United States Patent Application Publication US 2004/0123343 A1 - sequence listing, part 41

SEQ ID NO: 125583 - protein, 105 aa, Oryza sativa
  Clone ID: PAT_MRT4530_28212C.1.pep
MVNVPKTKKTYCKNKECRKHTLHKVTQYKKGKDSLSAQGKRRYDRKQSGYGGQTKPVFHKKAKTTKKIVLKLQCQSCKHYSQHPIKRCKHFEIGGDKKGKGTSLF

SEQ ID NO: 125584 - protein, 323 aa, Oryza sativa
  Clone ID: PAT_MRT4530_28213C.1.pep
MPPANLSISAPSAAAAPPPPLYLRRLPLIAAAALLFLLVIVVLAAAHPYGYAPWLANAAPAALLRRPVSTTFYSFDLLREYPHDPYAFTQGLLYGGNDTFFESTGLYHRSSVRRVDLKTGKVLVQHEMDGRLFGEGLTLLNDKLFQVVWMKNQGFIYDRHNFSKRESFTHKMSDGWGLATDGKVLFGSDGTSRLYQLDPKSIQVMKTVTVKYQDNEVPYLNELEYINGEVWANVWQTDCIARVSHEDGLVVGWIFLHELRQHLWNSGNTEIDVLNGIAWDEENQRLFVTGKLWPKIYEIKLRPVDGPQDGSVEKLCPKASFYR

SEQ ID NO: 125585 - protein, 58 aa, Oryza sativa
  Clone ID: PAT_MRT4530_28214C.1.pep
PRVRCAWKSSSNIFVSHQTRCSILVFFLSDPKVRLIPLTFYHTKKCYRLIFSSFRFKV

SEQ ID NO: 125586 - protein, 360 aa, Oryza sativa
  Clone ID: PAT_MRT4530_28215C.1.pep
MTTGYDAIDQHNQHNHMDNGGDEFLLSLYGFTQHDDNTLVADVVDGITQHGDHNQITNEGGVERRDRGNNMGRCLQRLNRACRGKLQVVITEGNIRPVVPLVAAKFATECNIIVRNHVPILPHWKLYKEKPASAYVNLFLGKLKAKFDINIEDDTVKMACTEMMKSAVRQQRYRLKQKYFDPFPLHLVTKTSPVKFMSNEQWTQLLESWKSPQKMEMCQKNKENRGNVKYHHTTGSRAYMVHVENLTRMENKLSTTTEGEELKSAAQVVADVLAENTKKNRFLKNVGFHNAQPRFSEQSTETELEAEKRTNAELRAQVADLSNKVQESEQARIKDREEMKRSQSEMEAKLNLLLSQIRPS

SEQ ID NO: 125587 - protein, 636 aa, Oryza sativa
  Clone ID: PAT_MRT4530_28216C.1.pep
MAGGEAHAALQAVAQSLRWTYSLLWQLCPHQGSSLVWGEGHYNGAVKTRKSTVMQPPPAEEEDDADHAARHRSRQLRELYDWLQQAGENSSGGVQTSSTTASRRPGAALSPEDLTETEWFFLMSASYSFPPGIGLPGRAFARRGHVWLTGANEVDSKVFLRAILAKTVVCIPVVDGVLEIGTTEKVEEDMGLIQYARGIFMDQHGIHMKPTLSQHSTSNPVTHCTHQHPIQVQMQLGITSQTKFDYSDELNADEENDDTEEEGMSGSDTNNTDTERNSGQLQLQMQDQLNMVSNDHQTIPNNAVSSELMQCEMSEVVRDGCSNNILEDEIQMLMDCQNSNCQLNLQGPDEPCHSWHFLCEELQNDYQPATEDQVASPENTHYPKTLMTILHYNTLRQQEMNIKNYLPVSEKSSFSRWTTPEGSDDNKTMISPGTTQRMLKSILMIVPSSHCSYRGAETPESRGGKGASGCHPRSESYPYPPMDKASILGDTIEYVKQLRNRIQELESSSSSSRAAARAPSAAAAGRRRKRSAAAATATAAEGMSSSNGRNGGEAAEVVQVSIIESDALLELRCGCGGGGGGVVLLRVMQAMQELQLEVTAVQASCAGGELLAELRAKVVVMILICMKMQMQMQMQN

SEQ ID NO: 125588 - protein, 502 aa, Oryza sativa
  Clone ID: PAT_MRT4530_28217C.1.pep
LPGRAFARRGHVWLTGANEVDSKVFLRAILAKTVVCIPVVDGVLEIGTTEKVEEDMGLIQYARGIFMDQHGIHMKPTLSQHSTSNPVTHCTHQHPIQVQMQLGITSQTKFDYSDELNADEENDDTEEEGMSGSDTNNTDTERNSGQLQLQMQDQLNMVSNDHQTIPNNAVSSELMQCEMSEVVRDGCSNNILEDEIQMLMDCQNSNCQLNLQGPDEPCHSWHFLCEELQNDYQPATEDQVASPENTHYPKTLMTILHYNTLRQQEMNIKNYLPVSEKSSFSRWTTPEGIVTAVTGEQKHLNQGAGKAQVDAIQGDFSANHVLKERRRREKLNEKFIILRSLVPFMTKMDKASILGDTIEYVKQLRNRIQELESSSSSSRAAARAPSAAAAGRRRKRSAAAATATAAEGMSSSNGRNGGEAAEVVQVSIIESDALLELRCGCGGGGGGVVLLRVMQAMQELQLEVTAVQASCAGGELLAELRAKVVVMILICMKMQMQMQMQN

SEQ ID NO: 125589 - protein, 92 aa, Oryza sativa
  Clone ID: PAT_MRT4530_28218C.1.pep
MSRGSGGGGAGAVALPAGVGQCDGKSCRWEGAPLAVGRAPRLRCRLQRLVRRSPGKASCEGTVGRCEGGEGVGAAALLVWVEEVEGKSPRRE

SEQ ID NO: 125590 - protein, 68 aa, Oryza sativa
  Clone ID: PAT_MRT4530_28219C.1.pep
GTVHLSSLPRWRVKGNPFLNTCLHDFFCNKRWSLWEVLNRVISIREPVNHCSPFWKCSCHQNPGPLRL

SEQ ID NO: 125591 - protein, 567 aa, Oryza sativa
  Clone ID: PAT_MRT4530_2821C.1.pep
MASSALICDTEQWKGLQAHVGEIQKTHLRHLMHDVERCKAMTAEYEGIYLDYSRQRATGETMEKLFKLAEAAKLKEKIEKMFRGDKINSTENRSVLHVALRAPRDEVINSNGVNVVPEVWGVKDKIKQFSETFRSGSWVGATGKALTNVVSVGIGGSFLGPLFVHAALQTDPEAAESAKGRQLRFLANVDPVDVARSIKDLDPETTLVVVVSKTFTTAETMLNARTLKEWIVSSLGPDAVAKHMIAVSTNLELVEKFGIDPKNAFAFWDWVGGRYSVCSAVGVLPLSLQYGFPIVQKFLEGAASIDKHFRSSSFEKNIPVLLGLLSVWNVSFLGYPARAILPYSQALEKFAPHIQQLSMESNGKGVSIDGVQLSFETGEIDFGEPGTNGQHSFYQLIHQGRVIPCDFIGVVKSQQPVYLKGEIVSNHDELMSNFFAQPDALAYGKTPEQLHSEKVPEHLIPHKTFQGNRPSLSLLLPSLSAYEIGQLLAIYEHRIAVQGFLWGINSFDQWGVELGKSLASQVRKSLHASRVEGKPVLGFNSSTTSLLTRYLAVEPSTPYNTTTLPKV

SEQ ID NO: 125592 - protein, 93 aa, Oryza sativa
  Clone ID: PAT_MRT4530_28220C.1.pep
MEIQYELTSDRDPNRSPTGLGGPSDGSYIFVRGVTGGGIVSPWEYSEENARGGEGRAGAIDYFLYIDAHYLARVPSTSQRLLPLHSALSGNDL

SEQ ID NO: 125593 - protein, 60 aa, Oryza sativa
  Clone ID: PAT_MRT4530_28221C.1.pep
HQNSCKAHTQSAYNPLEMSKSNLPKTLIPYGCSVHSKQLEQSYDVLRLQNFVCQLIMWVI

SEQ ID NO: 125594 - protein, 302 aa, Oryza sativa
  Clone ID: PAT_MRT4530_28222C.1.pep
MDITGAGAMGGGSTAATAAAAAGAGWKTPVSMVLVQLFITGQILLSKVSIGGGMLIFVLLAYNSFFAVVFLLPFALIFERGKWRDMDWGAFGWIFLNAFIGYSVPMSLYYYGLKDTTSSYSVIFLNITPLFTFILSLMFRLEAFKLRSIPGVLKIASILLSIGGTMLISLYKGKSLHLWDSIIQHQNEHKSATNQLRGTILLVGSSFTFACWFLIQGNFYFFEKGALATAGKYILNSWAITKRGPTYPTMFSPLSVVFTVVLDSVLLGNDITIGSLLGTALVIVGLYLFLWAKAREIPKKST

SEQ ID NO: 125595 - protein, 44 aa, Oryza sativa
  Clone ID: PAT_MRT4530_28223C.1.pep
FKSFLNTNMLNYHQHNSHNVSMYIFIMFYNILYTYRVRPHLVSA

SEQ ID NO: 125596 - protein, 118 aa, Oryza sativa
  Clone ID: PAT_MRT4530_28224C.1.pep
SGNVNTNGGNTASSSSDVLLLMLIAMTVLCYHVNVDDYFIKSTLLLMLFSTVTRSTHIINIMFIIMLLWIKICRIITIFPTITPLLPQFSVVSYAGHLMVKTKEGTQFERMNPRRLMT

SEQ ID NO: 125597 - protein, 2111 aa, Oryza sativa
  Clone ID: PAT_MRT4530_28225C.1.pep
MAAALAWRFNGTNGGADLEHKVQESEPPTPVSVMRMVKNRANVEDEETLSSVAQCIEQLRQGSSSTQEKENSLKQLLDLLETRDTTFGAVGSHAQAVPILVSLLRSGSSGVKMLAATVLGSLCKEEELRVKVLLGGCIPPLLALLRSKSAESQTAAAKTIYAVSQGGIRDHVGSKIFSTENVVPVLWEQLKVSLKNESLVDGLLTGALKNLSKNTDGFWSATVQCGGVDILIKLVASGQANTLANACNLLGALMMEDSSVCSKVLSGETTKQLLKLLGPGNETYIRAEAAGALKSLSAQSKEARRQIANSNGIPALINATIAPSKEFMQGESAQALQENAMCALANISGGLSYVISSLGESLESCSSPAQIADTVGALASALMIYDTNSESISASDPLVVEKTLMKQFKPKAPFLVQERVIEALASLYSNPVLCRTLADSDAKRLLVGLITMAGTEVQDDLTKSLFALCKKDCDLWQALQGREGVQLLISLLGLSSEQQQECAVALLALLSKENDESKWAITAAGGIPPLVQILETGSPKAKEDSATILGNLCNHSEDIRACVESADAVPALLWLLKNGSDNGKEIASKTLNHLIHKSDTGTISQLSALLTSEQPESKVYVLDALKSLLSVAPLNDILHEGSAANDAVETMIKILNSPKEETQAKSASALAGLFHCRKDLRETHIAVKTLWSVMKLIDVQTDKILMAASSCLAAIFLSIKQNKDVAAIGRDALAPLVSLANSTVLEVAEQATRALANLFLDHELSLQVSFEEIIFPITHVLREGSIDGRTHAAAAIARLLQCRPINQPLSDTINRSGAVLALAGLLEAANGEAAATSEVVDALVLLSKPKVSSGHTKAPWTVLAENPHTILPLVSCVADAAPSLQDKAIEVLSRLCSDQHDIVGGLVSEIPGCISSVARRVIGSNMLKVKVGGCALLVCAAKEHCQKQIEILSDSSLYIQLIHSLVSMIHMTNLPSENGSGENISDIKISRHSKENNNSDETVCRTAVISGNMIPLWLLAVFARHDSKTRAEILEAGAVEMLMEKISQNAFLYVGEEDSTAWVCALLLALLFQEREINRSNAALHSIPVLSNLLRSDEQAYRYFAAQALASLVCNGSRGTLLAVANSGAATGLISLLGCAEVDIADLLELSEEFMLVPNPDQITLERLFRVDDIRVGATSRKSIPLLVDLLKPIPERPGAPFLALGLLTQLAIDCPPNMMLMAEAGILEALTKYLSLSPQDATEEATTDLLGILFSCAEIRHNEAALGTVNQLVAVLRLGGRNSRYSAAKALESLFIADHVRNSESARQAIQPLVEILSTGMEREQHAATSALVRLLSDNPSRALTVADVEMNAVDVLCRILSSDSSAELKGDAAELCCVLFANTRIRSTSAAARCVEPLVALLVCEANPAQLSVVRALDRLLDDEQLAELVAAHGAVIPLVGLLFGKNYTLHEAVARALVKLGKDRPGCKLEMVKAGVIESILDILHDAPDFLCIALAEMLRILTNNASIAKGPSAAKVVQPLFSLLSKADIGPEGQYSTLQVLVNILEHPECRADYNLTPRQTIEPVISLLNSSPPAVQQLAAELLSHLILEENLQKDTITELAIPPLIQVLSSGLPNLQQRAIKALANLALAWPNTIAKEGGVFELSKYSTEFFLEVPVAVLVQLLRSGTESTVVGALNALLVLESDDSTSAEAMAESGAVEALLDLLRSHQCEEAAARLIEALLNNVRIREAKAAKNAIAPLSMYLLDPQTQSQQGRLLAALALGDLFQNEGLARSTDAVAACRALVNLLEDQPTEEMKVVAICALQNLVMYSRANKRAVAESGGVQVLLDLISSSNPDTSVQAAMFVKLLFNNHTIQEYATSETVRVITASIEKDIWASGSANEEYLKALNALLSNFPRLRVTEPATLCIPHLVTSLKTGSEATQEAALDSLYLLRQAWGACAAEIFKAQSVAASEAIPLLQYLIQSGPPRFQEKAELLLQCLPGTLTVTIKRGNNLRQSVGNPSAFCKLTLGNNPPRLTKIVSTGATPEWDEAFAWAFDSPPKGQKLHISCKNNSKFGKKSFGKVTIQIDRVVMLGSVAGEYTLLPESKSGPNRNLEIEFQWSNK

SEQ ID NO: 125598 - protein, 96 aa, Oryza sativa
  Clone ID: PAT_MRT4530_28226C.1.pep
MGFGESTQGNQRKLDGPGKVSTELSLVNLEAKNLHPKPECNQPIRKGQRPGFLLKAISAVFSWGCQRQRGVQQNTDQEQQPDWRTSSERSRFQPKL

SEQ ID NO: 125599 - protein, 415 aa, Oryza sativa
  Clone ID: PAT_MRT4530_28227C.1.pep
MLALVATFVLACLVFLSKPCAREMRLFLSTLCQELALALLGFLAGLRLLGGVGAGAAAETTMPLMPSFKRKRAAAVEEGGGGGGGGGGEEAGGEPSVLDLPELAIECILARLPPSELRNMAGVCRSMRERCRGDHLWERHMSEKWGGVLGHAAREEWRTYLASAADTGGAAASCSLAGGGRHRRWLAALSCVCPVVSWMRPRADGGSGGKSAGPVLDDSIMSWYLSMESGKFWFPAQVYNREHGHVGFMMSCYDAELSYDFHSDTFRARYPPHGRRTVVLEDGVHWDRVRAPPVDTHAHDLHASDCLHELRPGDNIEIQWRRNKEFPYGWWYGVVGHLESCDGSEHFCRCHLSDTVVLEFNQYTPGSRWRQALVNRKDHREEGNEGDGFYGGIRKLRSKDEISKWRQLWPTDILE

SEQ ID NO: 125600 - protein, 111 aa, Oryza sativa
  Clone ID: PAT_MRT4530_28228C.1.pep
MFVPSSSILPLLSSLSLPSCRDLPRGWCRGRRRRLPSPLSRMASRRRRWRCGRRPPSPPVANGVEDSDDSGGGGSGALPSRMGSRTAMAVAPEPSPADGVEDGGSRTSCRE

SEQ ID NO: 125601 - protein, 103 aa, Oryza sativa
  unsure (1)..(103): unsure at all Xaa locations
  Clone ID: PAT_MRT4530_28229C.1.pep
LLPPRLSPPSISPTPPPPPPPPPPPXPAARRPSSPAPPHPHRPTPPATEDAETAPHSRSPTPPSPLLVRTRTPSSLAAVVGASTATPIAGNPLRRAHPSLERE

SEQ ID NO: 125602 - protein, 231 aa, Oryza sativa
  unsure (1)..(231): unsure at all Xaa locations
  Clone ID: PAT_MRT4530_2822C.1.pep
MSAATEEGRPDGEEDSPRAEAFLEILGRVQPGDAEAELSSCGIGPTAEVAEQVLRSRVCYSRPKSAVRFFVWSGRSVKHTGYAWNLLVDILGKADMEEPMWDAVRTMNKEGGGLVTVATFASIFSSYCASGNLRKAVEAFDVMGKYGVEPDAVALNSLLSAMCRGEGRAQAAQDLFERTKATVAPDADTFGILLEAXEKEGNAQRAKSTFGEMIVRVGWDAGNMPAYDAFL

SEQ ID NO: 125603 - protein, 56 aa, Oryza sativa
  Clone ID: PAT_MRT4530_28230C.1.pep
MKRGTRGEGTKLRGHNLHNAAMLFSPMPLDPKNTCLKVENDMVVVRKRRTMDKTIG

SEQ ID NO: 125604 - protein, 108 aa, Oryza sativa
  unsure (1)..(108): unsure at all Xaa locations
  Clone ID: PAT_MRT4530_28231C.1.pep
MQLNPKARTRQNKKKVKGWRCIEIVLNVTLSMRGNPHEVHQPNPTMYAVSYCRIRLNRLTLSNSNSADLDHSRFGLQPILTLFPEXSPSRTPFRFLLHLRYLDYKIWL

SEQ ID NO: 125605 - protein, 62 aa, Oryza sativa
  unsure (1)..(62): unsure at all Xaa locations
  Clone ID: PAT_MRT4530_28232C.1.pep
MPNSTPRALLHCFNLTHEECPEVASSHXAPVEPESNLNVLPEDVAPLSSSCWGYAVLHAADH

SEQ ID NO: 125606 - protein, 283 aa, Oryza sativa
  unsure (1)..(283): unsure at all Xaa locations
  Clone ID: PAT_MRT4530_28233C.1.pep
MSGRRSFFASKKPSRSSNPFDSDSDDGGREQRPARASSVPPPADQRGSLFGGGDGFSASSAAARSRYRNDFRDTGGVEAQSVQELEGYAAYKAEETTQRVQGCVRIAEEMRDTASKSLVTIHQQGXQITRTHMMTLDIDQDLSRSEKLLGDLGGIFSKKWKPKKNGEIRGPMLTRDDSFIRKGSHVEQRHKLGLSDHPPQSNARQFHSEPTSALQKVEMEKAKQDDGLSDLSNILTELKGMAVDMGTEIDRQTKALGDSEKDYDELNFRIKGANTRARRLLGK

SEQ ID NO: 125607 - protein, 62 aa, Oryza sativa
  Clone ID: PAT_MRT4530_28234C.1.pep
PEILLYGKHGIHRTFYASQKAMSETLLYMANNTWIHEVMLVKTSMPTPDAECTDWSSSEQGS

SEQ ID NO: 125608 - protein, 79 aa, Oryza sativa
  Clone ID: PAT_MRT4530_28235C.1.pep
MVEGAKGSVVVCFAVAAAAPDFVVGNVAIPWVIGSFFLFSDHFIVWSAMGFDELPSLKAEPPPLHLKLCHQCASRDNEP

SEQ ID NO: 125609 - protein, 104 aa, Oryza sativa
  unsure (1)..(104): unsure at all Xaa locations
  Clone ID: PAT_MRT4530_28236C.1.pep
LSRRSRNNCAYLCGQIGRISSRQEEQGRAAHSKRIYNSRKQGRMVKARTCSREGRTAIACVASGPLTLSSCSSYSLPGFXSAVECGAGSQGHALLVGNRKNRRD

SEQ ID NO: 125610 - protein, 1488 aa, Oryza sativa
  Clone ID: PAT_MRT4530_28237C.1.pep
MRAPHGSDTGGGPRWTESTDRGGGGTPRGADVAPTRRPCGSHVGGQMDGPDLPPGRSDGGGGSRPGAHGHGSSRPASRGARWRGATQGGERPAAESGGDRRRAAMHGERRRRGPERQGGGAKRERGKDGGEMLTEDSAGTEGRRRTATRNDRETTANGGRSPEPPSEHDERGLERERERTMEEGEDAGRRQRPWRCSPVHGAEWVPVADSDGGEVDGTARTTANATASTARLGTTASGDRSGGGGGGGGEEGDGARAVEGTGELGEMEKKREGRALTDSSDKRKREERNKYQREWRARKKAKLSGTGNVTSDSPVLATTISATELSEGGEVGRSAISSTEKKEERNRKQREYRERKKAESKRVSEDDATLSVLDKENIDPDDPIDWLHRNDMYKRQKKKSESEIIEQNQQSPFSDGIMQCHTTQIPNVHEAIPDNDYVEFDSALFEPANEGGVDDGRVEDEQGADNDFDEASQVLEDDGYESYRVGVHNDAKYFRKHIQYFNSHFSFTSLGETLDQRVSTAAGTEDADALAHRVWRSPDLDINLVRVILGILAKNPYVQTFKRVGSMPNLDDYMIELNTNVTPDQRRYNAPTASQGVVDVLSSGETSGSAVGKRVVLPRSFPGGDRDMQRRFLNAMALVQRFGRPDYFITMTCNPYWDEITENLEPGQLPQDRPDLVARIFRAKLRDMLDLFVKKKYFGEVQAYAHVTEFQKRGLPHEHILLIMKSGSKLTTPDEYDKVICAEIPDKAKYPELHLLAIKHMLHGPCGTLNKNCACMVDGECRFDFPRQFNQATQQGKDSYPLYRRRDDRWRVKIRGAELDNRMLGFPLFGIYPAVLQLQLHLPNMQYVTYNEDGNLEDVVNRPSSSRTTLTEYFKMNQVDPEARKLLYKEFPEHYRWIIGQNVWQKRKTQRGQVGRVVYAHPGEGERYNLRVLLNHVRGATSFEDLRTMSVTDIRALWDNHKATMSEDYSRGNTNPAAVEQMVLRDIRDLLHSMGNDITEYGLLEISDIGERTNDVMTEIIEELNVLVDQDHLDIYTSLNDEQRAGFDEIIDNVTNKKSQIFFIDGPGGTGKTFMYKALLARVRSEGLIAIATATSAVETLDRYLQDIMGYLLPFGGKVVVFGGDFRQAKVYHSFDSVDDDPHNSYPLDYLNSITPNETCLLRNLTQGVFEMSGRRSFFASKKPSRSSNPFDSDSDDGGREQRPARASSVPPPADQRGSLFGGGDGFSASSAAARSRYRNDFRDTGGVEAQSVQELEGYAAYKAEETTQRVQGCVRIAEEMRDTASKSLVTIHQQGQQITRTHMMTLDIDQDLSRSEKLLGDLGGIFSKKWKPKKNGEIRGPMLTRDDSFIRKGSHLEQRHKLGLSDHPPQSNARQFHSEPTSALQKVEMEKAKQDDGLSDLSNILTELKGMAVDMGTEIDRQTKALGDSEKDYDELNFRIKGANTRARPREAKVDGIMMWTLAPVLELERIAVDSGGDPDAIHHCAA

SEQ ID NO: 125611 - protein, 127 aa, Oryza sativa
  Clone ID: PAT_MRT4530_28238C.1.pep
SILSWGRVHTKERITHGSNQMQTRKEQQQQKTFGLLLPFSTSDLDRRLPLSSRSSFGPTLRTGALQAKRRRHIWRVRSFRWSCSWRRLGGMASRFLCETGLAARIWQHTARRFGPRGVRRGQGLWCR

SEQ ID NO: 125612 - protein, 610 aa, Oryza sativa
  Clone ID: PAT_MRT4530_28239C.1.pep
MGLCCSKTQKETTPPHGGAEATTSPQVKRKSGKIAADDKGKKTRAGRAVEAAGDKKAVFVVKTKSGAVNVEERRPVVVVPTMPVRTSSCTKEEVDAILIQCGRLSRSSSGRAASSETGAGHRRSKRSYDFDQERRPGCGGGGDEERDWERHGGAVSRPSPHRGSPQRKRSGSRERSSGGGSRRASRSPGRRAEGVSPAPAPAGSGGGGGGGERVVRQQPGKMVSVPAREKARAPSPAAASGKRCASPRSSSPARMVAAGNENAGGGQMTAAQTPSLSRSSSPYRRSPMAEIDENSLRNNNGANHHKKISENALAIAAAPQKATERSKEKPKVVEETVLVAAAPPASKTTATRTASATAESLNTKARSRRASRDFDQNTNSYATQLLEDIQSYHQQQNTTSVAATAATLPSFSLPACVSKACSILDAVADLNSSSSDSHSCEPDRSANDRGSVNAPLGGGMDDLAEPGVHKRHATAPRGDIRGGGGETEPQESAGSNSVSGNPWTPSWEPNSVESTDRTWSASRSTNNGDEVVEQGSSSHAGARSPLNRSRQSSKQRAAQPEHSVRSRAGSSGGNSNNVVHRGRGAHRSGGGGGGSVASGRSGVRAVSAMS

SEQ ID NO: 125613 - protein, 689 aa, Oryza sativa
  Clone ID: PAT_MRT4530_2823C.1.pep
MRRRGDQCDDDEIDAAALGVAHRVVGRQQTFLGRPFSLAYLLSIFFPSAGAATARGDGMSVLSFALQGSSTARHGWYNIVCGVAIARYSGLVLVGSHVANVALDQSESYPLTRRSGHKRECHQVAVMASSALICDTEQWKGLQAHYDFVFRHACGGEQAHVGAIQKTHLRDLMDDAERCKAMTAEYEGIFLDYSRQRATGETMEKLFKLAEAAKLKEKIEKMFSGDKINSTENRSVLHVALRAPRDEVIKSDGVNVVPEVWGVKDKIKQFSETFRSGSWVGATGKALTNVVSVGIGGSFLGPLFVHAALQTDPEAAESAKGRQLRFLANVDPVDVARSIKDLDPETTLVVVVSKTFTTAETMLNARTLKEWIVSSLGPDAVAKHMIAVSTNLELVEKFGIDPKNAFAFWDWVGGRYSVCSAVGVLPLSLQYGFPIVQKFLEGAASIDKHFRSSSFEKNIPAILPYSQALEKFAPHIQQLSMESNGKGVSIDGVQLSFETGEIDFGEPGTNGQHSFYQLIHQGRVIPCDFIGVVKSQQPVYLKGEIVSNHDELMSNFFAQPDALAYGKTPEQLHSEKVPEHLISHKTFQGNRPSLSLLLPSLSAYEIGQLLSIYEHRIAVQGFLWGINSFDQWGVELGKSLASQVRKSLHASRMEGKPVQGFNSSTTSLLTRYLAVEPSTPYNTTTLPKV

SEQ ID NO: 125614 - protein, 259 aa, Oryza sativa
  Clone ID: PAT_MRT4530_28240C.1.pep
MLRRLAAAAPRAFFSSSTPHAPPPPAGYTQRREYGLVPMVIEHTSRGERAYDIFSRLLKERIVCIHGPITDDTASLVVAQLLFLESENPAKPVHLYINSPGGVVTAGLAIYDTMQYIRSPVTTLCIGQAASMASLLLAAGARGERRALPNARVMIHQPSGGASGQASDIAIHAKEILKVRDRLNKIYAKHTSQAIDRIEQCMERDMFMDPEEAHDWGLIDEVIEHRPVSLVSDAVGSDLPNLGGGGDGANKATDEPSPA

SEQ ID NO: 125615 - protein, 83 aa, Oryza sativa
  Clone ID: PAT_MRT4530_28241C.1.pep
VGAIDSDQLCAAIISLDAGLPPHVASYCMTYGYLAHKPLYLYADHQLEANNCGADRVETLRWGMIQGRNYPVFVHYNTIYRVQ

SEQ ID NO: 125616 - protein, 101 aa, Oryza sativa
  unsure (1)..(101): unsure at all Xaa locations
  Clone ID: PAT_MRT4530_28242C.1.pep
LGRTGKVEDVXXXGSXXXFGXWESXLXXXVXAXVXLPXAXPARAGXNRGHRGXGTHAXFFXXGAFRNRXXWPXPRPLFXSSALSGGXPFCHGGGHGVTPPL

SEQ ID NO: 125617 - protein, 95 aa, Oryza sativa
  Clone ID: PAT_MRT4530_28243C.1.pep
MADVGGGSTGDQGDESDPAHGPGHPTEATADCASEPGCSGTLWMHKVCRTMAAMLLRFIYDMSPAEANAPAVSASCLSRIAGHQSVPGPRRRKGD

SEQ ID NO: 125618 - protein, 134 aa, Oryza sativa
  unsure (1)..(134): unsure at all Xaa locations
  Clone ID: PAT_MRT4530_28244C.1.pep
RNYYGEPVWPNDVLYIFLVVLLRTFACKGCSVTNIVINHNSLXLSVACHNFFPTNFWYGKLXVIRXVPNRLLGVLIMLSMPTYLWIISFLDNINKFQNPFRHLMATIVFLIYTAVTVWLDTGVTLPTEKSNLVH

SEQ ID NO: 125619 - protein, 163 aa, Oryza sativa
  Clone ID: PAT_MRT4530_28245C.1.pep
VEVEGIVKLRPLREREGAPVLRWWNGFDGGGQACSRATRTRGSRWLAEREEELAGTASRRASLRLQGRWLWWLDGVDREEGKLEKWIPLVEASPMARGFGLWSYGEGDRPTVAAAGHEEERERKRGRERPRICGRKRDGLPVFIGFGGRFSKEVVVLVTAAMS

SEQ ID NO: 125620 - protein, 60 aa, Oryza sativa
  Clone ID: PAT_MRT4530_28246C.1.pep
MPRAPPMSGHTPCPRMFRRLPERGLWSARQGEPPGSFATMDNPPTVGGGNHATGVARSGY

SEQ ID NO: 125621 - protein, 106 aa, Oryza sativa
  Clone ID: PAT_MRT4530_28247C.1.pep
MPLSPHAPPATRQLGEGLGPPQREGPRGLTPHPEGHDLAPRGPPVAPATHGAWGQGQAVEPRREAGEGDYDGRHRRLRTGCRRLVGEVMNPEFHSILKDVVGPIFR

SEQ ID NO: 125622 - protein, 557 aa, Oryza sativa
  Clone ID: PAT_MRT4530_28248C.1.pep
MQAATTKSRRIERQSTSGNRWMAAADEEATKHVVEQREERSGAPVLRWLGGGEVGGQMCSRAVAPVGCCRRVPLLSPLPLRARGCCCYSAVAGTAAPLPLLLYAAVVATAATALLCCCSSCAANVGRALWRGAGTGGGGERMDWWGGGSGPLLWAARFGDVGHLSNASLALGLSLGSGQGGGTTNATAHHENLAPDYPSTEAPDTSTRHAVMRHAAAAAVPLATTVAMLYARLAASLTGPGPRRLAALLPAMALLPVLPLALPYYSYRGFSAFVFVWLGEFKLLLLAFGHGPLHPALRPLPFVFTAALPVKLVDAAAAAAGASASRPPPAAPAATFKFVVSSAIKVGAMAAIVRVLHAKEEMHRYAAFSLNAVFMYCFLDVVLPALGAAGVALGMEMEPQFDRPYLSASLRDFWGRRWNLVASAVLRAAVYDPVRARSGDPAAGVLAAFLVSGLMHEVVILYLTSRAPTGRVTAFFALHGVCVCAERWWCARQHKREARPQLPRAVAAPLVLGFVAGTAFWLFFPAIYGGGMDDLYLAEIAGFAKGLGLGGSWTGEN

SEQ ID NO: 125623 - protein, 266 aa, Oryza sativa
  unsure (1)..(266): unsure at all Xaa locations
  Clone ID: PAT_MRT4530_28249C.1.pep
MATPAAVSTTSMCQPMRRTAEAWXDGGAGEAEKYLSTRGVAAAVLEGSQVAPEILARHRSLRRPLPALPPDRREQHIXCRPLPEPPLHLRRRRIDVTGCDDDGGAAWERRNRAVANEGSARRRGGQAFTVQLTVGRAVRRGRRRARQRSXGHRGAGASQTGVGGAADGGGCGPCDEATPPSAVLVIIVVHNSSTAAEEWRSGVGAAADEAPRQFLARVADLRRRRIMGFGGEARFLAWGWDNEATGRDATQGRTGEGMNAACGRSA

SEQ ID NO: 125624 - protein, 120 aa, Oryza sativa
  Clone ID: PAT_MRT4530_2824C.1.pep
MEAKVATVTRPLPSLFMVRTADGVPHGLLHAGLAEDVDEEVPGVAGVIHRPPRPDEEADGGLGTGVADAGPEHLLRDLRFRIPRLDPARISRNASARGESSSPSSRPFSVAALIGDKRRD

SEQ ID NO: 125625 - protein, 112 aa, Oryza sativa
  Clone ID: PAT_MRT4530_28250C.1.pep
TPEARVAGDHVAGEDEGLGIHGRGPAEARVGGIVVVDEPAAALQPGHARRRRPPRRRRRLLHVQGEAGPRKARRPTGSPSLTRRRSLISPSLSSNRLNNNLLSLCLAVGIHV

SEQ ID NO: 125626 - protein, 200 aa, Oryza sativa
  Clone ID: PAT_MRT4530_28251C.1.pep
MERLMMNMVVVVRAGTQGTQVQDYRPVNTGGCGSSADSSERRCRRLRLARRQQRAPPPLLRWESSEIICGSFDLAVALFNGGEFHARHDVVEELWYTTDEPTRTLPAAPRILQCAVGFHHLFNQNHRGAMMELGESLCKLRKLRLDDTTSPFSRFEKEVTAALNFTYRTQKELAACTDDLYLTMDGSVTSHQLLGNFAAD

SEQ ID NO: 125627 - protein, 134 aa, Oryza sativa
  Clone ID: PAT_MRT4530_28252C.1.pep
MALGAENLEGTIDRYISHTQEAPANKKPRELTVKEDAGRKPGIMLVARTAWPGDADGEEPKQHPFTKGKQMQKKLMDKISQLQQQEKILSEENALLLDQGKVQHAPIGAPAREMNQNQHVQDIDVDTELVIGRR

SEQ ID NO: 125628 - protein, 170 aa, Oryza sativa
  Clone ID: PAT_MRT4530_28253C.1.pep
MGGSKDEQQDRGLFSNLMHGVAGGGGGHGYPYPPQQGYYPPPPTAYPPPPPAGYGGGYGYPPAGYPGSSAPFQHGNHGGGNMGMLAAGAAAAAAAYGAHKLSHGHGHGGYGYGGHHGGLFGGHHGHHGGLFGGHHGHHGGGLFGGHHGHHGGLFGGHHGFGGHHGHHGHH

SEQ ID NO: 125629 - protein, 78 aa, Oryza sativa
  Clone ID: PAT_MRT4530_28254C.1.pep
MAASSNKGKEGCNTLAHVVVKEGAYSPSCWRCCAKEHDVHGSYHHLQLLFSSSGRPFVSLVATSRLLTTVRDWEELCY

SEQ ID NO: 125630 - protein, 162 aa, Oryza sativa
  unsure (1)..(162): unsure at all Xaa locations
  Clone ID: PAT_MRT4530_28255C.1.pep
GRETAAPTPTTTTNAAWATTSTSAITGRDSPARANTNTSETTKVETTTAVGIRPPPLPTSTATALXPDPSSATAPHLDPAGSGGRASAAAPPLPPLPDLVARPPPPRLPSXPCWIWRPGRRRRLLQPGAAAPPLLPLPDLAAGPAPPPPPLPARRHHASTDA

SEQ ID NO: 125631 - protein, 1272 aa, Oryza sativa
  unsure (1)..(1272): unsure at all Xaa locations
  Clone ID: PAT_MRT4530_28256C.1.pep
MPLPPLPRFLLLLPLSRRRRRLLLSTAAEAAAAPAPAPAPGRPTDPSLLLRLCTVLYQHQHAPEDALRRRLSALPLPSAAADDLRELFLQASARFPLSWRPVRRLLDHLTAAHGFAHSPATAARFLDVLAKSRNVDLLHSTLLSFPPALRSLAALRAAIRGLAPAREVGKVSSLLALFPDADRPRTLNFITDVVCSVCKLPDVAEKVIKQAEHRYGVSRTGRCCELLVVGYCRAGMLSDACRVWNGMERRGLDPGAAAYEEIVVTLFKNNRVADAMKVFDGMRRRGVSDGGRGGCYRAVVSWLCKEGRMWGAYMVFAEMFKRGVEVDGEVMGDLVYGLLVRRRVREGYRVFHGVKEKDIALYHGLMKGLIRIKRAREATEVFREMVATGCEPNMHTYIMLLQGHLGKRGRKGRDPLVNFESIFVGGLVKAGRTLEATKFVERTMWGGVDVPRFDYNKFLYYFSNEDGVSMFEEVGRRLKDVGHVDLGDIFLTYGERMATRDRRRRAMNGLLTEMEHAVVSAAEGAIHTLLGKLGTIVLQEAQLLGGIRGELQHLKDELESMTAFLQDLSGRDECGKQVKIWKKHVREIAYDIEDCIDEFKHQLGDSSSAGGSGPVVFFRKATHILQTTRVRHQIAKQIQELKRRTMNISARNSRYSANHLISGTAGNSMAAYDSQANLLNVDTRITALFPERRQLVGIEPRQGNLVHWLLEAHVQQLRVVSIFGFGGLCMISLAMTTSKSSDGSNAPFLCPKFINVSLRFXCIEAEDLFTYMKKXLNNHSPTGRGRXLLIYDEKCTXRMCSHAKSCDKILAVLXYLKNTYHLLLGEHLWNSKXLWLKFLDINTKEVLFLLIRDMHVHTDELDHHVMSHLQVEKQAFHIYPSPRVVEDDEVEVGDMDLYQENVRDEGVEALQDGEVAKPRDLGVHLQVQGRLPLVCRRLQLLSSXRILQRRWWHPARTWAGAGYEFLRNRDLKDLCRLFQLEYLNLRRTHITELPAQIGNLKKLETLDIRDTAIKHLPPGITNLPHLANLLGGRRSYNHTGRWPISEFWGLHIPNELRKMDSLTTLAQVEITTSTSHYISELSKLSRLRKLGVLMFVDDDSTWASLISALEKLSGSLRSLLLWRPDGAMNSGSVNSLSSPPIFTKSMNLRGEFPSLRLLVIHLDMSEDWEARFEEGALPKLARLELSLFEEASIQEITGIEFLPSLKEVSIRACHSNIVNVEEIATSLRADAEKNINKPIVTFEEKQWVPMRSRTDPPLDHMGNLLSSSFDED

SEQ ID NO: 125632 - protein, 833 aa, Oryza sativa
  Clone ID: PAT_MRT4530_28257C.1.pep
MAGAGTLLPVYCTAHSRRLKRTTPASRVSSTAMAAANGDASHGANGGIQIQSKEMKTAIHSNDSPKTLLKSESLHEYMLNTMVYPRENEFMRELRLITSEHTYGFMSSPPEEGQLLSLLLNLTGAKNTIEVGVFTGCSVLATALAIPDDGKVVAIDVSREYFDLGLPVIKKAGVAHKVDFREGAAMPILDNLLANEENEGKFDFAFVDADKGNYGEYHERLLRLVRAGGVLAYDNTLWGGSVALEDDSVLEEFDQDIRRSIVAFNAKIAGDPRVEAVQLPVSDGITLCRRLRIRRRGGSRRNCSWGDGDNDEDGATDDRIDANFFGDARDEPDPEPEEADATGRRPSSPTPEQELARRRPFATRKFTVPKSMEAPTRSVHPNRLAPPPAAQAATAQTEEDLIAMTTGNGDAPVIKNAHSDIDSTNKTLLKSDALYKYVLDTTVLPREPECMRDLRLITDKHQWGFMQSSADEAQLLGMLLKMAGAKRTIEVGVFTGYSLLATALALPEDGKVVAIDPDRESYEIGRPFLEKAGVAHKVDFREGKGLEKLDELLAEEAAAGREAAFDFAFVDADKPNYVKYHEQLLQLVRVGGHIVYDNTLWAGTVALPPDTPLSDLDRRFSVAIRDLNSRLAADPRIDVCQLAIADGITICRRLVTWQARQAGWGRGVGVDSGMFSNSNRTRPPPTRLTITSPRRVRLCAVSPTLQLQAAVWHDHPSVAGTGAGGVAWEGREKQFTASAGPRNVARPCAPLTVRGPCDKRTVGHPACRDKEFVILPRSPFHETKRTENFRYYDLARFRQPPFNDDFVDYLMPRPACDMEDGGVGQAALHTLGG

SEQ ID NO: 125633 - protein, 98 aa, Oryza sativa
  unsure (1)..(98): unsure at all Xaa locations
  Clone ID: PAT_MRT4530_28258C.1.pep
MGRPAREGGPRHAREGRREGAGGPGSPRVVPSGTRLSVTQFTVRREHAARTRVWGRDAVHARDSRXGCGCGGPTRSLTARGGPRARAGRRGAADRGQL

SEQ ID NO: 125634 - protein, 105 aa, Oryza sativa
  Clone ID: PAT_MRT4530_28259C.1.pep
MGRLPLPLLPLWAAGPALLLLPRREVYNASFLSIQIFFRAGTTVILMTAKYPNKEHVAYATFMSSNPREKVGGVEIDSKDQWLNDHDSVAYSRSNQEAWEFIEIG

SEQ ID NO: 125635 - protein, 194 aa, Oryza sativa
  unsure (1)..(194): unsure at all Xaa locations
  Clone ID: PAT_MRT4530_2825C.1.pep
KNIPVLLGLLSVWNVSFLGYPARAILPYSQALEXFAXDIQQLSMESNGKGVSIDGVQLPFESGEIDFGEPGTNGQHSFYQLIHQGRVIPCDFXSVSVKSQQPVYLKGEILSNHXXXLNVPFSFAQPDXVCLWESXLTXGLAXKXPXXLSXXGXXGXXXXVXXLLXXCDLAGDRPGFRGCLGGGIGNCGRSFWGF

SEQ ID NO: 125636 - protein, 235 aa, Oryza sativa
  unsure (1)..(235): unsure at all Xaa locations
  Clone ID: PAT_MRT4530_28260C.1.pep
MNIFFCDMLSKFQRSSRDHDSDQQIGASSDQQLIDHLRAYLEDKRLKDPQDKGYLVVIDDIWSTTAWKTIQCALPTTIHASRIIITTRINNIAESCCTPCKGFVYKMEPLSRQNSEILFVKRIFGANSTCPSQLKEIMNEILDKCDGLPLAIVTLASMLANNRRKEEWERVLKSIGSTNEKYGEWDTIHKILSLSYNDLAFYLPPLLLDLTTFPEXYENDKTRLIWSWIRGGVHI

SEQ ID NO: 125637 - protein, 632 aa, Oryza sativa
  unsure (1)..(632): unsure at all Xaa locations
  Clone ID: PAT_MRT4530_28261C.1.pep
GRRSSWASPPCSPCRGRDADFGRXAEFEASKMIGTLTRAEFTRLLQRQADGRVNRVFAGELPSRLKPSQVGDDEAGTSRKRKRAIVKGGQIRTCRSTKAVVESDGEEEEEEDADDIVVANTLLVISSTAVKPMMAVRRKKKKGKVVQVWHGFSDSEGSDGTPTSPVLQRAASRGRRMSPPPASDAEAATGGSASVPAAGTNLAEGERIVVVPSPIRQREGKAPAVEGSISDVTLTAPHFIPVDFATRPEITPFVDGVCQVIAPTEGLGLFTELNEFGESCAAVESLFGLAAHLSAKKSALERLDGYCLRLRKSEEDLRHKEDERRVVADTLKKANAENRSLRFDLEAACERNAERDRQLASAEEKIKSLEACVASAEATAATLAPATESAKEACYTLRLALNDLGARAEDAPGEGGTALDFSEWTQEAAGSVVEVAGAYGDCCARVSAGFVLSLLHAHGCDHIQEFPDFVKEEWPSNTQYSGAALRAFRKGFWEDGGRDCAKVQICENLERIVRNEEGAAANSEKDVRPSGRSPEHEGEGNGGQDHPEGVCRKSCIRPPSGSWRSQNEEFVALKGLPKVRCPFRPVYREMEINGRSYKVFMVAGWLRAHPGRTLEDYDFVRTRRLEDMARFW

SEQ ID NO: 125638 - protein, 67 aa, Oryza sativa
  Clone ID: PAT_MRT4530_28262C.1.pep
MGRASRAPEPAPARARCERAKRHTQASGWRGPGRGSRQRGRQWAAGGSAYHRRGRRAGRVVRYYINT

SEQ ID NO: 125639 - protein, 34 aa, Oryza sativa
  Clone ID: PAT_MRT4530_28263C.1.pep
VNYPSVVSGAPQGIEPLLITKNSLHLGLIYVQLL

SEQ ID NO: 125640 - protein, 152 aa, Oryza sativa
  unsure (1)..(152): unsure at all Xaa locations
  Clone ID: PAT_MRT4530_28264C.1.pep
MNIVLTGGTGFIGKALTKALLQTRHQLTILTHQTQLTSNSPTETFCQKMTDWHHLNHVDAVINLTSEPNFDKGWTNKQKQQLLTRRVDLTHQIVXLINAEENPPHTFISGSACGYYGNLANSNHFYDESTPAGTHFSAKICLEWEKAALNAQ

SEQ ID NO: 125641 - protein, 98 aa, Oryza sativa
  Clone ID: PAT_MRT4530_28265C.1.pep
ILLQPLTHVPTIPSATARPRSFSGAGDTPPPTGAGSGAGAPGGGAVNDYNNGGNSASPSSGGPFSGYNLLLLLLLALLQQQPAADCNGSGRLTGSRSP

SEQ ID NO: 125642 - protein, 82 aa, Oryza sativa
  Clone ID: PAT_MRT4530_28266C.1.pep
EPRERAREKPRERKKKERRREPGRAIEPEGIADPSEGQDPQEFEQGKSSLFFEHVDPNCEIILFTNKIVCNDEHPICEYAIP

SEQ ID NO: 125643 - protein, 738 aa, Oryza sativa
  Clone ID: PAT_MRT4530_28267C.1.pep
MDPEQTFLRVHARLSGMLSQLLTPRIRLALEYLYLAGAVALFCLLVVMHTNFVQQCEHIEMKKHEGIATLTTLSYLFHVKPGCSSEFSGIEFGEAQLVQIKIISGGLWVSKGASYIMDLQNLGRSAEKILEVNGDRFNILASKFWSTWVGPGARRSKIMFRTWKGDKEFEPQPENAADTAITATTSGVSDSKTTVEGSAYHPLSAKESFKAAVMYLFRKWYFRVVSFWRNIKQLSDNTFQLMFRSNWNDFLHTIKGIQLPSVDHLVSTIVQWFERRSKAFEPTYLYGVEKIQRVPPKLDAKAGASTSLLPSPNGMVVLSSPSMPGCVLWGNEIEKACATGGAVAWEVGAVKWRERMEEEGDKLKKIWRAQWWQQLLINSIVGYDTILTNSLVNSPGHGYLYNFQTKELYDLSYGHEPPAGPTRFGDYFVTKCGVLLMSLFVFFTTTMSVSFTLRETQSRMLRFTVQLQHHARHQLPTFQLIFVHVIESLVFVPIMIGILFFLFEFYDDQLLAFLVLTLVWLCELFTMISVRTSISMQFFPRFFLLYFLVFHIYFFSYTYGFSYLAFSATAAFMQHLILYFWNRFEVPALQRFIRSRAHLHQQTGVQITSSTIYTSTLHIARVNMRDPGAMNEGLGAAREADALLVPDEPNRNQQEGQPIENAELVANNPLHYQDQNPQQPGNAPAGSGSLNPFGSLLLWLLGGGASDGIVSFFSMFRDVRDHGQDYTDPPRNENGQVT

SEQ ID NO: 125644 - protein, 103 aa, Oryza sativa
  Clone ID: PAT_MRT4530_28268C.1.pep
MAWAKNGEDWEGEKGREGAWVYRAAMSVWKPTLGGQGASWRSALAAKTVTEADDAGGEEKRKKEGRKGGLPLASLGKGGREGDEEEPCLLSLEARAGSGGAEL

SEQ ID NO: 125645 - protein, 174 aa, Oryza sativa
  unsure (1)..(174): unsure at all Xaa locations
  Clone ID: PAT_MRT4530_28269C.1.pep
SRCNLLELRRRHRRRQQRRTSSPPCRGTALARASCPPPSTGRGRRPPPRRRTCSAACRRSTPAAGGSSTTAPSAAARRTPPRSARRGGRASPRRRGPTSSRGRRRCTGGAPRRPRRRRRXGSSGSSRRRRARGRPGCRRRRGESXTPSRRMGRGQRTGLPSRSIRPPSRSASHG

SEQ ID NO: 125646 - protein, 86 aa, Oryza sativa
  Clone ID: PAT_MRT4530_2826C.1.pep
SVGASACARYSMLICIRLLPRKLIEQGHAQSHSRRILACALVASITLGQALSSLQSPSRDRCSHIFKSISRTRHYSYLVLTYAHES

SEQ ID NO: 125647 - protein, 103 aa, Oryza sativa
  Clone ID: PAT_MRT4530_28270C.1.pep
MASRHFIICFNVIGGNATHTQFTLSTSFRHDIIYFNQIGGRITKSSIYIADDISACLHQSHRPSTLSMASRHDIIYSGKIEGNLAPSSYYGADGIPARVCLLH

SEQ ID NO: 125648 - protein, 136 aa, Oryza sativa
  Clone ID: PAT_MRT4530_28271C.1.pep
MSLELQQVLQRSSSAFVVPPAFELEINFGGGARSPMLSRDRIEGKATWESVRVGGLGALRNIPPASQSGFAPPRATASAAMVAAALNNGWKRKRPSTSSEHLLLRGFSELQLCEIVHEYAFPVDLYRYRYNVAYCK

SEQ ID NO: 125649 - protein, 490 aa, Oryza sativa
  Clone ID: PAT_MRT4530_28272C.1.pep
MPLCGMKSPAGAMGFLACLFPCPQEVRDEDEEPRSGQRVSSVEMFGADWLVSLVAVLVELNMLSVEYSKSSESCPLKTEGSIDMVGIRRNKGHGEATIFTLRELADATNNFSTECLLGRGGFGSVYKAFLNDRQVVAVKQLDLNGLQGNREFLVEVLMLSLLHHPNLVKLFGYCVDGDQRLLIYEYMPLGSLEDRLHDLRPGQEPLDWTTRMKIAADAAAGLEYLHDEAIPAVIYRDIKPSNILLGEGYNAKLSDFGLAKLGPVGDKTHVTTRVMGTHGYCAPEYLSTGKLTIKSDIYSFGVVFLELITGRRALDSNRPPDEQDLVAWARPLFKDQRKFPKMADPSLHGHFPKRGLFQALAIAAMCLQEKAKNRPSIREVAVALSYLASQTHESQNTAARHTLPGPSVPRVLDNQINQDTSLPSQHGVHMPPLAGTDHMVQEVKENCRSSSHRPGRGRVTPNGADRERALAEANVWVEAWRRQEKTSKMR

SEQ ID NO: 125650 - protein, 73 aa, Oryza sativa
  unsure (1)..(73): unsure at all Xaa locations
  Clone ID: PAT_MRT4530_28273C.1.pep
RGRWRGRSQSQCLEAGAGRCDRRGXGSPPPPPRTAPGRRGSPPSRRRRSAGWAPPPPPPRRPTRPRPRPPPLP

SEQ ID NO: 125651 - protein, 268 aa, Oryza sativa
  Clone ID: PAT_MRT4530_28274C.1.pep
MKGGRGSNGAATDLLVCFPSRAHLALMPPKAICSPSRPSASEPVKRRHSTSRSGPPPPSAALFKAAASGRNPSRRAADVPVDNEPSSPKVTCAGQIKARRPAAKPKISGAGGGAGGAKAAKKATWLQALGIKKDALPFLNAVHGAFRLNVAGCFGSFPGAVVEYTSGEDDDDEELAAGKDTEHGAALAKWFMVLEEGKKGLPRRLGGDAEEEVIKNSKKEEEEEDEKEERLVLMSYAPDFFKVSVDIAKETWIVGGDDAVLRCRSWKR

SEQ ID NO: 125652 - protein, 144 aa, Oryza sativa
  Clone ID: PAT_MRT4530_28275C.1.pep
GRVGGRVGGRVGGRVGFTDLRPGQEPLDWTTRMKIAADAAAGLEYLHDEAIPAVIYRDIKPSNILLGEGYNAKMSDFGLAKLGPVGDKTHVTTRVMGTHGYCGPEYLSTGKVTIKYDIYWFGGGFLELITGGRALGNNLAPYEQ

SEQ ID NO: 125653 - protein, 99 aa, Oryza sativa
  unsure (1)..(99): unsure at all Xaa locations
  Clone ID: PAT_MRT4530_28276C.1.pep
MGFLACLFPCPQEVRDEDEEPRSGQRVSSVEYSKSSESCPLKTEGSIDMVGIRRNKGHGEATIFTLRELADATNXNFSTECLLGRGGFGSVYKHFFMID

SEQ ID NO: 125654 - protein, 77 aa, Oryza sativa
  Clone ID: PAT_MRT4530_28277C.1.pep
GLKTPLKKRGPFLFTGSKKFYRYSNKNRKNFFSHGVGKKQFGQPPRKFKNRGPLFNNFELKKASPAKDSKKSASHIN

SEQ ID NO: 125655 - protein, 62 aa, Oryza sativa
  Clone ID: PAT_MRT4530_28278C.1.pep
ITPITFLQRHICFYNFSMFRIFFKKQNLVQDLALKNPNPTIHPVLVMSIRNHMGGRIWSLNH

SEQ ID NO: 125656 - protein, 63 aa, Oryza sativa
  Clone ID: PAT_MRT4530_28279C.1.pep
VLWALIGNYKQHCILLIIKYHDENHVEINEDFVSQLVYCCLKSALDPANVNANGGAHAFGATL

SEQ ID NO: 125657 - protein, 126 aa, Oryza sativa
  unsure (1)..(126): unsure at all Xaa locations
  Clone ID: PAT_MRT4530_2827C.1.pep
RGPYPVGFSPLRFRXGPLGRPPSAGFPHGLLSFLLGPRSCLGRGFSFLGVKAAMAPFLXRLFFRVSPGVGPAPLVLFPPQPPFGLPVLVGLPIALSGGLFRSRVFPLLKPVHWYPLRFSAEYMFLF

SEQ ID NO: 125658 - protein, 276 aa, Oryza sativa
  unsure (1)..(276): unsure at all Xaa locations
  Clone ID: PAT_MRT4530_28280C.1.pep
HASAPVYATASPGGAGGTTAAAARKKLLIFDAEEYLAESLAKYTARLSGEAVAERGAFTVALSGGSLIKALRKLTESPYLEAVEWSKWHVFWVDERVVPKDHADSNYKLAMDGLLSKVPIPASQIYAINDTLSAEGAADEYETCLKQLVNDGVVAISEVTGFPKLDLMLLGMGPDGHVASLFPGHPVVNENLKWVSYIKDSPKPPPERITFTFPLVNSSAHIALVVTGAXKAGAVHKAFSDKQSSSDLLPVEMVSQQKGVLTWFTDNQQCHAVQHL

SEQ ID NO: 125659 - protein, 94 aa, Oryza sativa
  Clone ID: PAT_MRT4530_28281C.1.pep
FWEQGQQGQCFIHLKRIAHDQQQRQLYGTQSPWAGRATRRAASPTRRRTATRIAPTTRPMVAEAEGALPGTPGRGHDEDADDAQRASMGTDTDT

SEQ ID NO: 125660 - protein, 360 aa, Oryza sativa
  Clone ID: PAT_MRT4530_28282C.1.pep
MSASAAVSSTCAAASSTTSRRSSSSPASRVQATPRRSLPSRLVASRTSPRSPVVPPVYATASPGGAGGTTAAAARKKLLIFDAEEYLAESLAKYTARLSGEAVAERGAFTVALSGGSLIKALRKLTESPYLEAVEWSKWHVFWVDERVVPKDHADSNYKLAMDGLLSKVACQNVIIVNYSLRFTMCEMEILYAVLHILLDLVPIPASQIYAINDTLSAEGAADEYETCLKQLVNDGVVAISEVTGFPKLDLMLLGMGPDGHVASLFPGHPVVNENLKWVSYIKDSPKPPPERITFTFPLVNSSAHIALVVTGAGKAGAVHKAFSDKQSSSDLLPVEMVSQQEGVLTWFTDKPAVSMLSSI

SEQ ID NO: 125661 - protein, 141 aa, Oryza sativa
  unsure (1)..(141): unsure at all Xaa locations
  Clone ID: PAT_MRT4530_28283C.1.pep
MADQALLSGRQMLQRPLQYSDSRSYYYMKAPYMVRAEATSPAKQGADRQLWLASKQALSYLDGTLPGDFGYDPLGLSDPEETGGFIEPRQLAYGEEFNERTAMMGVVGMVAPXLLGKLVLVPAETAIHGLQNGVIPPGGTY

SEQ ID NO: 125662 - protein, 105 aa, Oryza sativa
  Clone ID: PAT_MRT4530_28284C.1.pep
MWLTTVALLLTTVVIWTALQKRKRGEACPAAVAPPPIVQGTALVRFLRAMARDGPLEVIREQLAKLGSVFMASAPLGLFKVTFLVGAELGFLIDGVTAKPALTKK

SEQ ID NO: 125663 - protein, 454 aa, Oryza sativa
  Clone ID: PAT_MRT4530_28285C.1.pep
MRSPRLRRNPPPATAAAAAPAPDQFRPGDLVEVLPDEPGYRGAHFPASVTASHANPRGYTVAYDGSGCPLGEVVAASQLRPRPPDAPRGVPPAEHAVVDAFKGGAWWVGVALGGGRAAAGGRVAVCFPETREVVEFDAADVRPHLEWVAGEWLSPENMGISKTMPYKKGTQVEVAKLEGNSVVAWFSAAVEKAIWKNSLLVDYNCSKNDGSVLPKEIVDLKHIRPHPQHASAIIFCINDEVEGFQGNGWWLGVITDVHPEFRYTFKAAHSGKEIQLDQKALRLRYDWTHDQWQQVTQMIPGLFYMLLPTFHNNVTKKFAKGSKVEVTSNDDGFHGAWFQGTALKYVNNKILVEYDALKADDEITPLTEAIEVQHVRPCPPDIPVTSGFNLLDEVDACWNDGWWVGVISKVNSGDRYMVYFRSSTEETEFGHEQLRLHCDWVGGRWMRASLGLEA

SEQ ID NO: 125664 - protein, 70 aa, Oryza sativa
  Clone ID: PAT_MRT4530_28286C.1.pep
PPVVVGSFLLDFFFFLARFRPRTFHHSVFLLVSLNKECLFSVQQHKFGGLSPSSSFFFLPTISSLLWLAS

SEQ ID NO: 125665 - protein, 134 aa, Oryza sativa
  unsure (1)..(134): unsure at all Xaa locations
  Clone ID: PAT_MRT4530_28287C.1.pep
GGVGPHQNFWVGPPYRPPGFFIFFSRHLVFGKFLAPPSFPPGPSFAVITHHVFSPPLKKRVXLSTSPSVIPGGSHGSRDGGGPPLGGLGLRFPPNKVRYFKKKLHPPLGWLCKCWAHLFWKESLSLYRPACKIL

SEQ ID NO: 125666 - protein, 113 aa, Oryza sativa
  Clone ID: PAT_MRT4530_28288C.1.pep
MSILVSRSTDGSSLSGQNPDFTGCGCFPLNCSHLETINQLTGALPTSLGDLPYLEGWSVLGPYWFLLLTLDITFLRAHQMVVPVGDGNIVQVISRLYVIPDNPKESSAVKRFW

SEQ ID NO: 125667 - protein, 148 aa, Oryza sativa
  Clone ID: PAT_MRT4530_28289C.1.pep
ARRRRQRHHLPRRLELVAARTPSPPRTATSNPSPTHLFFSPNSEVRSSGLPDPSSHNTLPAAGLAAPTAANMPSWVARAARYRRRQVPLRALFSFFFFFLSFFHRMSLTTDKYGLCTSVQLYMLIRYCFQLLLLGAPKSMLCIFCMYY

SEQ ID NO: 125668 - protein, 534 aa, Oryza sativa
  unsure (1)..(534): unsure at all Xaa locations
  Clone ID: PAT_MRT4530_2828C.1.pep
MDLLRQPRGGARGPGPREWGPRGSLTVHGRPGAPGLTPAGAVGPTRQPHPRARAADSRAPXGSRTVRPKAATPVRPAGGGAPVPLWHGGAAAERGEGKGETNRRSTAHPGSTATTGTATGAEEGGGAARVDGVGGAPAVGERNGGVDEVGEDAAKLKEAAPRREMVRSDDGGGPEFDGDSGERERRRELDSGGERGRRVAETVEGGTGKVYIGLGGGESGRTRGKRARKIRPPLMAPARLGERFPNESEGEREGKMGGKREGITGNISPLLIARGADGGGGIRGGGGGARARARRRERREEGDDGVVLGRDTEFISMGSSGYFCGKERPYPEDFLGHVISAGGVAVDPSNVESVTNWKQPKTVSEIRSFLGLAGYYRRFIENFSKIAKPMTRLLQKDVKYKWSEETTEMPCFAVAPAVAVARGGRHRGRQVAAVLVRPSAVAVDRRNTVAVVKPKVAAASSSSPTLSVAPPPLLWSPVSSPRRPHRAGAFRSRRRAVIRRRVCATEPPSRRAARATAGGDVIADVIVAVCREPP

SEQ ID NO: 125669 - protein, 416 aa, Oryza sativa
  Clone ID: PAT_MRT4530_28290C.1.pep
MGNSLGCVGLGERLAAAAKDGDAAEAQRLLAANPGLARCTTFGNLNSPLHVAAAKGHHEIIYCNNMLNDQITDEIAALLLENGADVNARNIYGQVWRVENLSGRTALHMAAAGGHVKCVRLLVADAAGDRDGYVNKAANGGVTALHLAALHGHVECVHLLIDERASLAAQTLPCAAPPMASIGAGSTPLHYAACGGEVKCCQILVSRGADRTAINCNGIVVVRWIPIDAARIWGCNWLEHVLSPKSHLPCTGTPPSGYLSQPLPSLIAIAREQGLNLSSEVSDGFDEGADACAVCLERPCTVAAEGCDHELCVKCAMDLCSVIKSYDSAGIAGEIPCPLCRTGIASFRTTAAPPPPSLAGSPARRSRRNNSGGGGGEHEASNSGGSEKGYGSIDPDAGAVVPLYYAPPFAPSAILT

SEQ ID NO: 125670 - protein, 61 aa, Oryza sativa
  unsure (1)..(61): unsure at all Xaa locations
  Clone ID: PAT_MRT4530_28291C.1.pep
AQPQPTARTRNEXWVXXXPIVSTAIVRQTNRAVLTLTLYVQSYLCSRRGYTYLYVIXXSYV

SEQ ID NO: 125671 - protein, 81 aa, Oryza sativa
  Clone ID: PAT_MRT4530_28292C.1.pep
VFECDMLGVGTEAVAKKLAELTAKGVTTIIGGGNSVAVVEKVEVADVMTHIYTGGGAIVGVVKRKDLPRVGALDEAIPVAV

SEQ ID NO: 125672 - protein, 143 aa, Oryza sativa
  Clone ID: PAT_MRT4530_28293C.1.pep
MVVSPLPAVALLFPPRRPPPTAGLTSSSPEARQSGLLVGVQYLPASGRLLFLIGAAAVVVISFPGSTGSPSTPTAARLRPEPAAAAPASLSSSSTSLSAAPSAIPVRRRPCHHHLRHRSGEPATSSSASPPLHPGHRRRPLGR

SEQ ID NO: 125673 - protein, 50 aa, Oryza sativa
  Clone ID: PAT_MRT4530_28294C.1.pep
YSGPCQVDVIANAYRISREQASNPLRIIGEKSSVPSLRRVSHRPTQAVSK

SEQ ID NO: 125674 - protein, 691 aa, Oryza sativa
  Clone ID: PAT_MRT4530_28295C.1.pep
MAPVEDGGGVEFPVGMKVLVVDDDPTCLAVLKRMLLECRYDATTCSQATRALTMLRENRRGFDVIISDVHMPDMDGFRLLELVGLEMDLPVIMMSADSRTDIVMKGIKHGACDYLIKPVRMEELKNIWQHVIRKKFNENKEHEHSGSLDDTDRTRPTNNDNEYASSANDGAEGSWKSQKKKRDKDDDDGELESGDPSSTSKKPRVVWSVELHQQFVNAVNHLGIDKAVPKKILELMNVPGLTRENVASHLQKFRLYLKRIAQHHAGIANPFCPPASSGKVGSLGGLDFQALAASGQIPPQALAALQDELLGRPTNSLVLPGRDQSSLRLAAVKGNKPHGEREIAFGQPIYKCQNNAYGAFPQSSPAVGGMPSFSAWPNNKLGMADSTGTLGGMSNSQNSNIVLHELQQQPDAMLSGTLHSLDVKPSGIVMPSQSLNTFSASEGLSPNQNTLMIPAQSSGFLAAMPPSMKHEPVLATSQPSSSLLGGIDLVNQASTSQPLISAHGGGNLSGLVNRNPNVVPSQGISTFHTPNNPYLVSPNSMGMGSKQPPGVLKTENSDALNHSYGYLGGSNPPMDSGLLSSQSKNTQFGLLGQDDITGSWSPLPNVDSYGNTVGLSHPGSSSSSFQSSNVALGKLPDQGRGKNHGFVGKGTCIPSRFAVDEIESPTNNLSHSIGSSGDIMSPDIFGFSGQM

SEQ ID NO: 125675 - protein, 86 aa, Oryza sativa
  Clone ID: PAT_MRT4530_28296C.1.pep
MVEEGPTTARLGSGKGNRGGLSGGKEKASRALVLVVAVFGSSGSAGGYSGDLGGSRKGVFHPFGDTAIDDVDFFIDQDVWIWGLGI

SEQ ID NO: 125676 - protein, 64 aa, Oryza sativa
  unsure (1)..(64): unsure at all Xaa locations
  Clone ID: PAT_MRT4530_28297C.1.pep
VHPCRMLTSTCYMSAYLAEFQFSFSVLFGNGCIPFSKLCHTAVPLVLYCVLIKAHFLIYELRTX

SEQ ID NO: 125677 - protein, 34 aa, Oryza sativa
  Clone ID: PAT_MRT4530_28298C.1.pep
MASTPATRGNRSSGGDSRQRSGVRGSSRVGEAGG

SEQ ID NO: 125678 - protein, 135 aa, Oryza sativa
  unsure (1)..(135): unsure at all Xaa locations
  Clone ID: PAT_MRT4530_28299C.1.pep
NARLPAEADSSRRDREPSHRRRAPRRRATRARRPWGGPPAPRARRPXPRRRRRARAPASGWPRRRRRRGTRRAPRRACARRTRRARPWRAARPPRTRAARAPWRRGARRRRGSRRGARRGGGPAAAPPPAWGTSW

SEQ ID NO: 125679 - protein, 486 aa, Oryza sativa
  unsure (1)..(486): unsure at all Xaa locations
  Clone ID: PAT_MRT4530_2829C.1.pep
GGRPPAPVSSLPRPPSLAPALFKPSPHPLXRFRLSPFSLSAGIELAPSLSLSAVAAELRSAAAVTPDLLPFRRRLLRVRRNLADLVHPSVSPADRRNAAVLVDPSRVAAFLRFGRRSRRRRRPGVSRGPPFRFPLPSPLSGAAPPXPVVTGSDHRGAGAPPPVGCAGLAAFGRAPRLPCGARPSAARALGCGXHVGPTAPAGVSRVHPVHRGPRGCRVGPTPVDPMFNREKGKNVSGYASSNSSFQLNPPLASRELTRAHPWSIPSMLLGSQLPLVGSQDQNQYVFDRAFATQVDELPMPEEDVPFCHDCREQGHYALNCPWVYAKEAPSFGLAGQASLNQPPRTKSSLQPSVQSREPNGENPLNPENCFPPSLSYHVGSRTKQAKGKKSKNQKRKAPMRTEEEVXVSDSEGSDQVSSDDEDESPRHLGEEEMESKACTRCGEIGHVASMCLTLCPHCEEDHPPGRAKGNQSQEGDTKQNTVLCFK

SEQ ID NO: 125680 - protein, 141 aa, Oryza sativa
  Clone ID: PAT_MRT4530_282C.1.pep
MAEGDGDLARVEAEGVVAGAEGGEVALNLLRLPPAAPPPSGTSMEVEAAWPASGLAALVSRVSCCSSPPTTKTRRHSARCGGGGRSWVASGGAHGDAARLARSGIAITHHPPDEGGISMVDAGTLLAAMTRSTRGNVTEEF

SEQ ID NO: 125681 - protein, 178 aa, Oryza sativa
  unsure (1)..(178): unsure at all Xaa locations
  Clone ID: PAT_MRT4530_28300C.1.pep
RKTLKTKCVMSDALIECKCLLVFLTTTDKSASARNTTVAXHLRVTLKGYXTQGTIARTGFRAVTTCRLPMTNLWDTQQTKKKFSEPRAGCTDSSGTSPEFLLGSYTRRGRSWMSTKLPGTPPELSLTVNLILMYKRYNRASCNSAQSCVLEIRVNSSLYRLQMMVVAMGNDPTTPQPP

SEQ ID NO: 125682 - protein, 180 aa, Oryza sativa
  unsure (1)..(180): unsure at all Xaa locations
  Clone ID: PAT_MRT4530_28301C.1.pep
MKTTGVLMQKNASIDILQAFEPIQSGKSSAXTTEIFDVSNEQFQCTVVSVVRRVIGPRGLLLPHYTNAASLAYIIQGRCITGPTFPVCPECYHPQFLLSRQDQLTESLSHSLKFKDEHQKIHRFXQGDVIALPAAVSHWCYNDGEVPAVAIYVSDLNNGANQLDPRQRDFLLAGNKINPQ

SEQ ID NO: 125683 - protein, 88 aa, Oryza sativa
  Clone ID: PAT_MRT4530_28302C.1.pep
RAWSLGLVPGGWCNRQCVAPRSHPAAPWYQQLRQDCCRQLAAVAGSWCWCLALTLIVGGGGGGSVPACLALPGRGVLWLVWRGLWARA

SEQ ID NO: 125684 - protein, 636 aa, Oryza sativa
  Clone ID: PAT_MRT4530_28303C.1.pep
MDGNKRRRTRRRLSLATATAGDGDGDGMAAAPPPAKRQRCHAVEELPSPRRGLLRQSVLVVVFLRRAMLLAWGGRKADDDDGGGGAAVGVSRIGGVVRDELRRCLGPIARSFSLQFSKLERKLESRLERIDQRIENLNHKVDQITPLRRSHCNHQHPMQGTNNEGANAEGVETNEDDDKNTCVRLRFLNEMKPPIYHDDELKAENSEDIRIGIFDGEQMIKSGPLSKVKLEILALEGNFPYNSMESWTTKEFNEHRACGRDERGDVLAGERTVQLINGEASLGAIKFREGSCKARKANEKSHPPKLDDKVHRLEEIAINGIYCKRLVEKGIKTVKDFLKALNKDPDNLANILHMKKGSKAWEKMVTHARDCSLEGKPELKSYPVAQTNVVLIFDCVNSLVGAWFGGSYIASDSLSSAQQVIVDKLKGEAYQLLDQLPFDYIMEGGFPILNPMNANADYRAQGTEAVGGLDHAQIDPSFANANYQDQSTAQAGQEQFSSAAVAGWCQDSIAQPSSSHQTNHVVYPGGAQVNYSHQTNCVAPCDYPCQGASMVPGFDQVELQGRPFLGRDDLEASTSAHNNLPFPPQQQFTFSGDPGSSAQVNMQSQGHSKPSTSTTQGNLPTQQQWSQSQYHGNNWG

SEQ ID NO: 125685 - protein, 120 aa, Oryza sativa
  Clone ID: PAT_MRT4530_28304C.1.pep
GDLVKVLEGANQHVPPELQEMAARGAAGAPRNQAGGMSRWDGPGGGGNRFESAVGIPGSYGGIRDGPGGFGGRDGPGGFGGRDGPGGFGGRDGPGGFIGREGPGGFGGREGPVGFGGQES

SEQ ID NO: 125686 - protein, 89 aa, Oryza sativa
  Clone ID: PAT_MRT4530_28305C.1.pep
NRVHNIVKYTWESLVLIQPLINNNSGGLYPLNIPPSSPSTTFQTVTATLFPIEHWNYRKLLFLDFPSNSSCLSEIYYTLCWDVNYSCPL

SEQ ID NO: 125687 - protein, 260 aa, Oryza sativa
  Clone ID: PAT_MRT4530_28306C.1.pep
MDSKGKGGSNHASWTSAMSSFMLSHLANLVASGTRTSSGFKQAHLNPCARALNEMFCTNFTGDQIKNHLKTWQKKFTKMNRLRKVSAAGWDEVNFVITLDAKHYNEYIKMLTIFGSTMATGKFAKDSSSVLGTEDVETENEKVNRAPTTIDLDPETSSASKPKKAKTIESEDDGLIRAITNVGDKLAAAIVKAGEPDNTLPVGLFDTLKSLPGFQDIHLSFYYAYLVANPHIARAFNGLPFENKLHWVAMFISDKFTGSM

SEQ ID NO: 125688 - protein, 200 aa, Oryza sativa
  unsure (1)..(200): unsure at all Xaa locations
  Clone ID: PAT_MRT4530_28307C.1.pep
SHRSYLWDCMVQLKPVRNMRVXSDSWFADNLLRVGNGIEEVNEEGHIHLTSDICVPCKGIDSDLDGLMDTVFPNLNDNLTDPNYITSDDPHSYYLPEFLNSLTPNGLPPHVLKLKLNXPIMLLRNIDPANGLXNGTRPLVVHGFGRNAINVEIVVGQHAGKGVFLPRIPLCLLDDEMFPFHFKRKLFPIRLCFELTINKA

SEQ ID NO: 125689 - protein, 282 aa, Oryza sativa
  unsure (1)..(282): unsure at all Xaa locations
  Clone ID: PAT_MRT4530_28308C.1.pep
MKEMDSKGKGGSNHASWTYAMSSFMLSHLANLVASGTRTSSGFKQAHLNACARALNEMFCTNFTGDQIKNHLKTWQKKFTKMNRLRKVSAAGWDEVNFVITXMLSTTMNISRITRPMLXFFNKPLLHYGEMLTIFGSTMATGKFAKDSSSVLGTEDVETENEEVNRAPTTIDLDAETSSASKPKKAKTSESEDDGLIRAITNVGDKLAAAIVKAGEPDNTLPVGLFDTLKSLPGFQDIHISFYYAYLGANPHIARAFDGLPFXENKLHWVAMFISDKFPGSM

SEQ ID NO: 125690 - protein, 80 aa, Oryza sativa
  unsure (1)..(80): unsure at all Xaa locations
  Clone ID: PAT_MRT4530_28309C.1.pep
SLIEEDSLRVPFGLHLSEPLPPLGLPSPKERWRALILTATRPSLLLDGFLRVXLNFHSLLXAFLLFWHACGCVRKWMLIS

SEQ ID NO: 125691 - protein, 197 aa, Oryza sativa
  Clone ID: PAT_MRT4530_2830C.1.pep
MAADLPRRFASPPAALSPFQPYLNPPRTSSVRFRHSPPFLLAGIELAPSLSPSSVAAVDPVHPLAEFADRRNAVDPVDPSRAAAFLRSGRLFRRRRRPRTLQLRKIRSSWRLKPMFGKVTLGGFTTLDFGNILITWTLWNGWIIRNWIHTSPSIQNPQNGFRLDSGCMVLIVAPRPYKDRSSGLCCKALPYFHISSG

SEQ ID NO: 125692 - protein, 126 aa, Oryza sativa
  unsure (1)..(126): unsure at all Xaa locations
  Clone ID: PAT_MRT4530_28310C.1.pep
KVCLLLDEYTTVGIRRCPSGESYQLXRCTGALRAEYICLMGNXTVIRRCMRGLSGNSGNKVILELLPLLGGKVGLIFTKGDHKDVRXEVGQNKGGAPASDDRGAPGEGVVAAGPLVRDHSRRGSST

SEQ ID NO: 125693 - protein, 67 aa, Oryza sativa
  unsure (1)..(67): unsure at all Xaa locations
  Clone ID: PAT_MRT4530_28311C.1.pep
VFQKCIVDNATTNCXFILPVDKYYSTMLVQSSEEKIETQSATAAWLWLLQCTNRVXTCMETKVMCXL

SEQ ID NO: 125694 - protein, 112 aa, Oryza sativa
  unsure (1)..(112): unsure at all Xaa locations
  Clone ID: PAT_MRT4530_28312C.1.pep
MPLLMGIFVFFTGCLICYRLIISLLLNFLGVGTMHLKRCQTVKFYITAPLTFLYXVKVLFGFXKQLIGYNIIDFCYPSTVFRFGKSTRGIIAKMIEALGFGVIXFERRLSFR

SEQ ID NO: 125695 - protein, 360 aa, Oryza sativa
  Clone ID: PAT_MRT4530_28313C.1.pep
MSTSNNGGPTVAVKLYIDKEKKKVLFAESDKEFVDVLFSFLTLPLGTIVRLLGKQSQIGCLDELYKSVEALSEDYFQTKACKAMLLRPRNAAGSHCDRLKVKVDDTNERLIYVCPTSSCDARSFSSFWGVCNSCTVTTTLILREKPVDCRTVESNDDGVFVKSDLKFIIFDDLHVAPASTSTMFPLLGKFGLLEQRNIEEKVLELNSHKIINLLKRALVGYDFVDLVFGLLSLPLGSTIKAYGQVTSGGSSGLDNLYRSINGSGIGCVKQECQSLLLSPMLAPFFGCGSSVLLQVQESPIKSCSLRVIRAAKIPNEMLVKKELTLDRTQVFHLLLQVLKLLRAALVTRNALSSVLLPPKK

SEQ ID NO: 125696 - protein, 315 aa, Oryza sativa
  unsure (1)..(315): unsure at all Xaa locations
  Clone ID: PAT_MRT4530_28314C.1.pep
MMAYALRGAALVGXVLLLVVASPALVPVASAVPFIVLHGIGDQCENGGMASFTEMLGEWSGSKGYCIEIGRGAWDSWLMPLQEQADTVCKKVKKMKELRKGYSIVGLSQGNLIGRAVIEYCDGGPPVKNFISIGGPHAGTASVPLCGSGIVCVLIDALIKLEIYSNYVQAHLAPSGYLKIPTDMTDYLKGCKFLPKLNNEIPSERNATYKQRFSSLENLVLIMFEDDAVLIPRETAWFGYYPDGAFSPVQPPQKTKLYTEDWIGLKALEEAGRVKFVSVPGGHLSISRSDTKKYIVPYLKPDGSSRFGIRRILSD

SEQ ID NO: 125697 - protein, 186 aa, Oryza sativa
  Clone ID: PAT_MRT4530_28315C.1.pep
MAYALRGAALVGVLLLVVASPALVPVASAVPFIVLHGIGDQCENGGMASFTEMLGEWSGSKGYCILNVFLLSEIGRGAWDSWLMPLQEQADTVCKKVIQNLHHFYLCTVKKMKELRKGYSIVGLSQGNLIGRAVIEYCDGGPPVKNFISIGGPHAGTASVPLCGSGIVCVLIDALIKLEIYSNYVQ

SEQ ID NO: 125698 - protein, 330 aa, Oryza sativa
  Clone ID: PAT_MRT4530_28316C.1.pep
YPVCVGSVDWVLSFLLSLCSVRPSVEVVSLRILTSINLCLERKTDRELGILLSNSLVLEKLGIKYCDKINCLKIPCVLERLSSLEVFECYSLQMVESKAPNLCSFCFGGEQVQFSIGEPLQMKNLQVIFPNSISFGRAELPFSMPNLETLNISSRCEMSHTPTAPGKFLHLRYLSITFAGWRFSRAYDYFSLVSFLDASPLLETFILCILQKGKHDLTLRDPIYPRQMSERQHDSLKNVKINGFSSTKSLVELTCHILQNTTSLECLTLDTTRIEFRCSDSSVDVCLPSDRDAIKGAHKALLAIRTYIEGIVPATVKFSVLEPCRRCYAW

SEQ ID NO: 125699 - protein, 84 aa, Oryza sativa
  Clone ID: PAT_MRT4530_28317C.1.pep
VKDTRATAICSCAKVLSVLNVERMHNSLAHQQASQGRGSMLSESKFRKAKQAVQPNLMYLQGQQLENEEEIGTLVWGEADVSDP

SEQ ID NO: 125700 - protein, 118 aa, Oryza sativa
  Clone ID: PAT_MRT4530_28318C.1.pep
KHGSKLLMLWDLWGCLMFDHLPPLYKVGFGPLAKSNKFALVKRGPRTYFWKCSPRSLLGLKTGADRTTSFSSHFLGYLHLGLFYKAACLDFLGCYMPYKSYQNSLSTKLSLDVFYGTQ

SEQ ID NO: 125701 - protein, 420 aa, Oryza sativa
  unsure (1)..(420): unsure at all Xaa locations
  Clone ID: PAT_MRT4530_28319C.1.pep
MSRRSGYRAAEQEDRQVDLMGDSDFDDDEYGQPIESKEDTSAVDVKKGKDIQGIPWDNLSFSRDRYRKTRMVQYXRVVCTPVDKGALYYEFQYNTRSVKPTILHFQLRNLVWATTRHDVYLLSQRSVLHWSPFASEKHKVIDLQGHITPSEKHQGNVSEGFYQAQVSTLAVRGNLLVAGGFRGELICKFLDREGISYCCKSTHDDNGITNSLEIFEKPSGSVHFLASNNDCGVRDFDMEKFQICNNFRFPWAVNHTSLSPDGKLVAIVGDNPEGLIVDTNSGKTVHELRGHLDYSFASAWNPDGRTFATGNQDKTCRIWDIRNLSKSVAVLGGNMGAIRSIRYTSDGRFLAMAEPADFVHIFDVGSGYRRKQVVDFFGEISGISFSPDTEALFIGVHDRTYSSLLQYNRLRFYSYLDSAI

SEQ ID NO: 125702 - protein, 237 aa, Oryza sativa
  Clone ID: PAT_MRT4530_2831C.1.pep
WFYAVHWRNINRNYPWNNPADSHPRTWEAQFQSGIQTIALIAVREGVVQLGSMKKVAEDLSYVVALRRKFGYLESIPGVLLPHPSSAAAAFPGGPPDAAGWPAGMMVSPPVPPELYVDPYGGAAAGAVPPPSMQIMPSMSSLEALLSKLPSVVPAAAAPSPPPGVVVHATYRRRRRVVSAAQGGSGRGRLRPLPRHGHGDVVDQRRRREHRRRSIAVVLLRQRGRQAQRGVLASVPS

SEQ ID NO: 125703 - protein, 138 aa, Oryza sativa
  Clone ID: PAT_MRT4530_28320C.1.pep
MSRRSGYRAAEQEDRQVDLMGDSDFDDDEYGQPIESKEDTSAVDVKKGKDIQGIPWDNLSFSRDRYRKTRMVQYANFENVPNSGKNSEKVCTPVDKGALYYEFQYNTRSVKPTILHFQLRNLVWATTRHDVYLLSQRS

SEQ ID NO: 125704 - protein, 65 aa, Oryza sativa
  Clone ID: PAT_MRT4530_28321C.1.pep
FFFFFFLFIFYSFIYASSQRQECIGGHTNTETVVQASAYIPTRYMNTKRQWFKLVHIPTRYMNHR

SEQ ID NO: 125705 - protein, 913 aa, Oryza sativa
  Clone ID: PAT_MRT4530_28322C.1.pep
WRRRRRRPPCREELRCKRSDGKQWRCSAPSMPDKTVCEKHYVQAKKRAASSALRASLRRSSASASAARGTTPPARMAVARPIYGRVAGEPVYVAEPALPPPPPPPRRRQPVHGLPMGNAAGARTAAELVGRGSAGLVACSSAAGAAAAATCHQCRRVANTICCTSCDRRGYCTNCISRWYSDIPIDDVRKARVQEISAVDKLEYLHSILASVLPVLKQIYSDQCFEIGVDTKAYGLRTDIIRAKVNPDEQMCCDTSNYPRSDFCKVPVFDYHRHCPRCLYDLCLDCCRDIRRSRTSVARGEYAEGRVVDRSKDTSNKRARMEPSAESANDKSVPQRRDIKNIDIRSLFPTWRVNNDGSITCGPHEAGGCGSSKLVLRRIFKINWISKLVKNSEEMVNGCKVHVLENGCSSCNDGRTLELTGHRNFGVSTCSNNGGIDRFCVFSPVLEDLKSEGIIHFRKHWIKGEPVVIRNAFEPSLSSSWDPLNIWRGIQEIMDEEVDDDVIVKAVDCSNQAEVDIELKQFIKGYSDGHKGEDGELMMLKLKEWPPPSVLEEFLLCQRPEFIVNFPLVDFIHSRWGLLNLSAKLPPDTLQPEVGLKLLIAYGRHQEAGKGDSVTNLMINMADVVHMLMHTAKGHDVCPKRLQPERSEKIANGMTMHVNAHAPVQNLNVDMGEQSPDHVSSKFDERAHASALRLQEKSSDAKLNCGFEGSSTELSCSSHSEEPKVNGSERSQAGSVWDVFRRQDISKLNEYLTANWEELAASSQVKNPIYEQSIYLNKYHKRILKDQYGIEPWTFQQHIGEAVFVPAGCPFQVKNLQSTVQLALDFLSPESLGESARMAQEIRCLPNDHDAKLKMLEIGKISLYAASSAVREIQRITLDPKFNLDLKFEDQNLTQAVSENLARVTKQRNVPCS

SEQ ID NO: 125706 - protein, 79 aa, Oryza sativa
  Clone ID: PAT_MRT4530_28323C.1.pep
PFRSRWQKSPLLRSSSFFSSCSSYSSPAALNMLASSLQFAALGWAALIPSLGRPLSSPLQFEKSLVALPFASLVLFFGV

SEQ ID NO: 125707 - protein, 141 aa, Oryza sativa
  Clone ID: PAT_MRT4530_28324C.1.pep
MEAMEQAHIEMAWWSRGRHPRGPGCRRPRLVELGASSGATRQRESNDTGLGPRRGRPPSSCVDGSLGRRRSPAVEVTSSSLKRKQLGGGGSQATGGDEVSGERVTGGAMVSEERQGSAWPAEESRWWWSAEGDVDSGGAVP

SEQ ID NO: 125708 - protein, 60 aa, Oryza sativa
  Clone ID: PAT_MRT4530_28325C.1.pep
EILVHQPRASSCRQVITLNSSWVLGSLVNLLMQISLCFLTDSCFSLSATMAIYDVLQLVR

SEQ ID NO: 125709 - protein, 338 aa, Oryza sativa
  unsure (1)..(338): unsure at all Xaa locations
  Clone ID: PAT_MRT4530_28326C.1.pep
MAEEAAAGGLYYCHMCASTVSAVAAAEGEVEIKCPYCHSGFVEEIESARGVATGGGGAISSVWAPIIDGMVGGGGGDAVRRHRRSRRLADAAGADDGYYRDLALLDFSESRRRTAALLLLMQEFRERQLQRLESATATISAAAAEAGAVVGTSRDAEGVALADYFLGPGLDALMQRVGDGDAGRQGTLPAKKEAVESMPTVEVAAGGDCDSACAVCLEDYAAGERATEMPCRHRFHAKCIVPWLKMHSSCPVCRFQLPTDDDDDSSKSARGGAAHSGGGRRLSQPSPXVDGGGLGRLPAVKRYICSGFYHAEILQHFYLNRVSNFTLYLTAVSFAQYI

SEQ ID NO: 125710 - protein, 211 aa, Oryza sativa
  unsure (1)..(211): unsure at all Xaa locations
  Clone ID: PAT_MRT4530_28327C.1.pep
AAAGAQGSKRPRRXAGGEAATRRRLGGISDVDERGSHEGLEEGEEQDQFVLQRLAAAAVPDATTRPTMVATVAAFLESSNFPRVLTTLQSEAKLEFMAXIGSCCALPFWARREMRGFHTRRREMGERERERREKKXEEGNRNDMRAPHISGSHIILVXMTNGPAHIFFNSITHKXPRQLHVDRRLSQHRYVDAMSAKPPSKTAEGVKLYRF

SEQ ID NO: 125711 - protein, 59 aa, Oryza sativa
  unsure (1)..(59): unsure at all Xaa locations
  Clone ID: PAT_MRT4530_28328C.1.pep
SRLAQGEEARDPVLEMIEHIRQLTMVXSTGRNGLSKSGHWPRQKHSLGEEELVYLPYER

SEQ ID NO: 125712 - protein, 453 aa, Oryza sativa
  Clone ID: PAT_MRT4530_28329C.1.pep
MAGFDLNPPIINWDEVEDFNGDISDLNYDFVWDYDNEDGEDVNGRSSGNDGGCNGSDDDGGGSGGGDDDSGGGGDQTTDGAVDAGGIEAFESKKKKNCGRKKLSFNPDAIKDVPLRQRRTLRDLANALHMSKTTLFRRLKEGRFRRHTNAIKFTLTEDNMKARVQFCIQMLDSQSIPDEPTFKSLYNIVYIDEKWFYRTKPDENYYLSLDEPNPRRNVKSKNFIDKVMFLAAKARPRFDEYGECTFDGKIGIFPFTYWEAAKRSSRSRERGTMELKAMTSVTRDIIRNYLIEKVLPAIKHKWPNEERGLPIFIQQDNAKTHIAVDDPAFLSVAQEDGWDIRLTCQPPNSPDLNVLDLGFFAALQSLFQKSSPSNIEEIETNVIKAYEEYPANRSNHVFLTLQGCMREIMLAKEGQHYAIPHMKKRSLERNGQLPIRLQCDKQIYLDAVDFINT

SEQ ID NO: 125713 - protein, 152 aa, Oryza sativa
  Clone ID: PAT_MRT4530_2832C.1.pep
QWRPKSPRPVSFLLGRPLSFPTFLLTRRPLHPLRRVAADPVRRSAPSADCRSAVAIVIPNRAAVFLRSGRHSRRRRCPGVSRRPPFAFPLSSSLSGATPPRRWSPAATIGARVRATPVGRAGEAALGCALAAAKWARPSAARARGCGLFTFH

SEQ ID NO: 125714 - protein, 98 aa, Oryza sativa
  Clone ID: PAT_MRT4530_28330C.1.pep
MEIIGKSRLVADVKDAWKSWPRVEREESYAYGRWPVDGEVESSEAEFGPYSEAECLDRFEDTGAHLDKLAGVVGEKFEGVEGEKFGGGESGGFANVAP

SEQ ID NO: 125715 - protein, 202 aa, Oryza sativa
  Clone ID: PAT_MRT4530_28331C.1.pep
MRRRRHGRMGGRRQGEAASAGERGGGEAAAATTPSRLPLPLPLLPKQRRRRPPSSGATRASFAMAAALGLSGGEAFRLSADAGAGALKLHKDDITLWSVDGATVAIVNAANERMLGGGGVDGETRGWQILLRRRASQGVLRCLSFFFIVVVSADACAAADAAAARAAETSGGGGVGESASPDDGLSGEGEAGGREAGARRRG

SEQ ID NO: 125716 - protein, 187 aa, Oryza sativa
  Clone ID: PAT_MRT4530_28332C.1.pep
MRRRRHGRMGGQQQGEAASAGERGGGEAVAATTPSRLPLLPKQRRRRPPSSGATRASFAMAVAPGLSSGEAFRLSADAGAGALKLHKGDITLWSVDGATVAIVNAANERMLGGGGVDGAIHRAAGPELVEPCPVQRRGAGRFSYADELLKAFCAAFPSSSSSSSLPTPAPPPTQPQPEQQKPVVVVV

SEQ ID NO: 125717 - protein, 43 aa, Oryza sativa
  Clone ID: PAT_MRT4530_28333C.1.pep
QKLALAPSLHDLPLDLPIWYHSQCQCRPTQSAFAVGVLSDLNA

SEQ ID NO: 125718 - protein, 65 aa, Oryza sativa
  Clone ID: PAT_MRT4530_28334C.1.pep
MALAVTAARGGGKEVVTEEADVAWRRLRCRKAGAGVGDDREAIAVNPAAAEANREGVQRAQHGGS

SEQ ID NO: 125719 - protein, 40 aa, Oryza sativa
  Clone ID: PAT_MRT4530_28335C.1.pep
REVIRGARLEGHITGETAVPAAQLSKTVEGKEVKFSNPAH

SEQ ID NO: 125720 - protein, 1011 aa, Oryza sativa
  Clone ID: PAT_MRT4530_28336C.1.pep
MMSNLKLGVEVTSAHDLLPKEQGTCNPYVEIEFDDQKFRTAIKERDINPVWNEQFYFNISDPSRLTEKDLEAYVYHANRASNSKTCLGKVRISGTSFVSHSDATPLHYPLEKRTILSRARGELGLRVFLTDDPSVRVSAPGQEFDFISTPTTAQEQVAANAIPNPFQETRADQVRQFQHLPKEQHQHRPQPMTAQPYYPESSYGQQQQKTYSAVGNKAEGPPPPVMRMYAQGPQQQPVEFQLKETSPTLGGGRVIGGRVIPGEKAGAYDLVEKMQYLFVRVVKARDLPHMDITGSLDPYVEVHLGNYKMKTRHFEKNQRPEWDEVFAFPREVMQSTSLEVIVKDKDFIRDDYVGRVSIDLNEVPLRVPPDSPLAPEWYRLVGKEGHRDKGELMLAVWYGTQADECFPSAIHAGSEPIDSHLHNYIRGKVYPVPRMWYVRVNVIGAQDIFPMENHIPDVFVKVRLGHQMLKTRPARSPTRNFMWNEEMMFVAAEPFEEDLIIQIEDRVAQNKDEVIGETMIPLARLPRRADHKPVLPAWFDLRRPGLIDLNQLKEDKFYAKVQLRICLEGGYHVLDESTQYCSDLRPTMKQLWKPPIGLLEVGILSANGLNPTKTKHERGSCDAYCVAKYGQKWVRTRTIVDNLNPRFNEQYTWDVFDHGTVLTIGLFDNCHISADSNHSSSPGHMDKPIGKVRIRLSTLETGRVYTHTYPLLVLHPSGVKKMGELHLAIRFTATSLLNVLFTYSRPLLPKMHYAQPLSIVQQEMLRHQAVQLVAQRLGRMEPPVRREVVEFMSDARSHLWSMRRSKANFFRLMQVFSGFIAAGKWFGDVCQWKNPVTTVLVHVLFIMLVFYPDLILPTIFLYMFLIGLWNYRFRPRFPPHMNTRISHADMTNPDELDEEFDTFPTSKSPDLVRMRYDRLRHVAGRIQTVVGDIATQGERLQSLLSWRDPRATSMFLLFCLLTAVILYVTPFQVIALCLGFFWMRHPRFRHKVPSAPVNFFRRLPAKTDSLL

SEQ ID NO: 125721 - protein, 111 aa, Oryza sativa
  unsure (1)..(111): unsure at all Xaa locations
  Clone ID: PAT_MRT4530_28337C.1.pep
SILSLLEFQVALMGLFEGYRINGLPCFLNSYYPYPCGHYFYPLGLSDYPCTFFELKVKEIKNGRLAMFSXFDFFFHAIFTVKGPLENLLYHLIDPFVNNSWVYPTKFTPVS

SEQ ID NO: 125722 - protein, 35 aa, Oryza sativa
  Clone ID: PAT_MRT4530_28338C.1.pep
YASGHKVTMGYMTTVANTVYVLYFTVMPRMLLPLA

SEQ ID NO: 125723 - protein, 50 aa, Oryza sativa
  Clone ID: PAT_MRT4530_28339C.1.pep
FSRDQYIHLINVGLLFEREDEAEEERRRRARSLGLLGPGRPPVAAGLGGG

SEQ ID NO: 125724 - protein, 994 aa, Oryza sativa
  Clone ID: PAT_MRT4530_2833C.1.pep
MVNTRSNGNGPNLNNPNNNNNGENPTLAQVLAQQTQLMNMMMQQLQNQQNQGNNHAPPQNKLAEFLRVRPPIFSSTTNPVEASDWLHALEKKLDLLQCTDQEKVSFASHQLHGPASEWWDHFRLNRTTAEPITWLEFTAAFRKTHIPSGVVSLKKKEFRSLTQGSRSVTEYLHEFNRLARYAPEDVRNDEERQEKFLEGLNDELSYPLMTGDYSDFQKLVDKAIRQEDKYNRMEQKKRRIAQFKIQQGNNQKPRLILGHQSMPHGGSSSVVRPQRQFFNNNAGNNNRNQAPRLIAASTQQQPAKREQGSKLVVCFNCGDPGHYADKCPKPRRVKVVPAQSNSTAPVSKARVNHVAAAEAQDALDVILDDLPANELAEVKRQVDDLLQKGYIRPSSSPWGAPVIFVEKKDHTQRMCVDYRALNDVTIKNKYPLPRIDDLFDQLKGATIFSKIDLRSGYHQLRIKEEDIPKTAFTTKYGLFECTVMSFGLTNAPAFFMNLMNKVFMEYLDKFVVVFIDDILIYSRTKEEHEEHLRLALEKLREHQLYAKFSKCEFWLFEVKFLGHVISAGGVAVDSSNVESVTNWKQPKTVSEIRSFLGLAGYYRRFIENFSKIAKPMTRLLQKDVKYKWSEEWRDIDQVREAQINDPDIQEIKKNMRRGKAIGFLEDEHGTPCAAVAPAVAVAREGRRRVRRRVAVLVLPFATAEDRRSVIAVVDPKSFAASSSSPSPSVDLPPSFWSPRRLETIPFFVADITVPAAGRHPARSGRGGTDLAVAAAATGATPLATGAGWREAPPPPSLRSLLATAQAAARWRRKKEREGVAGLVASGAVPGVGRRKSVTVDAVRSLQRWELHGCGSMEAVAMTTDPEAGPPFATPYGGSGWWRRANGVARRPVAGAGATREGGDNGQPKKENRWGPTAAGMEMMAGMEGGGEDGDSGPDPVAPESGRSGVRQARSGGGAAEFAGSWRWWWQRLDSGDNRWLANGSIGCRLLWQRR

SEQ ID NO: 125725 - protein, 341 aa, Oryza sativa
  Clone ID: PAT_MRT4530_28340C.1.pep
MRRRLFRRPLPRPWGAYARRSRRWRVPAVTAWYGHARRAEVCRGARWGQKKRWEEGGGGRARGFGFHGEVSSVWVVVVVATAHSVSPRVRAADGRACPPPSLTGGAHPSSPSSRRSRRPARAERRRRRRRIRRIPPPPRAIKIELAPSSSLSSVADDLRPALSARRDRLPPRRRLLRLRRIAADPVHHLAELADRRSAIVPVHPSRAAAFLRSGRLLCRRRRPGRCFIEFHGEIRESCGRSRREFITKMSPIEITPIYSLLDLDMHKMDRKVEEEEEAEPMIQEMDELGLGESITDEEYLACLGNLPHGPPRPDTKTKLQGEQLHDLYIRHTVYRLKYYKV

SEQ ID NO: 125726 - protein, 63 aa, Oryza sativa
  Clone ID: PAT_MRT4530_28341C.1.pep
MNSTTQNTVWQAGPGSTGAIASHPTSGQNLRSMQRLDFLSGKSAGASNSRMPFSWAYSLNAKE

SEQ ID NO: 125727 - protein, 113 aa, Oryza sativa
  Clone ID: PAT_MRT4530_28342C.1.pep
MAAPATGGGISADVPILHSENLTSNVKSIYYSRTFLSIISGVVAGIWGFTGLMGFVFYLLVMMVASLGLLLKAKFSIHTYFDSWNRILIEGVFGGLMSFVLFWTFAYDIVHIF

SEQ ID NO: 125728 - protein, 289 aa, Oryza sativa
  Clone ID: PAT_MRT4530_28343C.1.pep
MLAGDESEDVAPLKIAVDVVPAGDEPEDAAPLLQIRGGRRGNCRGYRRQPSRRRRRVGRCVAISRLPRRLLRRGDKDEEEFHGTEKGSGRAGQAPAGCDEDMAMAATYTAVQAHVSIRDRGTAGSGEPFFFSSYRVTGNRAPTRPCRGTRAPTGHGPEDDKYYLLHFTIPVLAANAFHHSWTVKAMLHIISLICSSEIHVLFVYLCPVRRWKDITKSQKRCFVSGSRLILPMACVSFQVIPSCLSAARFKEISFLSIVLWNYFYWQPRIYGMKEMALFFKVFSHQFTIG

SEQ ID NO: 125729 - protein, 221 aa, Oryza sativa
  Clone ID: PAT_MRT4530_28344C.1.pep
MLTKGGSLYLYQHKLETFHQAMKMAVTLFGRGGGVATASGIRRRQMERRCIRPQKVGGGVALSEIGEVSKSAAEGWQHEYESTEVEEEEGGAVSGVNVGGRCRRGARDLGGVSAIWVGREYDAFEIGFITTDDFTNADILEATYPAIAKRLHGDWVTGPAIPIVTGFLGKGWKTGAITTLGRGGSDLTATTIGKALGLREIQVFSIFEDLGISVDCVATSE

SEQ ID NO: 125730 - protein, 606 aa, Oryza sativa
  Clone ID: PAT_MRT4530_28345C.1.pep
MAKCYSEWPPLPPLHPPRRTPSQTSLWTIRRQLASFVLHCSRSCASPLLEPKNLPDEFHAVSASTPAPVPVSPLPDAPKLGISNKFIRGLCSDRQTEQLAFECYRRALHQPEFLPDKKTMNALTVQLLRAKQWSSLEFLVEDFRAYGVMPERRTCARLVASCVKARKFGLADMVLGVLEGKRGAPAAVAFSSAMQAYNKLHMYRSTLLVYERMRAARLSRDADAYRAVMAACGALGKPEMVASLLKQYKSHKWYPSESCVETYAIVCDALGRAGRASDALKCLREMEADGIAPNATIYSSIIRSLADAHESSAAEDLYNEAWKKGRLGDPDMFLKVIVMHVEAGRVEKIMGVAKDMRETGLRVTDCILSTIVNGFVKRRGLKPAIRAYDKLIALGCEPGQVTYASVINVYCQLGRSDRAESVFSEMIDRGFDKCVVAYGNMISMYGKISRASDAMRLLAVMKKKGCEPNIWVYNSLLDMHGRLGNSRQAEKIWKEMMRRKIQPDRISYTAIINAFNRSGELDRCMDLYQEFRETGGKVDTALAGLMVGVFSKCSRFNELIELLKDMQGTRLDRRLYLTVLRSLRDAGLEVHVKWLQTNFSFVEEKT

SEQ ID NO: 125731 - protein, 60 aa, Oryza sativa
  unsure (1)..(60): unsure at all Xaa locations
  Clone ID: PAT_MRT4530_28346C.1.pep
RALPPXKXKGITXWDEKHPLFDYLENPXKKYIPGTKMAFGGLKKEKDRNDLITFLKENTK

SEQ ID NO: 125732 - protein, 147 aa, Oryza sativa
  Clone ID: PAT_MRT4530_28347C.1.pep
ARAGPLRLLRWRGGLVPAAPPRAGPPAGRAAARPGTRSLFPKPSSPHLLPSPPLSPSRPPVAPCPPPPPALPPPPAAPALSSAAAGLPPPCPVAPAFRFPLNPFRVVHLEILAAAGLWTPLLVAVAAACLLYRRGGVSAEVPPGDSC

SEQ ID NO: 125733 - protein, 93 aa, Oryza sativa
  Clone ID: PAT_MRT4530_28348C.1.pep
LWSRAKKKKKKKKKRQKKKKKKKKEKVTKTMAVPAPVDYSYSPFARLEFLTFSLTIYSALCLGTTLVRVLSSLIPFPSPPRGSISSGIIVCDM

SEQ ID NO: 125734 - protein, 94 aa, Oryza sativa
  unsure (1)..(94): unsure at all Xaa locations
  Clone ID: PAT_MRT4530_28349C.1.pep
YXAACFAPXSACSSTSASAEQEXQLAXGAAARXPRRGXRPLGGRTRXPGSPPYAPAIEPEGDGWRVQASLYLASAPPPDTRERLQDSCRGSVLY

SEQ ID NO: 125735 - protein, 44 aa, Oryza sativa
  Clone ID: PAT_MRT4530_2834C.1.pep
SKVVLPNPFSRLVLKPPFFSKRTGWANPGNPGRGPASGTSFNYS

SEQ ID NO: 125736 - protein, 1337 aa, Oryza sativa
  Clone ID: PAT_MRT4530_28350C.1.pep
MWKTLQLCSSIHLRRHLRQEPKIICHGYANGASELNSNARSLLKGEICYTGKKKESISVSSSNIAVSSQGIGFSLEQRTGEKCLANSHLDVKLCTGIVKLVIDKCSYIFKSKGGIFDGNCRLQDVLKLGFWLSPETLRPFWRASELKPDDFLNILIGFGPDAAEVKKAIFLWNLYWWASWQSKAFQHLPRSNEIMVSILANAHMLSQAESLLLLLDGNRVLADAGKLFSQVIQAYAEAGNLGKSISIYDCAQDRCLIPSGSCYQVLLHLLMERRKNDLVLRVYLDMLGAGLGSYTEGDILDIVVKALIKKDKFLQAIGIIRQLKDLNIQMSKGSLSAVTQEFCKKKDIGDMMNFLEEWRYLPDLLLSNRIIASLCANIGTDEAWLVFQRLEVLGFVPDATTFGIFIRYSCRELKLKAAFLYLSECFSRHINPKVCAYNAIIGGIFKEGLYRHAKYVFEDMAERKIIPELLTYKILLAGYCRYRQFDEIEQTLRTMETNGINDIPSGNCVLSKALSFLGLDHLGVKVKRDNAAGYPKAEFFDSVGNGLYLDTDSTKFEASLVQIIDYALYPDISLNLVRACRQGDIASALVLKDETFQWGHDISTASYSELLKALSASPARAMDAINLIDEMADTPDKFDAQNLNLAVQTLSRNGRSACARLAFDRLLRDGFPASQDTYTYLMIGFCIERDIAGFWECWSLATKHGWSPGSRDVIPLISHLSKWGVIEEALEFISVLLDCYPSLFFSAYCQLLEELCMTGCTSVGCAMLEALIEKGVAVDPSLICNVMEGFLKEHKIAETIGMYDMLLNRNKVLNVSTYQSALSSVARIDAERAMDLVQSVMNMESTDFSTCSSIVKNLLQSGKIGQVMSVFEETVLGKKFNATLLNSFLQAYYCVKNWRKADAVLCMMLKMQNSLSISSYRFLVRRMCEQSRISSALRLKELIQDRDKSTELILYNILIFYLFRRRHILQVHNLLKDMKSNGFSPDTTTYDFLVNGFHKSGDVDHSINMLDSCIAQGLTPSNRSLRVVLSHHCKLGNLEKSLELFHLIESNGWKHGLVIETTLISSLLSSGRFSEATSCLNSMNKRELIGFDIHFDVLIKELCLLGDVEMSVSLLNTMLKKGKIPSEVSYDSVVYRLCMLKEFDQALDFLAEMQFANLKPSDMSCDVLIQGLCAMGRTCDAMNILEMLTTIGSSPSYHMYRVVFENCCRSNNLQKAATLLHDMQQAGFSPNFEMHWSVISNLSSNAKRTTGYEKPILSNLISSTQTPVELTELHEIKLMQLNVPFTSEGHDKDVLSIIVYVGGDNADIISLHQIRVLLLVVLAQTLLLAMKDTLELT

SEQ ID NO: 125737 - protein, 515 aa, Oryza sativa
  Clone ID: PAT_MRT4530_28351C.1.pep
MLPMLPPPALRAPSAWEQATTSSSIGRSAMEESCSSNWPATPCAAATTAAADKSNCTVGSTNNSPSEQVGHGDSLIYSLPYLPEDIWRHIHSLMPMSAAARAACLSHSFLNSWRFHPNLSLNFKTLCPRTSRGNFKCKIDSILRNHLGTAKILKLNVADEDSTYPYIDRWLEVAVTPGIEELTLTLHKKYIFACSLLSDGVRDSIRCLQLTFCAFHPMAELGPLRSLTKLHLCGVHITGDELESLLLNSLVLEQLRLNHLSCLSVMACRRMQVIVCEAPNLSSISLSGGIKFSLGETLTMKVLSMIRPNVVCYARAQLPSIMPNLESMELGSDSEAVNIPMLPTKFLYLKHLTIQIAGGTFSPSYDYFFLVSFLDASPSLETLYLDVFQDDMAHESIIESSSPHLRQLPELSHDCLKSVKILGFNSAKSLVELTCCIVKAAVSLERLVLDTLRGGDDRCCGESNGKICWPVSNAVLKESARAAIAVRRYIEDKVSPTTTLTLVEPCTRCHSLAFG

SEQ ID NO: 125738 - protein, 304 aa, Oryza sativa
  Clone ID: PAT_MRT4530_28352C.1.pep
MGDGEGSTGGGGGGGDPQRLKRIGAAAYDYENDSRWAGYWSNVLVPPHLASRPDVVDHFKRKFYQRYIDPDLIVEPMSSTSSSQSTKPAARSSATPSNENVRARDSGSSARSTAASQPSQTERTANSLWLDGRTIHFSINAWVLVVASLGILPILPKHIASKAYRLSLLGTICSSAYSLYVTYGKPRAWNMAAIQPWLQSIIVAKDFVHLMFSLMMFTSNVHYKIALLPVLCWALDHVARFLRRNFARSSLYRQLLKLMYHAPVTSGYHQSAWARIGRAVNPYIHRYAPFLNTPISAVQRWWLR

SEQ ID NO: 125739 - protein, 119 aa, Oryza sativa
  Clone ID: PAT_MRT4530_28353C.1.pep
MGVARLRGGVAAARRGVGWVAARQGGGAAAAAAWEGWRWLDEEEERRLDEAEKWQRRLNGRLGGSGGGSATRRRIRWRRGTRMAHSAASRCACGASGSGRSAVADFSGETTVLQGGREH

SEQ ID NO: 125740 - protein, 131 aa, Oryza sativa
  Clone ID: PAT_MRT4530_28354C.1.pep
KIALLPVLCWALDHVARFLRRNFARSSLYRKYLEEPCLWVETNNTTLSLLCSNAEITLGFLMIVSLFSWRRNIIQTFMYFHLLKLMYHAPVTSGYHQSAWARIGRAVNPYIHRYAPFLNTPISACQRWWLR

SEQ ID NO: 125741 - protein, 233 aa, Oryza sativa
  Clone ID: PAT_MRT4530_28355C.1.pep
MTYLDAKVTMASVRGRVLQQTAEPDEEESMYFLKGVAPMSGSEYSSSDSEATLDDIPPIVIDADLEEEENMSDMSSMLNLQGPDKLGNNQPLDIVPLNSIPFRQEVAFHQKVDSSKEEVPVPQWMKQLDNYKDGDWTVFLQIRDDGHMAWKIVKYWLPKILEKVNRAIWVETPSWVITCCGWQLKPVVLINVDAYIDKAHIYITPEHMSSYSLSLPSIIKSTKPSSCSREMGF

SEQ ID NO: 125742 - protein, 51 aa, Oryza sativa
  unsure (1)..(51): unsure at all Xaa locations
  Clone ID: PAT_MRT4530_28356C.1.pep
LGLKMNFYSWVFXPGLKIAIFSPRFVLQLGLQGVTNRTGNKNYFSTNTLIK

SEQ ID NO: 125743 - protein, 80 aa, Oryza sativa
  unsure (1)..(80): unsure at all Xaa locations
  Clone ID: PAT_MRT4530_28357C.1.pep
GSNPGQLGTPTPSALLPEHIXGLSILCITNNLVRIFINLHVLDFLTNWAQFSFGLLSNTVMFMLPALYAQHQAFTHLDMR

SEQ ID NO: 125744 - protein, 507 aa, Oryza sativa
  Clone ID: PAT_MRT4530_28358C.1.pep
MAATSDSTPAAAAAAAASSSSSPLHIVVFPWLAFGHMIPFLELSKRLASRGHAVTFVTTPRNAARLGATPPAPLSSSSRLRVVPLDLPAVDGLPEGAESTADVPPEKVGLLKKAFDGLAAPFARFVAEACAAGDGEAVTAAAGFLRKPDWIIPDFAHSWIWPIAEEHKIPYATFLIVPAALVAILGPRRENLTHPRTTAEDYMVQPPWIPFPSNIAYRRRHEAEWMVAAFRANASGVSDMDRFWESEQHPNCRLIIYRTCPEIEPRLFPLLTELYTKPAIPSGLLVPPALDDNDIGVYNRSDRSFVAVMQWLDKQPNKSVIYVSLGTEAPITADHMHELAFGLELAGVRFLWALRRPSGINCHDDMLLPSGFETRVAARGLVCTEWVPQVRMLAHGAVGVFLTHCGWGSTVESFHYGQPLVMLPFIADQGLIAQAVAATGVGVEVARNYDDGSFYRDDVAAAIQRVMVEEEGKELAHKAIELCGILGDRVQQEMYLYELIGYLQCYK

SEQ ID NO: 125745 - protein, 85 aa, Oryza sativa
  unsure (1)..(85): unsure at all Xaa locations
  Clone ID: PAT_MRT4530_28359C.1.pep
KHSDEHVHSKIRFSFXGYIRLSSSFESETRHRHCLLLFVLVRMMSVEAIVYWFLYLLPSVMFCCTEDTACLHVHAWVLYLAFMFY

SEQ ID NO: 125746 - protein, 190 aa, Oryza sativa
  unsure (1)..(190): unsure at all Xaa locations
  Clone ID: PAT_MRT4530_2835C.1.pep
MAAGSSAPVSPSSGRSLPLPTLYKPSPCLPPPFPPLAALSPRRNRARVVALSLRRHRRAPVHRRRRPGPSPASAPPPSASPHPRRPRPPLRFGRRPPEHRQPRPPEPRRHLPPLRSPFPSSPSTRGEPWTAASFPPSPPLSRAPLRRAYGRRRRPXGRGRAASRRPHRRGRLRVHRAAAAWGPAVSRPRP

SEQ ID NO: 125747 - protein, 117 aa, Oryza sativa
  Clone ID: PAT_MRT4530_28360C.1.pep
SADVSLSVSSSGGPLLSFLASVSMLGILYIEPYIPLGIRVLDIQQSIEDFAVNAKVPSSKASGIAFTHGVFELCIKQWCVDAHRRQKSCRWRTHLRSLAPVIMQDSFAEVCICVHDK

SEQ ID NO: 125748 - protein, 95 aa, Oryza sativa
  Clone ID: PAT_MRT4530_28361C.1.pep
RIPSGSYLSPRAGGKPMPRRANITFTEAQLSLKTSGTPELLSLLITLRSERMRMRVHGTVDTVKHVGFRIFSFGIRHLTRRTAIAPAAAHRVQHG

SEQ ID NO: 125749 - protein, 79 aa, Oryza sativa
  unsure (1)..(79): unsure at all Xaa locations
  Clone ID: PAT_MRT4530_28362C.1.pep
LWRGARKFGAPLPELSVHSAPGSEXNFYYKCSSTRTLNKEGSSCTSTIVVINNLDVVSRLEITFVCCVTHGFVRGEVLQ

SEQ ID NO: 125750 - protein, 603 aa, Oryza sativa
  Clone ID: PAT_MRT4530_28363C.1.pep
MQTPSVPKILKPCAAVLGFTTLQMDLIVARCSAAFFRSPTLLVNVQFWLGYLRGCVDWEASPTTTSAAKAVLVIADEFGVPRRMRPFKDVIVAAFLLKPEHLAWKAAFFRDEQSSGGRRRRVQAWRLWRGRDFINVATIVEEDFVAKFIRPFLVKDSNLDKRALSPPRRKIPRKCKRGRTVGAVAPNGAAPWMESPWASLDGDIIRLVAEHALAGDVADYLRLRAVCRHWRSSTVSPRGRSVVDPRFHPRRWILFPESHGLFPGHRKLHGRVRFFNVSTGAFARLLLPFFPDHFVIDSVDGLLLLQRDRDSAIRILHPFTGDIVELSSLETLRPQVEPFFTSTELAYMRAMERKEMGIFSYFNRICAALSFGPDGVITIMFVVTRVQRVAFATSADQQWTLSNWQTNLSWKYMAFQGKIYAASIWVNFSPNRIFVIDPPRVEANGSASSFSLPEPKLFATCPVEKLFGFAYLVNCESEVLLIGHTDRSYSQAVVYRLADIILGRFIPLTRFGDYTIFMDERSLCVSSKAVPGIADGSLIYRHHGKFLAQYHVRSGTLSTAAEGRIEEGYRLAPYSLIHHLFACCLMTFGKSPGYAVLPCLVPA

SEQ ID NO: 125751 - protein, 272 aa, Oryza sativa
  Clone ID: PAT_MRT4530_28364C.1.pep
MAAFSSSSSAPMLIRSVLFVSLLSAAFVFDSGEAGAAHRVVDPEWHPATATWYGSADGDGSDGGACGYGTLVDVVPMKTRVGAVSPVLFKGGEGCGACYKVRCLDASICSRRAVTVIVTDECPGGVCAFGRTHFDLSGAAFARLAVAGHGGQLQNRGEISVVYRRTACKYGGKNIAFHVNEGSTTFWLSLLVEFEDGDGDIGSMQLKQANSAQWQDMKHIWGATWSLTPGPLVGPFSVRLTTLTTRQTLSAQDVIPKNWTPKATYTSRLNFA

SEQ ID NO: 125752 - protein, 246 aa, Oryza sativa
  Clone ID: PAT_MRT4530_28365C.1.pep
IDEILENYELLEFPKSYGIDFPAITPTGHDDAFPDPHSGIGGGSSQHASKAGGPPSKATFLIVFEALRTARLQIAYQTLPVKTTRTSDTAPWVSSRGGGLVVYDTALAGANARARPNSTQVVGFQLHPGRWLPHAHRPPAPDQAHAHQHRRRALPIVLLTSPIWVHVAIVVADEAATTFHSFMVGPGGRTACAIGGGGGGGVLWRTVPGAWLRRCHHGQLPPHARPWLWGHRFSVALAFRHPLQGL

SEQ ID NO: 125753 - protein, 42 aa, Oryza sativa
  Clone ID: PAT_MRT4530_28366C.1.pep
PRVRQRVRQRVRPRVRLNIKKEKQTKNQSEGKKNTKAPGWPF

SEQ ID NO: 125754 - protein, 36 aa, Oryza sativa
  Clone ID: PAT_MRT4530_28367C.1.pep
MKPVIGFHWVDGAGESGWPDMEKLNGGGGPLLVAPL

SEQ ID NO: 125755 - protein, 206 aa, Oryza sativa
  unsure (1)..(206): unsure at all Xaa locations
  Clone ID: PAT_MRT4530_28368C.1.pep
FFINLIKFNFFPGVEDRLVWRWTSNQRYSAHLAYQAFFHGQHSFACGDLLXHAKGXAKCRFFFWFAFQQRCWTADLLQKCGIDSHSACPFCAQDLETANHILLDCVFARQVWLHVLSPPGWAALSPPXGSWFQDWWSSSRACLPEHLRRCFDSLVLLVSWQLWKERNSRVFNSALSSVSVVLESIHPEGYLWSLASVAAFGDLLGV

SEQ ID NO: 125756 - protein, 1030 aa, Oryza sativa
  Clone ID: PAT_MRT4530_28369C.1.pep
MAEVVTSIVVKPLLSMVKDKVSSYLLQEYRVMEGLEEQHKILKRKLPAILDVISDAEKQASEQREGAKAWLEELKTVAYEANDIFDEFKYEALWREAKKNGHYTALGFDVVKLFPTHNRVMFRYRMDKRLCKIVHDIEVLVTEMNAFRFRFQPQPLVSMQWRQTDSEIFDPTNIISKSRSQEKLKIVNILLGQASSPDLLVLPIVGIGGLGKTTLAQLVYNDSEIQKHFQLLVWVCVSDPFDVDSIAENIVKLADRSKEVKEDGKHQIDYHVSQVTKDKPLQKLQKLVSGQRYLLVLDDVWSRDADKWEKLKASLQHGSIGSAVLTTTRDEQVAQLMQTTDAYNLTALENSIIKEIIDTRAFSLRKDEKPNEQVEMIDKFVNRCVGSPLAATALGSLLRTKETVQEWQAILMRSSICNEETGILHILKLSYDDLPSYMKQCFAFCAMFPKDYVIDVDNLIHHLAKYSSVRALKLSKEMRLIQLKPKILHHLSNVGELQKLDIGGHLELHQLQNVRESDAIHTKLDSKRKIMELSLVWDNEEPRNETADSSHNKVMEALRPHDNLLVLKVASYKGTTLPSWVSMLEGLIELDLSTSYTRCENIPQLWQLQYLQLLRLAGFDRLQYLCSIGENSTTCSIFPKLKELTLENLKSFKGWWDKTERQEQPSCDNDNNKTPTALPNFPQELQLIELNKIDRWQQVEATHVKTPMFPNLENIRIMDCPKLASLPEARKLSVLHITKGSQQLLFCIPRYITSLSTLSLLQEGVETAPPAEHNLIEWVDDNENWKGESPLADMRLDNFNMFFLSGAHALWTCFAQLIVLRICRCDVLIHWPEKEFQGLVSLKTLGIVSCNKLKGYAQAPERSTSGGGQLLTRLESLTIIECKSLVEVFNTPPSLKYLHIRRCPELKSIFGKQRRGSTLIEGPCSDNIVSAPVLEPSSPAGDHFSPPESLESPHSGELPSLVKLTLCYCKSLASSSLPNSPQAYSSLQGLIIMECPALKVLPTCLRQRLGSLEWKELDARHEELFLQSDK

SEQ ID NO: 125757 - protein, 1982 aa, Oryza sativa
  unsure (1)..(1982): unsure at all Xaa locations
  Clone ID: PAT_MRT4530_2836C.1.pep
IGNNLISSWFGMVYSWFGDRTVQPMPRYKPEYLFGVEGFVQELRTMSFVIGFGTAPFYAXIRHDRHEEKCRVKVTLNSNSEDIPSVMFEAGGRNYIHACQEVARIAIGELRDRYSDQLADTEYRYHPRQPQGSDRGSYLETEGIENDATTRHLVEMLWAMDESRAETVLAAQDREDRNRGKICELEDKVDRLEKELAALKGEAPPQKARIRLTARKRALFVPRYQLAPKVRVVEKEVAPADPPIIIISSDEEEESKRNHSKIEWVATQDDEDEPNEPSIDLRCSEEQDNRNGPNLNNPNNNNNGENPTLAQVLAQQTQLMNMMMQQLQNQQNQGNNHAPPQNKLAEFLRVRPPVFSSTTNPVEAGDWLHAIEKKLDLLQCTDQEKVSFASHQLHGPASEWWDHFRLNRTTAEPITWLEFTAAFRKTHIPSGVVSLKKKEFRSLTQGSRSVTEYLHEFNRLARYAPEDVRNDEERQEKFLEGLNDELSYPLMTGDYHDFQKLVDKAIRQEDKYNRMEQKKRRIAHFKAQQGSXXXXXXXLGPQSMPQGGSSSVVRPQRXFFNNNAGNNIRNQAPRPVAASTQQQPAKREQGSKPMVCFNCGDPGHYADKCPKPRRVKVVPAQSNSAVPASKARVNHVAAAEAQDAPDVILGTFLVNSVPATVLFDSGATHSFLSMSFAGNHGMEVEDLRRPLMVSTPSNQALSLQRSPYVRIEIQGVPFLANLILLESKDLDVILGMDWLARHKGVIDCANRKVTLTSNDGRVVTVHALSSEFLRSRLNQITLEEIPIVREYPDVFPDDLPGMPPKRDIEFRIDLVPGTTPIHKRPYRMVANELAEVKRQVDDLLQKGYIRPSSSPWGAPVIFXVEKKDHTQRMCVDYRALNDVTIKNKYPLPRIDDLFDQLKGATVFSKIDLRSGYHQLRIKEYRLFECTVMSFGLTNAPAFFMNLMNKVFMEYLDKFVVVFIDDILIYSKTKEEHEEHLRLALEKLXEHQLYAKFSKCEFWLSEVKFLGHVISAGGVAVDPSNVESVTNWKQPKTVSEIRSFLGLXAGYYRRFIENFSKIAKPMTRLLQKDVKYKWSEECEQSFQELKSRLISAPILILPDPNEGGQLYCDASKLGLRCVLMQDGKVVAYASRQLRPHEKNYPTHDLELAAVVHALKIWRHYLFGTRTEEFERLNLGIVSIGFVAALEAKPTLIDQVREAQTNDPDIQEIKKNMRRGKAIGFLEDEHGTVWLGERICVPDNKDLKDAILKEAHDTLYSIHPGSTKMYXDLKERFWWASMKREIAEYVAVCDVCQRVKAEHQKPAGLLQPSKIPEWKWEEIGMDFITGLPRTSLGQDSIWVIVDRLTKVAHFIPVKTTYSGSRLAELYMARIVCLHGVPKKIVSDRGSQFTSNFWKKLQEEMGSKLNFSTAYHPQTDGQTERVNQILEDMLRACALDFGGSWDKNLPYAEFSYNNSYQASLQMAPYEALYGRKCRTPLLWDQTGERQVFGTDIVREAEEKVKIIQERLRVAQSRHKSYADNRRRDLSFEEGDYVYLRVTPLRGVHRFHTKGKLALRFVGPYKIVSRRGEVAYQLELPQSLAGVHNVFHVSQLKKCLRVPTEEANLEQIEVQEDLTYVEKPIRILETNERKTRNRVIRFCKVQWSNHSEEESTWEREDELNRGIEFDSDRPLSFXPSFPSSSPAAMGLRLRLRAPLKASPVSPPPAATLAFASRRQSRSSAPCAAVDSAVAVAREGRHRGRQVVAVLVRRFAIVGDRRSIVAVVKPKNSAVSSSSPAPSVASPPSFWSSRRRSPASVRRPSRPLRRAAAAVGDVIADVIKVVRHSVVSGESVFAGEEFEEFQGQQGKSHRSQTTRDVCQRVKAEHQRPAGLLQPLQVPEWKWDEIGMDFITGLPKTQGGYDSIWVVVDRLTKVARFIPVKTTYGGNKLAELYFARITDGQTECLNQILEDMLRACVLDFGKTWDKSLPYAEFSYNNCRVPKRL

SEQ ID NO: 125758 - protein, 82 aa, Oryza sativa
  Clone ID: PAT_MRT4530_28370C.1.pep
MAMEVEDGGGGAFVAGVGGGVLVGDGGGAVPVRGGGGGAAPVCGDVCGAVPLRGFGGGSFAVRAHGVGFVPVRGGAACSVAV

SEQ ID NO: 125759 - protein, 70 aa, Oryza sativa
  Clone ID: PAT_MRT4530_28371C.1.pep
VHMGVRALGRVQDNAMECQNLALVAGEPSTAQSDRQGLGLTGCGSSGSGSPRRDLLQNQDEQSNRHGSGG

SEQ ID NO: 125760 - protein, 121 aa, Oryza sativa
  Clone ID: PAT_MRT4530_28372C.1.pep
LLYGEKDAYWPRAAFTSSRAPFSLLIGRDLRSLLSGQKSSQNDLHDCLPRSTSVSATSTLPRWLVAAAAQSARCMACVTVYDDISEHCKRSVSERDELTIEASTCYYSVGDHSDGRPVFAH

SEQ ID NO: 125761 - protein, 3583 aa, Oryza sativa
  unsure (1)..(3583): unsure at all Xaa locations
  Clone ID: PAT_MRT4530_28373C.1.pep
MKWSTLLSKVVFAGQQEQEQPPPPPPPPPGSSSSPLNRQKQGDPGQATPRLSAADEGGSVGGGGVAAASGSSPSAVSASPASSSFPDYIHVPIGNKGKNELELDFRRFWEEFRSSSSEKEKERALNLAVDVFCRLVKEHSSVAELVTKLVEAHVFAFVIGRAFVTDVEKLRIHSKGRSLRVADVIGFFSEITELGICPGSNLLYAVEVLVTQTIDKQPLLDSGILCCLIYILNSLLSPDESSQKSSPVGQEVSTSEKSKDWGPMLSRRLEIEASVVHTMKALASHPSAAPSLIEDDALQVLFHMVANGSLTVFSQFREGLVPIHTIQLHRHAMQIKVLLMAVKDFNPQNGDAAYTMGIVDLLLECVELSYRPEAGSVRLREDIHNAHGYQFLVQFALTLCSLHKNQVLQSSPKLASEDGVNPPHRSEQDTFTSDLSPQLSRLLDVLVNLSQTGLSENYVGKSMKSSHGKGTGHNRSRTPSVDKFADEILEINSPKVKDLEAIQMLQDIFLKADNLEVQAEVLNRMFKIFSSHLENYKLCQQLRTVPLFILNMGGFPPALQEVILKILEYAVTVVNCIPEQELLSLCCLLQQPISTSLKHTILSFFVKLLSFDQQYKKVLREVGVLGALLDDLKQNKLFFGEEPQNRTPKSAQRMSSASSFRKTMDNKDAILSPKLMASGSTKFPMFEDEGTITVAWDCLFYLLKRAEPNQQTFRSSNGVNTILPFLVSESHRSGVLRLLSCLIIEDSLQAHPEEIGSLIEILKSGMVSTSSGSQQKLDNDAKCDTFGALWRILGANSSAQRIFGEATGFSLLLTTLHSFQNDSENEETESSLLTHMKIFGFLMRAMTAAVYSNPVNRIRLHTILSSNTFYDLLSESGLLCVDCEKHVILLLLELALEVVLPPTSNLQVESISSENPEDESGFLSATSFGLSRLDKERIYNASAVVVLIRSLLVFTPKVQLELLRFIEKLANAGPFNQENLTSVGCVGLLLETINPFLEGSSPILNHALRIVEVLGAYRLSSSELRLLVRYILQLKVKCSGHLFVNMMDKLIQIEDVRQGSISLAPFIELDMSKAGHSSIQVSLGERTWPPVSGYSFVCWFQFQNFFRSHPKEAEKTSKGSYSKRNGQVMRIFSVGAVDDANTLYAELYLHDNGVFTIATSNSSSLSFPGIEMEEGKWHHLAVVHSKPNALAGLFQSSVASLYLDGKLRHTGKLGYSPSPFGKSLQVTLGTPAIRAKVSDLSWRLRCCYLFEEVLTPGSICFMYILGQGYRGLFQDTDLLRFVPNWACGGEVMAILDSLELEVIAPSGSQRVDSAMKQGNSRLESSGIVWDMERLRNLSLQLSGKKLIFAFDGTSSDAFRASGTLSLLNLVDPTSAAASPIGGIPRYGRLSGDVYVCNQCTIGDTVQTVGGIPVVLALVEAAETRDMLHMALELLALSLQQSHQNVKDMQSLRGYHLLALFLHRRMSLFDMQSLDIFFRIAACGASFPEPQKSNMNRTASYASGISPESSLDDLTLPKFGDDMSSIGSHGDLDDFSAQKDSFSHLSELENADLAGETSEFIVLSNADMVEHVLLDWTIWVTAPISVQITLLGFLERMVSMHWFRNHNLTILRRINLVQHLLVTLQRGDVEIPVLEKLVVLLGVILEDGFLASELELVVRFVIMTFDPPELTPNRQIVREAMGKHVIVRNMLLEMLIDLQVTINAEDMLEQWHKVVSSRLVTYFLDEAVHPTSMRWIMTLLGVCLTSSATFALKFRTSGGFQGLNHVLPSFYDSPEIYYILFCLIFGKPVFPRVPEVRMLDFHSLMPSDENCGELKFVDLLDTIIAMAKATFDSLIMKSMLAHQNNNLSHLNGTLVADLVESTPDMGGDLQGEALMHKTYAARLMGGEAAAPAVATSILRFMVDLTKMCPPFSAVCRRHDFLESCVDLYFSCVRSDCAVKMAKDLTSAATDEKCMHDDDNESLKDTFSNLPQDQEQSAKTFSIASFPQEQKSSSSGSSGMHNSFETAEVKADDSSNQASSTTFLNGQANQVVQSAHDQGQMSAPSSNGIADSHQPADSPTSASMNNIGSPVLSERSAHKAASTPTASPMAPFASWPGSAGSYSDGRQLTASPSMSSTISGIDLDSSPDLKTNIQGSPAVNTLFPINSKLLLDIDDLGYGGGPCSAGATAVLDFIAQILADIISEQLKATLFIESILECVPLFVDIDSALVFQGLCLSRLMNFLERKLLLDDEEDGKKLDKSRWSANLDPLCWMIVDRVYMGCFPTPVGVLRTLEFLMSMLQLSNKDGRIEDAVPSGKGILSIARGGRQLDPYIHAILKNTNRMVMYCFLPTFLKNMGEDDLLANLAFLTETGRSLGIFKPSQEDYTVDICTVLQLLIANKRLVLCPSNVDNDLMCCFCINLMALLRDKRLTAQNLAVDLLKYLVVHRRPSLEDLLVSKPNQGQQMDILHGGLDKLLTGSTTAFFEWLQSSQQTISKVLDQCALIMWVQYITGSAKFPGVRIKGMEVRRKKDMGRKLREIAKLDSRHWEQINERRYNLDLVRDVMSTELRAIRQDKYGWILHGESEWQSQLQQLVHERGIFPVRQLSTEPAWQLCAVEGPYRMRKKLEPSKFKIDTIHNVLASNLGLDDVKITKKEDGHMVMTSGSDTMSGLNLLTYDTERKDLDAADFASFKDEDDIFKGGSTVSPPIGWTDDKSSINEQSLHSATEHGAKSSSFSYHMTESVHGKSEFNSPRRAPSVKGTDTRTSEDKSEKELLDNGEYLIRPYLEPSEKIRHKYNCERVAGLDKHDGIFLIGELSLYIIENFYIDDSNCIYEKGNEDELSVIDQALGVKKDVLGSCDSHQKSPSTWGATAKVLLGGRAWAYNGGAWGKEKLCSSSNLPHPWHMWKLDSVHELLKRDYQLRPVAIEIFSMDGCNELLVFHKKEREDVFKNLTAMNLPRNSMLDTTISASSKQDSGEGSRLFKIMAKSFSKRWQSGEITNFQYLMHLNTLAGRGYSDLTQYPVFPWVLADYESDTLDLRNPQTFRKLDKPMGCQTEGGEEEFRKRYDSWDDPEVPKFHYGSHYSSAGIVLFYLLRLPPFSMENQKLQGGQFDHADRLFNSVKDTWVSAAGKSNTSDVKELIPEFYYLPEFLENQFNLDLGEKQSGEKVGDVVLPPWAKGSSREFIRKHREALESDYVSENLHHWIDLIFGYKQRGKAAEDAVNVFYHYTYEGNVDIDSVSDPTMKASILAQINHFGQTPKQLFQKPHPQRRTDRKVLPHPLRYSAYLTHQEIRKTTSSVSQIVTYNDKILIAAANSFLKPVNYSEYISWGFPDRSLRILTYDQDKLVSTHENLHSGSQGQCTGVSHDGNILTTGGDEWLLAVMXTLKDEHLKVSEHXAKLDDSKXSNLHIIEVSNSSXITSGCFLTQNVTRTCLCSLRMISELARFHTTIYQLCWPKPQTIMPNGAGALLDVWNVNGDCLAVVNTSQLPSDLILTVASTTNSDWQDTNWYVTGHQSGAVKVWKMVHYTSDEAANSKSKSPPSTLGGMSLNGQTQEYRLLLQKVLKAHKHPVTALCLPPDLKQLLSGDASGHLFSWSLKDDSFKVS

SEQ ID NO: 125762 - protein, 739 aa, Oryza sativa
  Clone ID: PAT_MRT4530_28374C.1.pep
MAATAAAAGPASPAVSFSLPSPPLPRRADCRRGRGHGHRPRRGPPLLRAASTAAPPSSSPSSQSPGSLSIQLSPRASPPAAPTHVASLARDRAEDLQAESRAMTRAAAATVFSPELLSSRYGSRPVKANPPILTAPLCARRLFGTRILTILAAVCFTRGQSSSAVRRARAVELRTILTRLGPTFVKIGQGLSTRPDLCPPEYLEELSELQDSLPTFPDEEAFACIERELGFPLDSIYSTISPSPIAAASLGQVYKARLKYSGQLVAVKVQRPGIEDIIGLDFYLLRGLGYLINKYVDFISSDVVALMDEFARRVYQELNYVQEGQNARRFKKLYADKQDVLVPDIFWDYTSAKVLTMEWIEGVKLNQQAAIEKQGLKVLDLVNIGIQCSLRQLLEYGYFHADPHPGNILATPEGKLAFLDFGMMSETPEDARVAIIGHVVHMVNRDYEAMARDYYALDFLEPDVDVSPIVPALKSFFDDALNSTVSELNFKTIVDGLGAVLYQYPFNVPAYYALILRSLTVLEGLALYADPNFKVLAASYPYFAKRLLTDPNPYLRDALIELLFKDGKFRQVYVLMKWNRLENLLVQGSQDREFAAKDALQPVLKLLLGPDGEELRVLVVKEAVRVTEAITFGTLIDSYNAAPEFLKPLISSGNPAGPFKISDTEREQMIELRDRVFRIWGLLRSSDGFDPTILQPIVQVLQEPEARVLGSRVAGGVTQRLAARLLQQLLRTPPAPGSP

SEQ ID NO: 125763 - protein, 131 aa, Oryza sativa
  Clone ID: PAT_MRT4530_28375C.1.pep
PPVYSSRNGHASYPFPGVYLQGSAALGIGIRNDAARSELAVDSSAKYRIVAAEYLGEGAVEEPRWLNFMRVWGPTVVYKSRQRMERMTSAMHRRLRSPAERMLNKLPNELSREEGPTGPKEKNNWEGDERW

SEQ ID NO: 125764 - protein, 58 aa, Oryza sativa
  Clone ID: PAT_MRT4530_28376C.1.pep
RLAKLCRRRRRSERLGDGAPSRMNGVGLTYYKNGERGIKDGARRPEFEKNSSISLLEA

SEQ ID NO: 125765 - protein, 605 aa, Oryza sativa
  Clone ID: PAT_MRT4530_28377C.1.pep
VALRAAEVVSKIGAFGLKVFLDEQRGQSSSAVRRARAVELRTILTRLGPTFVKIGQGLSTRPDLCPPEYLEELSELQDSLPTFPDEEAFACIERELGFPLDSIYSTISPSPIAAASLGQVYKARLKYSGQLVAVKVQRPGIEDIIGLDFYLLRGLGYLINKYVDFISSDVVALMDEFARRVYQELNYAEGQNARRFKKLYADKQDVLVPDIFWDYTSAKVLTMEWIEGVKLNQQAAIEKQGLKVLDLVNIGIQCSLRQLLEYGYFHADPHPGNILATPEGKLAFLDFGMMSETPEDARVAIIGHVVHMVNRDYEAMARDYYALDFLEPDVDVSPIVPALKSFFDDALNSTVSELNFKTIVDGLGAVLYQYPFNVPAYYALILRSLTVLEGLALYADPNFKVLAASYPYFAKRLLTDPNPYLRDALIELLFKDGKFRQVYVLMKWNRLENLLVQGSQDREFAAKDALQPVLKLLLGPDGEELRVLVVKEAVRVTEAITFGTLIDSYNAAPEFLKPLISSGNPAGPFKISDTEREQMIELRDRVFRIWGLLRSSDGFDPTILQPIVQVLQEPEARVLGSRVAGGVTQRLAARLLQQLLRTPPAPGSP

SEQ ID NO: 125766 - protein, 271 aa, Oryza sativa
  unsure (1)..(271): unsure at all Xaa locations
  Clone ID: PAT_MRT4530_28378C.1.pep
LELDATPIXPALKSFFDDALNSTGSELNFKTIVDGLGAVLYQYPFNVPAYYALILRSLTVLEGLALYADPNFKVLAASYPYFAKRLLTDPNPYLRDALIELLFKDGKFRWNRLENLLVQGSQDREFAAKDALQPVLKLLLGPDGEELRVLVVKEAVRVTEAITFGTLIDSYNAAPEFLKPLISSGNPAGPFKISDTEREQMIELRDRVFRIWGLLRSSDGFDPTILQPIVQVLQEPEARVLGSRVAGGVTQRLAARLLQQLLRTPPAPGSP

SEQ ID NO: 125767 - protein, 191 aa, Oryza sativa
  Clone ID: PAT_MRT4530_28379C.1.pep
MELAPALSLSMAMSSWVATIVTLLIGVAVASLRGRQRRTKARLNLPPGPRGWPVFGSLGALAGALPPHRALAALAARHGPLMHLRLGSFDAVVASSAGAARLVLKTHDAAFADRARTAAGELVAYNYKGIVHTPYGAYWRMARKLCATELFSPRRVDSYERIRAEEIGALARDLFGRAGRAVAVRERLASA

SEQ ID NO: 125768 - protein, 448 aa, Oryza sativa
  Clone ID: PAT_MRT4530_2837C.1.pep
MSWQRVGALLLGAQSCLPVPEMAGSVTRRGLHMTGFVLELRGMCVVLGYPHGVDYQARPLPDQEGDDAEPHAGWEVTAVILAGSSERASLAVTAGGDSFPAACQSAALLAIGTLHQRYPDELQHSPYRYHPRRGGARDYATFRDASSEDDATIVHLARMVEAYDAARIDFHQMVRRGMVENNMKILELRQENLQLKKDLDAVEAQLHQLKIAQGEICRPKRRRVCRSQKITARKSTSRPELVRQSLAWTCFVETPRAEPAPVVPQEGEASGVGSSEVVWGMVMPMVTTRRNAATGDGNQPEGSNHNHQGNPPPPPPPPPPPPPDTNAILTQILAQQANMMTAFLHHLQNPPQQNAPPPPPQHSKLAEFLRIRPPTFSSSNNPVDALDWLHAVGKKLDTVQCSDEEKVVFAAHQLQGPASLWWDHFQATQPEGQPITWARFTAAFRRTH

SEQ ID NO: 125769 - protein, 61 aa, Oryza sativa
  unsure (1)..(61): unsure at all Xaa locations
  Clone ID: PAT_MRT4530_28380C.1.pep
XWXQRAEQLEEAAEADGDHHGGAVRPLFSADPPPPLIAMDPPQTLINYDPTIIRIVVDYCV

SEQ ID NO: 125770 - protein, 131 aa, Oryza sativa
  Clone ID: PAT_MRT4530_28381C.1.pep
RTAPWKPCCCAADRWRLGLFGTPTARATYAAAHSEYGTVRAGCSHSPDSRTGPLVTSIALWIFFFSRFQPGSKTPAGRQVVRMRSIGSAVKLRKLGRARAAAAAQKHGGTGGRETQEGAICNYYKIRGWMC

SEQ ID NO: 125771 - protein, 169 aa, Oryza sativa
  Clone ID: PAT_MRT4530_28382C.1.pep
FFFFFFQFKFCTSITVSHELSSAHEELGHFPSNRTGTRQDRPPSAGVAEHPGRGSTAQEGPGQYRTAHPGAGEAAGQGTTTPNRTRTNRSHNTAAGRAGADRGKTPPPCRTERCRLHDRTRAGGRQPQPRARPGGDQRRIGGTSAGAGAGANDTHGSANRGAGKREKEG

SEQ ID NO: 125772 - protein, 42 aa, Oryza sativa
  Clone ID: PAT_MRT4530_28383C.1.pep
AYAHGFRLRIDSRGHKTLRLSSIAQKVHGLTRENGSSHSVLA

SEQ ID NO: 125773 - protein, 37 aa, Oryza sativa
  Clone ID: PAT_MRT4530_28384C.1.pep
FCSLKIYPQHYSFGCTTLHLKIFLLTQHYSDIDFSYL

SEQ ID NO: 125774 - protein, 74 aa, Oryza sativa
  Clone ID: PAT_MRT4530_28385C.1.pep
TQVVHCKSLNRKEKEEPYTFTNISTQSNQTTPTFKLHACMYTAHHRQCQASCDIHEHTRHFNTHKRNFRFYQHH

SEQ ID NO: 125775 - protein, 77 aa, Oryza sativa
  Clone ID: PAT_MRT4530_28386C.1.pep
DENHFETIYSGGKYFSGDKSKHLGPFLSKIRINQFLNLISKLTLYTRSFNTFFHPYQNLYFFFPGKNKINFMSTTFI

SEQ ID NO: 125776 - protein, 83 aa, Oryza sativa
  Clone ID: PAT_MRT4530_28387C.1.pep
MAAKPEPTQLEKEQMFGMMEKEMEYRVDLFNRLTQTCFDKCIEKRYKEAELNMGENSCIDRCVSKYWQASNMVGQMLGNRPQM

SEQ ID NO: 125777 - protein, 108 aa, Oryza sativa
  Clone ID: PAT_MRT4530_28388C.1.pep
MLIKYLINYLIAWKETAAAWSTATSRRRRWPPWPWTPRPWPTPPAPSSSAARRPRSSGPPAAAAPPPSQSQQQETPSSPPPRRRRPPEKAAAGPSPPTPYLSSISIRW

SEQ ID NO: 125778 - protein, 96 aa, Oryza sativa
  Clone ID: PAT_MRT4530_28389C.1.pep
LIELNLPRRGRSITSGSPGLQEFGTRSSEKFMDSVEVYNVKCGWSVPGFSSIGVSASRLLLSLNVLKFNACPLPSILNNFVALPKKPTPILFFPNF

SEQ ID NO: 125779 - protein, 73 aa, Oryza sativa
  Clone ID: PAT_MRT4530_2838C.1.pep
MACGPGGNLFGRVLGYVLNEILVQVLANNRTFQRFAVRTNKSLENLSSKAKEVREELSEQWRNSRGNDDHFRQ

SEQ ID NO: 125780 - protein, 125 aa, Oryza sativa
  unsure (1)..(125): unsure at all Xaa locations
  Clone ID: PAT_MRT4530_28390C.1.pep
CMPARLNVCLCALVVLDVAGARXKDCQGCCNYYRALQLGKYIDTAGRSIAAGWLTWSCLVLLMCWCWELVYLLYWIHASAAWLATIPEWVLGGYRPRSAACPCNXEPPGLHMAAVLAWQNVRCHL

SEQ ID NO: 125781 - protein, 37 aa, Oryza sativa
  Clone ID: PAT_MRT4530_28391C.1.pep
VELIEMKVETVELIEIDLSTSPEIDSIALLDGKLNAT

SEQ ID NO: 125782 - protein, 107 aa, Oryza sativa
  unsure (1)..(107): unsure at all Xaa locations
  Clone ID: PAT_MRT4530_28393C.1.pep
WQCGINSHSAYLFCNQDLQMANHILLGCVFARWLQVWCTSSRACLPEHIRAGFDSLVLLVSXQLWKEHNFRVFDSALSSVSVVMVSILSEGHLWFLASIVIFGVSWE

SEQ ID NO: 125783 - protein, 121 aa, Oryza sativa
  Clone ID: PAT_MRT4530_28394C.1.pep
MRRAGAVAEPRRGGVALSRYAGQVGNDESSQNPIPFQPSSPRRRAAPSSTAAGEGAADEAGWSRSRGLHSIVSQSLPERAPRSRSRRCGGPALAMLKLEVTNHTTHLFLQQEIHCTHRLRF

SEQ ID NO: 125784 - protein, 96 aa, Oryza sativa
  Clone ID: PAT_MRT4530_28395C.1.pep
SSSFIHHIYINRCFLTKESTNYLATPHSHTHTANYSSLASSQISPASSRHHLRRWGCPRCRTPGGSPPRAPSPLHGSQGTPTKHGVEPTKGRRATL

SEQ ID NO: 125785 - protein, 36 aa, Oryza sativa
  Clone ID: PAT_MRT4530_28396C.1.pep
LEVDHWHHNYSMVHGGDNPGVPGTHVWLTATTVFTL

SEQ ID NO: 125786 - protein, 59 aa, Oryza sativa
  unsure (1)..(59): unsure at all Xaa locations
  Clone ID: PAT_MRT4530_28397C.1.pep
FFFFFFFFFFFFFFFFFFFEXNRLLXLLLQRRDMAQRXGXXNXNLHDXRSKQNLXGYIS

SEQ ID NO: 125787 - protein, 92 aa, Oryza sativa
  Clone ID: PAT_MRT4530_28398C.1.pep
DAWADAWACRYFHPKPPPANPGPAPSGPVSGPMAQQSNIQGSQPNFVGYQAADGSSFSGNILGGHTSWGNLPPSLRPPPEGGYPPFPFVDWG

SEQ ID NO: 125788 - protein, 88 aa, Oryza sativa
  unsure (1)..(88): unsure at all Xaa locations
  Clone ID: PAT_MRT4530_28399C.1.pep
TSKKSPKKTTPAKDYSXPSKRMDSRTTGTEASAKXKTLEFRSFRSXQEIRSIKESKPMRRCSGKQVLEXRMTTNPGASCHERERGQPS

SEQ ID NO: 125789 - protein, 1352 aa, Oryza sativa
  Clone ID: PAT_MRT4530_2839C.1.pep
MADMGRPLTAKPISRTGLQGRGFAAGEVVCRGDGGGDEAEAAGSTNNFSNKLGGGGFGFVYKGVLPDGQEIAVKRLSNRSSQGLEEFKNEDSRLKIIHRDLKASNILLDDDFNPKISDFEYAMEGKFSEKSDIFSFGVLILEIVSGRRNSSFVDEEWSMNLLGYAWTLWKEGSVSELIDPLMGTICSYDEVCRCIQVGLLCVQELPGDRPSMPLVLRMLSGDVTLPAPKQAAFFVGRVPLDDNNTGSGNQLTQSSNLLRLVAFFFLLSGQTSAAAAAGVADKLDKGQNLTDGQTLVSSGGGSYTLGFFSPGKSTKRYLGIWFTVSGDTVYWVANRDRPLDGKSGVLLLNDDGSQLVLLDGGSRRTVWSASFLAASAAVVQLLDSGNLVVRNGSGGDAYLWQSFDQPSDTLLPGMKMGKSLWSGQEWFITAWRSADDPSPGDYRRTLATDGLPELVLWRGGGGGGATKVYRTGPWNGRFFNGVPEASNYSDKFPLQVTSSAREVTYGYGSVATAGAAPLTRVVVNYTGVVERLVWDASSRAWQRFFQGPRDPCDSYARCGPFGLCDADAAATSFCGCVDGFTAASPSAWALRNTSGGCRRGVALDCAGGGGGSRTTDKFKVVRGVKLPDTRNASVDMGATAAECERRCLGNCSCVAYAAADINGGGCVIWTDDIVDLRYVDRGQDLYLRLAKSEFAVKRLKKSALTNKGKKDFAREVAVMAGLHHGSLLRLLAYCNEGNERILVYAYMKNKSLDNHIFGPLPRRANLHWRRRLDIIQAIAKGVAYLHEGPDGSVIHRDLKLSNILLDDELKPKIADFGTAKLFVADQSGQTLVVSQGYASPEYALRDEMTLKCDVYSFGVVLLETLSGVRNGSMQTLLPQAWRLWEQGNLMDLLDPAMARPAPDDAELLYDLERCIHIGLLCIQDMADDRPTMSEIVAMLTSRTSQMEQPKRPTLDSRAAMRPLRQRGLGTQGSTTMSSSLVDNSVNTNLSQVFPASTMLVWTQVGEIVFPVYTTMPISTGPPMTRNENAMATNQDDSMSKDPPAEAENGTSTTSELEKDSNAAKPCRSDMNRELTKMTSEVTRSWCPIHKTRKHTLQACWVFLNIRAEIRACKERGIQRISPTRDVYCPIHKTKNHDLSSCKVFLSAMKAPSPKVQQSHIPIRDKDKERGATPTSDRFVGRTRSNHQLAMPMVKTLNGGNRLIEPPLHLAALAISEITSTAAERHDAHETMRIVPGVMSLHGAIITKIEETAQTKTEAMITATTATITTIANGGCQTILVEDVAITMTMMETGAETTAGDDDKILEIQADILTDIHEGHTIADNPPPPALGVGLSVVPYVMSDGLRDSDPEQ

SEQ ID NO: 125790 - protein, 906 aa, Oryza sativa
  Clone ID: PAT_MRT4530_283C.1.pep
MEDLSLSSELDPALLSTSTSSSSPPDSASPSFSFYHPSPPNYTLAVSNLSCRDPRRGSGGAGLLSWLLGSFSTSSPPATGGAGLLNNVSFTASSSQILAVVGPSGAGKSTLLRILSGRGTGGEIAARPHAVVSVNGRAVTSRARLRRMCGFVTQDDNLLPLLTVRETILFAARFRLRSAVTARERGERVEALMQELRLSEVADSYVGGCGGAGGAPRGVSGGERKRVSIAVDIVHDPPVLLLDEPTSGLDSRSAMDVLSLLRDVARARRQVVVLSIHQPSYRMLAYISSMLLLSRGAVAHFGTLKSLEHSLSRLGHEIPMQLNPLELAMEVTEQLEADHARFGAALATTIHQHQHNKVIDDEDESSGAGEHEHEHGYYCSRAVEVGALAVRCWRTMHRTKELFAARAAQAVIAGLGLGSVYFRIRPDPEGVALRLGLFAFSLSFLLSSTVEALPILLHERRVLMREASRRAYRLSSYVVANALVFAPCLLAVSLLFSAPVYFLAGLRATTQAFACFALAVWLIVLMASSLVLFLSAVSPDFVLGNSLICMSLGVFFLFSGYFIPRESIPRYWAFMYYVSMYRYPLDLLLINEYGGSSSGSRRGWRWNGSGHVDDGCCGGKSEMARWCERHWSSACRSAAMRMTSSRETVNNADHFPHPPPCNYYLVDSGYPLREGYMSPYRKTRYHLKQLDTKGPENLHEIFNYQHSCLRNVVERSFGVLKESGQQIGSAHDWLAATAKLDYMVWHELGRYRQTGLRYLAVPTFISRRIMLNGQIGFGTSSCWTVKFLLMSCRLQGSGVLHAKIDGDYYQAFDMEDWHVCWDGYGFLGKLARDYVTFMILSHWNTMFLNADDAGARTSAERQRPISSSSDEIQDLFEKIWVPRGPIKSRDYRWLEITIYMCSKWLV

SEQ ID NO: 125791 - protein, 57 aa, Oryza sativa
  Clone ID: PAT_MRT4530_28400C.1.pep
RLRLLAAAAAAAVMASSMVGIASAAEAPAPAPTSGATAAPAFAVASLAVAAVGYLFC

SEQ ID NO: 125792 - protein, 42 aa, Oryza sativa
  Clone ID: PAT_MRT4530_28401C.1.pep
KGCYHLHCNKCISKCSLNLYINSSYQTTNHNSNQKENKENHK

SEQ ID NO: 125793 - protein, 98 aa, Oryza sativa
  Clone ID: PAT_MRT4530_28402C.1.pep
MAPVQEQDKQLVVDLTSTAADQLARMCSAGEPLWCGCVARMMVVEEHARKFRCEEWEEWPNFATPSRWQRCQPRHCLARRSSENLRRGKIWCLRPGEM

SEQ ID NO: 125794 - protein, 143 aa, Oryza sativa
  Clone ID: PAT_MRT4530_28403C.1.pep
MASSAMAWWRTKSAWQRRRTPQVEGAASFRVTRHCYRREGLPRDGETAEFDGARRAPGSFQQQQQQLLSTPRHPHRPRSPVAAAQPPLTSTIPITRPSYRRLYRLQPHITAVLAPACHAATSTGFAVSRASPATAYFPLSTTE

SEQ ID NO: 125795 - protein, 259 aa, Oryza sativa
  Clone ID: PAT_MRT4530_28404C.1.pep
MGWGISRLIGLKAAVFLSVAYFFHRLDMTLLSFPLIYASVIAMLVSIASHPSIDLPLLLGKGSNGSFPVWSWIMFSPFLLFIHLFVLLRRFVKNEPLYTEIADGVYVGGWPSSVERLPPGEPAVIDCTCELPRSSTISENSYLCVATWDTRAPQPSQIESAVRWALRKRSQNKAVYVHCAYGHGRSVCVMCALLVALGLAEDWKAAEQMIREKRPSISMNSLHRKSLEEWAKHLLTPSKRSGESDVSYAILSDHTRKRH

SEQ ID NO: 125796 - protein, 787 aa, Oryza sativa
  Clone ID: PAT_MRT4530_28405C.1.pep
MPPPPPPPKLEPASKPESTNPNSSMPPPPPPLPVEGASTSSSMPPPPPPRPAAPPQPEVEGADASAEGGTSASDSEADEAAGNLGRGSRDIEMAEAAAPPPSQQQQPRPRAPYAIPEWSAAPGHPFFLEVLKDGTIVDKLDVSRKGAYMFGRIDLCDFVLEHPTISRFHAVLQFRNDGEVFLYDLGSTHGSFINKTQVKKKIYVEIHVGDVIRFGQSSRLYIFQGPSELMPPEKDMQKLRDARVQQDMLDREASLLRAKNQAALAEGISWGMSEDAVEDSAEDEADEITWQTYKGQLTDRQEKTRSKIIKRLEKITNMKKEIDAIRAKDISQGGLTQGQQTQIARNEQRTSQLMEELENLEETLNDSIRESLGARTGNSNRGSHKASLEEEDDILSDEDDFYDRTKKKSSSHKSSEQQVETADSLLDKKDTITSDIESKKKLVEEEKNKLAKSENADVGDDLDAYMSGLSSQLGMFFPWSVIASGEVVVNENKIWHNAQFYACHFSSLTSLNCSAVHDKIAQIQKELSDLQTELGRVVYLLKIADPMGEAARKRDLKPRETKSPASNDSLRPESRKQNKVAQNKASTEEKLKESCAEKTQVDKPAEEEKGISTNQENGSKPAFSIPKPQWLGDKRTVESEENCIKEESANEEETDNFVDYKDRKTILSGSANGKDLEEAAPGLILRKRKSDQSAANEVESSVESEASAADAVALLLKHKRGLQTSEDMEDENEPQASKRKSKKSKQKRVLGPARPDFLDAGPDHETWVPPEGQTGDGRTSLNDRLGY

SEQ ID NO: 125797 - protein, 51 aa, Oryza sativa
  Clone ID: PAT_MRT4530_28406C.1.pep
MVVAVQEIATHWFENHISGCPFAIMSGDQADDVGRDDSAFVEIVLDNAVRK

SEQ ID NO: 125798 - protein, 84 aa, Oryza sativa
  Clone ID: PAT_MRT4530_28407C.1.pep
MQKPASTGGAIRNSRGNSLQPMVAVAKTSVCRKDGMRVRALTHCGSKCAKGFRDGDDDEMKDLHKLFFGPSMIDDDVNSDGELQ

SEQ ID NO: 125799 - protein, 127 aa, Oryza sativa
  unsure (1)..(127): unsure at all Xaa locations
  Clone ID: PAT_MRT4530_28408C.1.pep
VLREAYLDLRDPVQGEAHDXYGKDDIATEAGRDARATMADWVGREPSEDYIAQLVTASIHGLDIXGDEEDTDLREVEAKNPVVQEDPEDKLAXTLYSTLHGNGQGDIEELAHNAKAELSRLSNAQLG

SEQ ID NO: 125800 - protein, 632 aa, Oryza sativa
  Clone ID: PAT_MRT4530_28409C.1.pep
MSYPTFHVHPPFPVSARKKEDDGGGGGGKKEAAAAAMRRLAEMDHRAAADGGKVVAAVAVDGDRGSQHALKWAADHVLSLSHPFFLLHVRRKHASLHSAGGKQFSLLHVQDDVAASSPDQMDHHTKDLLLPFQCFCSRRGEDLEAEIRKLKLELKQKNDDMHMWNKLPLGIGDRSENSNASVEHEDEHLQEFTTCSTHSYSERPNAEPSSAVRGPKHKLLKLETSSSDQCRERTIQEFKDHSSQDTVHPILRRLPPKFYSPRNDSKHGCASEKAYNLELKCKSLPRPIETKRLLEGLPTRFQCKIYTTEEVANATDHFSPELKVGEGGYGPVYKATLDNTLVAAKILHSNITQGLKQFQQEVELLNNIRHPNMVHLLGACPEYGCLVYEYMPNGSLEDRLFCRSGTPPLPWQLRFKMAVEIATGLLYLHKMKPEAFVHRDLKPGNILLDKDFVSKISDVGLARIIPRSMDETVTQYRMTDAAGTFCYIDPEYQKTGLVTTKSDVYALGIIYLQMITAKDAMGLAYMVSDALEEGTFEGLLDPNVTGWPVQEAQKFAELSLKCCELRHRDRPDLESVVLPELIRLHTFVASSGDNSSIDQGHQRSVSDKELALENDLAEILNDGLVKGASFAA

SEQ ID NO: 125801 - protein, 125 aa, Oryza sativa
  Clone ID: PAT_MRT4530_2840C.1.pep
NELGVRNKWQASGDGQKRASNHQSSGQNFSRSALIVGWLARLGGKVRNPIKKWAQDSRVVRWVKNESLLRHSAVVPTVPPQKIILCCHLPVLQKVEAMEVKLIFCGWGFPPECGYGGRAPSAGRR

SEQ ID NO: 125802 - protein, 689 aa, Oryza sativa
  Clone ID: PAT_MRT4530_28410C.1.pep
MELSSLAALLHSPLLLAVLLLVFSWLIVSSTKKRPPPPCGDGGRRLPLPPSPPGVPLLGHLPLLGTLPHRKLRSMAEAHGPVMLLRLGRVPAVVASSAAAAEEVMRTRDLAFASRPRVRMSERLFYGRDMAFAPYGEFWRQARRVTVLHLLSPRRVLSFRGVREQEVAALLDRVRRRCGGGGETVNLSDLLMSYAHGVISRAAFGHGGAHGFDGDEGGEKLRKLFADFEGLLGTMTVGEFVPWLAWVDKLTGLDAKVARTSAAMDGLLERVIADHRERRRSRGQAVGDGEADADHRDFVDVMLDVSEAEEGAGAGAGGVLFDTVAIKAVILDMMAAGTDSSFTTTEWVMAELINHPRVMRKLQDEIRAVVGTSSASAAAAATGGGQVTEDHLGELPFLRAVIKEMLRLHAPGPLLLPRETVEDTELLGYRIPARTRVIINVWAIGRDAAAWGDSAEEFVPERWLDGGGGGGVEYAQQLGKDSRFVPFGAGRRGCPGAGFAALSVELALANLLYHFDWELPPPAASGIMATTRLDMDELFGLSVRLKADLNLVAKPWAAWHEGDEDIPGDVCSEEQITAEGVGGHLATGRDSCGGDRWQIGSPRKASVATWRREDFVRRGSVDQDGDRRRRESWQRTGDGDRVGRAGGGDRWQIGDADDGAAADREGSTDGGALSGVSACGSGILAVAQK

SEQ ID NO: 125803 - protein, 114 aa, Oryza sativa
  Clone ID: PAT_MRT4530_28411C.1.pep
QYLQYLYQGPIVLSPWDQVKRNAVPITPTLNREQLSTSEENSKKTVDMESTEVFTKKTKLTEEEKNRLNFLKKISQRYQKFALPQYLKTVYQHQKAMKPWIQPKTKVIPYVRYL

SEQ ID NO: 125804 - protein, 118 aa, Oryza sativa
  Clone ID: PAT_MRT4530_28412C.1.pep
MADQLTDDQIAEFKEAFSLFDKDGDGNNNNHHHHLVLSFSISICSLDRSLSFAHAGRLAPVALPPPRGCPSFLASSGGRSDPGTDLDGNRSLSSSCVSSGELSDMDATLICCADLTIS

SEQ ID NO: 125805 - protein, 516 aa, Oryza sativa
  Clone ID: PAT_MRT4530_28413C.1.pep
MCVAVAVLVAGTVWLCASSAGFMGGPYGGYRVQVHLVYRVERFSMLPLKLHQCNGKYMRNTLRVKQIKFYVLTCTPPAETNGYLRVRCNGGLNQQRSAICNAVVAARIMNATLVLPELDTNSFWRDKSGFPGIYDVPHFLKTLKHDVHIVTSLPGIMSKGKTKKLKAHKIVPPRDAPLSWYTTLALEEMKKYGAIYLTPFSHRLAEDIDDPELQRLRCRVNYHALRFKPHIMKISNEIVNKLRSEGHFMSIHLRFEMDMLAFAGCIDIFTPEEQKILIEYREKNFAKKILVYKDRRIIGKCPLTPEEVGLILRAIGFDNSTRIYLASGEIFGGDRFMSPFRAMFPRLDNHSSVGPEKLEENTRGLAGSAVDYMVCLLSDIFMPTYDGPSNFANNLMGHRLYYGFQTTITPNRKALAPIFMDREEGHVTGFEDRVRQVMFNTHFGGPHKRIHPESFYTNSWPECFCHMNPMNPSDKCPSDDPHDVLGGQLQNEEIEDVDLKTTDKIESITQIEETMI

SEQ ID NO: 125806 - protein, 49 aa, Oryza sativa
  Clone ID: PAT_MRT4530_28414C.1.pep
PGCRGFETLQRYRNRFVCSMMTCRYFDCLTSYSVSFSMDYCLPNFILLF

SEQ ID NO: 125807 - protein, 160 aa, Oryza sativa
  Clone ID: PAT_MRT4530_28415C.1.pep
AEEDEVDPADEEFFQEQVNLERHGLVPVGTSSGRDSHWPRMLRPRITPDAAACGHGAIHRRFGHDARRGGYRQSGNDGVVVHRPIGVMTWAQLASEEIVLLVRHQIHLVVPWCGLSFNAMVSAGVQNDHRRRRQSARQAQRLQSKHGQREVLRSSDAVRG

SEQ ID NO: 125808 - protein, 97 aa, Oryza sativa
  Clone ID: PAT_MRT4530_28416C.1.pep
MVTAARRGAARQWRRDVSDDGATADGRATTGSLWPSPPGSGGQPLSPATDPAREAGRRRRASAADDDEAGAAATTRSMTGQISARKKAIDRLGKCSV

SEQ ID NO: 125809 - protein, 47 aa, Oryza sativa
  Clone ID: PAT_MRT4530_28417C.1.pep
SVLNKYRICAVPVADELDPGTSYECGDRECKCDFCASSIGADEHGLH

SEQ ID NO: 125810 - protein, 135 aa, Oryza sativa
  unsure (1)..(135): unsure at all Xaa locations
  Clone ID: PAT_MRT4530_28418C.1.pep
QPLLSSIDSSLKLAHDACANIGSIIXXCHEEISELKGGHXHRVVEITENXGKCLEEEYLVDEPSCSTPRRRQIDLPSMESIEQLRTPDYDELLKSFRESRASLKQANGDMKHFLEVQEATPPSITDPRAPLIARN

SEQ ID NO: 125811 - protein, 87 aa, Oryza sativa
  Clone ID: PAT_MRT4530_28419C.1.pep
HYNSKQQPKRGGTTTPQPQQGPPHPRKARRGEAKHRLGLGSGQSRHHPIEAPEGDPQTLGQDKWPALEKELLPTQTASNKTRGRPDG

SEQ ID NO: 125812 - protein, 126 aa, Oryza sativa
  unsure (1)..(126): unsure at all Xaa locations
  Clone ID: PAT_MRT4530_2841C.1.pep
VAVRAASYQQALRHYHEKRIRARTLSIGDYVLRRVQSQAGRKXNKLSPKWEGPYTITQVLRPGAFKIADGDGRNIETYPHVPLRRLDKASEEPKGKTMISACSTEAGQRSKSLIFREEFSDDKAGG

SEQ ID NO: 125813 - protein, 645 aa, Oryza sativa
  Clone ID: PAT_MRT4530_28420C.1.pep
MEPSRRLLLSDYDGAIVSPLPSPPPSSATPFRPGVAVVVGILTSVFSITFLLLLYAKHCKRNAAESSGPYGSGGAFGSSGGGGAGERRNSGVDRAVVESLPVFRFGALRGQKAGLECAVCLGRFEPTEALRLLPKCRHGFHVECVDTWLDAHSTCPLCRSRVDPEDVLLLPEPPKPSTTGPPDPPETKVAAAAAAATAKDKEASLAPAAPAPSPAFRGFFSGRHSTGSVRAPGRVGPASRRSADLVGGDGGAVVGCFEAAKVRKDRVLLMEPAAAVAEPDPEAYDRRFGHRILVSTAGGCEDETAPAAKQRWSEVRPSDLMFVRSEMLVTEAGRVQLETITSRALFLSTIGCYYYPMVNMHVSRRQSGDVIVVRVSLIETWRTTDDDVLSRSSLLGGPDEHDVREHLLDVDGVGEEGAAAAAGPKIRVRGLTRRSEARGEEILRGVDLDVPRGVVVGVIGPSGSGKSTLLRALNRLWEPAPGAVLLDGVDICGIDVLALRRKVGMLFQLPAMFDDKNYFEKYFYCGRNYNYPKLPKVVFEGTVADNVRYGPQLQGKKLTDAEVLLLDEPTSALDPISTQNIEEAIVRLKKTRGLTTVMVSHSVKQIQRIADLVCLLVAGEVVEVLPPSELSEAKHPMARRFLELS

SEQ ID NO: 125814 - protein, 151 aa, Oryza sativa
  unsure (1)..(151): unsure at all Xaa locations
  Clone ID: PAT_MRT4530_28421C.1.pep
FNVKNAAVKDMKRGSVASNSKDDPVKEDVSFTSQVIIITHPGQIGIGYASVLECXHTSPIAVKCNELAIKIPSRSGKELEKEPKFLKSDNAGMVQMIHTQLMDVETFYEYPPHGSYAVRNIRQTVAVGVIKTAEKKYSTGPKVAKAAAKKK

SEQ ID NO: 125815 - protein, 85 aa, Oryza sativa
  unsure (1)..(85): unsure at all Xaa locations
  Clone ID: PAT_MRT4530_28422C.1.pep
IEVRRRDVLLRGDCRPIGWLLGLPFALLAVVVSFIGAIIWIVGLXSSCICPCCLCCXTCCLEVAVELVKAPLHVHDLVHLPRYPG

SEQ ID NO: 125816 - protein, 87 aa, Oryza sativa
  unsure (1)..(87): unsure at all Xaa locations
  Clone ID: PAT_MRT4530_28423C.1.pep
CRCEAITHMLGGFYRELGAPNVGPPMSKVFRGSRKGHLEGAAASLPAFXKVDIPNGEGGVCYWLAKSGYKLGYCTNLCMNVVWLLKK

SEQ ID NO: 125817 - protein, 168 aa, Oryza sativa
  Clone ID: PAT_MRT4530_28424C.1.pep
TERPARLYQIGSIFHLPRDPYGYNPRPLEERGPTTHSHHPNQHTRTIEATTSNQHTQDKPRDIALGISTASPLRCLWILSGETKVLSLTSRGMTSRGKTTLLSITSQTYSPPCRHQLDRLPQILTGLTYVLVPTIPILCKYRNRDFKRRLKSYQVVWPHAFYITKFQQ

SEQ ID NO: 125818 - protein, 333 aa, Oryza sativa
  Clone ID: PAT_MRT4530_28425C.1.pep
MHTTLASYAQDLAMPAAALDLLPDKAHQPSMAPSLHAWDSPNGAPTPMPKRLEGKVAIVTGGARGIGEAIVRLFVKHGAKVVIADIDDAAGEALAAALGPHVGFVRCDVSVEEDVERAVERAVARYGRLDVLCNNAGVLGRQTRAAKSILSFDAGEFDRVLRVNALGAALGMKHAALAMTQRRAGSIISVASVAGVLGGLGPHAYTASKHAIVGLTKNAACELGAHGIRVNCISPFGVATPMLINAWRQGHDASTADDADADIDLDIAVPSDQEVEKMEEVVRGLATLKGATLRPRDIAEAALFLASDDSRYISGHNLVVDGGVTTSRNLIGL

SEQ ID NO: 125819 - protein, 106 aa, Oryza sativa
  Clone ID: PAT_MRT4530_28426C.1.pep
MTIYESMIRSQQVHRTMRGLAGRSMIGPGQDAFLRATAYSAGPGGPQTRALQNSEISWMRFPCLLAAAMATISAISRWLTPTHANAMDPGCAPKGYSSYAPGLELI

SEQ ID NO: 125820 - protein, 47 aa, Oryza sativa
  Clone ID: PAT_MRT4530_28427C.1.pep
MGKLNRWGRRVLEVPICLCDYMGIYDGAQHVSEEEDEPSRTNREQSR

SEQ ID NO: 125821 - protein, 89 aa, Oryza sativa
  Clone ID: PAT_MRT4530_28428C.1.pep
SSTDLKFDAATNSPAPFEQFCWHGGSHLILKTEKPNFPQWAWKTWKGLQFIVLNISHNNFTSLGSDPFLPLYVEYFDLSFNSIEGPIPW

SEQ ID NO: 125822 - protein, 540 aa, Oryza sativa
  Clone ID: PAT_MRT4530_28429C.1.pep
MKELADAAEACLPVPLGLPRLHVGPDERGKDFVHEAVIAGNKQLVRSSSNRRVGIIKPNSPKSPVASASAFESVEGSDEDDAKQPNDFVSLQILYYSKPSNRQEINEGEQKGNKVLENGAAAPLAAASLIRSHSISNDLHGVQPDPVAADILRKEPEQESFIKLLTAPHEIPSPDEIEVYKLLQKCLELRDCYLFREEVAPWEKEVINDPCTPKPDPNPFTYVPEPKSEKFKFHLMLNADREFLAQKTAPHRDFYNVRKVDTHVHHSACMNQKHLLRFIKSKLRKEPDEVVIFRDGTYMTLKEVFESLDLTGYDLNVDLLDVHADKSTFHRFDKFNLKYNPCGQSRLREIFLKQDNLIQGRFLAELTKQVFSDLTASKYQMAEYRISIYGRKQSEWDNLASWIVNNELSSENVVWLVQAHIIGEWGLAGWDMGGWIEEKVIIRWLCTHEEAHNLRARFDQVEKFSNIYNTKLVSLDIPRLYNVYKEMGIETSFQTLLDNIFLPLFEVTNNTVSLRDLDFGEMRCVVVYLNNVILPDEVDQ

SEQ ID NO: 125823 - protein, 468 aa, Oryza sativa
  Clone ID: PAT_MRT4530_2842C.1.pep
MEGGGGGGTDMNAVPDGVVQHVLSMLSNVRDVAACACVCRRWRECVPYLPALFFPRNAFDTAAAAGGAADDAIGRMVRSVERLRELVIYCPFSMARLPEWLALRSTSLRVLELRMDAAAADKAEDGGYLDCIGLARGLEELRLWGVSLTAAPAWGRLDKLRVLEIVGAPLEDSAVKDAISACPNLTDLSLLGCDCSGAVSIELALLERCRLDFLGAGNCSLSLAAPRVESLEVQGFTWITLRGGHSLRRLSIAKSTGRVYKVDTGKLPDLEHLSLRGVQWSWAAVSSVLQCARDVKHLVMKIEFSGDFDALQPFPEVDLVDFFNSHPNLRKFDIHGAMFAALCQKNSLKNLDARFCIPCLEEVLITVRSPLNAEQKLNTLESLVKYSVRLRSMVIRISQMKNCHDAADDFFEEIFKLKQHLRLICHWDLVCSGQNGLRLYSIWYGIMVYLLPLDVLRYLIKTWNICCA

SEQ ID NO: 125824 - protein, 1012 aa, Oryza sativa
  Clone ID: PAT_MRT4530_28430C.1.pep
MSSSTKRVAHHLPSLLLTAMYILLQVQATTNTARTVVPPVRCHPDQASALLRLKHSFNATAGDYSTAFQSWVAGTDCCRWDGVGCGGADGRVTSLDLGGHQLQAGSVDPALFRLTSLKHLNLSGNDFSMSQLPVITGFEQLTELVYLDLSDTNIAGEVPGSIGRLTNLVYLDLSTSFDRAEYNDDEQVTFDSDSVWQLSAPNMETLIENHSNLEELHMGMVDLSGNGERWCDNIAKYTPKLQVLSLPYCSLSGPICASFSALQALTMIELHYNHLSGSVPEFLAGFSNLTVLQLSKNKFQGSFPPIIFQHKKLRTINLSKNPGISGNLPNFSQDTSLENLFLNNTNFTGTIPGSIINLISVKKLDLGASGFSGSLPSSLGSLKYLDMLQLSGLQLVGTIPSWISNLTSLTVLRISNCGLSGPVPSSIGNLRELTTLALYNCNFSGTVHPQILNLTRLQTLLLHSNNFAGTVDLTSFSKLKNLTFLNLSNNKLLVVEGKNSSSLVLFPKLQLLSLASCSMTTFPNILRDLPDITSLDLSNNQIQGAIPQWAWKTWKGLQFIVLNISHNNFTSLGSDPFLPLYVEYFDLSFNSIEGPIPIPQEGSSTLDYSSNQFSSMPLRYSTYLGETVTFKASKNKLSGNVPPLICTPARKLQLIDLSYNNLSGSIPSCLLESFSELQVLSLKANKFVGKLPDIIKEGCALEALDLSDNSIEGKIPRSLVSCRNLEILDIGSNQISDSFPCWLSQLPKLQVLVLKSNKLTGQVMDPSYTGRQISCEFPALRIADMASNNLNGMLMEGWFKMLKSMMARSDNDTLVMENQYYHGQTYQFTATVTYKGNDRTISKILRSLVLIDVSGNAFHGAIPDTIGELVLLRGLNLSHNALTGPIPSQFCRLDQLESLDLSFNELSGEIPKELASLNFLSTLNLSNNTLVGRIPDSYQFSTFSNSSFLGNTGLCGLPLSRQCDNPEEPSAIPYTSEKSIDAVLLLFTALGFGISFAMTILIVWGSHMRKRH

SEQ ID NO: 125825 - protein, 90 aa, Oryza sativa
  unsure (1)..(90): unsure at all Xaa locations
  Clone ID: PAT_MRT4530_28431C.1.pep
FCRQLTFVGEGGGRVLQRSTTMVGGIYXELGATDVGHPMAEVFPGCRRGDLLRAAVNLPGGXGGGISNXTXFVCYWVGYXYTSITGHLST

SEQ ID NO: 125826 - protein, 150 aa, Oryza sativa
  Clone ID: PAT_MRT4530_28432C.1.pep
MAAFNKLGSFLRHSGLTSSASAGSSPAMFNAARLMSTKLFVGGLSWNTNDDSLKEAFTSFGDVTEARVINDRESGRSRGFGFVSFANGDDAKSAMDAMDGKELEGRSIRVNFANERPPGNRGGGGYGGGGGGYGNQGGYGDGNRGYGGQY

SEQ ID NO: 125827 - protein, 39 aa, Oryza sativa
  unsure (1)..(39): unsure at all Xaa locations
  Clone ID: PAT_MRT4530_28433C.1.pep
LSKTIKQATNXNITITRQTLYHPPRGSHHPAGSTILIIQ

SEQ ID NO: 125828 - protein, 148 aa, Oryza sativa
  Clone ID: PAT_MRT4530_28434C.1.pep
MASKRIQKELMDLRKDPPTSCSAGPAGEDLFHWQATIMGPSDSPYAGGVFFVNIHFPPDYPFKPPKVNFQTKVYHPNINSNGSICLDILKEQWSPALTISKVLLSISSLLTDPNPDDPLVPEIAHVYKSQRPRYEETARAWTQKYAMG

SEQ ID NO: 125829 - protein, 52 aa, Oryza sativa
  Clone ID: PAT_MRT4530_28435C.1.pep
QQNNGWQFIYLVIFYPKADLKGFCPIKNLLEPFVLDWRECPKPISFIKLNPL

SEQ ID NO: 125830 - protein, 110 aa, Oryza sativa
  unsure (1)..(110): unsure at all Xaa locations
  Clone ID: PAT_MRT4530_28436C.1.pep
FFFFFSNGILFAENWDLMTHFTSWSRMARRDIAXATACAGQVLALSIAPQPPPXPPPPLACLPQPSWTWQPMTGRQPTVQQPETDSHRTWHVQXGGALQWPYRPSAVLPP

SEQ ID NO: 125831 - protein, 104 aa, Oryza sativa
  unsure (1)..(104): unsure at all Xaa locations
  Clone ID: PAT_MRT4530_28437C.1.pep
RRDPREPTRDDGSRXRSERREERLAWRSRWLQSAREWCAAASVTASSFRREEAAQSSGXXAXGRGRGAGDEXTGXDGDGAGEEXARGEGGGHRGGAAERRSAVR

SEQ ID NO: 125832 - protein, 218 aa, Oryza sativa
  Clone ID: PAT_MRT4530_28438C.1.pep
MAHPHRLVAVLALILLASPAAMRAAEAACAGEKFPAGRAYAACEDLPSLGAALHYTYDASKSSLSVAFVAAPAGAGGWVAWGLNPTGEGMAGTQALVALKGGSSSSAPAVKTYNITGYVALGGASTPIAFPATDLAADEGSGGKIRLYGKLQLHKGMKSVNQVWQVGSSVTGGAPDKHAFGPANLASKAKLVLAGSKAATATSPALAVAALVGFLAIV

SEQ ID NO: 125833 - protein, 263 aa, Oryza sativa
  Clone ID: PAT_MRT4530_28439C.1.pep
MAHPHRLVAVLALILLASPAAMRAAEAACAGEKFPAGRAYAACEDLPSLGAALHYTYDASKSSLSVAFVAAPAGAGGWVAWGLNPTGEGMAGTQALVALKGGSSSSAPAVKTYNITGYVALGGASTPIAFPATDLAADEGSGGKIRLYGKLQLHKGMKSVNQVWQVGSSVTGGAPDKHAFGPANLASKAKLVLAGSKAATATSPASEPAPAPVAGGPAPSSGSDSGASSSVAPTAGKNAATTAAAVSAPALAVAALVGFLAIV

SEQ ID NO: 125834 - protein, 61 aa, Oryza sativa
  Clone ID: PAT_MRT4530_2843C.1.pep
TYLNPHKVTKKKFGPIKNTFLYLYHLGKREANKNSFQTSGTPGGPQCGQSAKKPGFAICSF

SEQ ID NO: 125835 - protein, 87 aa, Oryza sativa
  Clone ID: PAT_MRT4530_28440C.1.pep
LAQSSISYNGRGGGARCLGISAGYGGLCSGGERYRVRLLLLSSSATLTSTCISARNIQNICIYHKTDVYSRVSLPGKDAHGSMHTSH

SEQ ID NO: 125836 - protein, 70 aa, Oryza sativa
  Clone ID: PAT_MRT4530_28441C.1.pep
MPRPRFLCRCAAGSRAAAPLFPCRRSTAFVPPYGTVATAVVAVAAVEAGDEASEDPYAYYQEGDEDDGAQ

SEQ ID NO: 125837 - protein, 169 aa, Oryza sativa
  Clone ID: PAT_MRT4530_28442C.1.pep
FRGLTVRDELEFGEPMQDVFFCLQHAEGLKFPLLFMVNALVHKGIINQHQLTPEFFSLLGRSEENVNVAALRDFWGDKFPVFDACGRLKKALNRVARNPKLLCSKVGDDHAEVRRLVITPTRAYCLPPEVERSNRVLRHYHEVADRFLRVTFMDEGMQVLNNNVLNSFT

SEQ ID NO: 125838 - protein, 62 aa, Oryza sativa
  Clone ID: PAT_MRT4530_28443C.1.pep
MARSRAPSLSTWTRRCCHHVVTAWRPGSAPLWPRRRHSQAQQMRKKMEMDGKSDGIGMIPIL

SEQ ID NO: 125839 - protein, 69 aa, Oryza sativa
  unsure (1)..(69): unsure at all Xaa locations
  Clone ID: PAT_MRT4530_28444C.1.pep
LTPTPLKPSPPPXPPTRPACRLPLSAPPPNAFPSPQLTPPSSPPPPPPPHXPPPPVPASTSSSDIKEVP

SEQ ID NO: 125840 - protein, 511 aa, Oryza sativa
  Clone ID: PAT_MRT4530_28445C.1.pep
MARMGISKGGSGKEAKKPPLLLGRFEVGKLLGQGNFAKVYHARNVATGEEVAIKVMEKEKIFKSGLTAHIKREIAVLRRVRHPHIVQLYEVMATKLRIYFVMEYVRGGELFARVARGRLPEADARRYFQQLVSAVAFCHARGVFHRDIKPENLLVDDAGDLKVSDFGLSAVADGMRRDGLFHTFCGTPAYVAPEVLSRRGYDAAGADLWSCGVVLFVLMAGYLPFQDRNLAGMYRKIHKGDFRCPKWFSPELIRLLRGVLVTNPQRRATAEGIMENEWFKIGFRRFSFRVEDDRTFTCFELDDDAAVDAPTSPPDTPRTVDSGDVGAAPTRPRKAGSLTSCDSAPSLLEGRFGLGGSSRRRSSLNAFDIISFSPGFDLSGLFDQDDGGGAGAGSIPEQQKHTARFVSAAPVEVIVATLEAAAAAAGMAVREREDGSISMEGTREGEHGALAVAAEIYELTPELVVVEVRRKAGGAAEYEEFFRARLKPSLRELVCDDRPCPEDSGELSRSL

SEQ ID NO: 125841 - protein, 390 aa, Oryza sativa
  Clone ID: PAT_MRT4530_28446C.1.pep
MQTCSSYILSRAQAFNTQELISLERLTEASSWKRTAAAGPDGGDSAAHENGSMLALLPAEAVSLPAIGGGGGGDGIIAYDSGWAALVGLWEPHARQRTAAGDPTYRVRDDSLVEVLLLSPGSLEHSRCSEEFHITTAYQDLIEQFENNELIKHPRVSEFCAGVTDSESLAARVVNFANQVKLVLGYVTSLLEIKQCPRANTEKGKHVVHLVSNKSKLAKKNQGCSPRRWEKPHAGWMKLNVDGSFDLNSGSGGLGVMLRNSSVKSIFSASGFIERCSSPLEAELIACKEGIIMALQWTLLPIIVESGCLVAVNMIQAAKEERSQFAHLIRDIGNLISGDREVLIQKIYRTQNCISHFLANKARAKLCTEFWPDETCNIISQFVCEEAASE

SEQ ID NO: 125842 - protein, 70 aa, Oryza sativa
  Clone ID: PAT_MRT4530_28447C.1.pep
MVDPSTACAMQRRLHVHPTLLKLVGRAGGQAPWIHIDSSRSSSLHWFLFCAHLYLFHPNVYLPPLASPLG

SEQ ID NO: 125843 - protein, 62 aa, Oryza sativa
  Clone ID: PAT_MRT4530_28448C.1.pep
MVHQVGWRKMTLVRVEISSEGNRLGIAFVPEESLEKREKRKEDLIKAESEAEIEFGNRAGIG

SEQ ID NO: 125844 - protein, 46 aa, Oryza sativa
  Clone ID: PAT_MRT4530_28449C.1.pep
VSTVTHPLYALCLTYELLYCYNSVPDTAEGGNAMRVHYRSKGRYPM

SEQ ID NO: 125845 - protein, 108 aa, Oryza sativa
  unsure (1)..(108): unsure at all Xaa locations
  Clone ID: PAT_MRT4530_2844C.1.pep
MQLNPKARTRRNKTKVKGWRCVEIVLNVTLSMCGNHLEAPQSNPTSHIKLYCXDRLHQLTXSDSDSADLIIADLDSSRSLLCFRXDLRLRLRFDLIFFPNADITKFGR

SEQ ID NO: 125846 - protein, 748 aa, Oryza sativa
  Clone ID: PAT_MRT4530_28450C.1.pep
MSGCLLIRAIARRGTLPQNSSDVSKSIVGQVQAEEQEGNGQANQQAVQQHMILAGQLSQPKSLTEEPNSFQFAEKETGYAGLQNFTGPKVDVGQTSGEQQHVKQMVGQQAPPGAQDARKRGYQPSIPFNMLIPILQAHLDRDKDMQLQTVWAKLRRNEVHKDDFLRVIRNIVGDQMLKQAAHKVFAQMQAQAQRSGQANANQQANANQYSLQSQVSSSGSAQLHDQQVHVSTTPNQGQKNQALSSSQTFVQSGTQVQSSMTAHDNSIQRPDAKGMHVTPNRPPVMNSAISAQTMNKQQQPTQVQQASQQIYGTTNRPDQPYTRPIGGSTPLSSLSSESEIRPSSHPAKMEILPSHPMTQQNAAAQQMQQNKDVKTNASNPRSNAKQDSGTGKGRAVGTGGSSTKSQGKQGPPNFSTPPAAKSNKKTAGQKKSLETSGSTPPPPSKKQKTSGTFQEQSFDQLNDVTAVSGVNLREEEEQLLSAPKEESWASEEARKIAQEEDGKLFLQKGPLLKKLAAIVPKCNLKSIGGDVEHCLSMRIDTEKSGHQLVITSDVGRQILRMNQKAKEEWDKKQAEETDKNKKQNEVDGGGTVELDKEKEETRSKNAKPNKEEDDKMRTTAANVAARQAVGGSDMLSKWQLMAEQARQKREGLDLAASSQRGTASRSHMAGKGPTDHHEASKRTHSAAFGTGGMNRQGRGPFAASHPKGPQRTISMKDVICVLEREPQMTKSRLIYRLYERLPGDSTRD

SEQ ID NO: 125847 - protein, 103 aa, Oryza sativa
  Clone ID: PAT_MRT4530_28451C.1.pep
MAAEEEARWSRYRVFLRPMWSNNRGSPWEHTKVKALYHHDTIGEKKEKENSFMRVCCTLAGQVEYFFAEIHGFAKFLTNINIIRKFYLNPLNTSKSHMHSGGV

SEQ ID NO: 125848 - protein, 41 aa, Oryza sativa
  Clone ID: PAT_MRT4530_28452C.1.pep
MSFALTLPRGRFVSILAPPAISPPRSPPPLRPTARSALFHS

SEQ ID NO: 125849 - protein, 164 aa, Oryza sativa
  unsure (1)..(164): unsure at all Xaa locations
  Clone ID: PAT_MRT4530_28453C.1.pep
MAPGERRATMRAVQYSGXRGGAAALKFVEIPVPSVKKDEVLVKVEAASINQSDLMTQKGMMRPFHPKFPFIPVNNVSGEIVEVGSAVREFKVGDKVVSKLDFWTXGGLAEYVATSDKLTVARPAGISAADAAGVPVAADSAPGAQGIGTKFDSGPRGPTLTRAH

SEQ ID NO: 125850 - protein, 72 aa, Oryza sativa
  Clone ID: PAT_MRT4530_28454C.1.pep
MREPAGRWRRGGGIAGGHRGEASLVPPPASSVPDQQEKLSVSELQQSLALLARNVHNQLPVQQRSLYDSAST

SEQ ID NO: 125851 - protein, 74 aa, Oryza sativa
  Clone ID: PAT_MRT4530_28455C.1.pep
MAKPACTLMAREAENGIHDPMKGPIDQCLSIGPAHPHATTGHLLVGTLAFSSSVSEGDSKTKLITVELRTMMSY

SEQ ID NO: 125852 - protein, 100 aa, Oryza sativa
  unsure (1)..(100): unsure at all Xaa locations
  Clone ID: PAT_MRT4530_28456C.1.pep
MMVVMVGMVGNTLQPSLGLHLNRPAKTWIQRRRGRFGRTTRFGRTXGQPNPAQFRLEAFSVVLLHRLVNFGPIHRVNYEFLAHSYTSLVLDIVRLIYRLS

SEQ ID NO: 125853 - protein, 93 aa, Oryza sativa
  Clone ID: PAT_MRT4530_28457C.1.pep
MKCKPQTSASVVADFQWLGFFLVSPNQSTRKRKEDEGMAQFLIILVAWEIWKHRNEYAFNVATSNIEEVLPAIAREGGLWCTAGATSLQGVGS

SEQ ID NO: 125854 - protein, 248 aa, Oryza sativa
  Clone ID: PAT_MRT4530_28458C.1.pep
MAYASCVPVCRRHRTARGPPSSSPRSPAMNPMPEAGRPLPPPPSSSPPCLRPAAVVPAVASDGSALPAVAGDGSALLAVADDGSSPPAPPFPALPPPPAMPSPLSPMPPPLCQCRLRRCRHHRRPSRGRRHRQEWVEGEREREREREREWVGEASSPIRLVHHLVEGRARARHRTVGHAQCPGLRAPASRARAPPPAPGQPPPNAFRPKYSEPPSPSSIHAFRLPARPAAATTLHPSRLRTRPRAGQI

SEQ ID NO: 125855 - protein, 46 aa, Oryza sativa
  Clone ID: PAT_MRT4530_28459C.1.pep
MEIDRTNTVNEQTPQTPKETTTGSGNRRPREGGGRHQGGMVGLERN

SEQ ID NO: 125856 - protein, 108 aa, Oryza sativa
  unsure (1)..(108): unsure at all Xaa locations
  Clone ID: PAT_MRT4530_2845C.1.pep
MQLNSKARTRQNKTKVKGGRCAEIVLNVTLSMCGNHLEAPQSNPTSHIKLYCXDRLHRLTXSDSDSADLIVADLDSSRSLLCFRXDLRLRLCFNLIFFSNADITKFGC

SEQ ID NO: 125857 - protein, 355 aa, Oryza sativa
  Clone ID: PAT_MRT4530_28460C.1.pep
MGPLHLQSPFLLWSPAPPTPPLPPSPPSKTRRPPPPPPPFCPHLSVPCVGLPLPPPCPPPPGAIRFPLWHGAATIPASSVCRSVRGHFVEHLPHVEGRVPGDGEGAFAGVPPEMLPPKKRLLRYHPYAAAWTIQEMANHAREQGGFGGKRPAVPTPPGVEEDDGLRAELRRLRISRPALVLTKRLTPSDRSREKARLVLPEGLVRTSPLLGMLTAGERHLVLTGDGGGLPVPAFDRLGRAYAMALKRDRSPTCRSYRLTGQWSLFASRHAMHDGDAVEVRAFRPPAWQARLESRGEGGLGMALLLRRPRGQPTPPAAVNDAAFWSYRERGAADGLLLLARTAPRRGDGGVQITVP

SEQ ID NO: 125858 - protein, 776 aa, Oryza sativa
  Clone ID: PAT_MRT4530_28461C.1.pep
MATTSTSSLLPLLPSRTPTPTPRRRLPFAAAAAAAAAPPRPFLVSSPPPPPAPRARLARRAAAGGLYGGGGGEEEGDGEDGEMEEEYYDDGDEEGDWEDDDAEEGEEMDVEAMEEEALGAVADLSERLSRELRIDDDVRDKRRIIRDKTSASKHIPDNLLPRVAIIGRPNVGKSALFNRLVGGNRAIVVDEPGVMEELAITTTVGMDGIPLASREAAIARMPSMIEKQAVAAVDEAAVILFIVDADIEIADWLRRNYSDKHIILAVNKCESPRKGQMQALDFWSLGFSPLPISAITGTGTGELLDMELDGVEEDGNYIPAIAIVGRPNVGKSSILNALVGEDRTIVSPVSGTTRDAIDTEFTTEDGQKYKLIDTAGIRRRAAVASAGSTTETLSVKRAFRAIRRDRFVHHTDRLDISNDPAQLNLPRPIPRGGFPATPTPSSSDELSLATGARTDSPNGMGGSFGWLEFLLSTSHPCEDDAAEELPVEPPVAAMDAAHDGRDEVRGEVPSEPSEVLAGEEEAAMDAAHDGRGEVRGEVTFERAIGASSRAGYEGIKLGEEPSLKPAMVGAPEIKMIEIAEASSVAQWDLLAGTEDCSPEINPKIVDLQQQQQEASLLPDEVISEADASILAQYSSVTKKDDDAEFLICRPNFGFVTRPQQHTPKKRHPKNKRAMGINLLYQLLFDLKELMELCGQADKIQSEVFLKKAMKKACRDSDDAVADIVFQALKVDGFILRLLRYLKSQFNFCRTQAWKIRNEILRIGGTPINDPLSKDSP

SEQ ID NO: 125859 - protein, 218 aa, Oryza sativa
  Clone ID: PAT_MRT4530_28462C.1.pep
PNTDNLLTKGKLSGWAAVRLHHRAVRPGSRPPPRAPGRGGRTGPRRPSASPQVAAGQGMELASRGGRQSPPHSRRPRRPGAGTAAASLPVGSRSRRGETAMRARGKDWGRAPSRTRDGWAGGDISTEAESPTTPTASPPAPTRAVRSTSAQRQPANWTTAQHLQDSSGWLVRSSEFRATIIQTRPFPGIFSNPWPIAAPLIPILQNKIWMSVTSCQFS

SEQ ID NO: 125860 - protein, 453 aa, Oryza sativa
  Clone ID: PAT_MRT4530_28463C.1.pep
MHSTGMEMEVEVAGDDEAVPEAPERSVVLISAGASHSVALLSGGVVCSWGRGEDGQLGHGDAEDRPVPTVLTAAFDDAPGGVASVVICGADHTTAYSDEELQLYSWGWGDFGRLGHGNSSDVFNPQPIQALQGVRITQIACGDSHCLAVTVAGHVHSWGRNQNGQLGLGNTEDSLLPQKIQAFEGVRVKMIAAGAEHTAAVTEDGDLYGWGWGRYGNLGLGDRDDRLIPEKVSSVNGQKMVLVACGWRHTITVSSSGSIYTYGWSKYGQLGHGDFEDHLVPHKLEALKDTTISQISGGWRHTMALAADGKLYGWGWNKFGQVGVGDNEDHCSPVQVNFPNEQKVVQVACGWRHTLALTEAKNVFSWGRGTSGQLGHGEIVDRNIPKMIDALSSDGSACKQLESSKAVPMSAKVWVSPSERYAIVPDEKAGKGIPAGNGTETHVPQGDVKRMRV

SEQ ID NO: 125861 - protein, 249 aa, Oryza sativa
  Clone ID: PAT_MRT4530_28464C.1.pep
MAPHSTSGAAACSTSDAGHPAPSPASALHSTSGARLPVPGQRRERRDTSRVAERQSAATATVPATFADGRGALKSGGCPALVSLPASSFFADNLVGGFLLTTLADTHLGRRKMLVLSLATMPVSVLSWLLMGRFNRRSSVVELTAASGLCSLACVVIPADPEASTGGLRLAAELSSFASCETTRSSGARVVTTPTTASHQLPPRRSATPSWPWPRRRTQLAAGACAAAPGRRLAPPHVSCLLLRRALAW

SEQ ID NO: 125862 - protein, 180 aa, Oryza sativa
  Clone ID: PAT_MRT4530_28465C.1.pep
MAVKEVQALRKEFDAQQAGKAVQVLGQALLKVSFGTQEYKREEEILFDVVDIPYNYNAIFGRGTLNKFEAVSHHNYLKLKMPTTSEGDRRMPFGLRNVGATFARPVYKVLVPQLGRNIEAYIDDIVVKSRKAFDHASDLQETFDNIHAAGMKLNPEKCVFGVCAGVGLALYRPLSTSNSG

SEQ ID NO: 125863 - protein, 63 aa, Oryza sativa
  unsure (1)..(63): unsure at all Xaa locations
  Clone ID: PAT_MRT4530_28466C.1.pep
EKRAVLDTLLFTLEFVNEGHPDKLCDQGXDAELGAXLVEDHDSKDACETWTKTNMDMVFGEIT

SEQ ID NO: 125864 - protein, 115 aa, Oryza sativa
  Clone ID: PAT_MRT4530_28467C.1.pep
MLEVDNSCQLLELEVGDNRIKPFLAQYKYHGQIGLATAHPNFSLKSSTSARDARGWLRPFAATTHEGAPAESRVLAAPREERSAPLTHKSAAVARAVRFQVFSLEPSEAIQLNLS

SEQ ID NO: 125865 - protein, 195 aa, Oryza sativa
  unsure (1)..(195): unsure at all Xaa locations
  Clone ID: PAT_MRT4530_28468C.1.pep
KMDGVVVFADENSILRTELFDEAQKVKSVGAVPVGVLGEDEGTSETFLQAPSCDAEGKLVGYHVSEETMLPANRGDMLLSSRLEWAGFVVNAQALWEGGGAASRPEWVSDIDAIDDGAAXSPLSLVTDAARVEPLASCGQAALAWSHRSDALHEVKFPHEWKIDPPVVTIASRQQDAKPETPLKRTTLLNTEGQH

SEQ ID NO: 125866 - protein, 471 aa, Oryza sativa
  unsure (1)..(471): unsure at all Xaa locations
  Clone ID: PAT_MRT4530_28469C.1.pep
MKLPLLRPLWPMLAXRAGSPDSPPEPSKPSLPAAWLLLHALFCATSMXAVGFRFSRLIVYLLFLPTPINPTAHLVSLVSPPVMLAXAANATTTITTTTTTTTTTVTTTTVAAEVGAHPQHHHHGPVFVGRHPIRVRPWPHPDPNELLKAHHILAAVQNGRQRSSRRRGAGPPRPVIAVTPTTTSALQVPSLTSMAHTLRLVDGPLTWIVVEPEHHTDAVAAVLSRSNLNFLHITGPDSSTSRLRMHALREIRKRKMDGVVVFADENSILRTELFDEAQKVKSVGAVPVGVLGEDEGTSETFLQAPSCDAEGKLVGYHVSEETMLPANRGDMLLSSRLEWAGFVVNAQALWEGGGAASRPEWVSDIDAIDDGAAASPLSLVTDAARVEPLASCGQAALAWSHRSDALHEVKFPHDTLAVSSKLHGSDLGFDPDTMARWKIDPPLVTIASRQQDAKPETPLKRTTLLNTEGQH

SEQ ID NO: 125867 - protein, 108 aa, Oryza sativa
  unsure (1)..(108): unsure at all Xaa locations
  Clone ID: PAT_MRT4530_2846C.1.pep
MQLNPKARTRRNKTKVKGWRCVEIVLNVTLSMCGNHLEAPQSNPTSHIKLYRRDWLHRLTXSDSDSTDLIIADLDSSRSLLCFRXDFRLRLRFDLIFFSDANITKFGC

SEQ ID NO: 125868 - protein, 236 aa, Oryza sativa
  unsure (1)..(236): unsure at all Xaa locations
  Clone ID: PAT_MRT4530_28470C.1.pep
EFGLTLTSLTNLLTQKERPWTMVAYRMGDDVDGIFRSVAEYIIGDGADNRYWTTNWTGNGCFAWRWPILYSYVGHSRLSVAQAMVNHRWVRDLQGSLFNEALGDFFQLWDEVHDVALQPNADAIRLKLTGDXGQFSAASAYDLFFMAKEDCPYGEMLRHSRLQSTIESLFFHXLALKGRCLTADNLAKRNWPHDEVCPLCQRDNEDCHHLFVACNFTIAVWRLMRSWINVDFPIPW

SEQ ID NO: 125869 - protein, 516 aa, Oryza sativa
  Clone ID: PAT_MRT4530_28471C.1.pep
MRKPHHAAQPPPPPPLPLPLPLPPRNCPLATAVLALLSVLLATALWVLLVLSPASHARGPAAGLSDAADAEAFAVAGGGGGGGGEGAEAPLSLGHIVFGIAGSAHLWPRRREYVRMWWDPAAMRGHVWLDAGAPAAPGPSASGEGSLLPPIRVSEDTSRFRYTNPTGHPSGLRIARIAAEAVRLVGGGGGGARWVVLVDDDTVVSADNLVAVLGKYDWREMVYVGAPSESHSANTYFSHSMAFGGGGVALSLPLATALARTLDVCIERYPKLYGSDDRLHACITELGVPLSREYGFHQWDIRGNAHGILAAHPIAPFISIHHLELVDPIYPGLNSLESLELFTKAMKTEPMSFLQRSICYDKRQKYTFAVSLGYVVQVYPYVLLPRELERSERTYIAYNRMSQRTEFDFDTKDIQKSLCKKPILFFLKDVWKDGNITRGSYIRASVRDDLKNKVFCFRSPPLPDIDEIQVSASPLSKRWHLVCSNIPNNISYLVSTFTLANCRTPDIGTKKVMQCA

SEQ ID NO: 125870 - protein, 45 aa, Oryza sativa
  Clone ID: PAT_MRT4530_28472C.1.pep
CLNCSRGGRKKMHWPSWEWLSTPKYLGGMGFRDLVLLKLRYLVCP

SEQ ID NO: 125871 - protein, 833 aa, Oryza sativa
  Clone ID: PAT_MRT4530_28473C.1.pep
MAADLGKQIFSQIGHNIVKNALIHQWVSLGFIEESNIFSTRQLSERYIKQLLGLSFLQLSKSPLTAGLYHEDVTLFTMHDLVHDIARLVMVDEILLDNKQDNSGGISYHYALLSNCFKPLESSTGYLAKIRALCFTNCREFRLSDGAFSSGKSLRVLDLSDCSIQKLPDYIGQLKQLSSLLGIPQALHGLAKLEYLNLSLQNGEIHQDKLPLIGLPEVIGSLTNLKYLNLARCMDYVFGSPSTDQTDSFIGSISTFSNLEHLDLSKNKILCSIPESIGSLRMLHTLNLSGSSMLARLPECLTKKESLKVLNVMGCKLFEAKLPQSNFLFTLPHFVVHTGEGQSSSNLPLLEHAILDEFLELSRLENVKSTQEARSIKLIEKESINSLNLEWTGGADRFVEDMNVLGEMVPPNTLKKFVIEGYRASAFHPGITLWDLPKCNSLPPFGQLPNLGEITLGRMHGIRRIDKGIYGGPGAFPRLIGFHLWAMHSLEELDFRDDLQTQVMFPMLQDMEISDCPKVRLKSSPPNAGNWTIILSDNVLSSRVERCHTSASSSSAVACLSDHLCKLVPMHQWVLLCHLPPLLHLHIDGCGDLSSASPEIIRALSSLKSLILEDNEKAEGLPRWLGELTCLQGLSLVGFQKLKDLEGNMRQLTSLQSLNLDGCSIMESLPQWLELTSLENLRLRYRKNLNDLQQTMCDNLTSLQPLTLEKCVRTPSLPERMGNLNSLKELKDDQAEQPRLLGGITCVQHLSLEGFPDLLDLQGSMRQLTSLTSLHLYQCDSMTSLPQWLGELASLKWLTIKDCGKLNDLQETMQHHLPTVTRIGSLPQNSLSA

SEQ ID NO: 125872 - protein, 91 aa, Oryza sativa
  Clone ID: PAT_MRT4530_28474C.1.pep
EGGNGIFQGRFFFKAYQIFCYASMPSWKEWVEKLGPFSSIPDPQLEEVRRGYRVWKAGFGRVKMGKKSVSSGLFVAKPFAQLIMGLIKFFG

SEQ ID NO: 125873 - protein, 64 aa, Oryza sativa
  Clone ID: PAT_MRT4530_28475C.1.pep
LRLHQPAASSAADWCFRRRHGWPVMTPIDAIFFTAGYIAVAANRRQHLQHKLPTSAADWFLFFH

SEQ ID NO: 125874 - protein, 406 aa, Oryza sativa
  Clone ID: PAT_MRT4530_28476C.1.pep
MPSAIAACFRCAPSAAAAASAASGPAGPSLATSVYETHLGLAALSWTRTSLGLSLRAVLRLSSPATAASVGTCFDEDADEETLAFRVRPWLLWRRRGTRRFRAAGDRRVDLAWDLTRARFPGSGSPEPSSGFFVAVVVDGEMVLAAGDLSDAAYRRTRARRPAGPRPVLLSRREHVAMRDAGRGGRGHRSWVTVRGKEREISVDLVSRGRGRDTGSSGSSSREKDRADVGLSVSIDGERVLHVRRLRWKFRGSERVDLGGGDRVQLSWDLHNWLFPQREPPTTDAAAHAHAHAVFVFRFDLGGGGEEASEHAKALCDKAPRRDAAGILRGYFARWGQKDWSETGSERRKRGRGRRLAKASSSSSASVASSTASWASGSTVMDWASPEEAEMQRGDGFSLLIYAWKS

SEQ ID NO: 125875 - protein, 65 aa, Oryza sativa
  Clone ID: PAT_MRT4530_28477C.1.pep
INQHHSTLDPPRSNDIFLLEQTWWLLFKLSYIRDWQSGSWELFKYGCSKIKHSMDHIGHMFIEIH

SEQ ID NO: 125876 - protein, 59 aa, Oryza sativa
  Clone ID: PAT_MRT4530_28478C.1.pep
MVPRQILRGLRSLKEWPAPANRKPMIHHAQHHARDIVWSTRLHTIDLCSGRATSQRYAT

SEQ ID NO: 125877 - protein, 373 aa, Oryza sativa
  Clone ID: PAT_MRT4530_28479C.1.pep
MTPLARRLLHASSPAAAGGEPGVLACRLASRAVVRFAGPEAGRFLRSLLTNDLLLSSSSQQRYAPTPNAPARAPPPAYAALLTPQGRFLYDLFLYRPPPPSQLLDRTGSAPLTGERPKGNQEDEGEDEPGEVLADVDAAEVDELLACFKRYRLRSKVEIDNVSKEFLCWQRFGRNVEHTGPSTQEPEAQSIGWGQGVDHAAESAAQAPLVESDKEADERHYLLWRIENGVAEGSTEIPKGEAIPLEYNFAGLNAISFEKGCYIGQELIARTHHRGVIRKRLMPLIFEDENGQELKQAVAPGSEVVDKESGKKIGTVNTALGSRGMGLLRLEEALKQNSSLAIKDNRDVRVKAIKPDWWPVEWTQMLEQQSAVA

SEQ ID NO: 125878 - protein, 108 aa, Oryza sativa
  unsure (1)..(108): unsure at all Xaa locations
  Clone ID: PAT_MRT4530_2847C.1.pep
MQLNPKARTHRNKTKVKGWRCAKIVLNVTLSMCGNHLEAPQSNPTSHIKLYCRDRLHRFTXSDSDSADLIVADLDSSRFLLCFQXDLRLRLHFDLIFFSDADITKFGC

SEQ ID NO: 125879 - protein, 68 aa, Oryza sativa
  Clone ID: PAT_MRT4530_28480C.1.pep
EKHNVMCGFFCPGHSKSNAPVSSGGSECNVQAASSNLVIPLLSALFNLGIQSLSVLLKAGYKLGRIVR

SEQ ID NO: 125880 - protein, 1047 aa, Oryza sativa
  Clone ID: PAT_MRT4530_28481C.1.pep
MQPLQFSNKNYSNRFPITSFGLALALLLFLASPTSSCTEKESNSLIQFLAWLSKDGGLGMSWKNGTDCCVWEGITCNPNRTVNEVFLATRGLEGIISPSLGNLIGLMRLNLSHNSLSGGLPLELVSSSSIMILDVSFNYLTGDLSDLPSSTHDRPLQVLNISSNLFTGNFPSTTWEVMKSLVALNASNNSFTGKIPTSFCASAPSFALLDISYNQFSGGIPPGLSNCSTLTLLSSGKNNLTGAIPYEIFDITSLKHLSFPNNQLEGSIDGITKLINLVTLDLGGNKFIGSIPHSIGQLKRLEEFHLDNNNMSGELPSTLSDCTNLVTIDLKKNNFSGELTKVNFSTLPNLKTLDVVWNKFNGTIPESIYSCSNLTALRLSFNNFRGQLSEKIGNLKSLSFLSLVKNSLANITSTLQMLQSSKNLTTLIIAINFMHETIPLDDSIDGFENLQVLSLYGCSLSGKIPHWLSKLTNLEMLFLHDNQLTGQIPIWISSLNFLFYLDITNNSLSGEIPTALMEMPMLKTDNVAPKVFELPIFTAQSLQYRINSAFPKVLNLGINNFAGAIPKEIGQLKALLLLNLSSNKLSGQIPESICNLTNLQMLDLSNNNLTGTIPEALNKLHFLSAFNVSNNDLEGPVPTVGQLSTFPSSIFDGNPKLCGPMLANHCSSAQTSYISKKRHIKKAILAVTFGVFFGGIAILVLLAHLLTLLRSTSFLSKNRRYSNDGTEAPSSNLNSEQPLVMVPQGKGEQTKLTFTDLLKATKNFDKENIIGCGGYGLVYKGELSDGSMLAIKKLNSDMCLMEREFSAEVDALSMAQHDNLVPLWGYCIQGNSRFLIYSYMENGSLDDWLHNRDNDASSFLDWPMRLKIAQGASQGLAYIHDVCKPNIVHRDIKSSNILLDKEFKAYVADFGLSRLILPNKTHVTTELVGTLGYVPPEYGQGWMATLRGDMYSFGVVLLELLTGRRPIPVLSASKELIEWVQEMRSKGKQIEVLDPTLRGTGHEEQMLKVLEVACQCVNHNPGMRPTIREVVSCLDIIGTELQTTELN

SEQ ID NO: 125881 - protein, 129 aa, Oryza sativa
  Clone ID: PAT_MRT4530_28482C.1.pep
AIGIITEITSVAPIQTCIRDGESLKRSIYISDADNVTINVALWGDRATSFPANDILEAGQKRNVSLSGNSACKWYINLDKPEVAALKNSIKGNYEPIKYIDLPASSDAPNNAEQKKIIEIKDLHPFKFK

SEQ ID NO: 125882 - protein, 567 aa, Oryza sativa
  Clone ID: PAT_MRT4530_28483C.1.pep
MAAAAVAANGGGDGAQASNAPAPTRLASVYSEVQTSRLKHALPLPSVLRSPFALADGPASSAAGNPGEIAKLFPNLFGQPSVSLVPSPEPASTRPLKVGVVLSGGQAPGGHNVICGIFDYLQEYAKGSVMYGFKGGPAGVMKCKYVELTADYVYPYRNQGGFDMICSGRDKIETPEQFKQAEDTVNKLDLDGLVVIGGDDSNTNACLLAEYFRGKNMKTRVIGCPKTIDGDLKCKEVPTSFGFDTACKIYSEMIGNVMTDARSTGKYYHFVRLMGRAASHITLECALQTHPNVALIGEEVAAKKETLKSVTDYITDIVCKRAELGYNYGVILIPEGLIDFIPEVQKLIAELNEILAHDVVDEAGAWKSKLQPESRQLFDFLPKTIQEQLLLERDPHGNVQVAKIETEKMLIAMVETELEKRKAEGKYPAHFRGQSHFFGYEGRCGLPTIFDSNYCYALGYGSGALLQCGKTGLITSVGNLAAPVEEWTVGGTALTSLMDVERRHGKYKPVIKKAMVELDGAPFKKFASLRDEWSLKNHYISPGPIQFSGPGSNDANHTLMLELGAEA

SEQ ID NO: 125883 - protein, 73 aa, Oryza sativa
  unsure (1)..(73): unsure at all Xaa locations
  Clone ID: PAT_MRT4530_28484C.1.pep
DGQRRWGAASGWGVLRASRVDDSARREQCKAPESYYSILGVVXQRRDWENPGVTQLNRLAAHPPFASWRDSEE

SEQ ID NO: 125884 - protein, 394 aa, Oryza sativa
  Clone ID: PAT_MRT4530_28485C.1.pep
MDSTSCLLDDASSGASTGKKAAAAAASKALQRVGSGASAVMDAAEPGAEADSGGERRGGGGGKLPSSKYKGVVPQPNGRWGAQIYERHQRVWLGTFTGEAEAARAYDVAAQRFRGRDAVTNFRPLAESDPEAAVELRFLASRSKAEVVDMLRKHTYLEELTQNKRAFAAISPPPPKHPASSPTSSSAAREHLFDKTVTPSDVGKLNRLVIPKQHAEKHFPLQLPPPTTTSSVAAAADAAAGGGDCKGVLLNFEDAAGKVWKFRYSYWNSSQSYVLTKGWSRFVKEKGLHAGDAVGFYRAAGKNAQLFIDCKVRAKPTTAAAAAAFLSAVAAAAAPPPAVKAIRLFGVDLLTAAAPELQDAGGAAMTKSKRAMDAMAESQAHVVFKKQCIELALT

SEQ ID NO: 125885 - protein, 63 aa, Oryza sativa
  Clone ID: PAT_MRT4530_28486C.1.pep
MGSGEQTRRFPMSRTQQGSGEAWSRAPVTRNSGGGIRRREQAGMTTVAMAVTTLVAVLTTMTS

SEQ ID NO: 125886 - protein, 56 aa, Oryza sativa
  Clone ID: PAT_MRT4530_28487C.1.pep
MSQSATHRYQFATKKLGLSSPVLRFLRNARPKRGGASRRRRATVRRRPRPTSHRPK

SEQ ID NO: 125887 - protein, 1004 aa, Oryza sativa
  unsure (1)..(1004): unsure at all Xaa locations
  Clone ID: PAT_MRT4530_28488C.1.pep
MRIMIKGGVWKNTEDEILKAAVMKYGKNQWARISSLLVRKSAKQCKARWYEWLDPSIKKLCSPHAILLQAYTAFEGLMTEWTREEDEKLLHLAKLMPTQWRTIAPGVGRTPSRYLERYEELLHGACEKDGNYEPNHERRKGRPGEIHPKPEPKPEHHDAVDMSNADDDELRRADSPRAKXQGNDQVVMLERNSISQDGDTANCKNGSXLNDGGIDTRKXERHRKGIDYNADVRFDKSPPPGFYYTVGEDSTHEHAQFPTIIEXFKIXRREDIEAQLRKQDFLRSKIIQRQVALAAFAQAIKLKVPXSVTKRSKLKLLPPXNSYHLLVGTANMGNGGDTSLVEELGEGSTATRALLSSYSQTPRLAMTWVRTPQRTPAGKGDAIMMEAENLARLRESQTPLLGGDNPELHPSDFSGVTPRKKEMQTPNPMATPLASPGPGATPRIGMTPSRDGSSFGLTPKSTPFRDELRINEEVDMQDTAKLELRRQAELRKSLRSGFASIPQPKNEYQIVMPPITEEEKEEAEEKIEDMSDRLARERAEEQARQEALLRKRSKVLQRSLPRPPAASIEILRQTLIKGGESRSRSTFVPPTSLEQADELINEELLRLLEHDNAKYPLDEKTQKDKKKGSKRQANGTPSVPEIEDFDEDELKEANSMLEEEVQYLRVAMGHESESLEDFVKAHDACQEDLMFFPNNNSYGLASVAGNSDKIAALQYEFEIVKKRMDDEAKKASRLEQKIKLLTPRIPGRLGMMHHKHCNMYRAGKLWSQVQDTFKQMDTSATELECFQELQKQEQMAASYRIRNLTEEVNKQKALERTLQSRYGDLLTSYKRIQEQLEEHKRQLMIQEEMEAQKRAQEEEEMEAQKRTQAEEEKEAAKAEEEARKMDRAADEEAAGSKQVNEDQMDVDNSNADGDEFVGPIPPGPGTQGDDNVVAVEENSSSQSGDTATTEDGSCGMIDASKSGGQDHIDSKDELPTVGASLDDGSAAASSDQDVSTEVNATVPE

SEQ ID NO: 125888 - protein, 108 aa, Oryza sativa
  Clone ID: PAT_MRT4530_28489C.1.pep
MAVELDELYEMRTISRCSAEDTGTQWLSFPSRRHGATTAGCGRDGRPSPSLPLPLPVGLDGDGALSTAASTATTASASSEGGSVGGGGHRGRIRRRCSLLCLSSSSSG

SEQ ID NO: 125889 - protein, 90 aa, Oryza sativa
  Clone ID: PAT_MRT4530_2848C.1.pep
PLWPPPPKGGSPFAQGIQFSPPVFRGRGGKPPPLNGVGLGAPKQFGGTTPPHLRGSPFFFPPRFRVLVLVFLNTFVIGFGRLLCVNPGFG

SEQ ID NO: 125890 - protein, 91 aa, Oryza sativa
  Clone ID: PAT_MRT4530_28490C.1.pep
ATLLANRSLCLLRLSTGIRGYLLMLTCCRMLRPSWPKACYRQGAAFMFIKDYMQACEAFADGLKLDPANEDIAKALRDAQEAMKDQMEHRG

SEQ ID NO: 125891 - protein, 311 aa, Oryza sativa
  unsure (1)..(311): unsure at all Xaa locations
  Clone ID: PAT_MRT4530_28491C.1.pep
EESAKNIKFILCLXFENMSGLKINFDKNELIIVGLEKEKEXKFCSILTCKIDQGGLGILDLFRXMKVALLGKWLXKLENDEGLRQSMLYDKYLKNKTLCLDKHKTGDSQFWSGLLERXIQDFFFLKYCRKEVRNGTMTLICEDIWIGDRTLAEQFRELYNITFTKIVTIAKVFEMGWDAFEFRRTLGGDMAVKXNINKSXCNGKILQNGKDKLIWTLTKSGVFTVKSFYYAMKGHRSCNTYCRGSQLAMKLQDSGYPFKKIWRFKIPIKIKVLIWLALKNSILTKDNLIKRGWRKGTAKCQFCNKHESINH

SEQ ID NO: 125892 - protein, 60 aa, Oryza sativa
  Clone ID: PAT_MRT4530_28492C.1.pep
MENTCCFLHQFTARVVARVAFPCPGTRANLLVCRAQNHDDAAVLRRAVLAHLAGATGVGG

SEQ ID NO: 125893 - protein, 114 aa, Oryza sativa
  Clone ID: PAT_MRT4530_28493C.1.pep
MGRQHDKGDCREWCGGGGYGSSRRAHGLRWGCCHGISSRGSGDGGVVRLTGDEALARWLRVEGGRVVGCCFRIDLDSGEQKDHGQKPSLGASNDHVCGHRFSLEAVAILLGGIV

SEQ ID NO: 125894 - protein, 155 aa, Oryza sativa
  Clone ID: PAT_MRT4530_28494C.1.pep
MASLPAPIASTPGSTPPSSLPSTSPPPPPAANATEDQPSSRQLVYDLAVDLSFRNAHRRLSIRYLDTKLGPADDALPLFRQNPKNTTVLHPAFRGVVAVDGGTAAELEREAAEGTVHVKKVQFDSHNIDSIRYGSRSCIPETKYIHYSTIKTGVE

SEQ ID NO: 125895 - protein, 119 aa, Oryza sativa
  Clone ID: PAT_MRT4530_28495C.1.pep
MAKCVKHTNQGVLFFFLVLVVCSSIPTQARGQTASKIGSNMLMGVKKAASIGVKLNVCAVTAGGFYCCSKDQLCYPTLEQCLPKCNYKEKGCAANQPTMVPIHKTMMGRKTKPSNLSQK

SEQ ID NO: 125896 - protein, 155 aa, Oryza sativa
  unsure (1)..(155): unsure at all Xaa locations
  Clone ID: PAT_MRT4530_28496C.1.pep
GRREARCARDNENSFRHRVSSRRHDNEERGGRKKEDRDRDNRHNRYDHDDRERRVLXDTGRERRHXDDDDEDRRRDTNGRRRQDSREPDRRPRNRTPEPSDPSSSSSSSSSSSSDRYPRRTYDRRQPIAPSAGXRAFSRSLRDVXWPERFRPGAI

SEQ ID NO: 125897 - protein, 607 aa, Oryza sativa
  Clone ID: PAT_MRT4530_28497C.1.pep
MEFAVGSGSVRDLPPSKRFKYVGGSSLGMAPCLPARKRLCPPMLEAAAAAAAAVPVCLPAKKRAYAAAAAVEGGGFALCLPAKKRAYAPPVDDAVAPACLPAKKRIHAPPPPPPDSGASPSVPTTKRVDTLPPAAADKAAISPSIPVPVRKRVHAPQPPPAPAPEKAAVSPSIPVPAKKRVSATAAAAATDASPRVPFKDLVNTLPPPRDAAVSPSIPAKKSARAPPSPKDTAAPVSVCLPSNKRVMPPFLPPSPPPSKESDGARVAAVKEAKPQGSNKRGATTNSSVANGVEDDYARAEASKIQEKPKIPEKPINHEEIKEQVSKKQRSNTCRESKDQECNQSCSAISAKQSEVEALEKACKAIDLNEAAREEDSWDGERVAREPTQEAMAAAAEEEVEEEDDGVHCAVCGSTDGDPSDPIVFCDGCDLMVHASCYGNPLASFIPDGDWFCSVCTAAAAKKSKGNKPPPPPPRCCLCPARGGAMKRTTDARWAHIACALLVPEVFFRDPDGRDGVDCSRVPAHRFATACYVCESGGGCALECSQPRCGLGFHVSCGLDAGLCIEYQEAKAGGGGGGVVAGFCLEHTKLWEKQQLTGKYKIVSRGQK

SEQ ID NO: 125898 - protein, 170 aa, Oryza sativa
  unsure (1)..(170): unsure at all Xaa locations
  Clone ID: PAT_MRT4530_28498C.1.pep
SAERYPLSLSLLVRLPPPISFVLSAVFRSLEFLSDFVVVADDGGWQIPSPPPTPPPQHPQSGATLHQRRPFCPLNGAFWSRLCAPGPEISPAAHGMACAHRGTTRSSRSNLRRHTVDSYPITDLAIIPCDXILATLLFRKTYSRSTQLSLRGRLVGAIVPAVTDLRLNAG

SEQ ID NO: 125899 - protein, 520 aa, Oryza sativa
  unsure (1)..(520): unsure at all Xaa locations
  Clone ID: PAT_MRT4530_28499C.1.pep
EQHLHLVLKKLQEHQLCAKFSKCDFWLXRIARPMIQLLKKDEKFKWAAECGKSFEELKKKLVSAPVLILPDQTKDFQVYCDASRQGLGCVLMQEGQVVAYASRQLRPYESNYPTHDLELAAVVHPLKMWRHYLIGNRCEVYTDHKSLKYIFTQPDLNLRQRRWLELIKYYDMGIHYHPGKANVVADALSRKSYCNALGIGDMSDKLLQELEHLNLGIVEHGYVAALEARLTLVDQVRAAQAVPKEEAGLPNHHSRLSLASRATSPTSPPSPAPPHHRCPPLRHRRRRSGRCKPLLPSRAVDAVTFAVVRAASSTSPLSESTARTPPSLRAGSLEARPPLVVRRPPLAAPFAVATAAPPLSTASPPPSAGRRRCRTVAECPLGRLNPSVRAAACCPAVAATSAPRQHHVVPASLPVREPGFVRAVEDACGVVFPLQSKSRLSSTSMQLHAVGCSACAAQPPRAAPSRPATARRLLLRPHVSYPSSLGRREMLRPPSAVAPPTAPLCPPLAVLYESGIERGG

SEQ ID NO: 125900 - protein, 642 aa, Oryza sativa
  Clone ID: PAT_MRT4530_2849C.1.pep
MAAAATAANLAGKQGVRVVVIGDPGTGKSSLVVSVATEAFPENVPRVMPPTRLPADYFPDRVPITIVDTSSSPEHRAKLIAECQAADAVVLTYACDRPATLERLSTFWLPELRRLQLKAPVIVVGCKLDLRDEQQVSLEQVMAPIMQTFREIETCIECSALRQIQVPEVFYYAQKAVLHPTAPLFDQEAQSLKPRCVRALKRIFILCDHDRDGALSDVELNDFQVKCFNAPLQPTEIAGVKRVVQEKMPEGVNDNGLTLTGFLFLHALFIEKGRLETTWTVLRKFGYDNEIKLRDDLIPTIKRAPDQTLELTGQAIDFLRGIFNMFDTDNDDALLPAELDDLFSTAPENPWSNNPYVDCAERNVLGGLSLEGFLSKWALMTLLDPANSFANLIYVGYSGDFGSAFTTMRKRRVDRKKQQTQRNVFQCYVFGPRGAGKTALLQSFLGRQPSDALPMNGERFAANTVELSGSRKTLVFREIPEDDVRPLLADRESLAPCDVAVFVYDSCDEFSWQRTRDLLVEVATHGENTGYEVPCLIVAAKDDLDQSPLALQESTRVSQDMGIEMPIPISVRLRDLNNIFCRIVHAAQQPHLSIPETEAGKTRRQYRQLLNRSLMVVSVGAAVAVVGIAAYRVYAARKNTSS

SEQ ID NO: 125901 - protein, 270 aa, Oryza sativa
  Clone ID: PAT_MRT4530_284C.1.pep
MDSGRRRAGADGRRVLEATGYGDESSAQAGAAEAAGDESSSGRAQRAALVAQRARWVAPRRALEAVRYSDDVAMCTAARYPAPPSASASRTVAAGLRCGRRGAAGDARDEGGETGCGPCGLHFHRRAGGRRGSRGKTKQIERHFTAFRSCHDALRLHPRQVAVALCHGQTRPLLVAAAMDEAAAVAHGADGRVDEDGRPRVSGRSGGSGQHAMESGAGKRGGSVSTAAPRPRSGGSVGASAFARLKTLGYYMLSISCESRLQKQIGPALR

SEQ ID NO: 125902 - protein, 61 aa, Oryza sativa
  Clone ID: PAT_MRT4530_28500C.1.pep
QGVLVPAKGSLKEPFKLGMAISISINSNKNEGSQIRAFIKFFRLRRSLDAEEYLVPILSLD

SEQ ID NO: 125903 - protein, 400 aa, Oryza sativa
  Clone ID: PAT_MRT4530_28501C.1.pep
MRSAMATASVVTYLQRPRELPVPEFRAPPPSPVTGVLTSSSSGSLAYGECPDSNEDDEIGRFLRRSARVPVLRLPERAVPRKKKAAWAPPVIDVRLLALPEAGGPVAEALRSAAVAFGCFQVVGHGVDRSLVSAALRHVAAATARAATPEPEEVEVNGDDENGEEMWWSPGDGGQEMAGNWALQSGASHFRNTADALFIQLEQTATKIMDVLQRGGAVATQSIAGADTNGSLLCIRKHRRRQDDRSGGASGPIRHDDILRMLVRSSRCSRALALHLCPGASAFHIFSRRGWSRFRPMDGAVVVTVGDQLQACNGGLYKSVAGKPAYSNDDLRGNGGDTGVASAELFYCFPSAGTAAGKASEVLSADAGKIIPLNLQFMVAACLVLGYHFLLSSLHSTWLL

SEQ ID NO: 125904 - protein, 150 aa, Oryza sativa
  unsure (1)..(150): unsure at all Xaa locations
  Clone ID: PAT_MRT4530_28502C.1.pep
TPPRALLNGVDPIPVNRGLVGAYSLTTSKGEKAAIAKPNDEXEPFAPNNSXGFTGKALGQPGLKRSARVEETGXREGAAYLGYYENTANGPRTAPAKIPHPVSNADEWVSPAKMAASXGLVQGPERQIASSQQLIPHDFDARGHGTSSFS

SEQ ID NO: 125905 - protein, 87 aa, Oryza sativa
  unsure (1)..(87): unsure at all Xaa locations
  Clone ID: PAT_MRT4530_28503C.1.pep
RKDMYGNHVCIGGSPMFLGIADRMSKETTALAPSSMKIKVVAPXRADXSVWIGGSNLASLSTLQQXMWISKGEYDKSGPAIVPRKCL

SEQ ID NO: 125906 - protein, 117 aa, Oryza sativa
  unsure (1)..(117): unsure at all Xaa locations
  Clone ID: PAT_MRT4530_28504C.1.pep
CRGGVVASGRRAAAAAWRGPASWRGXRPHCWRDIVAGGGRIEVGVGIVGAAESCLAATTSEAAATRRLAXEMRPRRRWRQRRTXDDGEIRRRRRRGDAPGSGGEGEAEREIDRGKNF

SEQ ID NO: 125907 - protein, 472 aa, Oryza sativa
  Clone ID: PAT_MRT4530_28505C.1.pep
MDGRPLLPNEEEEEALPGVSDFRGRPVYRATSGGWRSALFVAVLELAGSFAYFGVSANLITYLTGPMGQSNASAAAAGYGMLTVASSVVASKSQVGILYVSLYLVALAQGFDKPCGLALGAEQFDPEHPRESASRSSLFNWWYFSMATGITVSIATVSYIQENVSWGVGFAIPFAVVSCAFLLFLLATPTYRLSSAAASPLLSLRHYKQSSEEARRMLRLLPIWATCLAYGVAYAQIMTLFNKQGRTLDRHIGHAGLELPPAALQTLGPVTIMVSVPIYDRAVVPMLRRMTGNPRGLTTLQRTGTGMALSLAAVAVAAAVEGRRLETVREQRPAMSWAWLVPQYVAMGVADVLAVVGMQEFFHGEMPEGMRSLGLALYYSVMGIGGFISSALISALDGITRRDGGDGWFADDLNRGHLDYFYWLLAGVSAAELAMFLCFARSYAYRNANKGPLLLVVPSNTPVSPCTNHHHA

SEQ ID NO: 125908 - protein, 109 aa, Oryza sativa
  Clone ID: PAT_MRT4530_28506C.1.pep
SGEIKPLVVFKAFSMGGCRQGPSMISKMPMQAHVDALAQQLASSPALLIKTNFTASRMSLLPTDLANSPGVLLAAGEYTAQAADTGAAAHWRSTQARRPASSRGGRRHA

SEQ ID NO: 125909 - protein, 608 aa, Oryza sativa
  Clone ID: PAT_MRT4530_28507C.1.pep
MDGRPLLPNEEEEEALPGVSDFRGRPVYRATSGGWRSALFVAVLELAGSFAYFGVSANLITYLTGPMGQSNASAAAAVNAWSGAACMLPLLGAFLADSFLGRYPSILLACTLYLLGYGMLTVASSVVASKSQVGILYVSLYLVALAQGFDKPCGLALGAEQFDPEHPRESASRSSLFNWWYFSMATGITVSIATVSYIQENVSWGVGFAIPFAVVSCAFLLFLLATPTYRLSSAAASPLLSLRHYKQSSEEARRMLRLLPIWATCLAYGVAYAQIMTLFNKQGRTLDRHIGHAGLELPPAALQTLGPVTIMVSVPIYDRAVVPMLRRMTGNPRGLTTLQRTGTGMALSLAAVAVAAAVEGRRLETVREQRPAMSWAWLVPQYVAMGVADVLAVVGMQEFFHGEMPEGMRSLGLALYYSVMGIGGFISSALISALDGITRRDGGDGWFADDLNRGHLDYFYWLLAGVSAAELAMFLCFARSYAYRNANKGPLLLVGKRRLWVEWQASAWLAIAARRDRERASWQWKEGCDDDEGRRQRMGSSFAGRSWRRRIDNGDPQPRCLLQWRRRMCVGEEATEMEISNICDRDYLKSAVDVRWQREEGTLAPGAC

SEQ ID NO: 125910 - protein, 67 aa, Oryza sativa
  unsure (1)..(67): unsure at all Xaa locations
  Clone ID: PAT_MRT4530_28508C.1.pep
EMPSXTPPDDESIRTLYXGGLDXXVXEQDLRXQFNXHGEXETIRMVXQRACAFXXXTTRXGXEKAAE

SEQ ID NO: 125911 - protein, 121 aa, Oryza sativa
  Clone ID: PAT_MRT4530_28509C.1.pep
MRKREGGGQTDKTIRAVPHPNKQPEARPPPLPSPTPTNPPPPHRKENTGQPNPPKKGRRGETNQASEPTRQGGPPHTKPGPFLFQTKQAWARPTRPGPPPPPKPIKARTPTAGWPPPPPPP

SEQ ID NO: 125912 - protein, 157 aa, Oryza sativa
  unsure (1)..(157): unsure at all Xaa locations
  Clone ID: PAT_MRT4530_2850C.1.pep
WYXVRXXXGXXXEFXXXXNXXXKNXVLTTTYPMIDXDEPXXXNAXGTEIEWXXAXCLXXXVXXXXPANGXXXXKPXXXTXHCXXXFXXXXXPXVXXDXXEIXXXTAXQLPNXLXQDYXLGSTXXXXXIXXAVXWFAGEAXXHQXXXGIMDHXHHXHX

SEQ ID NO: 125913 - protein, 134 aa, Oryza sativa
  unsure (1)..(134): unsure at all Xaa locations
  Clone ID: PAT_MRT4530_28510C.1.pep
EFLRQHYSIAASPFLQSAXYQLXNNQILQQLRLAAQQSHYQNINVGHTIAHXLHLQQFGDLYIDRNLAQAQALLAFNLPSTYGIYPQVLLVATGLSHLPTPLCACSSVTWNYITHICKLPEGENISSGIIACDI

SEQ ID NO: 125914 - protein, 67 aa, Oryza sativa
  Clone ID: PAT_MRT4530_28511C.1.pep
CKNSTKQTWYKMLKLVLYSTGDSQVQVVVTILIALRTSYFREVVGYSPEKVSIRLPNQDMAFGMEYN

SEQ ID NO: 125915 - protein, 69 aa, Oryza sativa
  unsure (1)..(69): unsure at all Xaa locations
  Clone ID: PAT_MRT4530_28512C.1.pep
QLVLAPPAGYGAQPGLIAGKXLLTKVWAKLPSPQCLGDREESGKLRRRMNVTKLPPPNSQNDRTEDRAR

SEQ ID NO: 125916 - protein, 105 aa, Oryza sativa
  Clone ID: PAT_MRT4530_28513C.1.pep
MRTDYKESNRTDNTDEIVVEGLDKISRRVGSVDSGFVNFGGGGGSEFRPSGVVATNNGLPVSLHQNIVTLAKHAQTRSIAAPALAATKHDAPRSRQGLVEGWEHQ

SEQ ID NO: 125917 - protein, 44 aa, Oryza sativa
  Clone ID: PAT_MRT4530_28514C.1.pep
RLVLVDGKVRTDKTDPAGFMDGISIPKTGVNYKLLYDTKGRFRL

SEQ ID NO: 125918 - protein, 110 aa, Oryza sativa
  Clone ID: PAT_MRT4530_28515C.1.pep
MEMGKYSSSERKKGPEKDTSIRSATVSFSSSSSSAGTRPSCWRSVVTTATARRRCCGGDEHDTAARASVLHGDHHLGGIGKKVDASAGAGVRTLVERNDFYCQECNTHGK

SEQ ID NO: 125919 - protein, 52 aa, Oryza sativa
  Clone ID: PAT_MRT4530_28516C.1.pep
PPGFSPTSAILSIRAVSTGALRLRFVGDSRAGGTADTSDRPRSPACSASRRA

SEQ ID NO: 125920 - protein, 93 aa, Oryza sativa
  Clone ID: PAT_MRT4530_28517C.1.pep
ETASPCATAEHRNIILVQSCKDCSGALILKGCTNICFLLKQSHQSRCYFGTLRRFSLSVCMNRTAIVASTARTIPRSTDRPRVCPRVRESVRT

SEQ ID NO: 125921 - protein, 150 aa, Oryza sativa
  Clone ID: PAT_MRT4530_28518C.1.pep
MRRSGPLNQFKLGYSYLLSFVTLSSCYKARDNHTGKGEVGRQSRGSKKPAEQRGPSDEQWRGGRSPGTTGGVADPSEAGGRSLGRRSAEAVMLVEGGEAGEETTLGAHSGLHTTRADGEVKEATSGGEVEPPDGPWVGEVVVLVTGILEV

SEQ ID NO: 125922 - protein, 266 aa, Oryza sativa
  Clone ID: PAT_MRT4530_28519C.1.pep
MGAKTDKGKVRRSQGRGFGYGHPLPSVVGLPVAEAKRRIKQCRPDVYIEVLSEKLGCDIGEVAFHILNYFGSYRPMWASLLFGPKNIRLLYRADRVMALAIGIRRGHRYRRLAKCNKRHAPFLSRTDSASDGRSPVLLLHPFAIISAFSKCRGIIKAPEDEMTAYFQHGLVHAKRWIGYRFAVSSGRFGGLAGDCGTSRVQGASGFRKQLDLTTNFATQSVIERTVSAGATAGRSTKMEYSKLDLVQEWRFRLNSHLTATRGFTFS

SEQ ID NO: 125923 - protein, 577 aa, Oryza sativa
  Clone ID: PAT_MRT4530_2851C.1.pep
MYHAPVTASYHQSAWAKIGRIVNPYIHRYAPFLNTPISAAQRWWFSQGPSDGQNAQHRQGNRFALLPSASRGNDLSGGNTCISYMKERSNNIEEITWVQNCILPQPDRQADAERKILDDALDRKPQIDWVEEDISSWMDKSYTSSNLEYNLLMQNIQVLESSLAGKDLVRLERDILVHIERLGALKSFNASISRATLTQTYELEFSLPGDIIKLDPEIPLEEQNVVVIVRSGKSQERKLKRMKASEKGSRVSVKTPSRKSKKSSSSQFIAEWKNYPGRRRSIVREQSALLVTIKECANLEKIRENLLKDGSEVSHASWAKAAGIDEALLRSRLQEGYCCRERLLVTTEWLVKYIAKTYAGMGTAFEDLLQAGKMGVLNGAEKFDSQKGCKFSTYVKYWIRKAMLALLAENSGVIQLPARMEGIIRKVREARRAIRYNTGRNPPDAEIAALIGVSVANVRLARKCSRRVVSLYTEIGVGQNAKFVEVTPDTSLEAPDEAMFRMQLRERLLHVLDRLPPREGHVLKLRHGLEDGKCRSLEQIGSIYHVSKEWIRKIEKSAMSKLRNDDVHNELKDFCGF

SEQ ID NO: 125924 - protein, 126 aa, Oryza sativa
  unsure (1)..(126): unsure at all Xaa locations
  Clone ID: PAT_MRT4530_28520C.1.pep
SLTIRGKSNTGAWKHHIEVVIGSSTMGLSSSSLAIKATLKVFSEGRITMHKSEANTKPASYWSPWYGTNRVLYLGPLSXASLSNYLTCDFLGDYRWDTAWLFADPDTYCNNLELLVIHSTRAILGT

SEQ ID NO: 125925 - protein, 53 aa, Oryza sativa
  Clone ID: PAT_MRT4530_28521C.1.pep
DHASAHASGLLHTSIFCSVFFCLKKTSETLALLFNYENTGALRRALCGKQGDT

SEQ ID NO: 125926 - protein, 604 aa, Oryza sativa
  Clone ID: PAT_MRT4530_28522C.1.pep
MHIDHPWLRKTMRDPMADGAGGAKVGTPGLVLSAHHACYVFTVKLSNGDLPPVALEDDMIIEIWGLPARVHQALELVACHLRKYLVHRSVIPLFDPHVIMKMQVPIFYAEAVIGPTGARIDYIRQASGSSVVIKDLDDSAMSIEITGSAATDVQIAEQLIKDNNFLVDSGELCLIILLHVAAGASYLATRLARIHKLKMPCILCTRMDHALHGKPWFSSDLVCAAHRQLCSCCSEPFTKARNAHRISETASVSGEINREQIPADHSKDKAFVVGIEEVNESDSSPRTYEQSTKNNGASGNAGTAKLAPSGSTVPMRVFVDRNSSVKNGFISRANLSSPRPSQIISAKDSNSTTQQEVKAFLSQMSTVRGIDSSWSDGAPSPGINAQTDESNANGRRPSLERNYSVIEPSDANLADEVEGESSPENLKRLLELNKKSMSALYKELEEERSASAIAASQAMAMINKLHEEKAAMQMEALQYLRMMEEQADHDHEAIQNLHDLLTEREKELLDMDAELENFRRLVQNEQFNGGKHDIAGIMNETDMPFEVLNDLGYTKNTMSGDSQPFTRVEKNCNSEIIFPPDFTPSGHEAYMSGRLFPQEFVIRH

SEQ ID NO: 125927 - protein, 160 aa, Oryza sativa
  Clone ID: PAT_MRT4530_28523C.1.pep
MAAKNHARSQDFWRRFWSMLSYACSELCLIILLHVAAGASYLATRLARIHKLKMPCILCTRMDHALHGKPWFSSDLVCAAHRSEISSLAYCSSHNNLAQCDDLCKRCTVATNDVVDTWRSKSRQLCSCCSEPFTKARSAHRISETASDSGEINREHIPAD

SEQ ID NO: 125928 - protein, 173 aa, Oryza sativa
  Clone ID: PAT_MRT4530_28524C.1.pep
MSCTSPDPPDYCSAASPELKLYQAFIFSVPVFFTFVLLLFFYLFYLRRRRANWQSLRMRTNNLIRGDNPRLECGIKKEMREMLPVVVFKESFLIRETQCSVCLADYQPDERLQRIPPCGHTFHIDCIDHWLSTNTTCPLCRVSLLPSPKTASIDPVDLEAQTVEENSSLDEKR

SEQ ID NO: 125929 - protein, 221 aa, Oryza sativa
  Clone ID: PAT_MRT4530_28525C.1.pep
PRVRQADHDHEAIQNLHDLLTEREKELLDMDAELENFRRLVQNEQFNGGKHDIAGIMNETDMPFEVLNDLGYTKNTMSGLESELAYRSESISRLEDKLCVSTNRLASDDAKINQEGLIGGADFGSSPTHGESTSDQQDDGNKSVQNHKDNCSCSHPEDGKTSDANLKDEVSLLHTRLQALEADQEFLKHVLNSLRCSPDGLQCVQAIASHLLELRRIATQR

SEQ ID NO: 125930 - protein, 134 aa, Oryza sativa
  unsure (1)..(134): unsure at all Xaa locations
  Clone ID: PAT_MRT4530_28526C.1.pep
IICYSTSPGEDSQSIVQICGKILFVTAFFQKEKAIRDVTTRVXPGRARLHLAAFIGHRLPSQTNTSLFFTLCPYSCAPGKNFPVGHPSQIAPGQARLTLEFFGNRLREKKLQFVDMSILLILLSIRPGCYTLTP

SEQ ID NO: 125931 - protein, 381 aa, Oryza sativa
  Clone ID: PAT_MRT4530_28527C.1.pep
MASHLLLRLPAPPPLLLHFPQRRVTLPQSRVSPTAPLLGARLVFSPASAVRPARARGSSIGGAGEDDSDGEVDGAPRLVGEDSAAFRLGDQRVASWVYFGGILAVVLWGLNVLWIDPATGVGTRFLEAVAAVSDNHEVRRWLVISKGKKSVVTMLLLTIIFAVVHSGMASLRETGEKIIGERAYRVMFAGISLPLAVSTVVYFINHRYDGIQLWQVQGISGIHELVWLSSFISFFFLYPSTFNLLEVAAVDKPKFHMWETGIMRITRHPQMVGQVIWCLAHTLWIGNSVAVAASVGLIGHHLFGVWNGDRRLASRYGEAFEVLKKRTSVIPFAAVIDGRQKLPKDYYREFIRLPYLAITALTLGAYFVHPLMQASSYQLPW

SEQ ID NO: 125932 - protein, 159 aa, Oryza sativa
  Clone ID: PAT_MRT4530_28528C.1.pep
MVCLLLTRRAGRLPACTSATSGPARGRLHAPPAAVARQVPRWLPATAGRGRGEHGHHARRSPGLLPTRGEPDAPVTTAVRLPAGSRRRPNEDDAPRVGWMDWGRRDAVSVGMDGLGIILDCSGDRDRNWAAWWLAVTMATTTNEPAAASATPSTGGAMV

SEQ ID NO: 125933 - protein, 66 aa, Oryza sativa
  unsure (1)..(66): unsure at all Xaa locations
  Clone ID: PAT_MRT4530_28529C.1.pep
ERSEEDARRLYTEWKGKHGKSYNSVTKEEPWYTAYKDNLRYINXYNSASDAWVHSLRLSLKRFTYL

SEQ ID NO: 125934 - protein, 63 aa, Oryza sativa
  Clone ID: PAT_MRT4530_2852C.1.pep
ASQREEGALKKKIKRKEKRRDGIVELNIRELSMRSQRAQEESRESKKLTNWEGQLGVRKKKKL

SEQ ID NO: 125935 - protein, 72 aa, Oryza sativa
  Clone ID: PAT_MRT4530_28530C.1.pep
STLDLVKEACVDNPKCAISVSNDVLGDPRRGVLKNLSVEAKCSPQTSSKEPSGKMSFGIHHDTYVASKVRLT

SEQ ID NO: 125936 - protein, 55 aa, Oryza sativa
  Clone ID: PAT_MRT4530_28531C.1.pep
FGWKSLNRHLGNLRTPSVPKGIEMKRANEFFYPFPCPGCMCRSNKSDPFKSLRAR

SEQ ID NO: 125937 - protein, 67 aa, Oryza sativa
  Clone ID: PAT_MRT4530_28532C.1.pep
TDCTLLPFQNDQLELCMSNCMEGLFLLDQAHFLPHHSMSISQVMYQCYLFPSIFPPPCGYTSILYED

SEQ ID NO: 125938 - protein, 34 aa, Oryza sativa
  Clone ID: PAT_MRT4530_28533C.1.pep
KVYQLFGNYERIMLNHINVPRSLYITVNLGINLK

SEQ ID NO: 125939 - protein, 183 aa, Oryza sativa
  Clone ID: PAT_MRT4530_28534C.1.pep
YFSPDDASRLISRVLIRRPSVEIGETKPHLFPPSGGGGALPPERRPSSRERRPSPRAAAFLPRPAAAAPTRPCGGDGGVRRRRRTAPDNGIGGIRAPSATAVPTAASTATTACAAYAGRSVSGGGNRGRIRRRWWPLLPLAQWSRVDLTVVASTEGGSRNGGFLRRLSSPSGAVVAAEGGSGS

SEQ ID NO: 125940 - protein, 110 aa, Oryza sativa
  Clone ID: PAT_MRT4530_28535C.1.pep
WRPAPARAGTPRRGRRGGPPSTPAAAEAARRRGVRPGAAARRGRARRGRAGRRGAAGRAAAAPAPAAAAVSRSSTPTGTPSPPATSFLPSQREKRKSKMESLERERERES

SEQ ID NO: 125941 - protein, 45 aa, Oryza sativa
  Clone ID: PAT_MRT4530_28536C.1.pep
VAYLLAAFVVIIAIHWSLERGQWARRWPCPLLLVRGRLATRPRGD

SEQ ID NO: 125942 - protein, 63 aa, Oryza sativa
  Clone ID: PAT_MRT4530_28537C.1.pep
MALWGGLGQAATVAQLVGADIGGLITMIMQVAMTAAVGGAASHFGSRGQSREGARARPLRRLC

SEQ ID NO: 125943 - protein, 68 aa, Oryza sativa
  Clone ID: PAT_MRT4530_28538C.1.pep
MESWGRAPALDLGHGGALELTGAATLDPRAEADADGGKRRRGGRALTLSMVTSTTALNSLKTEGITED

SEQ ID NO: 125944 - protein, 252 aa, Oryza sativa
  Clone ID: PAT_MRT4530_28539C.1.pep
MTIHLPAWAIKAIDKIRRGFLWRGRKEASGGHRLIAWPIVCQPQEFGCFGIFDLKLLSYALKGEMALDAKKEPLKPWSTFPIRHIEEVAPRHFALVPKRKVNKRTVLQALTNRSWISDIQGAFSIVVRGFSWLMECPLLGDITTRVTGHTFLEVLNFRLTSSIKKRLQLKQKASSCACEHVGNTRNNGQSNAALAAILDQLKKMEITLGEHTATITRLESNKATTDRKAKGIYSHPGGGHNDGSSDGKGLNS

SEQ ID NO: 125945 - protein, 88 aa, Oryza sativa
  unsure (1)..(88): unsure at all Xaa locations
  Clone ID: PAT_MRT4530_2853C.1.pep
WFFWTKLIFAYEREVHLYHNDCENHPSSYSGQRPACENRRNEQKKKNAGPHREPPVASPLPPLARSGREGEGEXPPPPSPRWRRSTPM

SEQ ID NO: 125946 - protein, 80 aa, Oryza sativa
  Clone ID: PAT_MRT4530_28540C.1.pep
YDQASACHSTDQFNICCASINNKRTRYLLPLCSYRERKQTGSISEIFFHFRWQMSTVLKVPAIDQKNVSKFLSVLNFYID

SEQ ID NO: 125947 - protein, 46 aa, Oryza sativa
  Clone ID: PAT_MRT4530_28541C.1.pep
MGRPQVVPIYVTWIWEENFQCAYLPATVKHYVRYSGDRAIRGCQIP

SEQ ID NO: 125948 - protein, 1822 aa, Oryza sativa
  Clone ID: PAT_MRT4530_28542C.1.pep
MTSVMTVGAGGGGELRRDGSGGGTVDPAQAWQIRQRRDGSDAVASGSGELGRWRIPSFPESPFSQKKSLKSSKASKATPGLEWYIPGLEIELCSRGGCSEWLGLYNRMPRYKPEYLFGVEGFVQELRTMSFVIGFGTAPFYAQIPHDRHEEKCRVKVTLNSNSEDIPSVMFEAGGRNYIHACQEAARIAIGELRDRYSDQLADTEYRYHPRQPQGSDRDSYLETEGIENDATTKHLVEMLWAMDESRAETVLAAQDREDRNRGKICKLEDKVDRLEKELAALKGEAPPQKARIRLTARKRALFVPRYQLAPKVHVMEKEVAPAQADPPVIIISSDEEEESKRNNSKIEWMVNTRSNGNGPNNPNNNNNGENPTLAQVLAQQTQLMNMMMQQFQNQQNQGNNHAPPQNKLAEFLRVRPPVFSSTTNPVEASDWLHAIEKKLDLLQCTDQDKVSFASHQLHGPASEWWDHFRLNRTTAEPITWLEFTAAFRKTHIPSGVVSLKKKEFRSLTQGSRSVTEYLHEFNRLARYAPEDVRNDEERQEKFLGGLNDELSYPLMVGDYPDFQKLVDKAVRQEDKYNRMEQKKRRIAQFKTQQGNNQKPRLTLGPQSVPQGGSSSVVRPQRQFFNNNAGNNIRNQAPRPVAVPAQQQPAKREQGNKPVVCFNCGDPGHYADKCPKPRRVKVVPAQNNSAVPASKARVNHVAAAEAQGAPDVILGTFLVNSVPATVLFDSGATHSFLSMSFAGNHGMEVEDLRRPLMVSTPSNQALSLQRSPSVRIEIQGVPFLANLILLESKDLDVILGMDWLARHKGVIDCANKKVTLTSYDGRVVTVHALSSESLRSRLNQITLEEIPIVREYPDVFPDDLPGMPPKRDIEFRIDLVPGTTPIHKRPYRMAANELAEVKRQVDDLLQKGYIRPSSSPWGAPVIFVEKKDHTQRMCVDYRALNDVTIKNKYPLPRIDDLFDQLKGATVFSKIDLRSGYHQLRIKEEDIPKTSFTTRYGLFECTVMSFGLTNAPAFFMNLMNKVFMEYLDKFVVVFIDDILIYSRTKEEHEEHLRLALEKLREHQLYAKFSKCEFWLSEVKFLGHVISAGGVAVDPSNVESVTNWKQPKTVSEIRSFLGLAGYYRRFIENFSKIAKPMTRLLQKDVKYKWSEECEQSFQELKSRLISAPILILPDPKKGFQVYCDASKLGLGCVLMQDGKVVAYASRQLRPHEKNYPTHDIELAAVVHALKIWRHYLFGTRTEVYTDHKSLKYIFTQPDLNMRQRRWLELIKDYDMGIHYHPGKANVVVDALSGKGYCNATEGRQLPLELCKEFERLNLGIVGRGFVAALEAKPTLIDQVREAQINDPDIQEIKKNMRRGKAIGFLEDEQGTVWLGERICVPDNKDLKDAVLKEAHDTLYSIHPGSTKMYQDLKERFWWASMKREIVEYVAVCDVCQRVKAEHQKPAGLLQPLKIPEWKWEEIGMDFITGLPRTSSGHDSIWVIVDRLTKVAHFIPVKTTYSGSRLAELYMARIVCLHGVPKKIVSDRGSQFTSNFWKKLQEEMGSKLNFSTAYHPQTDGQTERVNQILEDMLRACALDFGGSWDKNLPYAEFSYNNSYQASLQMAPYEALYGRKCRTPLLWDQTGERQVFGTDILREAEEKVKVIQERLRVAQSRHKSYADNRRRDLSFEEGDYVYLRVTPLRGVHRFHTKGKLAPRFVGPYKIVSRRGEVAYQLELPQSLAGVHNVFHVSQLKKCLRVPTEEANIEQIEVQEDLTSVEKPIRILETNERRTRNRVIRFCKVQWSNHSEEESTWEREDELKSAHPHLFASSSKSRGRDSV

SEQ ID NO: 125949 - protein, 101 aa, Oryza sativa
  Clone ID: PAT_MRT4530_28543C.1.pep
MARRASIIVAAVIAACVLLVCMTTSSVVDAAAAAPARRLLGSGRDDDAVAAPVVNVAAAAEPIMQQPAQMVAPVVADGDDGGVVPAGSKRLSPGGPDPQHH

SEQ ID NO: 125950 - protein, 1743 aa, Oryza sativa
  unsure (1)..(1743): unsure at all Xaa locations
  Clone ID: PAT_MRT4530_28544C.1.pep
MVYSWFGDRTVQPMPRYKPEYLFGVEGFVXELRTMSFVIGFGTAPFYAQIPHDRHEEKXRVKVTLNSNSEDIPSVMFEAGGRNYIHACQEVARIAIGELRDRYSDQLADTEYRHHPRQPQGSDRGSYLETEGIENDATTKHLVEMLWAMDESRAETVLAAQDREDRNRGKICKLEDKVDRLEKELAALKGEAPPQKARIRLTARKRALFVPRYQLAPKVRVVEKEVAPAQADPPVIIISSDEEEESKRNNSKIEWVATQDDEDEPSIDLRCLEELDNGNGPNNPNNNNNGENPTLAQVLAQQTQLMNMMMQQFQNQQNQGNNHAPPQNKLAEFLRVRPPVFSSTTNPVEASDWLHAIEKKLDLLQCTDQEKVSFASHQLHGPASEWWDHFRLNRTTAEPITWLEFTAAFRKTHIPSGVVSLKKKEFRSLTQGSRSVTEYLHEFNRLARYAPEDVRNDEERQEKFLGGLNDELSYPLMVGDYPDFQKLVDKAIRQEDKYNRMEQKKRRIAQFKTQQGNNQKPRLTLGPQPMPQGGSSSVVRPQRHFFNNNAGNNIRNQAPRPVAAPAQQQPAKREQGSKPVVCFNCGDPGHYADKCPKPRRVKVVPAQNNSAVPASKARVNHVAAAEAQDAPDVILGTFLVNSVPATVLFDSGATHSFLSMSFAGNHGMEVEDLRRPLMVSTPSNQALSLQRSPSVRIEIQGVPFLANLILLESKDLDVILGMDWLARHKGVIDCANKKVTLTSYDGRVVTVHALSSESLRSRLNQITLEEIPIVREYPDVFPDDLPGMPPKRDIEFTIDLVPGTTPIHKRPYRMAANELAEVKRQVDDLLQKGYIRPSSSPWGAPVIFVEKKDHTQRMCVDYRALNDVTIKNKYPLPRIDDLFDQLKGATVFSMIDLRSGYHQLRIKEEDIPKTAFTTRYGLFECTVMSFGLTNAPAFFMNLMNKVFMEYLDKFVVVFIDDILIYSRTKEEHEEHLRLALEKLREHQLYAKFSKCEFWLSEVKFLGHVISAGGVAVDPSNVESVTNWKQPKTVSEIRSFLGLAGYYRRFIENFSKIAKPMTRLLQKDVKYKWSEECEQSFQELKSRLISAPILILPDPKKGFQVYCDASKLGLGCVLMQDGKVVAYASRQLRPHEKNYPTHDIELAAVVHALKIWRHYLFGTRTEVYTDHKSLKYIFTQPDLNMRQRRWLELIKDYDMGIHYHPGKANVVADALSRKGYCNATEGRQLPLELCKEFERLNLGIVGRGFVAALEAKPTLIDQVREAQINDPDIQEIKKNMRRGKAIGFLEDEQGTVWLGERICVPDNKDLKDAVLKEAHDTLYSIHPGSTKMYQDLKERFWWASMKREIAEYVAVCDVCQRVKAEHQKPAGLLQPLKIPEWKWEEIGMDFITGLPRTSSGHDSIWVIVDRLTKVAHFIPVKTTYSGSRLAELYMARIVCLHGVPKKIVSDRGSQFTSNFWKKLQEEMGSKLNFSTAYHPQTDGQTERVNQILEDMLRACALDFGGSWDKNLPYAEFSYNNSYQASLQMAPYEALYGRKCRTPLLWDQTGERQVFGTDILREAEEKVKVIQERLRVAQSRHKSYADNRRRDLSFEEGDYVYLRVTPLRGVHRFHTKGKLAPRYVGPYKIVSRRGEVAYQLELPQSLAGVHNVFHVSQLKKCLRVPTEEANLEQIEVQEDLTYVEKPIRILETNERRTRNRVIRFCKLQWSNHSEEESTWEREDELKSAHPHLFASSSESRGRDSV

SEQ ID NO: 125951 - protein, 1355 aa, Oryza sativa
  unsure (1)..(1355): unsure at all Xaa locations
  Clone ID: PAT_MRT4530_28545C.1.pep
MPRYKPEYLFGVEGFVQELRTMSFAIGFGTAPFYAQIPHDRHEEKCRVKVTLNSNSEDIPSVMFEAGGRNYIHACQEVARIAIGELRDRYSDQLADTEYRYHPRQPQGSDRGSYLETEGIENDATTKHLVEMLWAMDESRAETVLAAQDREDRNRGKICKLEDKVDRLEKELAALKGEAPPQKARIRLTARKRALFVPRYQLAPKVRVVEKEVAPAQADPPEKVSFASHQLHGPASEWWDHFRLNRITAEPITWLEFTAAFRKTHIPSGVVSLKKKEFRSLTQGSRSVTEYLHEFNRLARYAPEDVRNDEERQEKFLGGLNDELSYPLMVGDYPDFQKLVDKAIRQEDKYNRMEQKKRRIAQFKTQQGNNQKPRLTLGPQSMPHGGSSSVVRPQRQFFNNNAGNNIRNQAPRPVAAPVQQQPAKREQGSKPVVCFNCGDPGHYADKCPKPRRVKVVPAQSNSAVPASKARVNHVAAAEAQDAPDVILVREYPDVFPDDLPANELAEVKRQVDDLLQKGYIRPSSSPWGAPVIFVEKKDHTQRMCVDYRALNDVTIKNKYPLPRIDDLFDQLKGATVFSKIDLRSGYHQLRIKEEDIPKTAFTTRYGLFECTVMSFGLTNAPAFFMNLMNKVFMEYLDKFVAVFIDDILIYSRTKEEHEEHLRLALEKLREHQLYAKFSKCEFWLSEVKFLGHVISAGGVAVDPSNVESVTNWKQPKTVSEIRSFLGLAGYYRRFIENFSKIAKPMTRLLQKDVKYKWSEECEQSFQELKNRLVSAPILTLPDPKKGFQVYCDASKLGLGCVLMQDGKVVAYASRQLRPHEKNYPTHDLELAAVVHALKIWRHYLFGTRTEVYTDHKSLKYIFTQPDLNMRQRRWLELIKDYDMGIHYHPGKANVVADALSRKGYCNATKGRQLPLELCKEFERLNLGIVGRGFVAALEAKPTLIDQVREAQINDPDIQEIKKNMRRGKAIGFLEDEQGTVWLGERICVPDNKDLKDAILKEAHDTLYSIHPGSTKMYQDLKERFWWASMKREIAEYVAVCDVCQRVKAEHQKPAGLLQPLKIPEWKWEEIGMDFITGLPRTSSGHDSIWVIVDRLTKVAHFIPVKTTYSGSRLAELYMARIVCLHGVPKKIVSDRGSQFTSNFWKKLQEEMGSKLNFSTAYHPQTDGQTERVNQILEDMLRACALDFSGSWDKNLPYAEFSYNNSYQASLQMAPYEALYGRKRSACRTPLLWDQTGERQVFGTDILREAEEKVKIIQERLRVAQSRHKSYADNRRRDLSFEEGDYVYLRVTPLRGVHRFHTKGKLAPRFVGPYKIVSRRGEVAYQLELPQSLAGVHNVFHVSQLKKXFKDTYRRS

SEQ ID NO: 125952 - protein, 72 aa, Oryza sativa
  Clone ID: PAT_MRT4530_28546C.1.pep
MGRQWQRVEIRRKGWAARDGGGDGAKLTRHNGGADGMRTDQLTSDANRNKSGLINSPTQNVRQCKTPADCRT

SEQ ID NO: 125953 - protein, 1651 aa, Oryza sativa
  Clone ID: PAT_MRT4530_28547C.1.pep
MPRYKPEYLFGVEGFVQELRTMSFVIGFGTAPFYAQIPHDRHEEKCRVKVTLNSNSEDVPSVMFEAGGRNYIHACQEVARIAIGELRDRYSDRLADTEYRYHPRQPQGSDRGSYLETEGIENDATTRHLVEMLWAMDESRAETVLAAQDREDWNRGKICKLEDKVDRLEKELAALKGEAPPQKARIRLTARKRALFVPRYQLAPKVRVVEKEVAPADPPVIIISDDEEEESKRTHSKIEWVATQDDEDEPNEPTIDLRCSEELDNGNGPNSNNNNNNGENPTLAQVLAQQTQLMNMMMQQLQNQQNQGNNHAPPQNKLAEFLRVRPPIFSSTTNPVEAGDWLHAIEKKMDLLQCTDQEKVSFASHQLLGPASEWWDHFRLNRITAEPITWLEFTAAFRKTHIPSGVVSLKKKEFRSLTQGSRSVTEYLHEFNRLARYAPEDLRNDEERQEKFLGGLNDELSYPLMVGDYPDFQKLVDKAIRQEDKYNRMEQKKRRIAHFKAQQGSNQKPRLTLGPQSVPQGGSSSIVRPQRQFFNNNAGNNIRNQVPRPVAASTQQQPAKRKQGSKPVVCFNYGDPGHYADKCPKPRRVKVVPAQNNSAVPASKARVNHVAAAEAQDAPDVILGTFPVNSVPATVLFDSSATHSFLSMSFAGNHGMEVEDLRRPLMVSTPSNQALSLQRSPSVRIEIQGVPFLANLILLESKDLDVILGMDWLAKHKGVIDCANRKVTLISNDGRVVTVHALSSEFLRSRLNQITLGEIPIVREYPDVFPDDLPGMPPKRDIEFRIDLVPGTTPIHKRPYRMAANELAEVKRQVDDLLQKGYIRPSSSPWGAPVIFVEKKDHTQRMCVDYRALNDVTIKNKYPLPRIDDLFNQLKGATVFSKIDLRSGYHQLRIKEYGLFECTVMSFGLTNAPAFFMNLMNKVFMEYLDKFVVVFIDDILIYSRTKEEHEEHLRLALEKLREHQLYAKFSKCEFWLSEVKFLGHVISAGGVAVDPSNVESVTNWKQPKTVSEIHSFLGLAGYYRRFIENFSKIAKPMTRLLQKYVKYKWSEECEQSFQELKSRLISAPILILPDPKKGFQVYCDASKLGLGCVLMQDGKVVAYASRQLRPHEKNYPTHDLELAAVVHALKIWHHYLFGTRTEEFERLNLGIVSRGFVAALEAKPTLIDQVREAQISDPDIQEIKKNMRRGKAIGFLEDEQGTVWLGERICVPDNKDLKDAILKEAHDTLYSIHPGSTKMYQDLKERFWWASMKREIAEYVAVCDICQRVKAEHQKPAGLLQPLKIPEWKWEEIGMDFITGLPRTSSGHDSIWVIVDRLTKVAHFIPVKTTYSGSRLAELYMARIVCLHGVPKKIVSDRGSQFTSNFWKKLQEEMGSKLNFSTAYHPQTDGQTERVNQILEDMLRACALDFGGSWDKNLPYAEFSYNNSYQASLQMAPYEALYGRKCRTPLLWDQTGERQVFGTDILREAEEKVKIIQERLRVAQSRHKSYADNRRRDLSFEEGDYVYLRVTPLRGVHRFHTKGKLAPRFVGPYKIVSRRGEVAYQLELPQSLAGVYNVFHVSQLKKCLRVPTEEANIEQIEVQEDLTYVEKPIRILETNERRTRNRVIRFCKVQWSNHSEEESTWEREDELKSAHPHLFASSSESRGRDSV

SEQ ID NO: 125954 - protein, 96 aa, Oryza sativa
  Clone ID: PAT_MRT4530_28548C.1.pep
MAEVEEDLVLFGHRTIILALGVDKCIASKAPADVGDSSPGGSPSNFLNLINDNPTDVAQDPENPHGVAPPSRGTAQRRSWDGVSESMAQGYALYMP

SEQ ID NO: 125955 - protein, 904 aa, Oryza sativa
  Clone ID: PAT_MRT4530_28549C.1.pep
MPMVNTRSNGNGPNNPNNNNGENPILAQVLAQQTQLMNMMMQQFQNQENQGNNHAPPQNKLAEFLRVRPPVFSSTTNPVEASDWLHAIEKKLDLLQCTDQEKVSFASHQLHGPASEWWDHFRLNRTTAEPIIWLEFTAAFRKTHIPSGVVSLKKKEFRAPGEFLGGLNDELSYPLMVGDYPDFQKLVDKAIRQEDKYNRMEQKKRRIAQFKTRQGNNQKPHLTLGPQPMPQGGSSSVVRPQRQFFNNNAGNNIRNQGPRPVAAPAQQQPVKREQGSKPVVCFNCGDPGHYADKCPKPRRVKVVPAQNNSAVPASKARVNHVAAAEAQDAPDVILGTFLVNSVPATVLFDSGATHSFLSMSFVGNHGMEVEDLRRPLMVSTPSNQALSLQRSPSVRIEIQGVPFLANLILLESKDLDVILGMDWLARHKGVIDCANKKVTLTSYDGRVVTVHALSSESLRSRLNQITLEEIPIVREYPDVFPDDLPGMPPKRDIEFRIDLVPGTTPIHKRPYRMAANELAEVKRQVDDLLQKGYIRPSSSPWGAPVIFVEKKDHTQRMCVDYRALNDVTIKNKYPLPRIDDLFDQLKGATVFSKIDLRSGYHQLRIKEEDIPKTAFTTRYGLFECTVMSFGLTNAPAFFMNLMNKVFMEYLDKFVVVFIDDILIYSRTKEEHEEHLRLALEKLREHQLYAKFSKCEFWLSEVKFLGHKDVKYKWSEECEQSFQELKSRLISAPILILPDPKKGFQVYCDASKLGLGCVLMQDGKVVAYASRQLRPHEKNYPTHDIELAAVVHALKIWRHYLFGTRTEVYTDHKSLKYIFTQPDLNMRQRRWLELIKDYDMGIHYHPGKANVVADALSRKGYCNATEGRQLPLELCKEFERLNLGIVGRGFVAVGDMGPGVLRPEA

SEQ ID NO: 125956 - protein, 89 aa, Oryza sativa
  Clone ID: PAT_MRT4530_2854C.1.pep
MRRHRRPAVAEPSRLGPAALAAHVTPLLGSVARARKKNGKRKEETAGVIFMPRESVAGDELGVILGKDDVRMIRISCGMLRLKIDARSW

SEQ ID NO: 125957 - protein, 861 aa, Oryza sativa
  Clone ID: PAT_MRT4530_28550C.1.pep
MRGVLSQLLSEMPRYKPEYLFGVEGFVQELRTMSFVIGFGTAPFYAQIPHDRHEEKCRVKVTLNSNSEDIPSVMFEAGGSNYIHACQEVARIAIGELRDRYRDQLADTEYRYHPRQPQGSDRATAQDREDRNRGKICKLEDKVDRLEKELAALKGEAPPQKARIRLTARKRALFVPRYQLAPKMVNTRSSGNGPNNPNNNNGENPTLAQVLAQQTQLMYMMMQQFQNQQNQGNNHASPQNKLAGFLRVRPPVFSSTTNPVEASDWLHAIEKKLDLLQCTDQEKVSFASHQLHGPASEWWDHFRLNRTTTEPITWLEFTAAFRKTHIPSGVVSLKKKEFRSLTQGSRFVTEYLHEFNRLARYAPEDVRNDEERQEKFLGGLNDELSYPLMVGDYPDFQKLVDKAIRQEDKYNCMEQRKRRIAHFKAQQGSNQKPRLTLGPQSMPQGGSSSVVRPPRQFFNNNAGNNIRNQTPRPVAAPTQQQPAKREQGSKPVVVPAQSNSAVPASKARVNHVAAAEAQDSPDVILGATHSFLSMSFAGNHGMEVEDLRHPLMVSTPSNQALSLQRSPSVRIEIKGVPFLANLILLESKDLDVILGMDWLARHRGVIDCANRKVTLTSNDGRVVTVHALSSESLRSRLNQITLEEIPIVREYPDVFPDDLPGMPPKRDIEFRIDLVPGTTPIHKRPYRMAANELAEVKRQVDDLLQKGYIRPSSSPWGAPVIFVEKKDHTQRMCVDYRALNDVTIKNKYPLPRIDDLFDQLKGATVFSKIDLRSGYHQLRIKEEDIPKTAFTTRYGLFECTVMSFGLTNAPAFFMNLMNKVFMEYLDKFVVVFIDDILIYSRTKEEHEEHLRLALEKLREHQ

SEQ ID NO: 125958 - protein, 1716 aa, Oryza sativa
  Clone ID: PAT_MRT4530_28551C.1.pep
MSFVISFTLLTIVNDAITGNNLISSWFGMMPRYKPEYLFGVEGFVQELRTMSFVIGFGTAPFYAQIPHDRHEEKCRVKVTLNSNSEDIPSVMFKAGGRNYIHACQEVARIAIGELRDRYSDQLADTEYRYHPRQPQGSDRGSYLETEGIENDATTRHLVEMLWAMDESRAEIVLAAQDREDRNRGKICKLEDKVDRLEKELAVLKGEAPPQKARIRLTARKRALFVPRYQLAPKFPPVSLLVPCPCQMVNTRSNGNGPSNNNNGENPTLAQVLAQQTQLMNMMMQQLQNQQNQGNNHAPPQNKLAEFLRVRPPVFSSTTNPVEAGDWLHAIEKKLDLLQCTDQEKVSFASHQLHGPASEWWDHFRLNRTTAEPITWLEFTAAFRKTHIPSGVVSLKKKEFRSLTQGSRSVTEYLHEFNRLARYAPEDVRNDEERQEKFLEGLNDELSYPLMTGDYHDFQKLVDKAIRQEEKYNRMEQKKRRIAQFKTQQGNNQKPRLTLGPQSMPQGGSSSVVRPQRQFFNNNAGNNIRNQAPHPVAAPAQQQPAKREQGSKPVVCFNCGDPGHYANKCPKPRRVKVVPVQSNSTVPASKARVNHVAAAEAQDAPDVILGTFLVNLVPATVLFDSGATHSFLSMSFAGNHGMEVEDLRRPLMVSTPSNQALSLQRSPSVRIEIQGVPFLANLILLESKDLDVILGMDWLARHKGVIDCANRKVTLTSNDGRVVTVHALSSESLRSRLNQITLEEISIVREYPDVFPYDLPGMPPKRDIEFRIDLVPGTTPIHKRPYRMAANELAEVKRQVDDLLQKGYIRPSSSPWGAPVIFVEKKDHTQRMCVDYRALNDVTIKNKYPLPRIDDLFDQLKGATVFSKIDLRSGYHQLRIKEEDIPKTAFTTRYGLFECTVMSFGLTNAPAFFMNLMNKVFMEYLDKFVAVFIDDILIYSRTKEEHEEHLRLALEKLREHQLYAKFSKCEFWLSEVKFLGHVISAGGVAVDPSNVESVTNWKQPKTVSEIRSFLGLAGYYRRFIENFSKIAKPMTRLLQKDVKYKWSEECEQSFQELKSRLISAPILILPDPKKGFQVYCDASKLGLGCLLMQDGKVVAYASRQLRPHEKNYPTHDLELAVVVHALKIWRHYLFGTRTEVYTDHKSLKYIFTQPDLNMRQRRWLELIKDYDIGIHYHPGKANVVADALSRKGYCNATEGRQLPLELCKEFERLNLGIVSRGFVAALEAKPTLIDQVREAQINDPDIQEIKKNMRRGKAIGFLEDEHGTVWLGERICVPDNKDLKDAILKEAHDTLYSIHPGSTKMYQDLKERFWWASMKREIAEYVAVCDVCQRVKAEHQKPAGLLQPLKIPEWKWEEIGMDFITGLPRTSSGHDSIWVIVDRLTKVAHFIPVKTTYSGSRLAELYMARIVCLHGVPKKIVSDRGSQFTSNFWKKLQEEMGSKLNFSTAYHPQTDGQTERVNQILEDMLRACALDFDGSWDKNLPYAEFSYNNSYQASLQMAPYEALYGRKCRTPLLWDQTGERQVFGTDILREAEEKVKIIQERLRVAQSRHKSYADNRRRDLSFEGDYVYLRVTPLRGVHRFHTKGKLAPRFVGPYKIVSKRGEVAYQLELPQSLAGVHNVFHVSQLKKCLRVPTEEANLEQIEVQEDLTYVEKPIRILETDERRTRNRVIRFCKVQWSNHSEEESTWEREDELKSAHPHLFASSSESRGRDSV

SEQ ID NO: 125959 - protein, 1727 aa, Oryza sativa
  unsure (1)..(1727): unsure at all Xaa locations
  Clone ID: PAT_MRT4530_28552C.1.pep
IPSFPXSPFLPEKSLKSSKASRQAPGLEWYIPGLEIELXSRGGCSEWLGLCNRMPRYKPEYLXGVEGFVQELRTMSFVXGFGTAPFYAQIPHDRHEXKCRVKVTLNSNSEDIPXVMFKAGGRNYIHACQXVARIAIGELRDRYSDXLADTEYRYHPRQPQGSXRGSYLETEGIENDATTXHLVEMLWAMDESRAEXVLAAQDREDRNRGKICXLEDKVDRLEKELAVLXGEAPPQKARIRLTARKXALFVPRYQLAPKMVNTXSNGNGPSNNNNGENPTLXQVLAQQTQLMNMMMXQLQNQQNQGNNHAPPQXKLAEFLRVRPPVFSSTXNPVEAGDWLHAIEKKXDLLQCTDQEKVSFASHXLHGPASEWWDHFRLNRXTAEPITWLEFTAAFRXTHIPSGVVSLKKKEFRXLTQGSRSVTEYLHEFNXLARYAPEDVRNDEEXPEKFLEGLNDELSYPLMXGDYHDFQKLVDKAIRQXEKYNRMEQKKRRIAQXKTQQGNNQKPRLTLGPXSMPQGGSSSVVRPQRQXFNNNAGNNIRNQAPHPXAAPAQQQPAKREQGSXPVVCFNCGDPGHYANKXPKPRRVKVVPVQSNSXVPASKARVNHVAAAEAQXAPDVILGTFLVNLVPXTVLFDSGATHSFLSMXFAGNHGMEVEDLRRPLXVSTPSNQALSLQRSPSXRIEIQGVPFLANLILLXSKDLDVILGMDWLARXKGVIDCANRKVTLTSNXGRVVTVHALSSESLRXRLNQITLEEISIVREYPXVFPYDLPGMPPKRDIXFRIDLVPGTTPIHKRXYRMAANELAEVKRQVDXLLQKGYIRPSSSPWGAXVIFVEKKDHTQRMCVXYRALNDVTIKNKYPLPXIDDLFDQLKGATVFSKXDLRSGYHQLRIKEEDXPKTAFTTRYGLFECTVXSFGLTNAPAFFMNLMNXVFMEYLDKFVAVFIDXILIYSRTKEEHEEHLRLXLEKLREHQLYAKFSKXEFWLSEVKFLGHVISXGGVAVDPSNVESVTNWXQPKTVSEIRSFLGLAGXYRRFIENFSKIAKPMXRLLQKDVKYKWSEECEXSFQELKSRLISAPILIXPDPKKGFQVYCDASKLGXGCLLMQDGKVVAYAXRQLRPHEKNYPTHDLEXAVVVHALKIWRHYLFGXRTEVYTDHKSLKYIFXQPDLNMRQRRWLELIXDYDIGIHYHPGKANVVXDALSRKGYCNATEGRQXPLELCKEFERLNLGIVXRGFVAALEAKPTLIDQXREAQINDPDIQEIKKXMRRGKAIGFLEDEHGTXWLGERICVPDNKDLKXAILKEAHDTLYSIHPGXTKMYQDLKERFWWASMXREIAEYVAVCDVCQRXKAEHQKPAGLLQALKIXEWKWEEIGMDFITGLPXTSSGHDSIWVIVDRLTKXAHFIPVKTTYSGSRXAELYMARIVCLHGVPKKXVSDRGSQFTSNFWKXLQEEMGSKLNFSTAYHRXTDGQTERVNQILEDMXRACALDFDGSWDKNLXYAEFSYNNSYQASLQMXPYEALYGRKCRTPLLWXQTGERQVFGTDILREXEEKVKIIQERLRVAQSXHKSYADNRRRDLSFEGXYVYLRVTPLRGVHRFXTKGKLAPRFVGPYKIVXKRGEVAYQLELPQSLAXVHNVFHVSQLKKCLRXPTEEANLEQIEVQEDLXYVEKPIRILETDERRXRNRVIRFCKVQWSNHSEXESTWEREDELKSAHPXLFASSSESRGRDSV

SEQ ID NO: 125960 - protein, 107 aa, Oryza sativa
  Clone ID: PAT_MRT4530_28553C.1.pep
MAGVSDSYNGSPLGLPHVDPAIGSSGRPTAALPSLPFQRGSGSRQHDGGRHGLRNMRGRQRQCGFGLHARGFAAGDDGWYGTADSGDGRGRSASDDGGGNRLGCRKC

SEQ ID NO: 125961 - protein, 1669 aa, Oryza sativa
  unsure (1)..(1669): unsure at all Xaa locations
  Clone ID: PAT_MRT4530_28554C.1.pep
RKSAQNLSSLSSAQIPSFPESPFSQKKSLKSSKASKATPGLEWNIPGVEIELCSRGGCSEWLGLYNRMPRYKPEYLFGVEGFVQELRSMSFVIGFGTAPFYAQIPHDRHEEKCRVKVTLNSNSEDIPLVMFEAGGRNYIHACQEVARIAIGELRDRYSDQLADTEYRYHPRQPQGSDRGSYLETEGIENDATTKHLVEMLWAMDESRAETVLAAQDREDRNRGKICKLEDKVDRLEKELAALKGEAPPQKARIRLTARKRALFVPRYQLAPKMVNTRSNGNGPNNPNNNNGENPILAQVLAQQTQLMNMMMQQFQNQENQGNNHAPPQNKLAEFLRVRPPVFSSTTNPVEASDWLHAIEKKLDLLQCTDQEKVSFASHQLHGPASEWWDHFRLNRTTAEPIIWLEFTAAFRKTHIPSGVVSLKKKEFRSLTQGSRSVTEYLHEFNRLARYAPEDVRNDEERQEKFLGGLNDELSYPLMVGDYPDFQKLVDKAIRQEDKYNRMEQKKRRIAQFKTQQGNNQKPHLTLGPQPMPQGGSSSVVRPQRQFFNNNAGNNIRNQGPRPVAAPAQQQPVKREQGSKPVVCFNCGDPGHYADKCPKPRRVKVVPAQNNSAVPASKARVNHVAAAEAQDAPDVILGTFLVNSVPATVLFDSGATHSFLSMSFVGNHGMEVEDLRRPLMVSTPSNQALSLQRSPSVRIEIQGVPFLANLILLESKDLDVILGMDWLARHKGVIDCANKKVTLTSYDGRVVTVHALSSESLRSRLNQITLEEISIVREYPDVFPDDLPGMPPKRDIEFRIDLVPGTTPIHKRPYRMAANELAEVKRQVDDLLQKGYIRPSSSPWGAPVIFVEKKDHTQRMCVDYRALNDVTIKNKYPLPRIDDLFDQLKGATVFSKIDLRSGYHQLRIKEEDIPKTAFTTRYGLFECTVMSFGFTNAPAFFMNLMNKVFMEYLDKFVVVFIDDILIYSRTKEEHEEHLRLALEKLREHQLYAKFSKCEFWLSEVKFLGHVISAGGVTVDPSNVESVTNWKQPKTVSEIRSFLGLAGYYRRFIENFSKIAKPMTRLLQKDVKYKWSEECEQSFQELKSRLISAPILILPDPKKGFQVYCDASKLGLGCVLMQDGNVVAYASRQLRPHEKNYPTHDIELAAVVHALKIWRHYLFGTRTEVYTDHKSLKYIFTQPDLNMRQRRWLELIKDYDMGIHDHPGKANVVADALSRKGYCNATEGRQLPLELCKEFERLNLGIVGRGFIAALEAKPTLIDQVREAQINDPDIQEIKKNMRRGKAIGFLEDEQGTVWLGERICVPDNKDLKDAVLKEAHDTLYSIHPGSTKMYQDLKERFWWASMKREIAEYVAVCDVCQRVKAEHQKPAGLLQPLKIPEWKWEEIGMDFITGLPRTSSGHDSIWVIVDRLTKVAHFIPVKTTYSGSRLAELYMARIVCLHGVPKKIVSDRGSQFTSNFWKKLQEEMGSKLNFSTAYHPQTDGQTERVNQILEDMLRACALDFGGSWDKNLPYAEFSYNNSYQASLQMASYEALYGRKCRTPLLWDQTGERQVFGTDILREAEEKVKIIQERLRVAQSRHKSYADNRRRDLSFEEGDYVYLRVTPLRGVHRFHTKGKLAPRFVGPYKIVSRRGEVAYQLELPQSLAGVHNVFHVSQLXKKCLSVPTEEA

SEQ ID NO: 125962 - protein, 350 aa, Oryza sativa
  unsure (1)..(350): unsure at all Xaa locations
  Clone ID: PAT_MRT4530_28555C.1.pep
MGEITNVTEYQAIAKQKLPKMIYDYYASGAEDEWTLQENREAFARILFRPRILIDVSKIDMATTVLGFKISMPIMIAPSAMQKMAHPDGEYATARAASAAGTIMTLSSWAXVYKDRRVVEQLVRRAERAGFKAIALTVDTPRLGRREADIKNRFVLPPFLTLKNFEGLELGKMDQASDSGLASYVAGQIDRTLSWKDVKWLQTITTLPILVKGVITAEDTRLAVENGAAGIIVSNHGARQLDYVPATISALEEVVKAARGQLPVFLDGGVRRGTDVFKALALGAAGVFIGRPVVFSLAAAGEAGVRNVLQMLRDEFELTMALSGCTSLADITRNHVITEADKLGVMPSRL

SEQ ID NO: 125963 - protein, 353 aa, Oryza sativa
  Clone ID: PAT_MRT4530_28556C.1.pep
MGEITNVMEYQAIAKQKLPKMIYDYYASGAEDEWTLKENREAFSRILFRPRILIDVSKIDMSATVLGFKISMPIMIAPSAMQKMAHPDGEYATARAASAAGTIMVYKDRNVVEQLVRRAERAGFKAIALTVDTPRLGRREADIKNRFVLPPYLTLKNFEGLDLAEMDKQFEPFRWHLQSNDSGLASYVAGQIDRTLSWKDVKWLQSITSLPILVKGVITAEDARLAVHSGAAGIIVSNHGARQLDYVPATISALEEVVTAAAGRIPVYLDGGVRRGTDVFKALALGAAGVFIGRPVVFALAAEGEAGVRNVLRMMREEFELTMALSGCTSLADITRAHIYTDADRLARPFPRL

SEQ ID NO: 125964 - protein, 88 aa, Oryza sativa
  Clone ID: PAT_MRT4530_28557C.1.pep
MADETITLQQYVNAARQTFLTVALLPDQNHSLEITPEGCLCLLTWTKCFTEAFSKGKSWNGDFTLADFKVCRGHVQKHKKPKNLVMRE

SEQ ID NO: 125965 - protein, 1308 aa, Oryza sativa
  Clone ID: PAT_MRT4530_28558C.1.pep
MEDSNTLILPCKRKNKGQGKDKDGKKIKEDPKMSKSKLKKLQNLEEEKQKKLLQAQSIEILRKHKISDDAYSLLHASGTIGQAETLKEKRRRAVHFSKAGLNVPEELSLLKKDGDQKASENSEAAEEDYLDKIVDSAKNEDPQRKCNNHIDNVAMKPVECKLVIDVGLSDQEPKTEGSDGVPNISANQAIQSCVPSCSGEEILQDKEPGQEERTVQECFNPPIVVPVSRPHEVEKTRRDLPIIMMEQEIMEAIYENSVVILCGETGCGKTTQVPQFLYEAGFGTSNRSDRKGIIGITQPRRVAVLATARRVSYELGLKLGKEVGFQVRHDKMVGSKCSIKFMTDGILLREVQSDFLLKRYSVIILDEAHERSLNTDILIGMLSRIIKIRKSLYIEQQEKIRCGLSINPEDKISQLKVVLMSATLQLKDFISNRRLFDVIPPAIKVPVRQFPVTVHFSKSTHDDYLGQAYKKVMSIHKKLPQGGILVFVTGQREVDYLCKKLQRASKQQTDKKTEKVEGDENGSSQEVVEREISEAYDIDRDESEHQDDMFSQYDEDESNAGPGVDSSDIEMEPEMDTDSEDDDSVYETTEEDGPVLAFLKGAEGSSGLKASFKAISRVSGEPESTDVPSNATILEESSHVPCTSKCTEPRSVSHASQQLRVFQDIPDGERLVVVATNVAETSLTIPGIKYVVDTGKQKVKNYNHATGMASYEIQWISKASASQRSGRAGRTGPGHCYHLYSAAAYGKDELFPEFSEPEIKNIPVDGVVLMLKFMNINKVENFPFPTPPDKESLVEAERCLKVLEALDSKGEPTLMGKAMAQYPMSPRHSRLLLTIVKILNSQRCFSRPNFILGYAAAAASALSFTNPFLTQNEFSGESKQDNPDSEDKDRQERKRQKKLKAMLFELSENPVEFCRVNSLHLKTMEEMSKLRKQLLRLIFHHSKFCEEFSWKFGVSEDVEEAWRHESDKKPMQLNEEELLGQGICAGWADRVAKRIRAFPGPSKDDKKVRAVHYQSCAFNDTIYLHRSSSVARIAPEFVVYSELLHTKRSYMHGVTSVKPGWILKYASSLCTFSAPLEDPKPYYEPQKDQVYCYVSPIFSRHNWQLPLHSLPIQDGTNRLQVFACALLKGDGLAFLKYTMNFLHLSPSVILGTIFQRKVGDSLDRMKIGSKVVDRPAAIREMRNFNPNYLCREIKEWNQDKYHSHLGAIRKQKNIEVILGGDDLYLYNYRRDKFFSLAVADTDGSKQLPQHDCSIVFFRSSEGKAGEDVGNWSGSGARRRQRESVMAFCSFHIGKPQVANWGADFTWKR

SEQ ID NO: 125966 - protein, 36 aa, Oryza sativa
  unsure (1)..(36): unsure at all Xaa locations
  Clone ID: PAT_MRT4530_28559C.1.pep
XTXKKYYXLNHYINIYPNFTTLSVTKLVSTPXTHXK

SEQ ID NO: 125967 - protein, 171 aa, Oryza sativa
  Clone ID: PAT_MRT4530_2855C.1.pep
HSWMDDVYGRIEVFPQHFLPSQQSMETPADGLSTSKTNLDSPPSSRRRSWTPKRVMGAASLLHLLSLPRIRWSSSTEDDDKIELTRAEVESLRTEIADAEERESQLKARLENIDEVLRYARLSGYLYIRSRWTQLPGEPPILDDADVDDWLPRFVVLQGQCVYYYLKSTAH

SEQ ID NO: 125968 - protein, 335 aa, Oryza sativa
  Clone ID: PAT_MRT4530_28560C.1.pep
MAMATAACRRPAVMLMAFAMAAAVTMSSVPPASGTTTLQYDFYSSSCPKAEETVRNVVEPMIFNDPTMGAAFIRLFFHDCFVRGCDASILLDPTSRNTQPEKTAIPLRGYDAVNKIKAAVEAVCPGKVSCADILAFAARDSAVVNGNFAFAMPSGRRDGTASSASDVARFIPSPAFHLQDLVDSFAAKGLTADDLVILSGAHSFGLTHCAFVTGRLYPTVDPTMNATFAAALKKLCPPPASGGGGRAVSNNQVTDPNVLSNQYFKNVAAGEVMFTSDQTLTSRDDTKAMVDDNAANPVAWMARFAAAMVKMGGVEVLTGNAGEVRKVCFATNTAS

SEQ ID NO: 125969 - protein, 608 aa, Oryza sativa
  Clone ID: PAT_MRT4530_28561C.1.pep
MEAPPSLPYRHLPQHLAGLLKTRPLHDLLSDASTSRAARHLFDAVPRPTPALCGTLISALSRLCSHQELLDAFSSLHRRGSDVPPGCVPLVVKSCAILAASRQGKQVHCHAIVRGLLGDIFVQTALVDFYAKNGDMDCAVKVFDEMPVKDPIPMNCLITGYSKSGDVVKARRLFDGMVRRTSASWNSMIACYAHGGEYQEALRLFRRMLSEGARPNAITIATMFSICAKTGDLETGKWARSLIAEQDLQNMIVHTALMEMYVKCRAIDEARREFDRMQQRDVVAWSTMIAGYAQNGRPHESLELFERMKATSCKPNEVTLVGVLSACAQLGSDELGGQIGSHVESQNLPLTSYLGSALIDMYTKCGHVGRARSVFNRMEHKVVITWNSMMRGLALNGFAQDAITLYKEMTEEDVQPNEITFVALLTACTHAGLVDQGMSFFKEMKTIHHVSPQVEHCACIVDLLCKSGRLREAYKFICDMEVEPNAVIWSTLLSACRAHADVELAKLAASKLLVLEPDNSSIYVLLSNIYADAGLWGDVREIRDLMRSKNVQKLSAYSWIELDGEVHKFLVQDTYHPKSAEIFNVVDGMGLHLDDVDSDPDLFVLEHY

SEQ ID NO: 125970 - protein, 525 aa, Oryza sativa
  Clone ID: PAT_MRT4530_28562C.1.pep
MGKLLCDSSSAAVAVAEAPSPAPAPPLLTWPTPDPDPPTSWTAVAALEDQQRRRLHRIWERGVAWKPPATLPLPPLVFRLDHAGEVDADGNCLFTAARKAASAKPDARDLRHRIVRRFSHLYAAAQAPDRDAIDAAVRHLYAPDLKAGWGVHVVQELKLLAPKTLRHHLDAAINDLVDLGIQREMAAETIYRERCIAVNNGDSWAKYMSVSGSAEDEHNIITLQYTEEGLLTIDENRDGHAAAFGDDIAIECLATEFKREVYVVQAHGADAMVDEDNCVFFLPHRPRGEICEPPIFLFMKGTVAVYAVSCNVSGLKVLTVEEEIQSVRKTAEAVGDFRKTPIYIVGTDCTAKRNIAKLLANSIIYRYLCSEELLEDVLGGKDALNAFRESDLNGYLEVETEGLKQLTSMGSLVLCCGDGAVMNSTNLYAAFTHHSLISHIRLLDESSCAYFLTRRLRHGISISPIFPLIKGAAWFVAGADPYEPLIVTVVMSIVRHRQDEVQRASMAFSAITVSVSNVASRPVFK

SEQ ID NO: 125971 - protein, 126 aa, Oryza sativa
  Clone ID: PAT_MRT4530_28563C.1.pep
ATLLLFPPPHASLNTGELGSARPECVGGMKRKATTAASADPAQVKDLVLHCSSYKAGPLGVRLGCRDAIGPGAWPCRFTMAHADYMHRNRLLARWQSRWQPGRGRQGHAGWWRPAMGLEPRGISRR

SEQ ID NO: 125972 - protein, 43 aa, Oryza sativa
  unsure (1)..(43): unsure at all Xaa locations
  Clone ID: PAT_MRT4530_28564C.1.pep
RFPVSLPLSARWRYVHPPEKGPXDRKLLSRGINPKEWPGLWTA

SEQ ID NO: 125973 - protein, 81 aa, Oryza sativa
  Clone ID: PAT_MRT4530_28565C.1.pep
MPPRRREHSPEGECAAVKWPCPSAPPPSSPRGGIGYGRRRRWTPAQSSAAPLRPRFLSLVMGPQEGSTVAGIVLPFAGSRR

SEQ ID NO: 125974 - protein, 59 aa, Oryza sativa
  Clone ID: PAT_MRT4530_28566C.1.pep
LISISEKMGSGQHILRLLTMNQNYNLVTTEQILLVCLIPSWELKWSFQTSTIDGDALTG

SEQ ID NO: 125975 - protein, 51 aa, Oryza sativa
  Clone ID: PAT_MRT4530_28567C.1.pep
MAGANTARGRAEAWQDRDTSWAWAWAWAWAQGFYAVAALPGLLLVTSCASR

SEQ ID NO: 125976 - protein, 237 aa, Oryza sativa
  Clone ID: PAT_MRT4530_28568C.1.pep
ITYFDCSLINIILNIFFIQSLFNGWIQCRQHFDLEYFVVVCRDVDVEDVQQRGQSELPVVVPLLAFEPHVPEGDDRRIQYWRTKFEVAELDRNMLEVRKDQAVETLRGREVWFNSYLKSCCTSMSRVCRELRVPRGDPEESAAGYISWLNGACAQLEGIGQRIDEALKQECRCSSRYAGGHVLACIRDHRPQLHLEFLREGFSRSRRTPTEIDGLAKLMALLAEKVFQSMDWRWPSW

SEQ ID NO: 125977 - protein, 68 aa, Oryza sativa
  Clone ID: PAT_MRT4530_28569C.1.pep
LTPTTFYCPTRQSIPGFTAWAPWNTMARKRVLLGLGHVGDQGGDTVAGTPLLVGPRRKLDKVFRKSNF

SEQ ID NO: 125978 - protein, 175 aa, Oryza sativa
  unsure (1)..(175): unsure at all Xaa locations
  Clone ID: PAT_MRT4530_2856C.1.pep
NRLQARVSRSNCRTGLSDRNFTFAPTGVTRPVRXVTSSSDKNTVLADGRYRANHTRVVVHALPERLSPXSSQSPARAHCHSDSQTRLIAASGCHGCLPVIMLKLCTMEKKGIRCWTGFTFLCSTHSLRNFWLETGHEGFVRIAQAKQVHXVTKGQQNLVKQDEGTXASPHECEAW

SEQ ID NO: 125979 - protein, 170 aa, Oryza sativa
  unsure (1)..(170): unsure at all Xaa locations
  Clone ID: PAT_MRT4530_28570C.1.pep
LVMLCKTLIGSNCLCMCGHHLSFLXHCDLEYFVAVCRDVDVEDVQQRGQPELPVIVPALAFEPHVPGAMWIKVRLESVLADXDRRIQYWRTKFKVAELERTMLEVKKDXAVVTLRGREVWFNLYPKSCCTSMSRICRELRVPRGDPEESAAGYISWLNGACAQLEGIGQH

SEQ ID NO: 125980 - protein, 50 aa, Oryza sativa
  Clone ID: PAT_MRT4530_28571C.1.pep
LVVRRPSGRSFALVPFSPLGKKKLNMSLNFICKNPMWFRMFHRGGKKRAK

SEQ ID NO: 125981 - protein, 154 aa, Oryza sativa
  unsure (1)..(154): unsure at all Xaa locations
  Clone ID: PAT_MRT4530_28572C.1.pep
HFDLEYFVAICRDVDVEDVQQRGQPELPMVVPLLASEPHVPEGNVDRSSPVETSMATTPLADLESALADQDRRVQYWRTKFEVAELERTMLEVRKDQAVETLXGREVWFNSYLKSCCTSMSIVCRELRVPRGDPEESAAGYISWLNGACAQLEG

SEQ ID NO: 125982 - protein, 272 aa, Oryza sativa
  Clone ID: PAT_MRT4530_28573C.1.pep
MVLSKLRRRLRSVTPGERTPTATADDRDARAQRSGGGDDEDATAAPPPPTSSQLHHMISERRRRERLNESFEHLRGLLPPGSKKDKATVLAKTLEYMNLLIAQISELEAKNRALQTQIHQRANGSSSSRSSMIRTVNEVHHHHNHQWLAVAAAAGGSPERVQVHVIGGGDHDGGASASSSSSAPEVTVRVAVRAPERGGADVSELVLRVLALLKAMGGFTVVAVDARQPGGGGGNGVAQASLTLRATVRMLTLLKRMFRAKNHSSSDQIIRL

SEQ ID NO: 125983 - protein, 44 aa, Oryza sativa
  unsure (1)..(44): unsure at all Xaa locations
  Clone ID: PAT_MRT4530_28574C.1.pep
CSFAPXYVLSIVHMIPCSDLVVAISILACCHPLFNTLEFVWFLV

SEQ ID NO: 125984 - protein, 133 aa, Oryza sativa
  unsure (1)..(133): unsure at all Xaa locations
  Clone ID: PAT_MRT4530_28575C.1.pep
GDPLSLVLXVLGAELLQAIINKANLLGLLSKPIPIESDPNFQLFNMPMTSFCMSKLVEDNCGRELFTLEALLXTFAQGTRLTVNYHKCLTLINVDEEKAQMLAGVFGCXIGTLPFTYLSLPLGTTKTRVVDFA

SEQ ID NO: 125985 - protein, 150 aa, Oryza sativa
  Clone ID: PAT_MRT4530_28576C.1.pep
MGGTLHYLSDLLLGGSSGKTSHKKKRQFNTVELKVRMDCDGCELKVRNTLANMKGVQSVEINRKQQKVTVQGMVDTQRVLRRAQSTGKRTELWPYVPYTNPYVAPPAAYDKKAPNGHIRRVDAVLPVTPSQEERLATLFSDDNPNACAVM

SEQ ID NO: 125986 - protein, 94 aa, Oryza sativa
  Clone ID: PAT_MRT4530_28577C.1.pep
PTPFRDLFRTVKTRRGPRFPRFPPRRTNRSPPRDELIMTVHAGRPAVIMPLNYICIWLIKYVRVIKTYAPQRLHTHIVRSANGRALAFFSGVQP

SEQ ID NO: 125987 - protein, 149 aa, Oryza sativa
  Clone ID: PAT_MRT4530_28578C.1.pep
MTSMATPPPKTLLLLVLALSVILVSATAFHHHHHHDGGAEAGGGGGGGGGFFEVPWFGPPGGGGGAGGHEMARPSTVCMEKGACSDERGAGPVQRDASLSAGERHGGRRRGGGGGRLDRSELLQEAAHLPGKTFSFNDKHGGRGGGGGG

SEQ ID NO: 125988 - protein, 100 aa, Oryza sativa
  unsure (1)..(100): unsure at all Xaa locations
  Clone ID: PAT_MRT4530_28579C.1.pep
FSWGAPHTTATLGGNGPINKEDPLNWGAAGAEIACSHLHEEKHMVGQLXRLCTRTQKGHTPSCHMAPAXQDHDDFAVCGWLCADGRPRVNGSSDWILTCI

SEQ ID NO: 125989 - protein, 105 aa, Oryza sativa
  unsure (1)..(105): unsure at all Xaa locations
  Clone ID: PAT_MRT4530_2857C.1.pep
SPWPRASXXRPXXGGSWVWXGPVXPLRPWLXAPWXAWACFFXGFALFVFFXVCFLGPVFLXXVFFFCPPGGGGAXSCWXXXGFFLPXXFWAPXXPLLVXPCXLPV

SEQ ID NO: 125990 - protein, 311 aa, Oryza sativa
  Clone ID: PAT_MRT4530_28580C.1.pep
MATGDDKPPSLDADIDMADLATLDAPASSDAAAAARFRPRAKGKPKPKPKPEPKAEDSKLKADDSIPMSKPEEPKPEAAAPMEDSMEVDGVGPSASASAEGVGAEEVEDEEDYVLREIDVYFTPKPFDEDTMLYVMQYPLRPCWRPYELNEICKEVRVKPLSSKVEVDLDINTECENYDPEVPLPSRLTEQTLSSSKAADVADYAVGVLRGNLVHLNHIDAVMQLRPSMLHVNSGRSNARQAHGGASSDASGSTMPSVKRNEHSEDSKDYTEESEPWISLTYQQAGSNVARKYHAEMVSDDGGPIDFTMST

SEQ ID NO: 125991 - protein, 177 aa, Oryza sativa
  Clone ID: PAT_MRT4530_28581C.1.pep
MKKDKNKGDELFFDQAKHLCGCLTRSLLSQAEAGGDLTWHRARKEPRRRGAADAAAAEAEEEIGSEDDDENGRKGGGDGWGGGISKPGADRWGPRGQRAAIPKIFVGVCATSAYAHNSQAPGACADGLRAPPPYAVTAAAAPPPVMENNLWATLHRSEPGRNDPLQPSDGSNMHPSR

SEQ ID NO: 125992 - protein, 309 aa, Oryza sativa
  Clone ID: PAT_MRT4530_28582C.1.pep
MGFKGFVEGGIASIVAGCSTHPLDLIKVRMQLQGEASAAAAAVAPAQAALRPALAFHAGQAVAIPHDVIAPPRKPGPIAVGAQILRAEGAAGLFSGVSATMLRQTLYSTTRMGLYDILKKKWTQENGGVLPLHRKIAAGLIAGGVGAAVGNPADVAMRRGTPIGRMARDEGVRSLWRGSSRPVNRAMIVTASQLATYDQAKEAILARRGPGADGLGTHVVASFAAGLVAAAASNPVDVVKTRVMNMKVAPGAPPPYSGAIDCALKTVRSEGVMALYKGFIPTVSRQGPFTVVLFVTLEQVRKVFNGVEF

SEQ ID NO: 125993 - protein, 327 aa, Oryza sativa
  Clone ID: PAT_MRT4530_28583C.1.pep
MGFKGFVEGGIASIVAGCSTHPLDLIKVRMQLQGEASAAAAAVAPAQAALRPALAFHAGQAVAIPHDVIAPPRKPGPIAVGAQILRAEGAAGLFSGVSATMLRQTLYSTTRMGLYDILKKKWTQENGGVLPLHRKIAAGLIAGGVGAAVGNPADVAMVRMQADGRLPLAERRNYRSVGDAIGRMARDEGVRSLWRGSSLTVNRAMIVTASQLATYDQAKEAILARRGPGADGLGTHVVASFAAGLVAAAASNPVDVVKTRVMNMKVAPGAPPPYSGAIDCALKTVRSEGVMALYKGFIPTVSRQGPFTVVLFVTLEQVRKVFNGVEF

SEQ ID NO: 125994 - protein, 104 aa, Oryza sativa
  Clone ID: PAT_MRT4530_28584C.1.pep
MEEECGTLALCDICCSCVPLSWGLASDVLFVCCVLAEEEAPKPLFIVRLASWRELGDGTRRRRKKERKRGRGGSGEGRFGGGWWPRDGEDLAAPRERSLVVAWT

SEQ ID NO: 125995 - protein, 247 aa, Oryza sativa
  Clone ID: PAT_MRT4530_28585C.1.pep
MMMSSRSSVSLGVLLLLAVILSAGAADPDILTDFVVPSDTDPSGIDGAFFTYKNLVTGNSGDPAKLTVTKATHAEFPALLGQSVSYAALVFGAGTVNPPHIHPRASELLVVVQGPLLVGLVDAARNGTVYTQTLQTGDMFVFPKGMVHFQFNNGTDVVARAFSAFGSATPGTISLPAALFGSGIDDTILDKSMHTDQATVDQLKQDQAPPSPRPSPGSSSSAAAALLPSRWAITLLLCFAASYYFYF

SEQ ID NO: 125996 - protein, 193 aa, Oryza sativa
  Clone ID: PAT_MRT4530_28586C.1.pep
MKPDGETQLRPTAAGHPDPGLGTSSAEYVASLGPATAPVSYPYISTYYGGTYGAYSGQPLVNAALMAMPPHSVPLVTDAVVEPIYVNARQYHGILRRRQSRAKAESENKANKIRKPYLHESRHLHALKRARGSGGRFLNSKAVEGKQDTKSVDKKDGAVPSEEKRDKKLANSIIKLENSSPTTQPGADASDVV

SEQ ID NO: 125997 - protein, 57 aa, Oryza sativa
  Clone ID: PAT_MRT4530_28587C.1.pep
RKEKVRITPPNYCGRPNYPPEPQNRTFFTPNYANRTNYPPRPNQWWFWSTWRTRGSP

SEQ ID NO: 125998 - protein, 827 aa, Oryza sativa
  unsure (1)..(827): unsure at all Xaa locations
  Clone ID: PAT_MRT4530_28588C.1.pep
SNWCSLVIEDVPVVRDYPDVFPAELPRMPPERDVEFRIDLVLGTQPISRAPYQLARPFQEELKKQLDDLLSKKLIRRSVSPWGAPVIFTEKKDGSWRMCVDYRALNAATIKNKYPLPRIEDLFDQLKGAKVFSKIDLQSGYNQIRVREEDIEKTAFSTRYGHYEYRVMSFGLTNAPAYFIEAMNSMLHSFLDNFVVVFIDDILIYSKDVEEHERHLRMVLGTLRENKFXCKLKKCEFWLPEVAFLGHVINQRCEEFXLGMAGYYRRFVKDFSIIAKPMTMLTHKDVKFQWTDQCERSFQQLKQRLVTAPVLTLPQPGKCFTVYSDASXVGLGCVLMQDGNVIAYASRQLKKHEQNYPTHDLELATVVFALKIXRHYLYGESCDIFTDHKSLKYIFTQKDLNFRQRRWLELIKDYDLNIQYTPEVKEEILREAHXTPYTVHPGENKMYHDLKKIYWWKRMKVDVAKYVASCGVVRLHGVPRSIVSDRDAKFSSKFWESVQEAFDTQLKFSTAFHPQTDGQSERTIQTLEDMLRSCIISWKGSWEDHLPLVEFAYNNSYHASIRMAPYEALYGRKCRSPLCWDSIGERAILGPDWVQQTTERIAEIRQHMLAAQSRQKSYADVRRRELEFEVGDQVLLKVSPTKGVVRFGTKDKLSPRYIGPFLIVERVGILAYRLELPESMKGVHDVFHISMLRKYLRDPEHHITVESVTIGQDLTFESRPVRILEESERVLRHRTIKYVKVLWTHQTEREATWELESQMREKYPELFTSGELYKSYRAGQEEQRSQGIGRKRGKVGDFLNIVVYAXFCSTSVEGSNVGGVESEYRRS

SEQ ID NO: 125999 - protein, 94 aa, Oryza sativa
  Clone ID: PAT_MRT4530_28589C.1.pep
MGVQFGSLFMFLWKELSSLVADLRLPQAEILLCWRLRYVRHQQGHVFGGFASGRPKATASEEISLLAGVPFSAASEDAFWLAAESGYRCEPSRV

SEQ ID NO: 126000 - protein, 199 aa, Oryza sativa
  Clone ID: PAT_MRT4530_2858C.1.pep
NTLLDSGSRGQPTRDGHNKVYKSLSDVIEGKEGRFRETLLGKRVDYSGRSVIVVGPSLSLHQCGLPLEIAIKLFQLFVIRDLITKRATSNVRIAKRKIWEKEPIVWEILQEVMRGHPVLLNRAPTLHRLGIQAFQPTLVEGRTICLHPLVCKGFNADFDGDQMAVHLPLSLEAQAEARLLMFSHMNLAEGAIGTPIALI

SEQ ID NO: 126001 - protein, 58 aa, Oryza sativa
  Clone ID: PAT_MRT4530_28590C.1.pep
CRARQPTLPARLVNALDTDILWTIRYSMFRRTNRYFVAYVVDPQIFDVSQKQLLFRGL

SEQ ID NO: 126002 - protein, 290 aa, Oryza sativa
  Clone ID: PAT_MRT4530_28591C.1.pep
MDDRIPPPSPLQYSPSPVHSSPHPLSSLRYSSSERERYLAELLAERQKLAPFVQVLPFCTRLLNQEILRASSLPPNHNFVDPERIEHGSPLRLPGLPVNGQPMDLEGWSGMQTENMRVLQASSMGWNGPPAITGTPVVKKVVRLDVPVDKYPNYNFVGRLLGPRGNSLKRVEASTQCRVYIRGRGSVKDSVKEDKLRDKPGYEHLNEPLHVLVEAEFPADIIDTRLNQAVTILEDLLKPIDESMDYYKKQQLRELAILNGTLREESPSPHLSPSVSPFNSTGMKRAKTGR

SEQ ID NO: 126003 - protein, 118 aa, Oryza sativa
  unsure (1)..(118): unsure at all Xaa locations
  Clone ID: PAT_MRT4530_28592C.1.pep
QAENIYEGCIGGQQRREYHLFIICPTIINHAEKKKKFQPTNMIIKYLLMQLRGPLRRIPPQNSKELFYFLQAPKFVQLGPPLYAKKNAHPPQNCGVFEGXKKKKKKKKKKKKRKGGRS

SEQ ID NO: 126004 - protein, 83 aa, Oryza sativa
  unsure (1)..(83): unsure at all Xaa locations
  Clone ID: PAT_MRT4530_28593C.1.pep
PPQRIPPXKGLPXEPGIFPATXSSLGPPFGRATLPRYAKCYXQREPGRSLSXPEYLKCESMXEELPXNLFWKFFMILKNYPKK

SEQ ID NO: 126005 - protein, 63 aa, Oryza sativa
  Clone ID: PAT_MRT4530_28594C.1.pep
MAALPSSFLSSLPSLTFIISLSSGVLPVNEEERGEGDGWSSRARGFISVAILTGAQAQGKERE

SEQ ID NO: 126006 - protein, 369 aa, Oryza sativa
  Clone ID: PAT_MRT4530_28595C.1.pep
MASSSSSWLVLLSAALCIGALPASHAARAFFVFGDSLVDNGNNNYLITSARADSPPYGIDTPDHRATGRFSNGKNMPDIISEHLGAEPVLPYLSPELDGDRLLVGANFASAGIGILNDTGVQFANIIHIEKQIRYFEQYQDRLRAVVGDEQAKKVVAGSLVLITLGGNDFVNNYYLIPYSPRSREFSLPDYIRYILSEYKQVLRHIHALGARRVLVTGVGPIGCVPAELALHSLDGGCDAELQRAADAYNPQLVAMLAELNAEVGGDVFVGVNTKRAHDDFIEDPRAHGFETSTEACCGQGRFNGMGLCTLVSNLCADRDSYVFWDAFHPTERANRLIVQQFMHGSLDYITPMNLSTILKLDQQAQLRN

SEQ ID NO: 126007 - protein, 137 aa, Oryza sativa
  unsure (1)..(137): unsure at all Xaa locations
  Clone ID: PAT_MRT4530_28596C.1.pep
NILLYIVLVFCFIYICRSYLSRNNYVATLLEICNGIGLVFIYMIALCHMXRCRVVFSSVSAMLRLLDTIKLCYMSRIYRGRPLMVTAQYGYSSTYVYRAKRLSYCSFVSITGWMGMTDCPKELSNQGWFLDIPGGQN

SEQ ID NO: 126008 - protein, 45 aa, Oryza sativa
  unsure (1)..(45): unsure at all Xaa locations
  Clone ID: PAT_MRT4530_28597C.1.pep
PSVRLNRNLAQAQALVAFNLLSTYXIYPRYYSAPGSMTTLGGVLD

SEQ ID NO: 126009 - protein, 45 aa, Oryza sativa
  Clone ID: PAT_MRT4530_28598C.1.pep
MELLLFFVQCICVKDPTAIRDLRSCNPVPLGSPTRSPISATTLQY

SEQ ID NO: 126010 - protein, 159 aa, Oryza sativa
  Clone ID: PAT_MRT4530_28599C.1.pep
PAVASARHTDREKLKRIDPCAKQDYGHEGVGQKERAKSDGKYKRESNSNACKQDNEQKRIVTNGYRKRRSKQRRRKIHLPTNRPRRKKKTTMKRKVASKQRRADRTKRGTRQQCPHRIPPGKNSKRERQHSTARDANNGEGTVCRGDNSKNDAATQNIV

SEQ ID NO: 126011 - protein, 67 aa, Oryza sativa
  Clone ID: PAT_MRT4530_2859C.1.pep
MMKKLRVAKNEGARKHTYKEPPLGDLRSQKGVRYLPAMQTNANRQNAKERQGKKRRRQRQAGGAVDL

SEQ ID NO: 126012 - protein, 104 aa, Oryza sativa
  Clone ID: PAT_MRT4530_285C.1.pep
IKLTRKRHLNATCDKELVKRDTWAPYQLKPGTMVSMDLICIGFISWGCVVSGYERSRKTQRQKLGSKVNLFVTCITKCYGLHLVLLLLVLSRALGVEGWQRQLA

SEQ ID NO: 126013 - protein, 50 aa, Oryza sativa
  unsure (1)..(50): unsure at all Xaa locations
  Clone ID: PAT_MRT4530_28600C.1.pep
MCGIFAYLNYNVSREXRYXLEVLFNGLXRLEYRGYDSSGIAVXGDVSLLR

SEQ ID NO: 126014 - protein, 143 aa, Oryza sativa
  Clone ID: PAT_MRT4530_28601C.1.pep
MQDLPQVLNVVFVGAARRLVEESGATGGECRGGGTEKAVGGGAARCRSLANFNHLVLPATTPSQGSEHHYSPRASATCPALRSPDIIIKVKQSLEKYNPTSIVHAKSGETPSAAVASSTASSAPGREAWKAQSALAPFPDLLS

SEQ ID NO: 126015 - protein, 331 aa, Oryza sativa
  Clone ID: PAT_MRT4530_28602C.1.pep
MEARGSRGMRLWLLSVAVMAMAMATRSQAQLQVGYYDTLCPAAEIIVQEEVSKAVSGNPGMAAGLVRLHFHDCFVRGCDASVLLDSTQGNRAEKDAPPNTSLRGFEVIDSAKSRLETACFGVVSCADVLAFAARDALALVGGNAYQVPGGRRDGNVSVAQETNGNLPPPSANVAQLNQMFGAKGLTQAEMVALSGAHTIGVSHCSSFSNRLYSSGPNAGQDPSMDPSYVAALTTQCPQQQGQPAAGMVPMDAVTPNAFDTNYYAAIVANRGLLSSDQALLADQTTAAQVVGYTNNPDSFQTDFAAAMVKMGSIGVLTGNAGTIRTNCRVAS

SEQ ID NO: 126016 - protein, 219 aa, Oryza sativa
  Clone ID: PAT_MRT4530_28603C.1.pep
THLRDSLLFIRTHSVNVGILKNSNIGFMVSNHGFEANPGKIAVIHSMEPLADLKKLHKLTGCMVSLNRFTSQLGERGMPFFMLLKKSDDFTWTPEAQAAFNDFKRCRREEDGSIKKIQRSVYFISEVLSESKTRYTQIQKLRHAIFITVRKLSHCFQAHPVSVVTSHPLRYVMFNKEATGRIAKWAQLMAFDISFQLRVAIKSQVLSDFITEWTEEQQP

SEQ ID NO: 126017 - protein, 459 aa, Oryza sativa
  Clone ID: PAT_MRT4530_28604C.1.pep
MDVLMLSSLGGQETLKSPQQSNDAFLFTVRSMTSLPHRDLDRSDLTQKKEILEWFQTLKFPDGYGSNLRRGVNFKKMRINGSKSHDYHIMMECLLPVMFRGYFQPYLWEVIAELSFFYRKLCAKEVDPIDLESMELQVPVLLLYTVHNPVARYNVIVESRECSLSLFSIKGDSISRGVTRHLTEVEWEAAMLYVLTNLPEVDDYIGKFLHEEWSRRGKPTRQQKENLLRNGARNGRPNFVTWFYQQSLIDMNINDDLKQVAKGCHTRVKTYSIYDVNGYRFRTDKYEKERPNATTINSGLVTIGQGENSDITDYYGYIKEIIELSFHVYEPFAVAHQATQVYYIPYPCKSVPALIDWWVVYKVQPTGKIAAPVDKDYDFLPNNDTVHYFQEDGLQGTFVVDLMEGLHNVSEATSRDAEGIVNDKDLQLLNGSNVLQQDESDSSDSDEDEEEGPIIDEYY

SEQ ID NO: 126018 - protein, 37 aa, Oryza sativa
  Clone ID: PAT_MRT4530_28605C.1.pep
CADAGNTSKLHKHPADNSKRLLLRQGGEWKDFPKQIV

SEQ ID NO: 126019 - protein, 1831 aa, Oryza sativa
  Clone ID: PAT_MRT4530_28606C.1.pep
MIERPQNNREALGDKNWIAAMQAEYDALIKNNTWHLVPYEKGQNIIGCKWVYKIKRKADGTLDRYKARLVAKGFKQRYGIDYEDTFSSVVKAATIRIILSIAISRGWSLRQLDVQNVFLHGFLQEEVYMQQPPGFESSSKPNYVCKLDKALYGLKQATRAWYSRLSKKLVELGFEASKADTSLFFLNKGGIIMFVLVYVDDIIVASSTEKATTALLKDLNKEFALKDLGDLHYFLGIEVTKVSNGIILTQEKYANDLLKRVNMSNCKPVSTPLSVSEKLTLYEGSPLGPNDATQYRSIVGALQYLTLTRPDIAYSVNKVCQFLHAPTTRHWTGVKRILRYLNQCTSLGLNIHKSASTLVHGYSNADWAGSIDDRKSTGGFAIFVGSNLVSWSARKQSTVSRSSTEAEYKAVANTTAELMWVQTLLRELGIESPKAVKIWRMRRLSSGSRGASSSADGSASAAISSRNRTRSSSSQQPTDPVQEEEQEDDEFWFCGPTRVPPRPTREEDKPVLRPIGDMQWEVQDYGQSTRVPNGILTTLIKENFPGVVKFKGRDEPAWSPEHYLLKPDNAKANQARLPSLLHRVEEEFWGFYRWAEGTEVEARRVVHNCVKKLFVDIFYEARILAVITYHKKILKTDIDRPTACRTYLTKAEYMKAKPWWFLNAGRAWALLSDLRWCNPEWQAYSRACSERRAKMKTPAHRQGSANLHRYHKNLEKKMGTPVHVLKAYAHANRVDPDEGYCDEDSSQNMLLEAYARAFTERHGEDSNWRTEPIDGVAVHMAGGGKKHGRFFLLNGLLKTPDVLADVGRSRCSLDDPRPSRRLRPNPDDSARIEELERQLQCEREEREQERERAREEREQERERAREERERALEEMERTRKEMEQEREQARVERVREHELFQEKTSYFTCALEVLQRKLNINFLPPCTPTLTHPQKRMEEDRSWMYNGRRKRNQGFDALLNVFGALLPQGHKLPLNLYEAKKFLSALTMPYEKIDVCPKYCMLFREENSEKTHCDKCGESRYVEVQNSYGEKKQLNIPMKVLRYIPFIPRLQRLYMSEPQAKQMTWHKYGHRYHPNKIVHTADAEAWKQFDRDFSEFASDARNVRIAIATDGFNPFGMGAASYTCWPVFVIPLNLPPGVCMQKHNMFLSLIIPGPDYPGKKISMYMEPLVDDLLHAWEHGVQTYDRATKQNFNMRVSYLFSFHDLPAYGIFCGWCVHGKMPCPVCMEVLKGRRLKFGGKYSFFDCHRQFLPHGHIFRNDPNSFLANTTVTTEPPHRFKTEEVHVRLQRLQPAANGEGFEGYGEDHNWTHIPGLWRLPYFHKLVLPHNIDVMHNEKNVAEAIFNTCFDIPEKTKDNVKARLDQAILCNRPDLNMIRRQTSGQWLKPRADFCLNRTQKKEILEWFQTLKFPDGYGSNLRRGVNFKKMRINGLKSHDYHIMMERLLPVMFRGYFQPYLWEVIAELSFFYRKLCAKEVDPIELESMELQVPVLLCKLEMIFPSGFFNPMQHLILHLPYEARMGGPVQYRWMYPGERDQKDLKSKVKNRARVEASIAEAYILDEIANFTTIYFADQVYTVHNPVPRYNVTVESRECSLSLFSIKGDSTSRGVTRHLTEVEWEAAMLYVLTNLPEVDDYVGKFLHEEWSRRGEPTRQQKENLLRNGARNGCPNFVTWFYQQWFDPAQTRYTPQYGLVEVAHSSTLAVYEPFVVAHQATQVYYIPYPCKSVPALIDWWVVYKVQPTGKIAAPVDKDYDFLPNNDNVHYFQEDGLQGTFVVDLMEGLHNVSEATTRDAEGIVNDKDLQLLNGSNVLQQDESDSSEFDEDEEEGPIIDEYF

SEQ ID NO: 126020 - protein, 355 aa, Oryza sativa
  Clone ID: PAT_MRT4530_28607C.1.pep
MVTFFLDTGKESGEDGFMVYGFALPQVLQSSVGETNILIGCRVWLHEVDATSLDGGQVIGFHSETPDLADKEGAVVKASDQDKHLVHGVHLVYQVHGFALPEVVQSWNGCSHHDDVHIAGLLNSLVAFFLDTNEDNGEDGSMVGEMHLIEDRCQIHKVAGKEVNTINGEFVVATSLTSSAWMSSLEWATLRMKGVEHAGLMGWRHLQDHDKANGHVGDEEVLFHEVDAASLDSRQVVSFDRETPDLADKEGAVVKASDRDKHLVTEIQQARSEILRKPTDVIKVFRWSWAVQRRGEGRRWGVVKGDAGEAVRRCAGTTLARRRGTSTAARHTQLRGKKSSSKVKKRMCLLIENVH

SEQ ID NO: 126021 - protein, 97 aa, Oryza sativa
  Clone ID: PAT_MRT4530_28608C.1.pep
MSAMVGGKVTAAVVHDVIDVLQLVLPHALRSRAVPLQPIAAAATAATTTSSSSSLTSGATSTPGMSNIVDTAADLAYSRAGRHHRQIRAGVNCRRRI

SEQ ID NO: 126022 - protein, 130 aa, Oryza sativa
  Clone ID: PAT_MRT4530_28609C.1.pep
MGRLWKSTDDVELLGLATRRGRDRVDKNGPAPAPLRVHPALDRREELGKINPQPRTLPGFPQPSGIKGRMVWETCSQSERRATGEGGEQYGVPAVGEGGNGKGCLRLAGSGETTSAGTTVRATSHGGEER

SEQ ID NO: 126023 - protein, 502 aa, Oryza sativa
  unsure (1)..(502): unsure at all Xaa locations
  Clone ID: PAT_MRT4530_2860C.1.pep
MIDQYKHQQLQIGLVSPQQIKAWANKTLPNGEVVGEVTRHSTFHYKTDKPEKDGLFCERIFGPIKSRICACGNSRASGAENEDERFYQKCGVEFVDSRIQRYQMGYIKLACPMTHHVWYLKGLPSYIVNLLDKPLKKLEGLVYGDFSFARPSAKKPTFLRLRGLFEDEISSCNHSISPFFSTPGFTTFRNREIATGAGAIREQLADLDLRIILENSSVEWKELEDEGYSGDEWEDRKRRIRKVXFLIRRMQLAKHFIQTNVEPEWMVLCLLPVLPPELRPIVYRSGDKVVTSDINELYKRVIRRNNNLAYLLKRSELAPADLVMCQERLVQEAVDTLLDSGSRGQPTRDGHNKVYRSLSDVIEGKEGRFRETLLGKRVDYSGRSVIVVGPSLSLHQCGLPLEIAIKLFQLFVIRDLITKRATSNVRIAKRKIWEKEPIVWEILQEVMRGHPVLLNRAPTLHRLGIQAFQPTLVEGRTICLHPLVCKGFNADFDSDSPTPVVA

SEQ ID NO: 126024 - protein, 224 aa, Oryza sativa
  Clone ID: PAT_MRT4530_28610C.1.pep
MESEGFHKIMAYFPDNLVNLPPVPDEPHCVGTITTAATILALPLMVELDAYVHYIMESVGELLLIRSFSVEADNLPTVEAGCIYFMKQNLANNNFLKKLAILELNGNRYGDASIATFFKLDTGSFVRKCVLVLRDYLFIANMAIGLVMILEMTPPHKTSMLNPFHACVRWDDQESEGFHKVMAYFPGNFVNLAPIFDEVHLTNHGSILSIILICVEEECDQAVQ

SEQ ID NO: 126025 - protein, 333 aa, Oryza sativa
  Clone ID: PAT_MRT4530_28611C.1.pep
MVLEESTIPVGVFHNIVMTSHLMPSRAAGSRHEDPALLFTNAWKAFGDFAEPFGCQVSDFSKRMVWELPDCSIDKQLIPSQSARRKLALGDSASRRVRDNQTHEPSGQFSRGGAPPSASIGHTRRDTFRQRKPNTSRPPSMHVDDYVARERNIEGASSASNMVSSTPRGALSGRPPSIHVDEFMARQRERQNPVLAPSGDATQVRSKSTLDDNVSTKPEKPRQPKADLDDDQEINIIFDEESGSDDKLPFPQPDDSLQSPPVIIGENSPGPVVDETENQQNGINLFSGTVVSESDEACETVISSQTAIRQESNIPSERKFSVSSPEKVMFPDH

SEQ ID NO: 126026 - protein, 72 aa, Oryza sativa
  Clone ID: PAT_MRT4530_28612C.1.pep
AHRNSSRRRPPACTPAARGRRRRRHPGRRRRAAAPAWPPSERGPPRGRRPAQRRRRRPGRRGRRGPRRRRGP

SEQ ID NO: 126027 - protein, 215 aa, Oryza sativa
  Clone ID: PAT_MRT4530_28613C.1.pep
MARNILAPVAGTLRGHPSELHRRCILVRRLPSCTVPGEVCDMFASIEAIAVSGGLGMAVVVFGVAVADCMSAAVLRTGAGFFEPVPPLHLGPPLVLAAAMDIKLALHPRRAPPRESGAGEEAMRVSWFSMLEGDRRGRPVEATTALVASLASRREGPTPGGADGGEPRYYGTSYTYWRTDDTEFFCMEDASRRAADLGDPHKIPDKIWPYQYWFD

SEQ ID NO: 126028 - protein, 35 aa, Oryza sativa
  Clone ID: PAT_MRT4530_28614C.1.pep
SDAYTKWLPSLRQSGCFLSHAFVVDETILQCIIAR

SEQ ID NO: 126029 - protein, 70 aa, Oryza sativa
  Clone ID: PAT_MRT4530_28615C.1.pep
MPTFTELAQPIKSASARDALMGNSSLNLIDYLFRIEISSKLHVACTRASPPSPPYHTDTGTQRLPRPPQV

SEQ ID NO: 126030 - protein, 40 aa, Oryza sativa
  Clone ID: PAT_MRT4530_28616C.1.pep
MLIYIYNIINLILRPDYYCLTKGYSCCCLQLVTLVPKLQA

SEQ ID NO: 126031 - protein, 69 aa, Oryza sativa
  Clone ID: PAT_MRT4530_28617C.1.pep
APPALHFMLPGSYVVWNCERIHHFTQETAMTMITHTALYTTHYRESWYALQVAGPGIPRVDTTRPEKTK

SEQ ID NO: 126032 - protein, 379 aa, Oryza sativa
  Clone ID: PAT_MRT4530_28618C.1.pep
MSSGGGGGGGGDRHGPYHQHGHLGRGEGADYVYSSSDMESFFFSQPGGVGIGGGGGGVVGAGGADEIMPYSSITDYLQGLLDPSGLARHLDVACPSSQDTVVKQELSVDVTSHDSQGTGGVAGEGVAQATPNSSASFSSSDGEAEGGKSSRRCKKGQAKAEEEDDKDEEDGENSKKPNKPKKKAEKRQRQPRVAFLTKSEVDHLEDGYRWRKYGQKAVKNSPYPRSYYRCTTPKCGVKKRVERSYQDPSTVITTYEGQHTHHSPASLRGGGGGVGIVGGHHHHHLFMPGVHGLPPSHLMPAGFHPELMGLMHHHPAMAAAAANPSMYFPGVAASAPPPPAVAGGGAMPPNDHPPLQQHHFTDYALLQDLFPSTMPSSNP

SEQ ID NO: 126033 - protein, 978 aa, Oryza sativa
  unsure (1)..(978): unsure at all Xaa locations
  Clone ID: PAT_MRT4530_28619C.1.pep
MVINLSSPPIFLLFFLWCVVVFFVAGDGGAVVAEAALDAQAAYLSQMKQEFAGPAMARWDFSAPAVDYCKFQGVGCDASGNVTAIDVTSWRLSGRLPGGVCEALPALREVRLGYNDIRGGFPGGLVNCTSLEVLNLSCSGVSGAVPDLSRMPALRVLDVSNNYFSGAFPTSIANVTTLEVANFNENPGFDIWWPPESLMALRRLRVLILSTTCMHGGVPAWLGNMTSLTDLELSGNLLTGHIPLSLARLPNLQLLELYYNLLEGVVPAELGNLTQLTDIDLSENNLTGGIPESICALPRLRVLQMYTNKLTGAIPAVLGNSTQLRILSVYRNQLTGELPADLGRYSGFNVLEVSENQLTGPLPPYACANGQLQYILVLSNLLTGAIPASYAACRPLLRFRVSNNHLDGDVPAGIFALPHASIIDLSYNHLTGPVPATIAGATNLTSLFASNNRMSGVLPPEIAGAATLVKIDLSNNQIGGAIPEAVGRLSRLNQLSLQGNRLNGSIPATLADLHSLNVLNLSYNALAGEIPEALCTLLPNSLDFSNNNLSGPVPLQLIREGLLESVAGNPGLCVAFRLNLTDPALPLCPKPARLRMRGLAGSVWVVAVCALVCVVATLALARRWVLRARQDGEHDGLPTSPASSSSYDVTSFHKLSFDQHEIVEALIDKNIVGHGGSGTVYKIELSNGELVAVKKLWVSRRSKQEHGHGGGGGCLDRELRTEVETLGSIRHKNIVKLYCCYSGADSNLLVYEYMPNGNLWDALHGGGGWGFGFLDWPTRHRVALGVAQGLAYLHHDLLFPIVHRDIKSSNILLDADFEPKVADFGIAKVLQARGDRDASTTTIAGTYGYLAPEYAYSSKATTKCDVYSFGVVLMELATGKKPIEPEFGDTRDIVQWVSGKVAAGGEGEALDKRLEWSPFKEEMVQALRVAVRCTXQHPAASAPTMADVVQMLAEAGPAAGRTAKDAANKKDSSGEPKL

SEQ ID NO: 126034 - protein, 157 aa, Oryza sativa
  unsure (1)..(157): unsure at all Xaa locations
  Clone ID: PAT_MRT4530_2861C.1.pep
DTLEVYKDGHAVRIPKGLTGLHDCEDVGVNIQRVXTTVRLCIARKLRDSASCEAQKQYNDEDFCSMPXQLPGMKIKTNTPISNKAREWCDRRLLEMKYTMHCPMMDSGRADVICRYHYMAFGADRXRLSDINPARRVXRSVGPVWKTVMTRLIQRSM

SEQ ID NO: 126035 - protein, 133 aa, Oryza sativa
  Clone ID: PAT_MRT4530_28620C.1.pep
HSRRRPSLSSAPAASSRLPLLARAPSGRAVFSLGLAATSSPSVSPPFRGGSTGDASSPAKQWRCRHCSTSGRHCRVSRAPTDVAVSSVDVAASSSTPAAPRFRRNAVAAPASPSSSSPAFFRPPLPPPRLVGL

SEQ ID NO: 126036 - protein, 178 aa, Oryza sativa
  Clone ID: PAT_MRT4530_28621C.1.pep
MCGGSGGGSKGGGAATPSTRWCPTPEQLMILEEMYRSGVRTPNAAEIQQITAHLAYYGRIEGKNVFYWFQNHKARERQRLRRRLCARHQQQPSPPSSTVPPAPTAAAAGAVVQVHPAVMQLHHHHHHHHPYAAAAAAQSHHLQQQQQQQAEWPAAVDYCSTASASASATAADMAIPPC

SEQ ID NO: 126037 - protein, 992 aa, Oryza sativa
  unsure (1)..(992): unsure at all Xaa locations
  Clone ID: PAT_MRT4530_28622C.1.pep
MMMTEAAPRDDEPGDRRDVDRRGRTVTRKRRWQPAAAARRKGTAWNTPLRCWRRWWCSGATSRRGGMGGRKDAGDEEDGEAGAATAFRRNRGAAGVEGGVAEPREVVATSAGAREPRQWQPEVEQWRQRHCFAGEDASPVLSPRNGGLTEGEEVAARPREKTARPDGAPARRERRLEAAGAEEREGRRLGPVHQEHFQDEDEGRNSQWCPSGIFTKNQKRRVQRIRNRERFQEVQQEINHRLKKTKTKQEWRVKSKVLSADEIEADKAKRLARGKAIASSSPMSKMMVDGGAAVNLMPYTTFRKLDPRTNGPQYPPYPVYGYPPSTVALRVGGFDAQGSTTMTSSSLDDNVYPGINQGTSASTMMVWTQVGEIVFPVYTTMPISTGPVITSSKNDMVTTLDDLMSKDPPAGAENGTSTTSAPEKDPSAASSCPSDGKHEPTRTTPEATRTGHPRRVYDRRQPTAPGGGCVAFTRTVRDVRWPKKFLPGAIEKYDGSTDPEEFLQVYSTILYAAGADNNALANYLPAALKGSARSWLVHLPPYSISSWADLWQQFVANFQGTYKRHTIEDDLNALTQNSVRRPRSLHNPGIGDKTDHNCSQAVRNCAKDTPESSKKKSRKNGKRKAQAEILAAKYIDPPKHPDPQGDDTRKTWCPIHKSDKHSLETCLVFKKALARQLALDKCKRVRVVEKAAEAATQDSDLAYPDSDLHVSHIFGGSTLYSSKREYKKVEREVCSTWQGAASKMKWSEQKIEFSEADHPKTAITPGRYPIMVEPTIRNIKVARVLIDGGSSINLLFASTLDAMGIPRSELTPTDQPFHGITPESSSKLLGKIMLPVTFGQANNFRTEQITFDVAEFDATYNAIIGRTALAKFMXPKGTITIQGNAKLAVQCDKRXLDMVEQTPNPPATAEPPKKRTVQGALNDQLGHNVKAYVNGIVVKTKKNNSLIDDLRETFDNLQRYRLMLNPEKCTFRVPSGKLLGFLVSGRGIEANP

SEQ ID NO: 126038 - protein, 510 aa, Oryza sativa
  Clone ID: PAT_MRT4530_28623C.1.pep
MDKTIVLYPGLYVSHFVPMMQLADALLEHGYAVAVALIHVTMDEDATFAAAVARVAAAAKPSVTFHKLPRIHDPPAITTIVGYLEMVRRYNERLREFLRSGVRGRSGGIAAVVVDAPSIEALDVARELGIPAYSFFASTASALAVFLHLPWFRARAASFEELGDAPLIVPGVPPMPASHLMPELLEDPESETYRATVSMLRATLDADGILVNTFASLEPRAVGALGDPLFLPATGGGEPRRRVPPVYCVGPLVVGHDDDDERKENTRHECLAWLDEQPDRSVVFLCFGGTGAVTHSAEQMREIAAGLENSGHRFMWVVRAPRGGGDDLDALLPDGFLERTRTSGHGLVVERWAPQADVLRHRSTGAFVTHCGWNSASEGITARVPMLCWPLYAEQRMNKVFMVEEMGVGVEVAGWHWQRGELVMAEEIEGKIRLVMESEEGERLRSSVAAHGEAAAVAWRKDGGAGAGSSRAALRRFLSDVGGRELRSVETLLLWAFHEIVVARIGLPLD

SEQ ID NO: 126039 - protein, 81 aa, Oryza sativa
  unsure (1)..(81): unsure at all Xaa locations
  Clone ID: PAT_MRT4530_28624C.1.pep
ETKTPSQFAKXSCFXFFFFFRIREEDVHLAXPXGPDGGAPCCRAXXXXGXGXGLPRXXXCELXRAQGMRXAAAEAAAAAGG

SEQ ID NO: 126040 - protein, 80 aa, Oryza sativa
  Clone ID: PAT_MRT4530_28625C.1.pep
MAWWRKKVVFPARRAWAAVSTRVRARKPGFQEFVPKIPAFAQPPKLNALLKVNLPGGYNATVKWQRPTRDYQQCTLPCKC

SEQ ID NO: 126041 - protein, 417 aa, Oryza sativa
  Clone ID: PAT_MRT4530_28626C.1.pep
MHHLLRLRRSILSAAAAAGRTLSTAAPPSRPRWAMIFHVEAARSSLAALRASFQLAEPPRASHVHVPAHLLDLRPLTDPRSQMRLLGGCVRGASGDGLLLLDFTDGLSTGPVVGVHPNGLARQMTGFDRRFDVTRFVCNPVTGQLFRMPDIDGTKDTSWCQFTGILTQSDRPDGPPDRYAVAWLSVDGEDNRRIAMRRFLSQKGEWDKLVGLPSPLPLARQMDVSHEVVAFAGRLWWVDVSWGVVSVDPFSDRPELQFVQLPRGSVTEPVEGIRKLGRFRLVGVSEGRLRYAEVSQKEPFVLSSFALDDNGSSWTLEHRVALSRLGVDGCHPDPEEDDTPRIGVIDPLNASTMYLTIGDSCVAVDMERGEVLGRSQIGCSTGPFSPFTGFLTPCILPPWLEEFQIPSAGSLLSHALF

SEQ ID NO: 126042 - protein, 892 aa, Oryza sativa
  Clone ID: PAT_MRT4530_28627C.1.pep
MRRCSCWQLLWLVLVCSWRIAAAQAQAAPRTDPTEAAALNTILGRWGKKASSEWNISGELCSGLASDKTNWDDYPNINPFIKCDCSYNNNSVCHIIKLRVYKLNVVGQLPSELQNFTYMEDLNLAFNPLSGQLPKEIGNLTNLLMLGVSFNNFTGELPEELGNLVKLEQLRAQDNDFTGKIPDNFGSMSSLEDMRIGDIVNGSSSLAFISNLTSLSNMILRNCRISGNLGLVDFSKFANLTYLDFSYNQLSGRFPSWVNQNNLQLNLVANNFVLVGTNSSILPSGLGCLQQDTPCFRGSPEYYSFAVDCGSNSSTSASDNTIFEADPTSLGTAAYYVTSQTRWGVSSVGNFFQGTNGMDRIYSSSKHFQNTVDSKLFETARMSPSSLRYYGLGLENGNYTVLLQFAEFSFTETPTWQSLGRRVFDIYVQGALKEKNFDIRKTAGGKSFTAVNRSYTATVSKNFIEIHLFWAGKGTCCVPTQGHYGPTISALSITPNFTPTVRNGVPKKRSKAGAIVGIVIGASVLGLAALFGIFFLVKKRRTMAQQRKELYDLVGRPDVFSSAELKLATNNFSSQNILGEGGYGPVYKGKLPDGKVVAVKQLSESSHQGKSQFVTEVATISAVQHRNLVKLHGCCIDSKSPLLVYEYLENGSLDQALFRDTGLKLDWTKRFEIILGIARGLTYLHEESSVRIVHRDIKASNVLLDTDLTPKISDFGLAKLYDEKKTHISTAIAGTFGYLAPEYAMRGRLTEKADVFAFGVVALETVAGRSNIDNSLEESKVNLFGWAWSLYEKEQALEIVDPRIKEFSRDEALRVIHVALMCTQGSPHQRPPMSKVVAMLTGDVEVAEVIMKPSYITEWLHREGDSSYFTNYAGSATPEFSGHKESELSFIS

SEQ ID NO: 126043 - protein, 143 aa, Oryza sativa
  Clone ID: PAT_MRT4530_28628C.1.pep
KPRVALKQQGPNKNPRGEKLYPTKPNKKRRGGTPKRGPKITPPPPQKYPLNGGKKNKKILGDKKRGPIKKPKQRGNFSQGKILGPGELKPQTLTGKFGRTPNPGGDPLLKKNPAFPKTNQKKTPFKPQHPPLGGAFKAQNPLP

SEQ ID NO: 126044 - protein, 98 aa, Oryza sativa
  Clone ID: PAT_MRT4530_28629C.1.pep
LRKCSFTNSIHLSQHILEGFAKVPFSEYILTQEKMSSRETLDHNCWKSRILPWSRKMWPTAKSIWANCCNLQPSDSIKVLYADPLFIVSSRWTVLQGI

SEQ ID NO: 126045 - protein, 88 aa, Oryza sativa
  unsure (1)..(88): unsure at all Xaa locations
  Clone ID: PAT_MRT4530_2862C.1.pep
MWVPFWNPVRPPETALTSNGPSVFMPTPIRVMLDLMESLSRHLSNASGFIXNSFRVNGNCQNKTMLLLKPNLVLGPCNTLGPPPRIST

SEQ ID NO: 126046 - protein, 150 aa, Oryza sativa
  Clone ID: PAT_MRT4530_28630C.1.pep
FFIFIFYLLILFFFFLDPKFQTGHPLTDWLLTFTFFTHYRHLLTIWLPTSRTPRHTHPTHWWFNVAPWDGTYYVRLRGKTTHHICDLGNVLTRVTPQTVWWSLTLRVLNVTHVMTHHLNCVVARFVKLCLPENAFVWFLTPVGEISLGHP

SEQ ID NO: 126047 - protein, 44 aa, Oryza sativa
  Clone ID: PAT_MRT4530_28631C.1.pep
MTMITPSSNTTHYRESWYACRYRSGIPGSTHASARPEHRRGRVC

SEQ ID NO: 126048 - protein, 103 aa, Oryza sativa
  unsure (1)..(103): unsure at all Xaa locations
  Clone ID: PAT_MRT4530_28632C.1.pep
TPSSNTTHYRESWYACRYRPEFPGRPTRPKNDKSVKDLVMLLFETALLTXSGFSLEDPNTFGTRIHRMLKLGLSIDEDESAEADADMPPLEDDAGESKMEEVD

SEQ ID NO: 126049 - protein, 140 aa, Oryza sativa
  Clone ID: PAT_MRT4530_28633C.1.pep
MMKQYEEDYKYLVEEGLDLEEMKKLYHELATGGEITENLGVGAARCPVPHHLISSRSGTGAAVRTYTMPVRGADVTMPLLKPVTSDPPSCGLLPPQLSSLPALDSDGSGSAPPETGAAGSVYRGLPPASETDPGAGASGP

SEQ ID NO: 126050 - protein, 324 aa, Oryza sativa
  Clone ID: PAT_MRT4530_28634C.1.pep
MAQLPPKIPTMATAWPEFGGGHHHHAAHGHHHQRSPSMGAFLAAPLPPFPLPPPAPANGGAQQQQQQQQHQPSWVDEFLDFSATKRGAHRRSVSDSVAFLDPVSDDNAGVGAHDFDRLDDDQLMSMFSDDLQPPPPQQQPAAPAASASSPSDHNSMNDEKQDKGETDEAQSECDGATPGQPASPATVDPKRVKRILANRQSAQRSRVRKLQYISELERSVTSLQTEVSALSPRVAFLDHQRSLLTLGNSHLKQRIAALAQDKIFKDAHQEALKKEIERLRQIYHQQSLKNAESQPADAAPVRGRDNADLIGSEGAAAAAPCPHS

SEQ ID NO: 126051 - protein, 1158 aa, Oryza sativa
  unsure (1)..(1158): unsure at all Xaa locations
  Clone ID: PAT_MRT4530_28635C.1.pep
MSDASSDLGGARPGAVERDIEQVSRFPILRLARLGNAEEIPAVGCMIELGVAITALKKGAYLLKYGRRGKPKFCPFRLSNDESILIWFSGKEEKQLRLSHVSRIIPGQRTKRSYIWQLQIDLSHHVVFFFLHSLSDGKRFTREYSTIFKAIFQRYPRPEKECQSFSLISHDRSLDIICKDKDEAEVWFAGLKTLITRSHQRKWRTESRSDMLSSGTTSPRTYTRRSSPLSSPFSSNDSVHKDGVENYRLRSPFGSPPKVGLEKAFSDIVSYAAPPKPFFPSDSNAGSVHSVSSGQSDNTNLHSRGIPMDAFRVSLSSAVSSSSHGSGHDDGDALGDVFIWGEGTGEGILGGGNSRVGNSSGVNMDCLIPKPLEFAVKLDVQNISCGGRHATLVTKQGEIYSWGEESGGRLGHGVDCDVPQPKLIDALANMNIELVACGEYHTCAVTLSGDLYTWGNGTSNSGLLGRGNEVSHWVPKRVNGPLEGIHVSAISCGPWHTAIVTSAGQLFTFGDGSFGVLGHGDRQSLSVPREVESLKGLRTVRAACGVWHTAAVVEVMVGNSSSSNCSSGKIFTWGDGDKGRLGHGDKDTRLVPTCVAALVEPNFCQIACGHCMTVALTTSGHVYTMGSPVYGQLGNPQADGMLPVRVEGKLHKNFVEEISCGAYHVAVLTSRTEVYTWGKGANGRLGHGDTDDRSSPTLVEALKDKQVRTVVCGINFTAAICIHKWVSGVDQSMCSGCRLPFNLRRKRHNCYNCALVFCHACSSKKSLKASLAPNPNKPYRVCDSCYSKLNKGPETDRYSSAKRGSVIQGFNDSVDEELETKSNAQLSRLSSLESFKHMDSRTSKKNKKFEFNSSRVSPIPNGSSHWSGLNISKSFGSSKKFFSASVPGSRIVSRATSPVSRRASPPRSTTPTPTLGGLTSPRVVDGVKPNDSISQEVLSLRSQVENLTRKSQLLEADLERTTKQLKEAISIAGEETAKCKAAKEVIKSLTAQLKGMAEKLPEGAGLVKNSRLPPLPGISIPTDISVASESLGSPRSSGEPCSNGSNGLLVSNGPTSVRNKLSHPEIPKNGTRLPDSDSKHESEWVEQDEPGVYITLTALPGGTRDLKRVRFRNLRLCPPFLEXSRKRFSETQAEQWWQENRARIEMQSSFERFKLCSG

SEQ ID NO: 126052 - protein, 316 aa, Oryza sativa
  unsure (1)..(316): unsure at all Xaa locations
  Clone ID: PAT_MRT4530_28636C.1.pep
NDVDKATKGCMDAAAMAAKAILRQLYAMQEEGTFSCTRHPWCLLVLLCVCCLNYRNTQEEVKEVHVKQNVPAPSSYLLNKSLSEYTLHRNSTIEIRYREXSRTVSIIYLKLMLIFFIYTCCRXMTFDKKKXNVNDRLLYHTVPLHXIVKMLESLYPKTWSFLYFASYNIQKLLMHVAGLHREGLCYNGAFTSQNIIFHHDAFTVVNVSTVSFNAXSVCRDYTGIYIIFSTRFGPVYPLHFEHLFQIFKXCVLGMNSRDXXIVAFVTYHPSVESYVDRMKQLIILDNVLHTHSRHHTANVVALGGYTLKSKGLSAFC

SEQ ID NO: 126053 - protein, 95 aa, Oryza sativa
  Clone ID: PAT_MRT4530_28637C.1.pep
RTRGRLPNLCYFKTTHTVPTPYSIFRKRSILFIYISGVLVHGLITLPPFDVPVDWRAYPSKGFRSNFLALRIITTCVFWRPVLLTRFLGFDCAND

SEQ ID NO: 126054 - protein, 113 aa, Oryza sativa
  Clone ID: PAT_MRT4530_28638C.1.pep
MPSQNRFCANGVRLQRAVPPGDTAAGRRSAARPDSAAVPGENNGARARPDSDPPQLIPEPRRAAREWVVSSSRKSYLKSCKIWITGCASRFVLFFSNSGDHLFFSGAGEPKLR

SEQ ID NO: 126055 - protein, 534 aa, Oryza sativa
  Clone ID: PAT_MRT4530_28639C.1.pep
MASQSKKRRIAGGGDGEDRISELPDDLLGHILSFLPNNLAARTAVLSRRWRYIFGYVHTISFEEEEGEREDDWITMYFQAEEKKSMSWKLLDRMNAALLCRRRCAGRHVPLRSFHFACDSYHVWDRVIVDAWVTYVVCHSSQELHLDLRFWIGPICAGGERDRLSTIVDSEPPVFPGRHYELPRSLYSCVALQTLCLSYCDLNLLESIDLSLLKTMRLTGIHGSRSRIQRLISSCPRLADLTLEALRQLKTLSLLDKRLRSFALRCCHNVDNVAIDASELTTIAYRGAVSDDPSYTLSMHGSLAITSCTVDFCSEELITSEEEFDSSTHLHLKFDRLGSCIDSDLFPAAGFRTFTNLRRLELTGHVPDCGVAIAMRRILEMTPNLESLTLFLKPEKCNPTNCDSESESDGSSDSGYISHSDDDDDDTDGDDYGSNIGYNSHSEEDGDDSEEDSSPGIASFSAIRCLRRRVKEINLVHYEGDDGQATVARLLLRNALVLQCVCVVLTRGRIGMQMRKKRKIKRWMMSRSAKAVFL

SEQ ID NO: 126056 - protein, 314 aa, Oryza sativa
  unsure (1)..(314): unsure at all Xaa locations
  Clone ID: PAT_MRT4530_2863C.1.pep
MGPPQQARGGGIDIEACARPIAVDHRIKLPYYFRIAGNLLRQAKIYRDENNLVDLYVILLRYSSLVCETIPKHRDYHTFPTRPVDFFRLAPHNQSKLIEVLSELESLKPVVQRQITEHNRARGGAIESNSINGTIAVNNITKQHMTNPYTYQPFVGSNNGSFERPVPGGNHQMAPLMSAQPDRPTRKQLANLPFPKEETLARHSILGPNGLHGQWTGPVTAIKVQYPSDLDIIKSDVSSLFPSVLNQDGQNGPSTISTDSTQIENDDIKSVLSLDDGRWSKLAEECASVPSVSLEEEXSQLSIKQPSPPPVLAD

SEQ ID NO: 126057 - protein, 82 aa, Oryza sativa
  Clone ID: PAT_MRT4530_28640C.1.pep
RWMAPGCSYTIPNANHLHGNISDEEHLTLEGWKEVLSRLERPWGHICALELDDYMIWSRVFKVTGLMGPTNRFLRFPTNRRS

SEQ ID NO: 126058 - protein, 880 aa, Oryza sativa
  unsure (1)..(880): unsure at all Xaa locations
  Clone ID: PAT_MRT4530_28641C.1.pep
GFEPSADLFGVVFFATVNSKTVVTPAGTKKTVFGSVNFNVRPERSDLXPVNATMSKWDRHWMAKWFYHSIPFEAGSDAANALRWRRGAISPNRKPKVVVDGAMEARFVLLCRICSRLSCRDLVEELCMLHIFPLSQSWQVGIDQDEEVDGLPKLVMPAGANVLTLAQADTEARKMIGDVSVTEFSQLLTRQAAGRVNRVYGGELPPRATPHKRRAPDSDTDDEETIEDDDEEEEGDVGETEAVGEKAAGEAADNRAETPGYTPTPSPEPVETGVESNCSPLRQKDVEGAKALVAIAAAKVAKGGSIKKTSGKRLVDVGRVFSDDESSDETPTSPACRSLGLSTAPGVKVDAGRVGGSVAGASASIDQVAKTAARVFGSPVRQPVVSPLAPGKEKKTAVETSVSDYSLAVPHFAPGDFETRAELIPFVEGVSKLVSPAGSSSLFTEQNEFDEGCSAVKSLAVRILAAHCSTERTMRARLDGLKNRLRAKDDELGRKSLEMEGLAHALKETKAENKRLRAELEEGSEAKAEIERLKAELKKEQAHSAALTDYYNFTEPKMEALRQEVVEAETNAKMEAQRFTLEMAKATESAKTVXQTLRLALSDMGARMRGVPGEGASAFDFSEWTQQAGGAVSDCATTYGDSCARVSATFALGLLQQFGCEHVAEFPNFAKGDWEISPQDVSPALRAWRKQFWQKDGRSTAKACLLKQLAKAEAADQGEEPTAGGGRGDAEDHPEGARRKLCIRALFGYWRSKNEKFVAVKGLPKVWCPFRPVYREMIINGNSYKVLKVASWMRAHPGXTLEDYDSVHTERREDMVRFWRNHQKSDRQEAIAQRRYSLVCVSPPSPLRVVYDISSDDEPCSPNHFFGSGDCFGGEDVIYL

SEQ ID NO: 126059 - protein, 1154 aa, Oryza sativa
  Clone ID: PAT_MRT4530_28642C.1.pep
MAGRTATTAALGYMVLGLYRRREAKARVAAGFLGCYKDDGHQRHCARNGEREDRFGKLKVTIPKFCGTNDPEEYLTWEFKVDKIFRMRNYTEETKLHMASLEFDEYALIWWEQMLNQREEHDELAVATWVEMKHEMRARFVPSHYKRDLFERLQNMRQGTRSVEEYYKEMEKAMIRAKIYNTIVQLVHQATKAEHQVQEDAKVAHNTSFTTRSLSSGGRPTPKFNLSKNFISSNSPSLNLASKKEESTQSASKKFVVPTGSSTSSVGSTPKSSNIQCFKCLGRGHMQKDCPNNKTMLILEDGEYESTSEDKDDLAADLTHFDDAQEEDEENGVVYYDFEEGPSLVVTPKVLTVQPKIDHEQRCNLFQTKAKVDGKVCKVIIDGGSCHSLASKEICNKLGLNLVRHPHPYHVQWFSDCGEVKIQFMVQVTFQIGDYCDTVECDVVPMTVCHLLLGRPWQYDRAAQHDGRTNQYKLRWKEKDIVLRPMTPSQIINENCQKLEVVVQSDKKREQKIVIHKSKDGTWRMCVDCRAINSISVRYRHPIPRLDDMLDELSGAVIFSKIDLRSGYHQIRMKEGDEWKIAFKTKFGLYEWLVMPFGLTNAPSTFMRLMNHVLRAFIGKFVVVYFDDILIYSKTMEEHLAHIRQVLEMLRSERLFANFEKCTFCREKEGKPIAYFSEKLGSAQLNYPVYDKELYALVRALETWQHYLWPKEFVIHSNHEALKYLRGQANLNRRHAKWVEFIESFPYIVRYKKGKENVVADALSRKSVLLTQLDVKVSSLESLKELYSKDSEFSDPYSKCLDGKGWEKYHVHDGFLFRADKLCVPESSLRHDVERYVQRCVTSHKAKSKLNPHGLYTPLPVPNAPWEDISMDFVLGLPRTRRGRDSIFVAVDRFSKMAHFIPCNKSDDASHVADLFFREVVRLHGVPRTIVSDRDVKFMSYFWKTLWAKLGTKLLFSTTCHSQIDGQMEVVNRTLSMLLRMMIKKNLKEWEDCLPHVEFAYNRVVHSTTQLSPFEVVYGFNPITPLDLLPLPLQERANMEATKRADYVKKMHEKTKETIERIIQSYAAKANKDRKKMLFQPGELVWVHLRKDRFPEKRKSKLMPHGDGPFRVLEKITDNAYKIDLPGDYTVSNTFNVVDLSPFFGTEETDSRTI

SEQ ID NO: 126060 - protein, 199 aa, Oryza sativa
  unsure (1)..(199): unsure at all Xaa locations
  Clone ID: PAT_MRT4530_28643C.1.pep
TREPKTQSVRTHTSCQWRRSTGTRGPGASAAAPSSPSSRARRHPSRRPPPRPPRRRRRTAGRRSTTATPSRGPSSPSSRRRPRRRRXAAGSTAPGTGRPSRRRPRSPASARSRRPTPRRSRRAARTXRVPASRPRRRPAPPPRVGRRARSSGGCSSAAGRGRRHRRRRGTAASSRGGRPGARRRGCGATGGARADEAVH

SEQ ID NO: 126061 - protein, 573 aa, Oryza sativa
  Clone ID: PAT_MRT4530_28644C.1.pep
MPPPSLLSLLPAASVSPRSRRAARRRPPTASRLPVRGARAASPLHASSSSSSGGGEGGGGDELHLLEKPFPSPSPADEDESESTEAAPALSTEEALAPFLKFFQGKSTEPDEDDAAAGGGGGGGGGYVEEDEEDKGRGVPELPGDLAVGVVVGGDGRTLDIDVGAGGEPALMLAKEAVPMTGEEFEYLACDVASKDAAQFAAEGKVGVVVSGGEGQGEATGGRNGKGRGRGSPALGVGTVVFTEVLGRTLGGRPLLSARRLFRRVAWHRVRQIKQLNVPIKVKIFEWNAGGLLTRIEGLRAFLPKPEMMTRPRNFTDLKNTVGQQIHVCITRIDEKANELIISEKEAWAMTYLREGTLLQGTVRKLFPYGAQITIGDTNRGGLLHVSNITRGQLTSVGDVLKVGEEVKAIVIKSTAPGRIALSTKDLESEPGLFLSNKEKVFSEAEEMAQRYRDQISEKHQPAELDSSFDEVAPFDDEAVSYANWKWLRFSKSDKTNFNPRAESANGTFYYPASVLGSSIFRDTEYSSRTGRKLKAGNGSFKYPIYYYRRAQLGWHMIGSLEQQGTETNPRQY

SEQ ID NO: 126062 - protein, 73 aa, Oryza sativa
  Clone ID: PAT_MRT4530_28645C.1.pep
MGGMAAPVVHITVEKKDAQHVTPSVSIPRTSLSTFRGGRQGDVIHATVGKNMIDNYNTKIKESSIFAYSVNST

SEQ ID NO: 126063 - protein, 100 aa, Oryza sativa
  Clone ID: PAT_MRT4530_28646C.1.pep
FFAPLVFAREIFFLRQGTPGQKKKNLPPPKLLKKGVFMAKYPPPGYFFCTTQKIFQPYFFPSFFFFKPRAGCWQQLPPPRKSLFFDKKEILAGFPPLNKA

SEQ ID NO: 126064 - protein, 57 aa, Oryza sativa
  Clone ID: PAT_MRT4530_28647C.1.pep
FFFFFYRIKTFLLPQLLRMAIAVANTFHPENTVSAAQYLSTKPLCLAARAGKLSSSS

SEQ ID NO: 126065 - protein, 132 aa, Oryza sativa
  Clone ID: PAT_MRT4530_28648C.1.pep
CKGAQGGVGPVLPPLRGPAFFGLVWEISLFGIPLLEHNVASGDTWGPRPLCHGLEGVGGRPMFSGFFRVRSRAFEGENKAGMCGSHPPPGNGPGFKNPPPVARPISCLEKKRQRGKRKRGQKETKKQEHKNK

SEQ ID NO: 126066 - protein, 231 aa, Oryza sativa
  Clone ID: PAT_MRT4530_28649C.1.pep
MAGEEPWSSEASDDVPDTSHMSDEQFQQFIDQYWAEQGFNIWSWIRASRTSSSSTPGPTRRTAASWQAVTFDGDGVARFSGNSDRSGGLDDQATSGFSIVDLLDGILQADDDGNGGGATPASSMAIVNLPEITVGDEKGEAKDCPVCLQGFEEGDKLRKMPCADSHCFHEQCIFSWLLINRHCPLCRFPLPAETEEDEEVVQAENDDDDDDEETILCLHRLFADAADEYTS

SEQ ID NO: 126067 - protein, 491 aa, Oryza sativa
  Clone ID: PAT_MRT4530_2864C.1.pep
MAAAAEVDAEARSILERAAASSFPPLHAIHHLLSVGVCVRCIFRFFGAFSYAAPCLSLTASVLHSFLEEHDDSAKSGSCSCLSKDEAYCSICFGVLLPTCYQDDGVEPLRSVSPIDNVTSIISEAVQREGHQVDEFSLEISLPAVIAANDRAIRLYMKEKYGSANWFDEKIFSQQTMSVKEALRILLVPSVEKQMNVKHGNNSFRIRLTYTHDEGSQKLLRLLPNDRGRKRKTESRDGSSKRGSTDDDKQILSESDAFINKNLEGIQDQDLRSLFQLPPEKVLEPCHLVISCQRSPIYIGGRYLKLSRNVSQSCWIIDDERMGEASVEEIIGENVRAICKGDGYKFHAAGREDIDVRMLGSGRPFLVEVLNVRSIPSATEVQQIADKINDSEKKHVRVRNLKLVGSEIWTMMREGEAEKQKQYAALIWTSRPLTDDDLHNISLIKDMAGTYIKEFVHGDLGRTHPSVGVMLSCRAEILQLDVTDVKMDFLQ

SEQ ID NO: 126068 - protein, 82 aa, Oryza sativa
  Clone ID: PAT_MRT4530_28650C.1.pep
MNAATARHSKPGDDTQREKPRMRRDIAMSRHTLVDPPPPPHHPPQCAAGRADRPPPLDVVAGGGAWQHAMKAVEGGGRWSGG

SEQ ID NO: 126069 - protein, 61 aa, Oryza sativa
  unsure (1)..(61): unsure at all Xaa locations
  Clone ID: PAT_MRT4530_28651C.1.pep
RTLCDHPKLPKGKTVALFVLDXWCEANPDKYNCIHVAQTPFMDALKNGALDKRRLVKSHGT

SEQ ID NO: 126070 - protein, 92 aa, Oryza sativa
  Clone ID: PAT_MRT4530_28652C.1.pep
MEVSMMEQGKTTTLPQKVSVTPEHERPEALLDANLKILLMIIVTGVSLGVFVTCLVLAFVLDLTVEGRAMVVFTALVGVVYGVAGYNIIRAC

SEQ ID NO: 126071 - protein, 441 aa, Oryza sativa
  unsure (1)..(441): unsure at all Xaa locations
  Clone ID: PAT_MRT4530_28653C.1.pep
NAPYLCQKDGITLHCPEVECSSSXTQSFSECWYVPPENETSGYIFIHAEGGLNQQRIAICNAVAIAKIMKATLILPVLKQDQIWKDQTKFEDIFDVDHFINYLKDDVRIVRDIPDWFTEKDELFTSIKRTVKNIPKYASAQFYIDNVLPRIKEKKIMSIKPFVDRLGYDNVPMEINRLRCRVNYHALKFLPDIEEMADKLAARMRNRTGSVNPYMALHLRFEKGMVGLSFCDFAGTREEKEMMAAYRQKEWPRRYKNGSHLWPLALQKRKEGRCPLEPGEIAIILRALGYTRGTQIYVASGQVYGGKNRMAPLRNMFPNLVTKEELASAAEMAPFRKHVTSLAALDFLVCLRSDAFVMTHGGNFAKLIMGARRYGGRHRLKSIKPDKGLMSKSLGDPHMGWAAFSDDVVITHQTRAGLPEPTFPNYDLWENPLTPCMCPTA

SEQ ID NO: 126072 - protein, 337 aa, Oryza sativa
  Clone ID: PAT_MRT4530_28654C.1.pep
MSGHAAPAPHVVEDYRGVIQLLSDGTVVRSDAGSGAGALLPPEDFPDVPGVQWKDLVYDATHGLKLRVYRPPTAGDAERLPVLVCFHGGGYCLGTFEKPSFHCCCQRLASELRAVVLSADYRLGPEHRLPAAIDDGAAVLSWLRDQAMSGPGADSWLAESADFARVFVAGESAGGNMSHHVAVLIGSGQLTVDPLRVAGYMLLTPFFGGVERAPSEAEPPAGAFFTPDMSDKLWRLSLPEGATRDHPVANPFGPDSPSLAAVAFPPVLVVVAGRDILHDRTVHYAARLKEMEKPVELVTFEEEKHLFLSLQPWSEPANELIRVMKRFIHKDEGSNNF

SEQ ID NO: 126073 - protein, 85 aa, Oryza sativa
  Clone ID: PAT_MRT4530_28655C.1.pep
MAARRGGGRRGARRRGGRAVRVGAEWRPDPPPPCVLPTVAHHSRTLRHPCKIHARSPSPLDSRGGAVAPPARQRCARSRPSPPCP

SEQ ID NO: 126074 - protein, 87 aa, Oryza sativa
  Clone ID: PAT_MRT4530_28656C.1.pep
MATTKHLALAILVLLSIGMTTSARTLLGYGPGGGGGGGGGGEGGGGGYGGSGYGSGSGYGGGGQGGGSGSGSGSGYGSGSGGGNGHH

SEQ ID NO: 126075 - protein, 185 aa, Oryza sativa
  Clone ID: PAT_MRT4530_28657C.1.pep
MATTKHLALAILVLLSIGMTTSARTLLGYGPGGGGGGGGGGEGGGGGYGGSGYGSGSGYGEGGGSGGAAGGGYGRGGGGGGGGGEGGGSGSGYGSGQGSGYGAGVGGAGGYGSGGGGGGGQGGGAGGYGQGSGYGSGYGSGAGGAHGGGYGSGGGGGGGGGQGGGSGSGSGSGYGSGSGGGNGHH

SEQ ID NO: 126076 - protein, 178 aa, Oryza sativa
  Clone ID: PAT_MRT4530_28658C.1.pep
MSKAKNIKPKVIEDSEEDSDSSIPIIAAKPTKKEKVEEKKAVKKVAKPASSDEEDTPVVEKKPTKQQKTETVAKKVVPVAKKPAKQESSEEESEEEAPKKVVAKAKSPVQKPVVQKKKPQPESSEESSEEEAPKPQPKGKVAQKVASSVQKAVSPAAKVTNKPAPVVESSESEEESEE

SEQ ID NO: 126077 - protein, 85 aa, Oryza sativa
  Clone ID: PAT_MRT4530_28659C.1.pep
MESGSDTEAAPKPKTKPKPKPSSCRFQCVADHKPPPPPPATTSNGGGGGGGGDGRSGEEGGKENTSQQRYPHLVVFLVFGNSLSS

SEQ ID NO: 126078 - protein, 86 aa, Oryza sativa
  Clone ID: PAT_MRT4530_2865C.1.pep
PLTPMGPIGGKFGSPLPTLPEVAIIALGRFQKLPRFDDEEKVYPPPKTKGPVGADPRVVAGPPVPGFCNEWKTLVEKPDRLLLQMR

SEQ ID NO: 126079 - protein, 88 aa, Oryza sativa
  Clone ID: PAT_MRT4530_28660C.1.pep
MPAGEKQDSLAAGGEALRKVHAELTDMLAQYKATGEAYVVMDDDDDHLPRVSAADVRSALQMVDDMFDVIDSYSAPPPPPPSDDMLDQ

SEQ ID NO: 126080 - protein, 98 aa, Oryza sativa
  unsure (1)..(98): unsure at all Xaa locations
  Clone ID: PAT_MRT4530_28661C.1.pep
XLIVDXFLRXXPXRVYXGQSWQSGPVAHITACATFQPTVTXYLXAIRPTSQHSCNPPAFVHTHTPQQCSQHNSIFRTTQPSWSHSPTPASLARQQHSR

SEQ ID NO: 126081 - protein, 30 aa, Oryza sativa
  Clone ID: PAT_MRT4530_28662C.1.pep
VYPQENICAGEAMDRNQQTLAYPTLAQPKA

SEQ ID NO: 126082 - protein, 513 aa, Oryza sativa
  Clone ID: PAT_MRT4530_28663C.1.pep
MEAKGKKRKREVEVSHPALERAVVPTNSALPIHRSALESGEDSSESVTSDAGTAKPPAKDVVHVANALCTVCTKSPKAVIEFVRRVSPSTVSRSIDWDLVNEDKSSKMSESRGRWTDFELHVFLESCLEEMAAFNITSNSPKPKAWENLVKKMKNKCKKKMTKAQLEYIWGQCKKQYQLWVKKGVIAFRNDPLKHIDLHHAVFSTRTVVGNHSAVAGADQGPPQQPVEWQPIDIDELTAAYTPPPPAPSTYGQSNGSKGKRKASGETSGSSNKRTRSSDWGDALDRLSVLCMASMESHAKQMDAWKASSPDGCMELEEKDGLRPGSEICYRNAEMSSNVGPYGWADGHTSSEEEDAIIDLLANEIRRNERAPNRIPVQTGWPGSVHDQRILNEDVQYYPNDFPQIPRGRYLLVDSGFPSRMGFLAPYPHVQYHRDRLGRRQAAAPEGREEHFNHCHSSLRGIVERTFGIVKKQWKILKVIPFNPDDTVGPRIIHAAFALHNFKKNYNDDVNYV

SEQ ID NO: 126083 - protein, 143 aa, Oryza sativa
  unsure (1)..(143): unsure at all Xaa locations
  Clone ID: PAT_MRT4530_28664C.1.pep
RQSQLTESQSQSQKFMDEHQKIHRFRQGDVIALPAGVAHWCYNDGXEPVVAIYVTVLNNGANKLDPRXRDFLLAVNLRYCLSYMCDVEDRSXNIFSGFSTELLIEALDVSIQVALHFQCXMTNEDXIVRVEHCLSLLQPYALL

SEQ ID NO: 126084 - protein, 61 aa, Oryza sativa
  Clone ID: PAT_MRT4530_28665C.1.pep
MRLWRQHGDSMAVRAPFAIVFVVVGEERLFHNVACGHDTSSGGLVEALTMSEDREWKDGHV

SEQ ID NO: 126085 - protein, 2479 aa, Oryza sativa
  Clone ID: PAT_MRT4530_28666C.1.pep
MTLPPSVSGSGGGGDLEAHLDGDVGNGNARSDSAAAAAAPELRYRGWKAMPFVIGNETFEKLGSIGTAANLMVYLTTVFHMSSLDAAVALNVFAGTTNLATVVGAFASDLYLGRYATVAAGCVSTFIGMVILTMTAGVPALHPPPCGEGRCLGATRGQLAVLGLAFAFIVAGAGGIRPCSLPFGADQFDPRTESGRRGINSFFNWYYFTLTIAVCASSTAIVYVQSSVSWWVGLAIPAALMLASCALFFAGAGLYVRVRPEGSPFAGVARVAVAAFRKRSAAAPSDADESLFRTRHASGVVSRLPYTDQFRFLDKAAVVVDAKSEVGGDGHPKNPWRLCSLQQVEEAKCILRVVPVWLTCIVYYVAFAQTNTYVILQAAQSDRHLGGGGGAGSFEVPPGSFTVFPMLALAVWIPLYDRLVVPWARRLTGREGGITPLQRMGVGMALSVLAMLVAAMAEKRRRDLAAGSPSNTGRVSRQSAFWLVPQLAALGLSEAFNQVSQTEFYYREFPESMRSVAGSVLFSGLALSSYLSGVLVAAVERATRGASAGDDGGWLAEDLNKGRLDWFYLLIAAIGAANFLAFVACAKWYRYKGSDDDDDDDHEHEQRKLCFMDSTPPTGRKRKRASGKQAILTTGVSSHSTGGTIRERQQRWRSIIKAKKGNCSSELKKNTVSKQQVPVAIADEISYYGPPAHVCRYCGAQFWYQERVKRSYSSDQGHIRFHLCCRGGKVCLPYLKHPPPFLAKLLDPNGDILSKYFLKSIRSYNSMFAFTSLGAKIDYGINKGPGPYVFKINGQVHHRIGSLLPEEGESLGYAQLYIVDTENEVHNRISIFDRDRDCDDDNGVDKKIVEGLIRMFDESNELVRSFRAARDLLQEGQSEPLRLRLLHDRSRTAAQYSAPTGSEIAALVYPILFPYGEQGFKLKIKYNRSGALRVGKRDEVTMLEYYAFRLQQRRCEAITLISGGRLFQQYIVDSFASVEENRLRFVIRNNKNLRSEIYKGIQDALHKGDVDGNNVGKKVILPASFTGSKRYMVQNYQDAMAICRFYGPPDLFITFTCNPKWQEIADALAFILGQKPEDRPDIVSRVFKLKVDELVSVLKKGTYFGKARAVLYTIEFQKRGLPHVHILVWLQEIPNRSSDPEGYRLVDEFMVHGPCGDLNKQCKCMKDGKCSKFFPKNYQDDTVVGEDGFVQYRRRAEIGNFVERYGVKLDNAWVVPYNLKLLKRFQAHINVEWCNKTHLIKYLFKYITKGPDRVRAVIESFGAHDPTRNLEAGVNSNDFSAENSSVKEQTNDVDEVREYIDCRYLSSHEAVWRLFEFDIHYRVPAVERLAVHLPLMNSIVYPAKRSLVDIVDDPRSRKSTLTEWFSANKIYPNARELTYIEFPTKWVWDKKEKHWHSRRSTAKKIGRAIYINPSCGELYYLRMLLNVVKGATSYEDLRTVHGVLYPSFKDACQALVLLGDDNEWREALREASLWGSATQMRQLFVTIVLFCSVCDALSLFNEFYIYFTDDIHRKIQSIIQLLLYTVPEQHLKNHVLVEFDNLFTKNGASMSNYGLPKPDLSLLSKVKNRLLAEEMAYDVAKLKNEHDTMIKQLNGEQKHIYDTVIRVFGGKTMLFGGDFRQVLPVVEGGGRLETIDASITNSYLWSHVNVLRLKVNMRLLGMLDSGLPANQIKEFNEWVLSIGDGTAKGSSQSDDGDSEWIEIPNDILIPRLDSAIDDIIKSTYPNLEISYSNPIYLRERAIIAPKNDTIDEINSRVLSLVPSHEKNYLSSDTLVESSRGHGNLDLLYPVEFLNSLQFKGIPPHNLVLKIGAPVMLLRNLNQSAGLCNGTRLIITQLGDRVLEAEIITGSHIGHKVLLPRIALHVSSTKWPFVLSCRQFPVRLCYAMTINKSQGQTLQNVGLYLPRPVFTHGQLYVAISRVTSRNGLRILIDNDKDSTCSITQNIVYKEVRVARSWHLSGTSKRRDFTALELILVDEEGVGITACVGENEIQKFSTSIVEGHAYFLRNFRVSRQTKKLNAVPSTYAIFFTPWTIVEEIPTEISGSLPLYIFNFVDFEDLDERARHPNGLVDVIGQLTVVHPLVQSNGLNGPSVRRNVELRDLSDRLLEITLWAEHATSFEDEFLIETIGKDEPVIIVFAGLNMKLFSGAPSCRSSAATKWYINIDIPEINAFRTSLQGRGCEVLLVPSDGAALGAANEADANRKSISELLSLNPHDNNDVRFTCDARIKEIDVSSGWWYKACSICRKGVKPTLQGFECVNCDNTEPIITPSYKLNVVIEDNTDRAKIFMFGGMAEQVVRRTAADLVEESSANQLLLPSPLRALIGRRFVFQIVISEQTFRTGQLCFQVRKVFNPPPIDGQNNGVHATLGNSLSHATLARTSGAQKKCDPTPLMEASGSSSNKASTLQTYGVTELPTDPKGSATPPPPFAHGAITKTSPQKGNEISEEHGYLCRRTPVGKRSRSTRKELFSTKKVKASDD

SEQ ID NO: 126086 - protein, 1451 aa, Oryza sativa
  unsure (1)..(1451): unsure at all Xaa locations
  Clone ID: PAT_MRT4530_28667C.1.pep
LIINGALFTVALADEISYYGPPAHVCQYCGAQFWYQKSVKRPYSNSSDRGHIRFHLCCRGGKVCLPYLKHPPPFLAKLLDPNGDILSKYILKSIRSYNSLFAFTSLGAKIDYGINKGPGPYVFKINGQVHHRIGSLLPEEGESLGYAQLYIVDIENEVHNRISIFDKDRDCDDDNGVDKKIVEGLIRMFDESNELVRSFRAARDLLKKGXSEPLHLRLLHDRSRTAPQYSTPTXTEIAALVVGDFSEKKIRAXDVIIQERGGXLRRISNLHANYMALQYPILFPYGEQGFKLKIKYNRSGVMWVRKRDGVTMLEYYGFRLQQRRCEAITLISGGRLFQQYIVDAFASIEENRVRFVIRNNKNLRSEIYKGIQDALHKGDVDGNYVGKKVILPASFTGSKRYMIQNYQDAMAICRFYGPPDLFITFTYNLKWQEIADALAFIPGQKPEDRPDIVSRVFKLKVDELVSLLKKGTYFGKARAVLYTIEFXKRGLPHVHILVWLXGNTKDPHPSFITSIICAKIPNRLSDPEGYRLVDEFMVHGPCGDLNKQCKCMKDGKCSNFFPKNYQDGTVVGEDGFVQYRRRAEMGNFVERYRVKLDNAWVVPYNLKLLKCFQAHINVEWCIKRHLIKYLFKYITKGPDRVRAVIESFGAAENSSVKEQTNNVVEVQEYIDCRYLSSHEAVWRLFEFDIYYRVPAVERLAVHLPLMNSIVYPAKRSLVDIVDDPRSRKSTLTEXFSANKIYPNARELTYIEFPTKWIWDKKEKHWHSHRSTSXKKIGRAIYINPSCGELYYLRMLLNVVKGATSYEDLRIVHGVLYPSFKDAYQALGLLGDDNEWREALREASLWSSATQMRQLFVTIVLFCSACDALSLFNEFYIYFTDDIHRKIQSIIQLPLYIFPEQHLKNHVLVEFDNLFTKNGASMSDYGLPKPDLSLLSKVKNRLLAEEMAYDVAKLKNEHDTMIKQLNGEQKHIYDTVIRSVYDRTGXCFFVYGYGGTGKTFLXNTIISRLXSEKHIVLAVASSRVASLLLLGGRTAHSRFKIPIVIDEASLCDIKRGTFLADLIVQCSLIIWDEAPMTHRYCFESLDCSMCDILGKTDPSCFNRVFGGKTMLFGGDFRQVLPVVKSGGRLETIDXASITNSYLWSHVNVLRLKVNMRLLGMLDSGLPANQIKEFNEWVLSIGDGTAKGSSQSDDGDSEWIEIPNDILIPRLDSAIDDIIKSTYPNLEISYSNPTYLRERAIIAPKNDTIDEINSRVLSLVPSHEKNYLSSDTLVESSRGHGNLDLLYPVEFLNSLQFKGIPPHNLVLKIGAPVMLLRNLNQSAGLCNGTRLIITQLGDRVLEAEIITGSHIGHKVLLPRIALHVSSTNWPFVLSRRQFPVXLCYAMTINKSQGQTLQNIGLYLPRPVFTHGQLYVAISHVTSRNGLRILIDNDKESSCSITQNIVYKEVLQSH

SEQ ID NO: 126087 - protein, 49 aa, Oryza sativa
  Clone ID: PAT_MRT4530_28668C.1.pep
VQRLYSIAVRPTLEGGALRTMVASSLSTPTVAGLWLAPMSLVRSPSVAF

SEQ ID NO: 126088 - protein, 174 aa, Oryza sativa
  Clone ID: PAT_MRT4530_28669C.1.pep
MAARPVSSTTSTCRPCSRRRFLLPSPPPPRPLVAFGSGKDRSEVVGNSVAFSLGLATTLAILGVAASFAGKAYGQVGQGLPVAASGLAVIMGLNLLEILAHCLKLFSMLVILYLQDPIVGGSLLLTYTTGYVAPLLIAASFAGALQSLLSFRRYSAWINPISIRYNFTVLVQRA

SEQ ID NO: 126089 - protein, 112 aa, Oryza sativa
  Clone ID: PAT_MRT4530_2866C.1.pep
MEEDLLSEEDATASGRVWRRTCSKRRAASDDLRAWMVEDLLLVNYIAAHGEYDGAGAAADPRVAWPRRGNGGARLMGISLIPQVSRLVPRKYHLIPHRYQNLISQVSLVPRK

SEQ ID NO: 126090 - protein, 317 aa, Oryza sativa
  unsure (1)..(317): unsure at all Xaa locations
  Clone ID: PAT_MRT4530_28670C.1.pep
MAARPVSSTTSTCRPCRPAQAAASKPSTSSSPGTGVLVGVPRERGSSVSKAAIRGARLEAAARCSLVRQRPMLLATVAVSGVSWSQWGVWLVAAGAANATEIGDSLLGSSGLALADLSIGDWFGNLLYSAGAFGSGKDRSEVVGNSVAFSLGLATTLAILGVAASFAGKAYGQVGQGLPVAASGLAVIMGLNLLEVIELQLPSFFSDYDPRAAAANLPSSVQAYLAGLTFALAASPCSTPVLATLLGYVATSRDPIVGGSLLLTYTTGYVAPLLIAASFAGALQSLLSFRRYSAWINPIXGVYTLLDRLFPATSMVM

SEQ ID NO: 126091 - protein, 409 aa, Oryza sativa
  unsure (1)..(409): unsure at all Xaa locations
  Clone ID: PAT_MRT4530_28671C.1.pep
MQGALPKRNFIMLQILSWMDSHNDFRLSPSDHMVRLDLIAKVHGTSQAEEYYRKLSTAASKKAASFPLLHCYVTERNVQKAETFMAELQRYGLPVDPHSFNEIMKLYVATCQYEKVLSVIYLMKRNNIPRNVLSYXIWMNACAEVSGLASVQSAFKEMLNDDMVEVXWSTYCTLANIFKKYGQSSKALACLRTAETKLSSTGRLGYSFIMTCYAALNDRDGVIRLWEASKIVPGRIPAANYMSAMVCLIKVGDIGRAEWTFGSWEAESKKHDVRVSNVLLGAYVRNGWIEKAERLHLHMLEKGAHPNYKTWEILMEGFVQSKQMDKAVNAMKKGLSLLKTCHWRPPLELLEAIAKYFEEQGSVEDADRFIKVLQKFNLTSLPLYKSLLGAYINADIVPQNIPQMIAGDQ

SEQ ID NO: 126092 - protein, 73 aa, Oryza sativa
  Clone ID: PAT_MRT4530_28672C.1.pep
NAYHSRTRAAVRGSPLLNMRIMSELKCKVGNDRMLTNYHQLFVAYIGIYDILVSAICIERDEFYPPHPPTNVI

SEQ ID NO: 126093 - protein, 262 aa, Oryza sativa
  unsure (1)..(262): unsure at all Xaa locations
  Clone ID: PAT_MRT4530_28673C.1.pep
MLQKLGNSLLGSSGLALADLSVGDWFGNLLYSAXRQANEAVQDQLSALSFTSLAVIFGAGLVTSLSPCTLSVLPLTLGYIGAFGSGKDRSEVVGNSVAFSLGLATTLAILGVAASFAGKAYGQVGQGLPVAASGLAVIMGLNLLEVIELQLPSFFSDYDPRAAAANLPSSVQAYLAGLTFALAASPCSTPVLATLLGYVATSRDPIVGGSLLLTYTTGYVAPLLIAASFAGALQSLLSFRRYSAWINPISIRYNFTVLVQRA

SEQ ID NO: 126094 - protein, 66 aa, Oryza sativa
  unsure (1)..(66): unsure at all Xaa locations
  Clone ID: PAT_MRT4530_28674C.1.pep
XNXXXHXNXKREKXXLTKXXXXXXXTXGRGRXLXXPXTATRPAEXXXKXGXXXGILXLQAXEGSXX

SEQ ID NO: 126095 - protein, 1678 aa, Oryza sativa
  Clone ID: PAT_MRT4530_28675C.1.pep
MDNILGGSTQSCTKTGSHEDVSDLTVAELKRKRARDRYAALTPQQKDDRNKKARERRKRKKEETQEETPLGDISNISVVDIMKCHLEDNDSSTLHQGRCENQYESSFFEGSDQNECDHDDDISLDNELVRAPTNETKERLQSKLARAREKYATLTPEQKQAKVDQRRTQRQSLTKEQRLELNARRRVARQSMPDVEIHDMNACRRSRRQNVTPGERSAHLARHDMDSFMDDDSDDEYYMFAGLGDDEDDEMVQSDDDDTQSPTSSVPDPYDYMYSNIPQSTNVLKPEPDCKHCGAKRFQYEPPSFCCRGGKIKLVQNETPPELMRLWTSSDPDAKHFRDNNRYFNGHFSFTTLGVSLDKAFANMSSGVYTFRAHGQIYHNIHSFSPRDSGPEHLELYFYDDDPTLSHRFQRSPSLDQDVIRTVADVLRNNPYSETFRSLGQAEDLANYRVTLNLDHRLHQRRYNVPVTTEVAAIWVEGNERRKFEPSVTIYRNNRTRKSIQPFYECYDPLSYPLFFPRGESGWHQGLPKDKITMEDANARNGDDPDCNSRIQVSIRDYYCYKFQMRRGIFNPILHGGRLFQQFAVDMYIKVESSRLDYDEITRELEPGQTPQDRLDLVVRVFRAKLEDLKKQLFEKHILGKVIAHVYVVEFQKRGLPHAHFLLIMSGRYKLTSAEQYDRIVSAELPDKKKYPELYNMVVKHMMHGPCGRLNGRCQCMRDGKCRNNYLREFNTTTSQGKDSYPLYRRRNDSKSKVVRGHPLDNRWVVPYNPYLLRMYNCHMNVEVCSSIKAVKYLFKYLYKGHDKASISINEADKNGEIDEIQRYRDARDFPMWFTWQTPDLRTVDGVLMPSFRAAAERRGLIEADNTLDECLTEAGVYQMPASLRRLFATILVYCEPTDMVLIDIRGMLQSMGKEISSFPLPEIDESHDSTRGDPREIIEESSIVVERDDMNLPDQLNDEQRSAFNKIMNAVGSAQGSVFFVDGPGGTGKTFLYRALLATVRGNGDIEVATATSGVAASIMPAGRTAHSRFKIPLNIEEGSYCSFTKQSGTAKLLQMASLIIWDEASMTKRQAVEALDMSMRDIMGCPRSPFGGKTIVFGGDFRQVLPVIRKGTRSQITEATLRRSYLWDCMVQLKLVRNMRAQSDAWFADYLLRVGNGTEEVNKEGNIGLPSDICLECKGNETDLERLIDTVFPNLNDNLTDPNYIICRAILSTRNEFVDRINMKMIERFRGDPTANGLCNGTRLVVRQFGKNAIDAEIVVGQHAGKRVFLPRIPLCPSDDEMFPFRFKRKQFPSAARRGVAGDQERSSQVQDEAIHCYEQIQDEVLTYNLFFNWKTNLYRVLRFNIPRFVSPLQNLKYVKYVLSSRLVFYRNAVAERLGSSQQPEDAELGGELAYVLGFSALLSAHMIGGVELIPQPEKPVHMYTRQAWKLDEEVGGKSAVLGSRWCWRQRRPCSRRGGTAFAGRDAVPIFLARPKLAYENCGSASCDSCRCRRWVDVGATRIRPSSASETASFIQQSAEEEGSSYGNVDIFLLKNSILPPNYFRGALTPKQFLCSFIDRTIENDSRYSLTMHLVLNCARDSSCSNQPKETPSSPPPPPPPPMYTTHAAQTQLQAQPCARYPRTVRSPPRQPPPCSAAASTGRPVGPVYRWGAAVVGDRLTYSRTLTSLVLDCSQP

SEQ ID NO: 126096 - protein, 106 aa, Oryza sativa
  unsure (1)..(106): unsure at all Xaa locations
  Clone ID: PAT_MRT4530_28676C.1.pep
DAWADAWVYRESCLFVEGNYXEDLSVLGRDLARVVIVDNSPQAFGFQLDNGVPIESWFDDRNDRELLTLLPFLQSLVGVEDVRPCIARKFNLREKVATAPSLFMHF

SEQ ID NO: 126097 - protein, 115 aa, Oryza sativa
  unsure (1)..(115): unsure at all Xaa locations
  Clone ID: PAT_MRT4530_28677C.1.pep
RYDHLFEEGEYFVLDTQDGYNDDQFSSDQELVPETEFQDCGEVEEKGGRIQDYGEVEEKGGXQDCRETEENVGGIQDCREVEKGGVISGSSSMVHSHHGGIWPTARRCGQQLRDK

SEQ ID NO: 126098 - protein, 92 aa, Oryza sativa
  unsure (1)..(92): unsure at all Xaa locations
  Clone ID: PAT_MRT4530_28678C.1.pep
MAAPDAEYRCFCDCLAWATDDRSLEAALSTYCESLESKIINDRXTVRSRVFGYRTISSXEQVMHDAIEVMNGEELDGRNITVKRAQSRRSGS

SEQ ID NO: 126099 - protein, 34 aa, Oryza sativa
  Clone ID: PAT_MRT4530_28679C.1.pep
VWCGLADIKWAPDHGSVLKNACGVHIATIKRRME

SEQ ID NO: 126100 - protein, 249 aa, Oryza sativa
  Clone ID: PAT_MRT4530_2867C.1.pep
MARCLEHAAHSDTKKRQSPPWTESTAAAGHVGAHPTLRIGRGRSDGRGRPSGTTRQARPQAAATAEPRPPATTPAASGDGARGGERVEREAVLTERMGRRDEDEEGDGRGATGGTKVAVARVHRGAGGSGVEWRSGVVAGLAGGAAKLVVVAARLEVDGNGGKRLPKAAKRRRVADGVRQCVARPVAQAAWRGDGYGGGGGRPEMATGGGGGSLESRRGGRLATDLKGERGAGDVGEWGQFGAGFGGEK

SEQ ID NO: 126101 - protein, 86 aa, Oryza sativa
  Clone ID: PAT_MRT4530_28681C.1.pep
MVETRHRQEMVVMVGCILPMALGGGSVADPPGARAVPWVMDPSSGGARPTVLAAGGILDNDSEWVARLLAADWRLNSGEAAGRRRS

SEQ ID NO: 126102 - protein, 61 aa, Oryza sativa
  Clone ID: PAT_MRT4530_28682C.1.pep
GATKFFLKHIGGEHGVLLLIRAHIISAYESTTTFFSKIERHAYLLAPPKQMETNNQNALLT

SEQ ID NO: 126103 - protein, 112 aa, Oryza sativa
  Clone ID: PAT_MRT4530_28683C.1.pep
MEIEIGGALLPCVDNERGRRQRVNEIERCEKDERLGGDKIQPCEREETEMTCVALAPLLYSPLASAADGDGHLAAATTSSSPFRWRRKISYCNQVAAVDNFERVDHLNRATS

SEQ ID NO: 126104 - protein, 201 aa, Oryza sativa
  unsure (1)..(201): unsure at all Xaa locations
  Clone ID: PAT_MRT4530_28684C.1.pep
MEVSVIGNPQARICRAELAYRELGFRFGSDVISGESRNRVSFCNQSSKWKEIAIRCSSRSVKCEAIVSDDASPFLKSTPKSKSLESVKLFGGLPLDTVSDCNNVNHLKAITAGLKALKLLGVEGIELPIFWGVVEKEAAGKYEWSGYLAVAEIVKKVGLKLHASLSFHGSKQTEIGLPDWVAKIGDAEXPGIYFTDRYGQQ

SEQ ID NO: 126105 - protein, 122 aa, Oryza sativa
  Clone ID: PAT_MRT4530_28685C.1.pep
VSISYIETAATTMKRQDDLKHYYFTCTCPRCVKDSEEDALLEGYRCNDQKCDGFLLPNAGNKGYTCQKCSTSRDGEELQKMASDVLLLSDKVSSLVSSGIDNSEVGSMYKTIEELERKLYHP

SEQ ID NO: 126106 - protein, 141 aa, Oryza sativa
  Clone ID: PAT_MRT4530_28686C.1.pep
LRPSTRLRSATATWQAARASARTSKSFLCSTLPRAPTTCRAPPPRRTRSATRRRSPRRSSSPRSPTPRSPPRATPARPASPCPATPPPAAPTTPSSPPTRSCLPAAATGAGRCCRGGQAAASTRRRRTTGCEEGVEVREAG

SEQ ID NO: 126107 - protein, 135 aa, Oryza sativa
  unsure (1)..(135): unsure at all Xaa locations
  Clone ID: PAT_MRT4530_28687C.1.pep
VHAYGRDYVWQSNWNHTRLAEVKGGQNWVXEKGNAXWFPGGGTHYKHGSXEYIERLGNMTTHSTDDLRSAGVVQALDVGCGVASFYAYLLPLDIHTMSLAPKDGHESQIQLALERAIGALISEMGTKQLPYPENA

SEQ ID NO: 126108 - protein, 55 aa, Oryza sativa
  Clone ID: PAT_MRT4530_28688C.1.pep
KPNKQFSVNFYKNISPTSIKHSNIQNKNKKISLANLNKFLLCYKISKTNTYIFSI

SEQ ID NO: 126109 - protein, 109 aa, Oryza sativa
  unsure (1)..(109): unsure at all Xaa locations
  Clone ID: PAT_MRT4530_28689C.1.pep
IXPETLTLTPPGAMDLLQSSYTPDDEDDDEQQPXSXXDXXPXRLPXKXAGPXVDDTALAISAAXVXXXRXLXPSLQLXXFNPNADQIXAXVLGSQXHDDXIYFGFGNRK

SEQ ID NO: 126110 - protein, 327 aa, Oryza sativa
  unsure (1)..(327): unsure at all Xaa locations
  Clone ID: PAT_MRT4530_2868C.1.pep
GGDYDPGKVHCGGLCYARVPGVTARAADGRXPRGSHSVRPEAATPAQXAGGGVPAPLWHGGAAAERGEGKGKXKRRSTAHPGSTATTETATGAEEGGGAARVDGVDGAPAVAXRNEEVDEVGEDAANPKEPAPRWKVVRVDDGGGPELGGDGGKRERRRELDSGGERGGXVAETVVGSSGRVYIGLGVKEGGRKXGERARETRPPLMASATLGEGFPNESGGEREKNGGKGEGIPGNNSPHFIARGDGGXGGGIRGGGGARARGRRRERREKGDDGWAPPVSEGGGRARPSAARARGGGRMGRGERRGRGKEMGRAGPRGRGAERTF

SEQ ID NO: 126111 - protein, 138 aa, Oryza sativa
  unsure (1)..(138): unsure at all Xaa locations
  Clone ID: PAT_MRT4530_28690C.1.pep
MACAHDFLALCGAMHCHNDALTDIATPINDLPIIAYCSRDKSVLVWDLTNLFQNVGEGTGTCEHRVHFLRLIGHFQLAQYVVVSCDXGHHRLSGSXDGELHLXHLFTVHSTRAFRAQDEDQISVGSSVETRCIICVYH

SEQ ID NO: 126112 - protein, 284 aa, Oryza sativa
  unsure (1)..(284): unsure at all Xaa locations
  Clone ID: PAT_MRT4530_28691C.1.pep
GRRPCRRVTTPAGRAVASSSTAAASSSPAYPPFPAETSGSASPPATXGVAATISPPAASAASPVRRPTSPPPLPAPECRPLSRPGHGVARISPERRHLRAGLSFLLVGXVAPLHHHLHQHRSGVFHAVPSSAQPLLPAIIVSSSSPIVLVVDVPSVARLVVSRRRLRHRHRCGVFHAVLVPVQPLPAVLVASSPVPVVVVAVVLSSFPVVVTPXSSSSSSPPRRQAPCRPRLAFVQGSPPKSFPRRPSPPRPFRRSGGSRSVVRGRRRRFGRPFSLSKASHIIL

SEQ ID NO: 126113 - protein, 300 aa, Oryza sativa
  unsure (1)..(300): unsure at all Xaa locations
  Clone ID: PAT_MRT4530_28692C.1.pep
SLHVPIPTPTAALPCCGVNDEATPSSVSLSLVPLRKVALVTGITRXDGSYLMELLFRKGYEVRATALXTSNMTHTHNHRCHASRXHLHYADISNSSSLRCVLDHILLDEVYNLTAQCHVALSFEVPDYTADVTATSALCLLEAVHLAHKPIRYYQAVPSEMFGSTPPLQSESSPFHPWSPTPSPIRRPLVRXNYHEAYSMFAXSSVLFNHESSRHGENFXTNITGAVGRIKVGLTKVFLSNLSVTRDLGFFGDXVKAMWHMLXQDQHSDYVVATKESHTVKEFLLAIFPTISLIWAEHKP

SEQ ID NO: 126114 - protein, 329 aa, Oryza sativa
  unsure (1)..(329): unsure at all Xaa locations
  Clone ID: PAT_MRT4530_28693C.1.pep
KDDVTCLAPGERPSEPSATTTNHASGTSGTTKGARRRRTARERLRRRSLNEGETRPARGLTTRRRGRRRRRXSDRERREDDDDDDRDRRGDDEGSRQRLHGGEDGVEHAAAMPTMEAAPRDDEPGEDERXRRRRIPAVFGRRGSDAEDDVAGXVPREGRQRRLMHGRGGRGLPEETSTRRKERPARXDGVPEKFGRRRGLAGKEDGTPVPGEVVATSAGAQGTRQRRAEAESWRQHHGCQRGGTSGGLRGKQRVGRRRGGGCDAGGGDGATGRRSGEEGEAAASNVSNFLHNGCMPLIPSLPRRDVGETLLHHPRRLDLTLHYQILCHH

SEQ ID NO: 126115 - protein, 156 aa, Oryza sativa
  Clone ID: PAT_MRT4530_28694C.1.pep
VGSESGDDKEKGKGEMKPEEAQEVWKEMLKQFKDEAQRMHGLTLQAYGVYSQRAREVLLEASEKLKIHADKAQKDLSVIATEVGGFLNFMLTGRTSAIRFGIILGFALLAMGISSLRSQRAGGRRPRLLLKGQAACVFPLYVNVNTFNSSLRILPY

SEQ ID NO: 126116 - protein, 273 aa, Oryza sativa
  Clone ID: PAT_MRT4530_28695C.1.pep
MAASLVHAAAASASPAPAARVGAFHPLASSSPFLRLACATASSPSTRRRRCLDAPLRALSAGSRLAAGWGAPRTRRVIATFAGEESVGSESGDDKEKGKGEMKPEEAQEVWKEMLKQFKDEAQRMHGLTLQAYGVYSQRAREVLLEASEKLKIHADKAQKDLSVIATEVGEEGQEYLKLAAQNSPDSIKDIIETFNSLGKLKISEYEDYHVGIPFGTFLTVGGFLNFMLTGRTSAIRFGIILGFALLAMGISSLRSQRAGGRRPRLLLKGQAG

SEQ ID NO: 126117 - protein, 76 aa, Oryza sativa
  Clone ID: PAT_MRT4530_28696C.1.pep
TLRHWIHPPVTPFLKKALVIGNTNQHRNEEHESGSPPLLCSARCSPLAARRMEIAAPPLPCSAARWHKERSPRVRG

SEQ ID NO: 126118 - protein, 154 aa, Oryza sativa
  unsure (1)..(154): unsure at all Xaa locations
  Clone ID: PAT_MRT4530_28697C.1.pep
KRKEEKKKREKKNKKGENKTSIVKKTSDSSGGKKKGETTEKKSIQKIKKGEKNLYRKKKSDSDSSGGKKKERRRKKNQEKTKKGEKENFYKKKDRLTPKRSPTPPVEKKQKKIREKELLCKKSPTPXKKVRLSVEKKKARKSKKKKREKKTSTV

SEQ ID NO: 126119 - protein, 125 aa, Oryza sativa
  Clone ID: PAT_MRT4530_28698C.1.pep
YNTSRFVRCHPLSLSVSSTTTRSDTNLIVQRDVIMQPCHVMLGLLLVLVVHLSAVSTSPSTSLSVTSDASKILTRLDQLAPVVSERVSLSGDAGNLDIGGESDDVSSEYVIEEEENSNDVTSSPG

SEQ ID NO: 126120 - protein, 306 aa, Oryza sativa
  Clone ID: PAT_MRT4530_28699C.1.pep
MAAPPLPRAPVSSSAAAASPGGRALLLLRVGGGGSGRCAGVAAAAAPGWRRPFPAASVAARSAGTTPGEVAVDPKVEAILDSVKWDSKGLAVAIAQNVDTGAILMQGFANKEALATTISTRKATFYSRSRSSLWTKGETSMNFINVHDIFLDCDRDSIIYLGKPDGPTCHTGAETCYYTSVYDALQGSKPNQDRQVVSTLYSLEDTISRRKEEIVTEGSGKPSWTKKLILDNRLLCSKISEEAGELNQTLLENEDESRTISEMGDLLYHAMVLLRVKGVRMEQVLEVLRKRFSQSGIEEKASRNKS

SEQ ID NO: 126121 - protein, 34 aa, Oryza sativa
  Clone ID: PAT_MRT4530_2869C.1.pep
LCQVAIARAGVSSWRRVAISFSLHCRALWFKRNK

SEQ ID NO: 126122 - protein, 166 aa, Oryza sativa
  Clone ID: PAT_MRT4530_286C.1.pep
MQLGKVEMSFMVLVEVTRGSMRGVIVDAALGGGGEANSTSEGDLGRWRRGQLLQEFEASQQWWLGEAHKASLEECASEATQVTWAVLGIVIVVGAAALRLHSGGGATATGCNVKCEACELDPAIDAIIRVGLKSRARQRMLILDRLQREHVKGNGEYEMTYFIDRD

SEQ ID NO: 126123 - protein, 195 aa, Oryza sativa
  Clone ID: PAT_MRT4530_28700C.1.pep
MSMFLRALAPLLTRRFSARSAQAQRSAAAATAGSSPAPRSPVSPRSQIKIFFTRAQRLTLPSISAQRDLGVGRGAVKGVLALTSSLAGLLLGFLYFKQDRDDSAAGEETRKEEEEVTVNWRDVIEPSVMARFTRKDGTFAYLDYTDYLNSQMNHGGKPLYDKKCSDKEEAVVDDAAEEDNVVDEVTMKAKFEDWG

SEQ ID NO: 126124 - protein, 116 aa, Oryza sativa
  Clone ID: PAT_MRT4530_28701C.1.pep
TGPPFPPAFCPPQPVIRDPLWPMGHPHFSNSPFFPPGAPPPKTNFVPVINPFCFEALLQPLLPKKVGFARHKHICFFVQGTPSCPFVSCKQKQKKKNKKNHKNKKKKKKPENKKTQ

SEQ ID NO: 126125 - protein, 56 aa, Oryza sativa
  Clone ID: PAT_MRT4530_28702C.1.pep
PKKITELEYFCTLKIILRSKFLFMHVDFKLKITIQIKINLYRITFFTFYLNLIVSG

SEQ ID NO: 126126 - protein, 331 aa, Oryza sativa
  Clone ID: PAT_MRT4530_28703C.1.pep
MELSKPQSKSKLQPLTNHLLSVFTSANLNSSSDSPLPRSKYLNHLSSLSRFPLQIDQSTVAIKENFGKFSEVLEPGCHFLPWCIGQQIAGYLSLRVKQLDVRCETKTKDNVFVTVVASVQYRALADKASDAFYKLSNTREQIQSYVFDVIRATVPKLNLDDAFEQKNDIAKAVEDELEKAMSAYGYEIVQTLIIDIEPDVHVKRAMNEINAGKLRVAANEKAEAEKILQIKKAEGEAESKYLAGVGIARQRQAIVDGLRDSVLAFSENVPGTTAKDIMDMVLVTQYFDTMKEIGASSKSTSVFIPHGPGAVKDVAAQIRDGLLQANAERND

SEQ ID NO: 126127 - protein, 73 aa, Oryza sativa
  Clone ID: PAT_MRT4530_28704C.1.pep
RQQTNSTTPYGSLPYGIKYYQHPSRFFPFIHLTKWGQLAGVIFHIIRVKSLTQKFPKSQSFQGWLFALTNKGG

SEQ ID NO: 126128 - protein, 335 aa, Oryza sativa
  Clone ID: PAT_MRT4530_28705C.1.pep
MDLGKSSSTSASLKKLQEDGAHPGRGTMEREAGGTNPQPVLGRMVVTEDYILCGFLPPPSEFLLLVWNFYGLSLLHLNPNSIAFLSIFSHLCEAYIGVEPFLDLFRFYYELRWMESNMSGCVGFQLRDGLKSRYIPFQCPSSRSKWRTRWFYLQIKDSNPVFVVPEEQPDKISSWTAKPPLTRSLQSFIDIIDDLRVRGLSGYEVAADFVGLNSEAVEHRVGQVMISGPTTASTIPVPLCEKRAAERDAAINALPLTDIIGPLAEHQVAVSLKEKVAKEASDAAAATTSGGNVRTKGRKFSSGGTDEGYARRVRRDLRRIARCGLDGCRARTREP

SEQ ID NO: 126129 - protein, 738 aa, Oryza sativa
  unsure (1)..(738): unsure at all Xaa locations
  Clone ID: PAT_MRT4530_28706C.1.pep
MDLGKSASTSATLKKLQEDGALPSRGTMEREAGGTNPQPILGRMVAIEDYVLCGFLPPPSEFLLLVLNFYGISRLHLNPNSIAFLSIFVHLCEAYIGVEPFLDLFRFYYELRWMESNRVSGCVGFRLRDGLKSRYIPFQWPSSRSKWRNMWFYLEIKDSNPVFVVPEDQPDKIPSWTAKPPLTPSLQSFIDIIDDLQERGLLGYEVVADFVGLSGETVERRIGQVMINGPTTTSDIPVPLCEKGAAERDEAINVASSLKVKVVKEASDSATTSGGNVPTKPRKFSSVIRQRRKASTPSASDASPPPPRRQRIVTIGEKEARAKAARAKSGGASSASPVVASTDVVPAAGSREATPSGPVSNPAAGRDLPATVLTWEELQVEMGRLLEAGARGIGREIAEARSEAATANARADRLVCELAKAREDLTKMRELAAGNERQRKGLEDRMSELGNNLSEIRGSLRVTYTGLHQLTGECGVTSTIPANPDEFSLTSLAELATAMGEIPSKHAARIAEETSNGIYTGACHVLACVRLSRPELDLREILDQGAASDTRKERGQPESLAVIPVLELEPYVSPDHVDQPLDIEGRMATTASDLEGALASQDRRIQYWKTKFEVAELERTMLAVKKEQVVETLRGREVWFNSYLKSCCTSMARVCRELRVVRGDPEESAAGYISWLNGACAQLDGISKRIDEALKQECRRSSRYAGGHVLACLRDHRPHXTLNIFVRVLLVLGGLRQR

SEQ ID NO: 126130 - protein, 567 aa, Oryza sativa
  Clone ID: PAT_MRT4530_28707C.1.pep
MEREAGGTNPQPVLGRMVVIEDYILCDFIPPPSEFLLLVLNFYGLSLLHLNPNSIAFLSIFSHLCEAYIGVEPFLDLFRFYYELRWMEPNRVSGCVGFRLRDGLKSRYIPFQCPSSRSKWRTRWFYLQIKDSDPVFIVPTEQPDKIPSWTAKPPLTPSLQSFIDIVDDLRVRGLSSETVGRRVGQVMISSPTTASNIPVPLCEKRAAERDAAINALPLTNIIGPLADHQVAASLKEKVAKEASDAAAATTSGGNVLRKGRKFSASDASPLPPRRQRLVTVGEKAARAKAVQDESGGTSGASPAAASTDVVLAPGSREVTPSGPVSDPAAGRGPLAAVLTWEDLQVEMGRLLEASARGIGRDGRSRDVDDEDVQQRGQPEFEPHASPDNVDQTLATGPEMVTTSLDLESALGGQDRRIQYWKTKFEVADLERTMLAVKKEQAVETLRGGEVWFNSYLKSCCTSMARVCRELRVPHGDPEESAAGYISWLNGACAQLDGVGKRIDEALKQECHRSSRYAGGHVLACLRDLREGFARSRRTPAEIDHLARSMAPFAEKIFQSMDWRWPSW

SEQ ID NO: 126131 - protein, 662 aa, Oryza sativa
  Clone ID: PAT_MRT4530_28708C.1.pep
MDLGKSASTSAMLKKLREDGALPGRGTIEREAGGTNPQPILGRMVAIEDYVLCGFLPPPSEFLLLVLNFYGLSLLHLNPNSIAFLSIFVHLCEAYIGVEPFLDLFRFYYELRWMESNRVSGCVGFRLRDGLKSRYIPFQCPSSRSKWRNRWFYLEIKDSNPVFVVPEDQPNKIPSWTAKPPLTPSLQSFIDIIDDLRVRGLSGYEVVADFVGLSDETVECRVGQVMISGPTTASDIPVPLCEKGAAERDEAINALPLTDIIGPLADHQVASSLKVKVVKEVSDAATTSGGNVPTKPRKFSYEELQVEMGRLLEAGARGIGREIAEARSEAATANARADRLVRELAEAREDLTKMRELAAGNERQRKGLEDRMSELGNNLSEIRGSLRVIYTGLHQLAREYGVTSTIPANPDEFSLTSSLAKLATAMGEIPSKHAARIAEETSNGIYTGACHVLTCRGQPESLAVILVLEFEPHVSPDHVDQPLDIEGRMATTSSDLEGALASQDRRIQYWKTKFEVAELERTMLAVKKEQAVETLRGREVWFNSYLKSCYTSMARVCRELRVVCGDPEESAAGYISWLNGACAQLDGISKRIDEALKQECPRSSRYARGHVLACLRDHRPHLDLEYLREGFARSRRTPTEIDHLARSMSLLAEKIFQSMDWC

SEQ ID NO: 126132 - protein, 925 aa, Oryza sativa
  Clone ID: PAT_MRT4530_28709C.1.pep
MNREDGANARNMQRLASWTKYGSLLPKLVEVLKEEYDLHKGVRKKIKHLSQELESMNAVLLKVGEVPPDQLDELVKLWAGDVRELSYDMEDVVDAFLVHIDGPEPLDTHMLRRFRKKMANFFNKCKHHHKIAGAIQDVNKKVEEVAARRDRYMVDNIIAKVTGPVTIDPRLQALYKKTTELVGIEKQSEKLVKILSLGDDVHASDEKMKIVSIVGFGGLGKTTLSKAVYDKHKLAFDCGAFVPVGRDPDMKKVLRDILIDFDYMNPNVMILDERQLINELRKLIQNKSDDQQKQLMVGSNARRLAVHGRSVEEHNHPQLVNVGLEKVSVTGEACGKHRLEHVGNLRHLRYLGIWNTRIDEFPKEVGDLKFLQTLNLSGTGIQQLPEAVGLLKQLLCLRINDSIAVPAGLIGNLTSLQELKIWPVDDVSTRQFVKELGKLRELRILRYAGDPTQQASGGVAFASNSGGRGNDGGGNSRGIGRRLRSLEAENKMDELLRANVLSEVFLLTALLLGALLSYGEPAVLVLGENQQTLSFKSKISITDCSIDKVETVAVEEHLDKTTTSNEDTHREGKGITSVETDTVPCVAPSSFAYSGVTVETEDVGENSKKNDELQELGSINPESDNNKVQYQYQLGEFMSSCWEPVMRQEPQDACSDSESDLTESSPDASMTDIIPMLEELHPLIDLQTGHPSLVSRDNLNTSSDDDEDDLEEEDASTDENQLEGKIDDFANWKDVIDLNYLDMDNNSKLEGMMDLQRAKNILKFELDRRLMDLQAADAVQKMEEASRFRVQVPSISTGRQNPFDSSNGSDEIIELPHVPDSAPSCLLPRKNLFDLCNSGTGTHFIDGSSVEDSDPQFAQLKDEALVSATSNATCRNESIEEKSSEALLAGNEDYSELPNELLKSGDPQFADSSEIQMQVIEATGH

SEQ ID NO: 126133 - protein, 337 aa, Oryza sativa
  Clone ID: PAT_MRT4530_2870C.1.pep
QNRVELFRHLPQYVHGTQLPDLESKFFHLDLMHPSVYKVGLQFLSGVISGGNACCVAMLLAFREAIKDYSTPSTKTLNRDLTAKISSYVSFLIECKPLSISMGNAIRFLKNRIAKLLLTLSESEAKASLQSDIDRFINEKIIIADHVIVSHAIAKVRDDDVLLTYASSSVVEMIFDHANELGKKFRVVVVDSRPNNEGQALLHRLVAKGISCTYTHINAISYIMHEVTRVFLGASSILSNGAVYSSVGTAAVAMVAHAFGVPVLVCCDPDVISRVPEREDLCHLKNCTYNENLQLLNLKYDTMPSDYVSMIITEYGMLPPTSVPVIVREYRREHIWI

SEQ ID NO: 126134 - protein, 84 aa, Oryza sativa
  unsure (1)..(84): unsure at all Xaa locations
  Clone ID: PAT_MRT4530_28710C.1.pep
MLLCGMACALMVGSFNCVIPVPKLADHSFRSSNLFSCVTPVSKLGFKYHLGVLFRDRCDTTEXVRRLKRVICKFRDRDDTVEQV

SEQ ID NO: 126135 - protein, 572 aa, Oryza sativa
  unsure (1)..(572): unsure at all Xaa locations
  Clone ID: PAT_MRT4530_28711C.1.pep
MDLGKSSSTSASLKKLQEDSALPGRGTMEREAGGLNSEAVERRVGQVMISGPTTASTIPVPLCEKGAAERDVAINALPLTDIIGPLADHQVAASLKEKVAKEASDAAAATTSGGNVPTKGRKFSSVSGHHRKASTPXGLGHISPASTTTTPCDGWRXAARVKAAQNESGGTSGASPAAASSNVVLAPGGREVTPSGPVSDPAAGRGPPATVLTWEELQVEMGRLLEAGARGIGREIAEARSAASSANERADRLAHEMSEAREDLKKMRELVAGNERQHQGLEHRMSELGNNMSEIRGSLRVTYTGLHQLARECGIKSTIPANPNEFSLTSSLAELASAMEEIPSKHVARIGEETSNGIYTGACHVLACVKLAHLELDLREILDQGAASNTRKEVMEEVGDLGESVLSLFEEDIDDEDVQQRGQPESPAIIPALTFEPHASPDNVDQTLATGTDMATTSLAKVCRELRVPRGDPEESAAGYISWLNGACAQLDSVGKRIDEALKQECRRSSRYAGGHVLACLRDHRPRLDLDFLREGFARSRRTPAEIHHLARSMAPLAEKIFQSMDWRWPSW

SEQ ID NO: 126136 - protein, 175 aa, Oryza sativa
  Clone ID: PAT_MRT4530_28712C.1.pep
MTVDTGLNDEIHTKDGTSDYDLQDTHREGKGITSVETDTVPCVAPSSFAYSGVTVETEDVGENSKKNDELQELGSINPESDNNKVQYQYQLGEFMSSCWEPVMRQEPQDACSDSESDLTESSPDASMTDIIPMLEELHPLIDLQTGHPSLVSRDNLNTSSDDDEDDLEEEDASTD

SEQ ID NO: 126137 - protein, 705 aa, Oryza sativa
  unsure (1)..(705): unsure at all Xaa locations
  Clone ID: PAT_MRT4530_28713C.1.pep
MDLGKSSSTSASLKKIQEDGALPGRGTMEREAGVMNFYGLSLLHLNPNSIAFLSIFSHLCEAYIGVEPFLDLFRFYYELRWMEPNRVSGCVGFRLRDGLKSRYIPFQCPSSRSKWWTRWFYLQIKDSDPVFVVPEEQPDKIPSWTAKPPLTPSLQSFIDIVDDLRVMISGLTTASNIPVPLCEKGAAERDAAINALPLTDIIGPLADHQVTASLKEKVAKEASDAAAATTSGGNVPTKGRKFSSASDASLPPPRRQRRHGAKAVQDESGGTSGVSPTAASTDVMLAPGRREATPSGPVSNPAAGRGPPAAILTWEELQVEMGRLLEAGARGIGREIAEARSAAASANECADRQVRELAEAREDLKKMRELVAGNERQRQGLEDRMSELGNNLSEIRGSLRVTHTGLHQLAGECGIKSTIPANPDEFSLTSSLAELAAAMREIPSKHAARIEEETSNGIYTGACHVLACVKLAHPELDLREILDQGAASNTHKEVMEEVGDLGESVLPLFEEDVDDEDVQQRGQPESPAIIPVLAFEPHASPDNVDQTLATGTEMATTSLDLEGALAGQDRRIQYWKTKFEVAELERTMLAVKKEQAVETLRGHEVWFNSYLKSCCTSMAKVCRELRVPHGDHEESAAGYISWLNGACAQLDGVGKRIDEALKQECRRSSRYAGGHVLACLRXIARTWTSIFSVRVLLVLGGLRRR

SEQ ID NO: 126138 - protein, 632 aa, Oryza sativa
  Clone ID: PAT_MRT4530_28714C.1.pep
MDNNSKLEGMMDLQRAKNILKFELDKRLMDLQAADAVQKMEEASRFRVQVPSISTGRQNPFDSSNGSDEIIELPHVPDSAPSCLLPRKNLFDLAVNQNMAHDSPLQETWTPLSYFSARRHRKHGNLYVRHSTSLHHNSFKLEKDEISENDAHKSHNSQSDGDAKQERNNSTLFGSLEAHIGEEIKILGMAISEVGVLEVNSGMVSSNQNADFSDDISSSPFQKPRQSTFEAKDTVHAGIEQLTSCSPYKVNNFEAHIVEADSIDEFNSLFKCRMEEVLVQSISKSSISQPLTVKLEDELSEPLSPDSGTGTHFIDGSSVEDSDPRFAQLNDEALVSSTSNATCRNESIEEKSSEALLAGNEDYSELPNELLKSGDPQTADSSEIQVQEQQCDTVEHQLQFLGLTVKKQSLHKSPTTTTTRTRGKSVMSHRDATLFSSDVASLAAPNFLLDGVINFVMAHMTTELGDESLLLVSPSVASLLANLQDYEPETVADTAQALLLASRRMVLFPVNNSERLDKADDGSHWSLLVLDNITGRFVHHDSMDGANLPAATRLADALRPLLPAPPQGPPISGPTPQQSNGYDCGVYLLAVALAICRWWKKHPRTEEAAPCWFESVMDQVTCERFTRLCIKE

SEQ ID NO: 126139 - protein, 651 aa, Oryza sativa
  Clone ID: PAT_MRT4530_28715C.1.pep
MDLGKSSSTSASLKKLQEDDAPPGLGTMEREAGCTNPQPVLGHMVAIEDYILCGFLPPPFEFILLVLNFYGLSLLHLNPNFIAFLSIFAHLCEAYIGVEPFLDLFRFYYELRWMESNRVSGCVGFRLRDGLKSRYIPFQCPSSRSKWRNRWFYLEIKDLDPVFVVPKEQPDKISSWTAKPPLTSSLQSFINIIDDLRVRGLSGYEVIADFVASDIPVPLCEKGAAERNDAINALPLTDIIGPLADHQVAASLKEKVAKEASDAAAATTSGGNVPTKGRKFSSVSGHRRKASTPSASDASPLPPRRQRLVTVSEKRGLDGCRARSREATPNGPVSDPAAGRDPPAAVLTWEELQVEMGRLLEAGACDIGRDIAEAWSEAVLANARADRLVRELAEAREDLTKMRELVAGNERQRQGLKDRMSELGNNLSEIWDADDEDVQQRGQPESPAIIPVLEFEPHVSPDNVDQTLVTETEMATTSSDLEGAFAGQDRRIQYWKTKFEVAELERTMLAVKKEQAVETLQGCEVWFNSYLKSCCTSMARVCRELRVVHGDPEELAAVYISWLNGACAQLDGIGKRIDEALKQECCRSSRYAGGQLLACLRDHRPRLDLEFLREGFARSRRTSAEIDHLARSMSPLAEKIFQSMDWRWPSC

SEQ ID NO: 126140 - protein, 109 aa, Oryza sativa
  Clone ID: PAT_MRT4530_28716C.1.pep
FLTLVFSTLLFFLTKPQHREFFDLLNGAFQFTTCKTFTFFPKRGLLLQGYNFNFLGAKIHTTSTLQLGLNRVSPSPGRPFYSILQGIIEHLSTGEQTNKATPCWGSFAH

SEQ ID NO: 126141 - protein, 701 aa, Oryza sativa
  unsure (1)..(701): unsure at all Xaa locations
  Clone ID: PAT_MRT4530_28717C.1.pep
MERETGGTNPQPILGRMVAIEDYVLCSLLTPPSEFLLLVLNFYGLSLLHLNPNSIAFLSIFAHLCEAYIGVEPFLDLFRSYYELRWMESNRVSGCVGFRLREGLKSRYIPFQCPSSRSKWRNRWFYLEIKDSNPVFVVPKEQPDKISSWTAKPPLTPSLQSFIDIIDDLRVRGLSGYEVVADFVNKRIQSLQARAYPAYNYSGPEDATRVSPRGLNIEAVECRVGQVAASLKEKVAKEASDAAAATTSGGNVPTKGRKFSSASDTSPPPARRQHIVTIGEXAILTWEELQVKMXRLLEAGARGIGCEIVEARSEAALANARADRLVRELAEAREDLTKMRELVAGNERQRKGLEDRMSDLGNNLSEIRGSLRVTYTGLHQLAGECGIKFTIPVNPDEFSLTSSLAELATAMGEIPSKHAARIMEETSNGIYTGACHVLACVKLSRPELDLREILDHGAASDTRREVMEEVGDLGESVLPLFEEDADDEDVQQRGQPESLAIIPVLEFEPHVSPDNVDQTLDTETGITTTSLEGALASQDRRIQYWKMKFEVAELERTMLAMKKEQAVETLRGHEVWFNSYLKSCCTSMARVCTELRVVRGDPEESAAGYISWQNGACAQLDGIGKRIDEALKQECRRSSRYAGGHVLACLRDHRPRLDLEFLHEGFARSRRTPTEIDHLARSMSPLAEKIFQSMDWRWPSW

SEQ ID NO: 126142 - protein, 42 aa, Oryza sativa
  Clone ID: PAT_MRT4530_28718C.1.pep
MARNRHWGAILDIHVEGRDERPRLRGRCVQIKFQAQVEIDYF

SEQ ID NO: 126143 - protein, 910 aa, Oryza sativa
  Clone ID: PAT_MRT4530_28719C.1.pep
MDLGKSSSTSASLKKLQEDGALPGRGTMEREAGGPEKRRRRTTQEKIAIVQQSFEPGMTVSLVARQHGVAASQLFLWRKQYQEGSLTAVAAGEQVVPASELAAAMKQIKELQRLLGKKTMENELLKEAVEYGRAKKWIAHAPLLPGDGDRHTDDTDVLLRIHHVIGELPTYGYRRVWALLRRQAELDGMPAINAKRVYRIMRQNALLLERKPAVPPSKRAHTGRVAVKESNQRWCSDGFEFCCDNGERLRVTFALDCCDREALHWAVTTGGFNSETVQDVMLGAVERRFGNDLPSSPVEWLTDNGSCYRANETRQFARMLGLEPKNTAVRSPESNGIAESFVKTIKRDYISIMPKPDGLTAAKNLAEAFEHYNEWHPHSLNSEAVERRVGQVMISGPTTASAIPVPLCEKGAAEHDVAINALPLTDIIGLLADHQVVASLKEKVANEASDAAAATTTSGGNVPTKGRKFSSVSGHRRKASTPLASDASPPSPRRQRLVTVGEKAARAKAAQDESGGTSGASPAAASMDVMLALGSHEATPSGPVSDPAASRGPPATVLTWEKLQVEMGRLLEAGARGIGREIAEARSAASSANERADRLAHELSEAREDLKKMRELVAGNERQWQGLEHRMSELGNNLSEIRGSLRVAYTGQHQFAGECSIKSTIPANPDEFSLTSSLAELAAAMEEIPSKHAARIGEETSNGIYTGACHVLACVKLAHPELDLREILDQGVASNTHKEVMEEVGDLGESVLPLFEEDVDDEDIQQRGQPESPAIIPALTFEPHASPDNVDQTIATGTEMATTSLDLESALAGQDRRIQYWKTKFEVAKLERTMLVVKKEQAVETLRGREVWFNSYLKSCCTSMDKDSGGDRPPGEVDGAVGGEDPPVYGLALAFLVVFVSCDRYLRKKV

SEQ ID NO: 126144 - protein, 1709 aa, Oryza sativa
  unsure (1)..(1709): unsure at all Xaa locations
  Clone ID: PAT_MRT4530_2871C.1.pep
SNQLDYDLADPCTNVPQYPLYPVYGYHPSTVARQVGEHGAQGSTTMSSSFADNRVNTNLHRGFPASIMLVWTQVDEIVFPVYTTIPISADPSMIRNENAMATTQDDSMSKDPPAEAENGTSTTSELEKDSNATKPCRLDKSHEPTRMTSEATRSWCPIHKTMKHTLQACWVFLNVRAEIRACKERGIQRISPTRDVYCPIHKTKNHDLSSCKVFLSATKTSSPKVQQSGISLRDEDKEQGTTLVSDRFVGVIDISSPEPSVLHLLEDYGSSPASTPREVLAIDGTSTSAHANAETQNQMATPAQHIRTINAILRETPYDPVLNDDLAQWTERLRESRTNLNYAFEEAAAAAHPEQPLTGGANGENPKQQESPHRAXPPPRGTGDLRNHLNGRREARRTXDNGDRSRYRVSSRCRDNERQEGRSNEDRDCVNRHDRERRTQGDAGRGHRHNDEDDRDRRQNKTGGRRQDSREPSRRPLRHQLPRNLQAPRDRRRPTCXTQNSGESLREYVRRFNECRNTIPEITDASVIRAFKSGVRDRYTTQELATRRITTTRRLFEIVERCTHANDALRRKNDKPKTGGEKKPAMDAPESSKKKNRKNGKRKAQAEVLAAEYANPPKRPDPQGSDVKKAWCPIHKTDIHSLEDCLVFKKSLEKHMAFEKGKRVRVVEKDAEAAPQESDSTYPDSDIHVSHIFGGSTAYSSKREYKKVEREVCLTWQGAAPKMKWSEQKIEFSEEDHPKTAIIPGCYPIMVESTIRNIKVARVLIDAYNAIIGRTALAKFMAASHYAYQVLKMPGPKGTITIQRNAKLAVQCDKLSLDKVKQTPSPPATTEPPKKPSDMPGVPREVIEHKLMVRPDAKPVKQKLRRFAPDRKQAIQEELEKLLKAGFIREVLHPEWLANPVMVRKANGKWRMCVDFTDLNKACPKDQCPLPRIDQLVDSTAGCELLSFLDAYSGCHQISMAKEDEEKTAFITPFGVFCFVKMPFGLITTGNTFQRTVQGALSDQLGNNVEAYVDDIVVKTKTSDSLIEDLRETFDNLRRYRLMLNPKKCTFGVPSGKLLGFLVSGRGIEANPEKIKAIENMKSPTRLKEVQKLTGCMAALSRFVARMGERGQPFFALRKKQDKFVWTQEAEEAFVALKDYLSNPPVLVAPQPNEELFLYIAAMPYSVSTVIVVEREKVQRPVYYISEALHDAKTRYPQIQKLLYAVIMTSRKLRHYFQAHRVTVVSSFPLGEVVRNKDFVGCIAKWVVELSQFDVHFVPRTAIKVPDNQIDNETWTMAFDGALNSQGAGAGFILTSPSGDQFKHAIHLNFRATNNTAEYKGLLAGIRAAAALGVKRLIVKGDSELVANQVHKDYKCSNPELSKYLAEVRKLEKRFDGIEVRHVYRKDNIEPDDLARHASRREPLEPGTFLDILTKPSVKEVIDEVSPAAPDISSEATEAERAVVDIETTDDWRTPLIKFINCEELPEDDAEAEKITRKAKIYCMIGNDLYKKAPNGILLKCVSSDDGRHLLLDIHEGICGSHAAGRTLVGKALRQGYGLPHRIITDNGSQFISADFQDYCIGLGVKICFASVSHPQSNGQVERANSIVLQGIKTRVYDRLMSHDKKWVEELPSVLWAVRTTTTTSNKETPFFLVYSSEAMLPSELRHHSTRVQKYSDEDQEEQRNVDVNLLEEHRERVAVSAASYQQALRRYHEKRIRARILSIGDYVL

SEQ ID NO: 126145 - protein, 133 aa, Oryza sativa
  unsure (1)..(133): unsure at all Xaa locations
  Clone ID: PAT_MRT4530_28720C.1.pep
CDYIYTKGPGNLVISAYVTCHDITFTVTLDLKLGKDGVLLRIDLTXDILKKGFEAVXELLSDGGLNTSVLEMAFAGNCGVKLNIESEDSGFLQPLFAXKLGLLLQVHLKDLFTMNLAMEIGRKTANAFSSILL

SEQ ID NO: 126146 - protein, 34 aa, Oryza sativa
  Clone ID: PAT_MRT4530_28721C.1.pep
MARMTRQAPDRGYVSPSQRNRRTIVLTPQWDPPS

SEQ ID NO: 126147 - protein, 70 aa, Oryza sativa
  Clone ID: PAT_MRT4530_28722C.1.pep
EQKRGLFFMCNSKLLFYSEIAKATASNLPKSVIAWLKKIMTPWQTILKRPYIFSLILTTIFCSELTIFSH

SEQ ID NO: 126148 - protein, 190 aa, Oryza sativa
  Clone ID: PAT_MRT4530_28723C.1.pep
MVMDAARAVAMPSLSPATVAARPSSRRLHKVAAMATQKPTSGTRRGTTVYFPVGEPGPRQTTSGKAAAPPVKLLTNVEKLRLLTKAEKAGLLSAAERAGLSLSAVERLGLLSKAEELEVLSAATDPGTPGALLGVALLLLAAGPAVVYLVPEEYPWEVAVQAVVALACVVGGSTAFAASSFVSKLQSSSS

SEQ ID NO: 126149 - protein, 74 aa, Oryza sativa
  Clone ID: PAT_MRT4530_28724C.1.pep
MVMDAARAVAMPSLSPATVALLLLAAGPAVVYLVPEEYPWEVAVQAVVALACVVGGSTAFAAYSFVSKLQSSSS

SEQ ID NO: 126150 - protein, 58 aa, Oryza sativa
  Clone ID: PAT_MRT4530_28725C.1.pep
GHLDASWAPQALVVRGVALFGARRTSLALLWEKKVDPTARPARPTVATRGDRMRTVRG

SEQ ID NO: 126151 - protein, 133 aa, Oryza sativa
  Clone ID: PAT_MRT4530_28726C.1.pep
ANYVTLHRLWNLIHPFSFPIFRIWRGDGCGIQVAAMTRSAGGSHGAGGDDQEAEEAATAKKLRWDLHLLLTELCHHAHHCRCPPGGVLALRRRPHRSGEQSDLYNKKAEAMPSSALINNKAKVQFADLPENLM

SEQ ID NO: 126152 - protein, 119 aa, Oryza sativa
  Clone ID: PAT_MRT4530_28727C.1.pep
MEIIVILSLVVLLVLGALFVLPKSRNKGKAKEASSNAKSVTFRSYTKEEISAHNTRTDCWVIIKDKVYDVTSYVEEHPGGDAILNNAGGDSTEGFFGPQHGFRVFEIIEDFCIGELKHS

SEQ ID NO: 126153 - protein, 179 aa, Oryza sativa
  Clone ID: PAT_MRT4530_28728C.1.pep
MKSGSLLTLTLGALLLAGIPISSAAVTPNSNIRLPTDGGDEWPSPPWDCCDKLKQSPLRIWPPKYKCLDEVDHCAAACEDCKRADGGGYVCRDWYWGVNPGPKCTGGGGEEAVRSRPWKCCDDAVCTRSMPPTCSCQDKVKSCSGGCGKCVQVESQPPRFRCLDRYHGFPGPKCHNQPA

SEQ ID NO: 126154 - protein, 79 aa, Oryza sativa
  unsure (1)..(79): unsure at all Xaa locations
  Clone ID: PAT_MRT4530_28729C.1.pep
TEYHCSTSPSGDPKRISNSGNMRNLPKAKTIQGQQLMRGSGYSSLMYPNVENYXDRIQGCHHLPPTSDKSVGYTTNKGN

SEQ ID NO: 126155 - protein, 117 aa, Oryza sativa
  Clone ID: PAT_MRT4530_2872C.1.pep
PRPPTAPPHPHHCFKSFPPQRFPPPPLPCFPIDPNHSCKEQNKIEIDDGGSRSKIRSQIQAEVLQQDCRHLFLPCPLNPMIPSQIGSNKRDDAKDGVMKSEAQISVWLQSWGKNHVL

SEQ ID NO: 126156 - protein, 66 aa, Oryza sativa
  Clone ID: PAT_MRT4530_28730C.1.pep
YWEALVPKSAILFTMLEHHNKRRDSSKIGTDTTHKHGSNQVSTHLCIGSVGGEIKFPQRDYSILGC

SEQ ID NO: 126157 - protein, 144 aa, Oryza sativa
  Clone ID: PAT_MRT4530_28731C.1.pep
MVRAIRPPIVPTLKKTWWQKGVFSAENGFGRWFQRVFGRYFQGKELVSESSLFLHQRAMEEAGILGRNAEALDNEKFGKKQFLVLVGLRYILAKNIGEYKGLNNSVELLQAAIDAKDSFITIDQAKHRFRASKQQELYRSPAIL

SEQ ID NO: 126158 - protein, 71 aa, Oryza sativa
  Clone ID: PAT_MRT4530_28732C.1.pep
MSAVAVELSPVYTGMSVIYHMERCQATFPSAAICTNFSIDIFFLSLCYRKVPSHVPSTVVRTDLSLHSFKL

SEQ ID NO: 126159 - protein, 126 aa, Oryza sativa
  Clone ID: PAT_MRT4530_28733C.1.pep
PSRACTWKLWSSHNTARTVEVVGAGREVGADRALSHPERYVVQALIAFRPQEVNCNAQRLRTPCQYCRRRRRRRLRCCSTRHARRTQRRSGRNMVRGAPLRRASVQSPVLPSQERRPPSVVRAPDG

SEQ ID NO: 126160 - protein, 85 aa, Oryza sativa
  unsure (1)..(85): unsure at all Xaa locations
  Clone ID: PAT_MRT4530_28734C.1.pep
MLQIRGLELQTTKQYLHCNTPQLEPLPTVLSMGRSHRLPAGXISAWLSNSVDPTDGNDKKGEYYWKDVADEFNNNRPVPVDTLMT

SEQ ID NO: 126161 - protein, 260 aa, Oryza sativa
  unsure (1)..(260): unsure at all Xaa locations
  Clone ID: PAT_MRT4530_28735C.1.pep
LEPLSTVLPMGQSHRLPALQDNKRRQLISSRQVKAAKTSNSVDPIDGNDKKGEYYWKDVADEFNNNRPTNGHKRTVKQLKTHWGNVKKDIGKFCGVYAQVRRTCTSGHSDDMIMEKAHLWYKNQSNQKKPFTLEYMXRELKDQPKWRSIIKKEENKNKRTKISESGAYTSSSNQETEEESSNKERHPEGQKKAKERLKGKGKGKAQSSPLGNQPSQNIVLYNEAMKIKAEALLKSAEATAKSAEAKREQIRMEKWQAGRV

SEQ ID NO: 126162 - protein, 57 aa, Oryza sativa
  unsure (1)..(57): unsure at all Xaa locations
  Clone ID: PAT_MRT4530_28736C.1.pep
LEWLNPPXLSVSPSVSXVSNXXSFIXSRXXVSWXAVFXXNCXXXLSXXXXPPXIYXK

SEQ ID NO: 126163 - protein, 169 aa, Oryza sativa
  unsure (1)..(169): unsure at all Xaa locations
  Clone ID: PAT_MRT4530_28737C.1.pep
ARSVPPCSQSGARISAAFEGRLIITWHTLCSFKLKSGATVMVMDKAYPLSLDLWNIRIQHTITNTSYLRMRXGNSPDVMENVSTGQATDEVLLGILLGDQDDPRYKRDPXEGFKALNLTTNTPAIVYEAGARRAKSPGDLVESIDYNFILIPANPNTLIIRSTGITRQQ

SEQ ID NO: 126164 - protein, 100 aa, Oryza sativa
  unsure (1)..(100): unsure at all Xaa locations
  Clone ID: PAT_MRT4530_28738C.1.pep
RRNFDPSGGGRRRREEEEMAXXSKEPCKKEACDIQACLSKNMRAALIRAAAAAAAGGGGDGAAEQGAVQEGGVRHPGLPLQEHVRFQEMCESYPITSILL

SEQ ID NO: 126165 - protein, 123 aa, Oryza sativa
  Clone ID: PAT_MRT4530_28739C.1.pep
MAQQSKEPCKKEACDIQACLSKNMFDSKKYVYGFLVFTSCQDSVRAQELGFVVGEVVGDAYGWWSWQQDDACFQLIGVSMIEHLNGAARCVRVIQLLQSCCEQCEYKSTHCGSLTGLLKNISK

SEQ ID NO: 126166 - protein, 157 aa, Oryza sativa
  unsure (1)..(157): unsure at all Xaa locations
  Clone ID: PAT_MRT4530_2873C.1.pep
GTGSVYIGXGRGETVRMRGKRARKIRPPLMRXARLGGKFPNESEGEREGKMGGKREVITGNISPLLIARGTYGIGGILAGGGARARARRRDRREKGDDGWAPPVSEGGGQARPSAARAREVGRMGRGEEGXRGKGMGRAGPRGRGEGKGIFLGFFFL

SEQ ID NO: 126167 - protein, 887 aa, Oryza sativa
  Clone ID: PAT_MRT4530_28740C.1.pep
PLLPEAMAEAAGGQPEFVEVRCAGCGETLEVEPGLTEFACPDCGTHQALPPELMPPPPPRPRRALPIPGRGPPPAAVLHAPVPVPVQVPAPARMPCGGCCALLSVPAGLVRFACPVCAAELVVDGGRLRLYFASPAAPTVSVVAPPPAGVKLTADPLRHQQEQAKIEIDHPQRAKQIPAHCSIHSDAKEEEDDAFGNATEAAAQQTMAREEPFIHSIHRGESCNETLDKTTARSSSRKARLQAGVESIYIEKLQPERPIQESTPQAQACPPSNSVRGDHAQGQQPLVDISSREQRAKNVSSTMEREKAEPLNQASELKKAQAGKTIGCPKRKRSSKNAGENKRKNKGFPSSPNEGLYLRRSKRLTKQPEQPINDDPVQQPAASPNQYNSDPPDIDRLIANLCPSPSPQCQMPQACSSESGNADASVLPASSNREMPQAEQSPHRYNQLCPPEVRGTHQLDKSGEQVQPQSPEQVTHAQQVSSTITALLKQKYPGSTYLPVGEHGDVPANEELVYRWKHYPAETRAAILNEFLQRYKWAPGREAECLKIFQRRAVKQFTGLLCEEKRRVRAELAAVQKAKKASGSRSSNSHAESEEEDATEEPKDNQTEKVNEDEDPLLWKPFPPAWMHPNWWERLCEYWAKEEVLQMSLKYRKNRFVGGRAHHTSGSRSFAMQRQLMVIENGGKPVSELEIFNKTHKFNGGTGEFVSEKAKRIVEGFKKRMEEAGDKPADPDAAWIQQVGGRNRGRYYGLTGTIDKAKIAEIAKSIPGKRGQQKFSQEEVQQMINHALQGLNQSWEEKFKSLEQSVRGAPLLGVDHETQEIDLVTLQHAPGSSAAGGDVQQDQSKHQDESDKQHVERRQSARHHDDDDDDDDEDYEVEEEEVVSTSD

SEQ ID NO: 126168 - protein, 50 aa, Oryza sativa
  Clone ID: PAT_MRT4530_28741C.1.pep
GENFSQTLFLGGLLNPVLVLPPKKKKKKKKKKKKKKKKKKKKKKKKKKNK

SEQ ID NO: 126169 - protein, 82 aa, Oryza sativa
  Clone ID: PAT_MRT4530_28742C.1.pep
ARQIPYMASFVHASHSLRAGSGYTTPIVKDRKLAQRPQVESWKGERQNLSAPPSPVSLMRRRTLGSIGQFGYTVRAGLPAFP

SEQ ID NO: 126170 - protein, 84 aa, Oryza sativa
  Clone ID: PAT_MRT4530_28743C.1.pep
AAVAHGAHPSFYPLFKHLHIFIQSYSCVAISEYMIFLGICTIATAGPLSFFSPCASMLALLAKICDDMYTIPVRFKSCFYLAYT

SEQ ID NO: 126171 - protein, 67 aa, Oryza sativa
  Clone ID: PAT_MRT4530_28744C.1.pep
MATPSTALNAAWRQRSRRSRAVLHFAPRGLHSASAQHCGFVIQRSNPIGNSLLSLPIPGSDGLTAHP

SEQ ID NO: 126172 - protein, 124 aa, Oryza sativa
  Clone ID: PAT_MRT4530_28745C.1.pep
DGCMGGADARGRRRRLRCGVFPVPSRTDPSSAATGGVGSGDLFLSRSDPVVSPCPAHADPPPVLTGGSRSGGSTVVVASLPPPPLRARPLRRPRPCCLLLPHAVFDGCDKGRRRRRWEALEGGI

SEQ ID NO: 126173 - protein, 188 aa, Oryza sativa
  Clone ID: PAT_MRT4530_28746C.1.pep
MNLFDASRYPAAAAFVLLCTNAAAALPPQLQQVNSGEVGRRYTARRRRYGTSTPDSGRRTPARLAADTPPATRRSDTVFPRRPAVTPPLKHSAYVHPFFSIPSSLARLPFGGAISDGQNCFDDESLSGTSFLAGDVQSSAKHTADLIGKFDQEERFGIQHWIWRVAGIAANRRIRQKIHNMAAKQSKL

SEQ ID NO: 126174 - protein, 147 aa, Oryza sativa
  Clone ID: PAT_MRT4530_28747C.1.pep
IRGALLFAVRFSPRLPTLKLCTRSLVVTYFRFGVGRRTIATVRTPWSSCDSVRRLFTEHSSVRSHTRSSPIVLVSHGIFVMSVMTQYSPLTFILSRPIRVVCVDSAPCRFCLGSTLPLCLCAPRSSHLLTLRPCLSAITLGSLLLVV

SEQ ID NO: 126175 - protein, 191 aa, Oryza sativa
  Clone ID: PAT_MRT4530_28748C.1.pep
SPRAGETSATKAPAIERQLACSLEDLYRGATKKMKISRDVLDATGKPTNLEEILTIDIKPGWKKGTKVTFPKKGNEKPNIIPSDLVFIIEERSHARFKRDKDDLIYTHRISLVEALTGCTVQLTTLDGRNLTVPVKSVINPTSEEVVKGEGMPITKEPSKKGDLKIRFQIKFPTNLTSDQKSGIQQLLPKP

SEQ ID NO: 126176 - protein, 356 aa, Oryza sativa
  Clone ID: PAT_MRT4530_28749C.1.pep
MGLDYYKVLGVGRGATDEELKRSYRRLAMKHHPDKNRSPHADDSLFKQVSEAYDVLSDPQKRAIYDQFGEEGLKAGAAPPPTTSSSSSHGGGGGFRFSPRSAEEIFSEMFGGAFGGAGPRAPGAGFPGFGGSPRAGETSATKAPAIERQLACSLEDLYRGATKKMKISRDVLDATGEDGVKGRKVERRGRLRVVHERRHERRSFDFSGKRKPTNLEEILTIDIKPGWKKGTKVTFPKKGNEKPNIIPSDLVFIIEERSHARFKRDKDDLIYTHRISLVEALTGCTVQLTTLDGRNLTVPVKSVINPTSEEVVKGEGMPITKEPSKKGDLKIRFQIKFPTNLTSDQKSGIQQLLPKP

SEQ ID NO: 126177 - protein, 766 aa, Oryza sativa
  Clone ID: PAT_MRT4530_2874C.1.pep
MSYYVDPRTSVPQYPLYSVYGYPPSTVACQVGGLGAQGSTTMTSSFTDNSVNTNLNQGVPTSTTLVWTQVGEIVFPVYTIVLISAGPPMAGNENAVARTRGDSMSKNPAAEAEIGTSTTSEPEKDPSAAKPCLSNRNHEPMRITSEVTRSWCPIHKTRKHTLQAWWVFLNVHAEIRACKECGIQHTSPTRDVHCPIHKTKNHDLSSCKVFLSAMKTPPPKVQQSRIPIRDEDKEQGATPILDRFVGVIDIDPHEPSVLHLLEDYGSSTTSTPREVLAIDDVGTSVRTNAEAENQVTAPTQHIRAINAILRETPYDPILNDDQARWIERLQESVTNLSNVFEEAATAAHPEQPPTGDANDRGGHSSEDRDRDNHHNHDDRERRCWAILVEDIAIITTMMEIGAETITGDDDRILENPADVLIIRLFEIVDRCAHADDALNDKPKTGEEKKPAKDAPESSKKKNRKSGKRKAQSEVLATEYADPPKRPDPQGSDTNKAWCPIHKSDIHSLEDCLVFKKSLAKHMASEKGKRVHVVEKDAEAPTQESDSAYPDSDLHVSHIFGGSTAYSSKREYKKVEREVCSTWQGATPKMKWSEQKIEFSEEDHPKIAVIPGRYPIMVEPTIRNIKSLSKSLGKITLPVTFGQANSFRTEQITFDVTEFDTAYNAIIGRTALAKFMAASHYAYQVLKMPGPKGTITIQGNAKLAVQCDKRSLDMVEHTPSPPATAESPKKVSKTNKTPKPDGAIKIVPLSSANPDKTVKIGASLGEK

SEQ ID NO: 126178 - protein, 101 aa, Oryza sativa
  Clone ID: PAT_MRT4530_28750C.1.pep
MKRGLKLTRLDSDVLGKMLILPSIAPKNPRYNLRKYQLAAQNSRQKHKDRPGHTRGQDEKIDIHWLASVGNFQVVNLARDWHHRAAAAHSNLTSHKWVATI

SEQ ID NO: 126179 - protein, 347 aa, Oryza sativa
  unsure (1)..(347): unsure at all Xaa locations
  Clone ID: PAT_MRT4530_28751C.1.pep
MVEDQTRTGQGTQTTIVDIQIHVLQKYKRLQMQRKNGRLHSTGILDGSDETNLFETSSTEKDFNSGVGEKXSKTEYYPLGTRREGRGWWLGSASKPAGQAWRMTAARAVAGDGNRRRGRRRQTARKAAAAAEDDDARAEDGDAHGREGKXGGGGGTKWEGLEGEGWSTAGGNHGRRRRQWWYSPARGEKRAPTAGLDGDAAAGVALAAAKLMAAQRCGSDGGHGRERRKEEKGGGECGEALLGLERDGRGREAAGFLADVGNGERERESFEFESLRCGVHARVGGVGMVGGDVGAGRGVGRGRRGRRAAXWVVVSAAVGAGVGGRRLGKGLTGGPHLSAPEREREAG

SEQ ID NO: 126180 - protein, 84 aa, Oryza sativa
  Clone ID: PAT_MRT4530_28752C.1.pep
KFAPSLLVRRIGRARAPHRVGPPPTEPPKTRAKAAPPRERASATSRRPSSRSRGVTAATSPPHHPSCRSYPPRHPGLSPSQSPP

SEQ ID NO: 126181 - protein, 669 aa, Oryza sativa
  Clone ID: PAT_MRT4530_28753C.1.pep
MAAQLKSMDMSISDGFLVHFIMNSLPSDYEGGKAKKQAYLVDNEKGKRKADEICAAETSKKPRNSPHKPKPKGKPKTPASPAPGPSASAIICRFCKKPGLIQKNCNGFKKWLAKNGIEFREDYRKGGANGRLHSTGILDGSDETNLFETSSTEKDFNSGNGQPPFRAAVNPEADQPDTPADPTPSRPPSPGADVSIRRGGADTRDLRVSDSRRERGGWQAGPTERRLKREREGRRHVGPTGSGTRREGRGWWLGSASKPAGQAWRMTAARAVAGDGNRRRGRRRQTARKAAAAAEDDDARAEDGDAHGREGKREEGEFFTEGTKWEGLEGEGWSTAGGNHGRRRRQWWYSPARGEKRAPTAGLDGDAAAGVALAAAKLMAAQIDSAAASGDRRSGKGGGGGCSGAGVMEGTGESGGKRKKVEGSAGKLYWGSRETDEAGRRPDFSPTARSGARKAGKAGGDGWWFRRRLAQAWAAGVRSDRGGEYYGKSAPYGQIPGPFAKFLQENGIVAQYSMPGEPQQNGVAVRRNRTLMDMASSSVAQALVEDINEPVAQDNVQTPQPTEITNEPLRRTQRERRSAIRSDYEVYIGEDIGKSDDPTSFNEAINSESSSKWLEAMEDELKSMGTNGVWDLVDIPERVKTVGCKATPSASPPATCYHDLDITDDSYRD

SEQ ID NO: 126182 - protein, 355 aa, Oryza sativa
  unsure (1)..(355): unsure at all Xaa locations
  Clone ID: PAT_MRT4530_28754C.1.pep
MAAAEDCRGSGGGGRRGSSHVGGVGGWRQQRRWRPACGGRECGGKVTTVAAVGGGTVVTTVAEAILDGSDETNLFETSSTEKDFNSGVGEKRARLSTTHCTQQVIPEEEGSPPSPAGNGQPPFRAAVNPEADQPDTPADPTPSRPPSPGADVSKGWGGADMRDPRVSDSKRERGGWQAGPTGQXHKGEKGRRQPPGSDRHQSRSADPGXRRRRVRVTSPATASGGGGDXKRRQXRRQRPKATGRRREGLERGRXTTATGIHGRRRRXEVKPTGARGDGCSGGEPRRGRGGRGGERAGRGRERRDSPADAGEWGGERGGIRISNPGHLGRGRKWEREGKGRGKRGARTGVDHVGRG

SEQ ID NO: 126183 - protein, 298 aa, Oryza sativa
  Clone ID: PAT_MRT4530_28755C.1.pep
MGATAGVRPLAPFLLMPPRWLREVRRPGYGGAGGQMAVQRELAARGKLRVPKQCHPVPGSPSARFGEAAGGWWNGGVLGQFSGWRFDEVGQRRGVGLEASRASSQGGGLMKSADGGASVRGRLHSTGILDGSDETNLFETSSTEKDFNSGNGQPPFRAAVNPEADQPDTSADPTPSRPPSPGGTRREGRGWWLGSASKPAGQAWRATAARAVAGDGNWRRGRRRQTARKAAAVAEDDGARAEDGGAHEREGKREEGEFLTEIGRREWTRRRTTTTSDGRTTATGRRSPGPSREQNGKD

SEQ ID NO: 126184 - protein, 223 aa, Oryza sativa
  unsure (1)..(223): unsure at all Xaa locations
  Clone ID: PAT_MRT4530_28756C.1.pep
LQEFGTRPEEHLLLLEVEAAAVSGEYIYEGWDPELVKHVLSFFHPDNMRVDVLSKSFDKQSQAIQCEPWFGAQYIEEDIPSSFMESWRNPAQIDDAFHLPRKNEFIPXDFNLRXANMPKPLSDDNPRCIVDEPFIKLWYKMDMTFNVPRANTYFLISVKDGYSNLENSVLTDLFVNLLKDELNEVLYQAYVAKLETSMSVVGSNLELKLYGYNDKLSTLLSSI

SEQ ID NO: 126185 - protein, 174 aa, Oryza sativa
  unsure (1)..(174): unsure at all Xaa locations
  Clone ID: PAT_MRT4530_28757C.1.pep
AQKESNGDALVSFWRVVKEVGGPANYLMLTKTNYDDXALMMKVMLQARGLWDAVEHGDANFQEDRTVLEAILRVVPAKLLGTLAIKATAXEAWDTVKTLHVGVERVRKVKAQTLLKEYEAIEFKDGETVEDFKVQANGHEKFQYVFLNFDNDVIYAIEKLVVNNRRVRVELRVG

SEQ ID NO: 126186 - protein, 106 aa, Oryza sativa
  Clone ID: PAT_MRT4530_28758C.1.pep
RQQGGKAPACGPHESAAQERERGRGAGTWLDSASKPAGQAWRATAARMVAGDGNRRRGRRRQTARKAAAATEDDGARAEDGGAHGREGKREEGEFLTEVGRREWRQ

SEQ ID NO: 126187 - protein, 395 aa, Oryza sativa
  Clone ID: PAT_MRT4530_28759C.1.pep
MEDARDRREVARRSPLWRPPTPASAGCFLAHDDNPVAIAFRRARLRKDPYRRPERGGETRPGAAAAGTPSPSNSGLFADAALHAAPGSGGARTLQPAATATEESQAARRGADDGHGYHRFARGRAVAPPRGRPGRRTRPSRPAGAPLLCLKARSPLLRLESEPLLRGGGRRSGHDANESFFRRWCRRPASSRELARHGACSAHCRRRPCFAAGRLSHICRRPRREEKRKKKKRAGDSIPQATLHGSDETNLFKTSPTEKNFNSGVEEKSKTEYYPLYSASHTRRGGNGQPPVRAAVNPEADQPDTPADPTPSRPPSPGADVSKGWGGADMRTPLGEGGGGKRPPTAVAGEKTAAAGDAGDALAAAKLMAAADWLGGGSSGGERRPEEWKRRRRRV

SEQ ID NO: 126188 - protein, 90 aa, Oryza sativa
  Clone ID: PAT_MRT4530_2875C.1.pep
MALWRALFLAAGNGNAALVRALLMSALPLPVLLEIQGVPSRGCPRAPKEQLTTCIRPRSPATGAGPRDRKRGKRGGEGMTGGVYIKGILV

SEQ ID NO: 126189 - protein, 229 aa, Oryza sativa
  unsure (1)..(229): unsure at all Xaa locations
  Clone ID: PAT_MRT4530_28760C.1.pep
KRAKPEDLTPAAGDSIPQAILDGSDETNLFETSSTGKDFNSGVGEKRARLSTTHCTQQVTPEEXGNGQPPFRAAVNPAADQPDTPADPTPSRPPSPGADVSKGWGGADMRDPRVSDSRRERGGWQAGPTERLAQGGRGAAGGSAWLQSRQAKHGERRRHARSPATAIGGADGNGRRCEKRHRRPKTTVHARRTATHTGERERGRRGSFSPRLAGASGDDGERRRRATGG

SEQ ID NO: 126190 - protein, 112 aa, Oryza sativa
  Clone ID: PAT_MRT4530_28761C.1.pep
RHHKEGWRRHAGPAGQAWRATAARAVAGDGNRRRGRRRQTARKAAAAAEDDGARAEDGDAHGREGKREEGKFFTEVGRREWRQRRTTTTSDGRTTATGERSPGPPREQDGRD

SEQ ID NO: 126191 - protein, 542 aa, Oryza sativa
  unsure (1)..(542): unsure at all Xaa locations
  Clone ID: PAT_MRT4530_28762C.1.pep
CALNPLSRTSQGILDGSDETNLFETSSTEKDFNSGVGEKRARLSTTHCTQQVIPEEEGSPPSPAGNGQPPFRAAVNPEADQPDTPADPTPSRPPSPGADVSKGWGGADMRAPLVSGTKGGRGGGWQAGPTGQCHKGGGERRGARXGPARLQSRQAKHGERRRHARSPATATGGADGDGRRREKRRRRPKTTGTKWEGLEGEGWLTASGFHGRRRRQWWKLTGVRGDASPGDGIGRENSGRGGPRDGGRGGADGGLAGGAGKVGGDVGVRYGRSGRGNSGIRGGVGGGFDGVGAGVGGRSESGSRSTGHPSRPNSITPTLAWVRLLEESYTTSPAVAHAGLCRPAGHGAVARAELAAAHGYRRRRGSRRRRLEAVAREAAESAEGHDECVERGGANEREGKREERGSSPASTAAGAKDEGGGDDPTSGGADGHRERGVPAVGLDGDAADGVALAVEKLTAAADWLGGGSRTCGVRTGPRWRAAALDENRVCRGQRLQNAANRRKGNGNRETIMGPGGGTAGEPATTPRSAPRATNNDEHTPPL

SEQ ID NO: 126192 - protein, 386 aa, Oryza sativa
  Clone ID: PAT_MRT4530_28763C.1.pep
MASSAAYFAFSVLVALHLCCCHGQAPDAAGNSSDVTAIYSLGDSITDTGNLIKEAPPGMFETIKHLPYGITFGYPTGRCSDGLLMIDFLAQDLGLPFLNPYLGKNKSFDHGVNFAVAGATAMDPTDQFNGRFFAPFSSNSLNVQLRWFKDFMKSTFSTEEGNSPDQFHIRKRLQSSLVLIGEIGGNDYNYALFGKSVSEVEKLIPSVVRTIIDAAKEVLEMGANRVIIPGNFPIGCMPTYLTSKRSSEPSDYDATGCLRELNRFAAKHNARLRRAIADELRPSYPAAAVAYADYFNSFLALLDAAGELGFDAGSARRACCGAGGGEYNYDPRRMCGAEGAAACAEPEKYVSWDGVHMTQAAYRAMSRLVYHGMYLEPQILSLADAP

SEQ ID NO: 126193 - protein, 72 aa, Oryza sativa
  Clone ID: PAT_MRT4530_28764C.1.pep
YASYVIRINSFSMVETAGYLAYGHFLFSLFLGVYLFDIFLLELAFHTSNSLIVQHVVFSLAIIIMFVVVGLC

SEQ ID NO: 126194 - protein, 51 aa, Oryza sativa
  unsure (1)..(51): unsure at all Xaa locations
  Clone ID: PAT_MRT4530_28765C.1.pep
MRPSLMRSASQVLRRRRGYSCACGQPDRKVSILGSAGGICQXFTLLMKLNP

SEQ ID NO: 126195 - protein, 953 aa, Oryza sativa
  Clone ID: PAT_MRT4530_28766C.1.pep
MGNDGEKASKLCKEAGGPSLDSNLAPTIGLALTTVPMGWDNRRRKHASTIMNARGRGARNGNGPNRGRGGGRAHSDVVVGANTTVLATRRWVGLEIDSVPGNEGQRDIVNYYLRCATGVGNGERELAVVGTHHSNRRVTYVVHEPFLQSLKELQVAAVVGVERLMWKSRKDVVHWLNMLISDVASDEVAICNNDGKDAKLANISTTKGSSSSTAGNDSGDFKWLGPESHSKKGKSYKSFWRRGFTFMVHDFVYILVQHGNKLVAYVEELYEDNHANKMVQIRRFRTLNSTGIQLSPGVNDREILHSDNLQDIGVECIDGLASVLNEEHFEMFQAIANNTNRQPYLCIRHIDNNSNVKTFDIAQLQGYSEQEIFRIVSGTPPVTVHPDASEGSKNTPRSSARGHHHHRTMENPTASDETNVQATTINVLARNAAPTESASALINSALEKYLEQYFSHGCLVECLSQDSGIRGCWFIGSVIRRCGDRIKVRYQHLQDPETPRANLEEWLLVTRTANPDTLRIRLSGRTRIRPHNMSERENPSTISVGTVIDGWLYDGWWEGIVLKVNDARRLLAYLPGEKKMVLFRKDQLRHSLEWIDNEWKNFAHREDIARRIPSAEDLRIRVITAREVLTREEVMKQLEGLKTNKGGSNSAKPAAEKGSSSSATKKTTPDLIRHATNDLGSLNFKHVGVPASEEIRTDNKGSQNHATAVTFSIHPLPFRLLPSFSIFFTASASWAIPSAAALWRQGCLPEPSGRRGSCQVPLLLPTRAGVPPAVVATVGFCCCCSAVAATRCQREKGGYSAVASAMAVQTTAVATPALTCGGRDGAGSGTWKEKGCRGSRASALTRHAKGAGARRDGAAVLAPVLRERREGMAAPAWLPLLQACRLGSGRRRYRWRVAADGLAQQWNSVAAMAEQKWNSVAATTKQQQRNPAVAAMAGDTPARVGSGSGSSGT

SEQ ID NO: 126196 - protein, 104 aa, Oryza sativa
  unsure (1)..(104): unsure at all Xaa locations
  Clone ID: PAT_MRT4530_28767C.1.pep
LQCRYKNLAFRFMSVPIDLILQSTRNKDRKIVVKSINDSRSARTQSVRGNPYEAYXLNPTTCTESHCRNRLNQLPSSTRTLLILIVADLDFSRFLLYFRNNLYL

SEQ ID NO: 126197 - protein, 120 aa, Oryza sativa
  Clone ID: PAT_MRT4530_28768C.1.pep
ASQIDRCRVVVAAIDEYEMKYRTGKSCSYHHRDNCGELPSLLIISPPLGWAALICDRGELPLPLLQAVPGCHQRLMSRCPDHDPARRGESTRGTPLVVAISKPATDDGDAHLDFAVADAW

SEQ ID NO: 126198 - protein, 263 aa, Oryza sativa
  Clone ID: PAT_MRT4530_28769C.1.pep
MAPPPISSSLSLMASNPIPSPPVAKPGRPLTVAACSNSSSSSSSSSPSSTSCSAAWSLPVATSAGRRGLLALGAGFLASPGLLCPAGDAGATRIEYYATVGDKLCDMNVVKSGLGYCDVEVGTGAQPPRGQLINVHYTARFTDGIVFDSTYKRGRPLTMRLGAGKILRGLEQGISGGGGVPPMLVGGKRKLMIPATLAYGPEPAGCFSDFRVNFGVSYKRRDYGQMKRKGATCLSPDAESKCVTGAPWVSNTQSTTFAICTKK

SEQ ID NO: 126199 - protein, 894 aa, Oryza sativa
  Clone ID: PAT_MRT4530_2876C.1.pep
MSYYVDARTSVPQYPLYPVYGYPPSTVARQVGELGAQGCTTMTSSFVDNGVNTGPIQGVPTSTMLVWTQVGKIVFPVYTTVPISAGPSMTGNENAVAITPDDPVSKDPPAVAENRTSTSYEPEKVPSAAKPCPSDKNCEPTRTTPEVTKPWCPIHKSRKHNLQACWVFLNVQAEIHACKERGIQRTSPTRDVYCPIHKTKNHDFSSCKVFLRAMKTSLPKVQQSGISLKDADKEQGATLTSDRFVGVIDIDPHEPSVLHLLEDYGSSSSSKRRDVFTIGGTSTSAHANADAENQAVTPAQHLGTVNAILREAPYDPVYSTVLYAAGADDNALANYLPMALKGFARSWLMHLPPYSISSWANLWQQFVANFQGTYKRHAIEDDLHALTQNPGKSLRDYVRLFNECRNTIPDITDAFVIRAFKTGVRDRYTTQELATRRITTTRRHSPEECLIFKKSLEKQLALEKGKRARVVEKAAEATTQDSDSAYPDFDLHVSHIFGGSTAYSSKREYKKVEREVCSTWQGVTPKMKWSEQKIEFSDEDHPKAAVIPGRYPIVVEPTIRNIKVARVLIDGGSSINFLFASTLDAMGIPRSELTPTDQPFHGITPQSSSKPLGKITLPVTFSQASNFRTEQITFDVAEFDTAYNAIIGRTALAKFMAASHYAYQVLKMPGPKGTITIQGNTKLAVQCDKRNLDMVEHTPSPPATAEPPKKELALITFLRDNADVFSWQPSDMPGVPREVIEHKIMVRPNAKPVKQKLRRFAPDRKQAIREELDKLLNAGFIREILHPEWLANLVMVRKANGKWRMCVDFTDLNKACPKDHFLPRIDQLVDSTAGCELLSFLDAYSSYHQISMVKEDEEKTAFIMPLGVFCYVKMPFGLITAGNTFQRTILGTFG

SEQ ID NO: 126200 - protein, 53 aa, Oryza sativa
  unsure (1)..(53): unsure at all Xaa locations
  Clone ID: PAT_MRT4530_28770C.1.pep
LIQYITSKXXCGGXLGSQPWPSHSYASIDVNPIPLRLAFSXIYFILSKKXCKV

SEQ ID NO: 126201 - protein, 169 aa, Oryza sativa
  unsure (1)..(169): unsure at all Xaa locations
  Clone ID: PAT_MRT4530_28771C.1.pep
WASARPPAEWSRAAGEGERRPSMTLSFFLVRQGLVSTHGYXNMYTRGLCNLSSRSIQFGTSPXFYLFYFILSFGGTWHLTRGCISVRSPAKGXVQCSVGPGNCLIYIGVVXGCISTXTSWIAPVWMIYLSTYLSYASVNIVLAYQFTSIGCFSLXGFCRYQLNRVARLE

SEQ ID NO: 126202 - protein, 103 aa, Oryza sativa
  unsure (1)..(103): unsure at all Xaa locations
  Clone ID: PAT_MRT4530_28772C.1.pep
RGRAPPRRRRSPSCASLSRTPSRPPPPARRVFGLSXPCRRPCPPSRSSAPPRRRRRGPRPPSLAPPSPARTPPPCARCRRSPPWPSAPPSRRWRASRPWPSRP

SEQ ID NO: 126203 - protein, 162 aa, Oryza sativa
  unsure (1)..(162): unsure at all Xaa locations
  Clone ID: PAT_MRT4530_28773C.1.pep
LRLASSSRAGSSWLVISNNFFLVRQGLVSTHGYXNMYTRGLCNLSLRSIQFGASPPFLLLLLFLRSGGTWHPTRGCIVFDLWRRDKSNXSAGPSNCIVYVGVVQGCIXHSTSWITLVWIIYLLGYLLYVYVNLVLTSQFSSIGCFSLXGFCRYQLIRLARLD

SEQ ID NO: 126204 - protein, 57 aa, Oryza sativa
  Clone ID: PAT_MRT4530_28774C.1.pep
ATRRAPQVKTYLPPLPDLRRAPPPCAPTPPCPAPPPPPPPSSGTRSSSPLPPPPASS

SEQ ID NO: 126205 - protein, 169 aa, Oryza sativa
  unsure (1)..(169): unsure at all Xaa locations
  Clone ID: PAT_MRT4530_28775C.1.pep
AHHSAAVLAPARRTAEGGEREIGGRESFLVRQGLVSTHGYXNMYTWGLCNLSLRSIQFGASPPFLLLLLFLRSGGTWHLTRGCIGVRSPAKGXVQCSVGPGNYIVYVGVVQGCIXHSTSWIALVWMIYLPTYLSYVSVNLVLAYQFSSIGCFLFXGFCRYRLNRLARLD

SEQ ID NO: 126206 - protein, 169 aa, Oryza sativa
  unsure (1)..(169): unsure at all Xaa locations
  Clone ID: PAT_MRT4530_28776C.1.pep
RSNPRAPARAGSSARQSPKRPLGEESFFLVRQGIVSTRGYXNIYTWGLCNLSSRSIQFGASPXFYLFYFILSSGGTXHLTRGCIGVRSLAKGXVQCSAGPGNCIVYVGVVQGCIXVHSTSWIALVWMIYLLPIYHVSVNLVLAYQFSSIGCLSLXGFCRYRLNRLARLD

SEQ ID NO: 126207 - protein, 167 aa, Oryza sativa
  unsure (1)..(167): unsure at all Xaa locations
  Clone ID: PAT_MRT4530_28777C.1.pep
RHRVRRVAALTRSAECLPNVAESFFLVRQGLVSTHXGINMYTRGLCNLSSRSIQFGASPPFIFSXFILSSDGTWHLTWGCIGVRSLAKGXSPXSAGPGNCIIYVDVVQGCIXVHSTSWIALVWMIYLPTYLSYVSVNLVLAYQFSFIGCFSFXDFCRYRLNRVARLD

SEQ ID NO: 126208 - protein, 57 aa, Oryza sativa
  Clone ID: PAT_MRT4530_28778C.1.pep
KRASTLPGPIFPWFRVKKGAPVFLGQGGPFLKTGGFNVFKVLPPGSPGGGKKAFFPA

SEQ ID NO: 126209 - protein, 169 aa, Oryza sativa
  unsure (1)..(169): unsure at all Xaa locations
  Clone ID: PAT_MRT4530_28779C.1.pep
TETGYESASEPHRLQCASAVTESDKTSRFVRQGLVSTHGYXNMYTRGLCNLSPRSIQFGASPPFLFLLLFLRSGGTWHPTRGCIXLRSPAKGXVQCSAGPGNYIVYVGMFKAASVHSTSWIDLVWMIYLSTYLSYISVNLVLAYQFSSIGCFSFXGFCRHRLNRVARLD

SEQ ID NO: 126210 - protein, 1533 aa, Oryza sativa
  Clone ID: PAT_MRT4530_2877C.1.pep
SSRLDYGLVGTSVPQYPLYPVYGYPPSTVARQVGGLGAQGSTNMSSSFVDNSANTNLNQGVPTSTMLVWTQVSEIVFPVYTTVPISAGPSMTGSENTVATTQDDSMSKDPPAEAENGTSTTSEPEKDLSAAKPCLFDKNHEPTRITSEATSTAHQHISPDGANAGPSVILRETPYDPVLNDNLARWTERLRESVTNLSNAFEEAAAAAHLEQPQFGGANGENPEQQESPHRATPPPHGTDRHPRRTYDRRQPTAPNAWCRAFSRSLRDVRWPERFRPGAIEKYDGSTDPEEFLQVYSTVLYAAGVDDNVLANYLPTALKGSAHSWLMHLPPYLFSSWADLWQQFVANFQGTYKRHAIEDDLHVLTQNPGESLRDYVRRFNECRNTIPEITDASVIRAFKSSVRDRYTTQELATRRITTTRRLFEIVDRCAHADDVLRRKNDKPKTGGEKKPAKDAPESSKKKNCKSGKRKAQAHSLEDCLVFKKSLAKHMASEKGKRVRVVEKDAEAATQESDSTYLDSDLHVSHIFGGSTAYSSKREYKKVEREVCSTWQGAAPKMKWSEQKIEFSEEDHPKTAVIPGRYPILVEPSIRNIKVARVLIDGGSSINLLFASTLDAMGIPRSELTPTDQPFHGITPQSSSKPLGKITLPVTFGQANNFRTEQITFRVLKMPGPKGTITIQGNTKLAVQCDKRSLDMVEHTPSLPATAEPPKKLSDIPGVPREVIEHKLMVRPDAKPVKQKLWRFAPDRKQAIREELDKLLKAGFIREVLHPEWLANPVMVRKANGKWRTCVDFTDLNKACPKDHFPLPRIDQLVDSTAGCELLSFLDAYSGYHQISKAKEDEEKTTFITPFGVFCYVKMPFGQITAGNTFQCTVQGALSDQLGNNVEAYVDDIVVKTKTSDSLIDDLQETFDNLRRYRLMLNPEKCTFGVPSGKLLGFLVSGRGIKANPEKIKAIENMKSPTRLMQVQKLTGCMAALSSTVIVVEREKVQQPVYYVNEALHDAKTIYPQIQKLLYVVIMTSRKLRHYIQAHRVTVVSSFPLGEVVRNKDVVGRIAKWVVELSQFDVHFVPRTIIKSQVLADFVADWTIPDNRLDNQIDNETWTMAFDSALNSQGARAGFVLTSPSGDQFKHAIHLNFRATNNTAEYEGLLAEIRAAAALGVKRLVVKGDSELVANQVHKDYNCSNPELSKYLAEVRKVEKRFDGIEVRHVYHKDNIEPDDIARRASRRELLEPGTFLDVQTMPSVKEASSEDSPVAPDISSGATEAERAIVDIETIDDWRTPLIKFIGSEELPEDDAEAEKITRKAKFYCMIGNDLYKKVPNGVLLKCISSNDGRHLLLDIHEGICGSHAAGRTLVGKAFRQGFLWSTTLKGACDMGGYRFLFVAIDKFTKWIEATPTGEIKADNAIKFIKGIFCRYGLPHRIITDNGSQFISTDFQDYCIGLGVKICFASVSHSQSNGQVERANGIVLQGIKTRVYDRLLSHDKKWVEELPLVLWAVRTTPTTSNKEIPFFLVYGSEAMLPTELRHQSTRVQN

SEQ ID NO: 126211 - protein, 145 aa, Oryza sativa
  unsure (1)..(145): unsure at all Xaa locations
  Clone ID: PAT_MRT4530_28780C.1.pep
ESFFLVRQGLVSTHGYXNMYTRGLCNLSLRSIQFGASPPFLLLLLFLRSGGTWHPTRGCFXFRSLAKGXVQCSVGPGNCIVYVGVVQGYISTXTSWIALVWMIYLPTYLSYVSVNLVLAYQFSNIGCFSFXGFCRYRLNRVARLD

SEQ ID NO: 126212 - protein, 87 aa, Oryza sativa
  Clone ID: PAT_MRT4530_28781C.1.pep
MAPPLHRGAFSNGFQLCVGIGAVTARLTNFFTQKIRQGWGWRVSLAVAAVPGGLLTLGALFLPETPNSLLQQGRDKRRVRVLLTRIR

SEQ ID NO: 126213 - protein, 146 aa, Oryza sativa
  unsure (1)..(146): unsure at all Xaa locations
  Clone ID: PAT_MRT4530_28782C.1.pep
GEGKVSFLSDKDLNQPMGINMYTRGLCNLSSRSIXRRIATFYLFYFILSSGGTWHLTQGCIGVRSPVKGYVQCSADPGNCIVYVGVVQGYISTFDLXIASVWMIYLSTYLLYVSVNLVLAYQFSSIGCFSFXGFCRYRLNRVARFD

SEQ ID NO: 126214 - protein, 159 aa, Oryza sativa
  unsure (1)..(159): unsure at all Xaa locations
  Clone ID: PAT_MRT4530_28783C.1.pep
VRPHWEGRRKAEEVSFFLVRQGLVSTHGYXNMYTQGLCNLSSRSIQFGASPXFYLFYFILSSGGTWHLTXGCIDVRSPTKGXVQCSAIPGNCIVYVGVVQGCIXVHSTSWIALVWMIYLPTYLSYVSVNLVLAYQFSSIGCFSFXGFCRYWLNRIARLD

SEQ ID NO: 126215 - protein, 145 aa, Oryza sativa
  unsure (1)..(145): unsure at all Xaa locations
  Clone ID: PAT_MRT4530_28784C.1.pep
ESFFLVRQGLVSTHXGINMYTRGLCNLSXDRYNSVHRHHFYFYFCFYXSGGTWHPTRGCIXLRSPAKGXVQCFTGPGNCIVYIGVVQGCIXHSTSWITLVWIIYLPTYLSYIYVNLVLAYQFSSIGCFSFXGLCRYRLNRVARLD

SEQ ID NO: 126216 - protein, 208 aa, Oryza sativa
  Clone ID: PAT_MRT4530_28785C.1.pep
MARRSSGARSRRGGGGLGKAGRPARRWHAKLAARSGAVVDDDDDVDGFEEKEEDARHILLFPVSSIFAPPFNLDGVLAMGGGSPRYPLAMGRRSATHPRAQLLPTTCVPLLHRQRLAHSSSLAAYPVLYLVTSDTHLPINDMLRTSHLLGIDTLGLLATTLPRRASSARASRHCLAMYSLTALTPPATTSLGGTRAGSMGYTDARGSA

SEQ ID NO: 126217 - protein, 132 aa, Oryza sativa
  unsure (1)..(132): unsure at all Xaa locations
  Clone ID: PAT_MRT4530_28786C.1.pep
HSLAKRGQPGMGYPMDSTPRNRAVEEGQRAGHGATGGPVDEQLRQAYHRQLPAVAXSWSRSSAVNHMAGGISRERGAPEDGHPKAEVIPGYRTGNLKRTTASLPAFCNVDIPNGTGGVCSRVGXPRAPKTGP

SEQ ID NO: 126218 - protein, 174 aa, Oryza sativa
  unsure (1)..(174): unsure at all Xaa locations
  Clone ID: PAT_MRT4530_28787C.1.pep
SLRSHTPEILPLSSPSTATRALLSPPRRRPAPSASRSSRLLHRSPNPKPNFPAEHRQSAVAHHSAARRRFSLHRLRSPPGTPAARTAACRRPHGAITRGQRKTHGWVASXATVDTRGQRKQQAVAASCEXAASTTRGTTIRVGVSGASATAMARASTASTAAAAREAHPQRRWQ

SEQ ID NO: 126219 - protein, 79 aa, Oryza sativa
  unsure (1)..(79): unsure at all Xaa locations
  Clone ID: PAT_MRT4530_28788C.1.pep
MLRRGRKMTALMGEDSGGDGGRRGGATCRASPACTPPTGPSPPPPSPPPQQQPAPPPSPPPXPPPPPGASPPRSSSYPP

SEQ ID NO: 126220 - protein, 89 aa, Oryza sativa
  Clone ID: PAT_MRT4530_28789C.1.pep
NKKKIKKKKKKKKKKKKKKKKKNIKKKKKKKKKKKKKKKKKGVKIICKKKKNKKKKKKKKIKPKKKKKKRKKLEGFTTEGRKHVDFKNK

SEQ ID NO: 126221 - protein, 123 aa, Oryza sativa
  unsure (1)..(123): unsure at all Xaa locations
  Clone ID: PAT_MRT4530_2878C.1.pep
MDGDRYGCCPSALLTGRPISTPTSAGNRCDVGLWLSVDDATSVRPVTDQSSLSTTCQLSNVHFCPSSYSILPVMVGMKPGINLTRANVPSLRDYTLAPAXDECLEAFVLTGWGKACVRPPVAT

SEQ ID NO: 126222 - protein, 102 aa, Oryza sativa
  Clone ID: PAT_MRT4530_28790C.1.pep
LFFFFFFFFFFFFFFFFFFFFFFGRKGEKGKGKLFTISKPSWAMAKTPGGPEKGWAWALENPKGHVFYAPGKHRGLFIKFPPPGGPGPCFRGKKWDPRRGLF

SEQ ID NO: 126223 - protein, 214 aa, Oryza sativa
  Clone ID: PAT_MRT4530_28791C.1.pep
MPPLTLDSLLRGGGGEPEDECEDEFSGSDDDGEDGGGGSEEWGGDVDGEYDPYSPAESLWLRIGEDIDWSEVGAVLEREDSTKGASNPKSAAACSCAGAPAARMPTCAGGGGTAKAVVIAGLPAAARKASREHERRRRLGRARARARVFAGDAVEVAEPGSPKVSCLGGVRSRARAQQPCCPAAAAAGRRRWWCAPWLVIATCHRCWSAPPPRV

SEQ ID NO: 126224 - protein, 103 aa, Oryza sativa
  Clone ID: PAT_MRT4530_28792C.1.pep
AMEAILPQQGSGWCCQRRNGGEIRPLRKSWPGERRGTARSWGYRATPPDRREFGRRRRWNHLVDAEAAKMTLMMSLLLQYMFVVSVMDEHHHFAWHCVLPLQS

SEQ ID NO: 126225 - protein, 81 aa, Oryza sativa
  Clone ID: PAT_MRT4530_28793C.1.pep
LQALLHVQLGVETKGNPKHAFPSKETSKPNETQSDSNLPVRPATHRRSDRPSTGGLTAQHTVVRPAHSEETMPLALLYSRE

SEQ ID NO: 126226 - protein, 67 aa, Oryza sativa
  Clone ID: PAT_MRT4530_28794C.1.pep
ATCNVKYKQHRKPTQRRTPRQAADKTTTAAEDRITATASQERQPELLRSLPHLRRFLFSLLSASSST

SEQ ID NO: 126227 - protein, 364 aa, Oryza sativa
  unsure (1)..(364): unsure at all Xaa locations
  Clone ID: PAT_MRT4530_28795C.1.pep
MSIASDSADVADEREPPPSGKKDCNYGTGKWVSDNNRPLYSGFGCKQWLSESWACRLTQRTDFAYEKFRWQPEGCEMPEFEASQFLTRMQDKTIAYVGDSLGRQMFQSMMCMVTGGKERLDVEDVGAEYGFFLAPGAKRPDGWAYRFPRTNTTILYHWSSTLCDLEPLDPSDPATSYAMHLDRPPAFLKNNLHRLHVLVLNTGHHWNRGKLRANKWEMYLGGAPNTNRNTAVIWKAKNITIHTVIKWLDTQLPHHPQLKVFYRSISPRHFFNGDWNTGGRCDNTSPLAKGSGISQNHSDDADAEGAVMGTXVKLLDIXTALSRLRDEGHISRYSIKATQGVQDCLHWCLPGLPDTWNEILAAQL

SEQ ID NO: 126228 - protein, 379 aa, Oryza sativa
  Clone ID: PAT_MRT4530_28796C.1.pep
QQQEQRHQEQQQQLLWYRASAPAHRRVRESPLSSDAIFRQSHAGLLNLCIVVLVAVNSRLIIENLMKYGLLIRAGFWFSGTSLADWPLLMCCLTLPTFPLAALMVEKLAQRKLISKHVVILLHIVITTSVLVYPVVVILKCDSAVLSGFVLMFLASIIWLKLVSFAHTNYDIRMLSKSIEKGVTHDISIDPENIKWPTFKRLSYFMLAPTLCYQYINPIVKNSKHPLKGNFLNAIERVLKLSVPTLYVWLCMFYCFFHLWLNILAELLCFGDREFYKDWWNAKTVEEPVHKWVIRHIYFPCIRNGFSKGVAILISFLVSAAFHELCVAVPCHIFKFWAFIGIMFQADVVSVCPAQIPLVFLTKYLQDKFNNTMATSPNK

SEQ ID NO: 126229 - protein, 159 aa, Oryza sativa
  Clone ID: PAT_MRT4530_28797C.1.pep
MATIPGLLLICLLMILPVLSTNRSERGGAELVHRSNWVQPLNRAAVDSEAVHMVGYITQPKEDGYYGFIVTMDVYGFNLSPGQLNSYAGVWVLPGDERPVFYLARTMSAAGAPTTGVDVYCPGFQPKKDASTRPGDVIPSISELNGTRQYIALNVFKVS

SEQ ID NO: 126230 - protein, 88 aa, Oryza sativa
  unsure (1)..(88): unsure at all Xaa locations
  Clone ID: PAT_MRT4530_28798C.1.pep
AKEIATVRXLGSFLALAGGDGMHVCTYLHMLCASQDPRCGATSANLNFIETTILESDDSPSPGKSLYSWAESNKNIDGHIMFHAMQLA

SEQ ID NO: 126231 - protein, 568 aa, Oryza sativa
  Clone ID: PAT_MRT4530_28799C.1.pep
MFDNCEVTIIVSGAMHRAKKAKVEPSSALRSDKFSSLPQEIKVTILSKLNSLDAIRASILSSAWRNVWTTLPEIYLCDLYLSWGSSETTQRSNFITLVDLALLLHNGPLASFSILGFKRYHDVFDRWMYMLSRKKPRSITIKFYSGHNYKIPSNLFSLSDLEYLQIKRCIIGLPQEFEGFKRLTVLNLKYFSSTDSDINNLISSCPLLSTLCLKYFEGITCLSIQAPALQDLEVKGNFQDFHLHAPNLSNLDVSLDKTEAQQSVVVEGNRKNYLKQAMVSLTSIVRLVMKRCIIALPQEFEGFKQLFVLNLKYFSSTDHDINTLVSSCPWLNTLRLKHFDGISCLRIEGQVLQIVEVEGKFEDFHLNAPNLSHVYITLDKTEAQQSVAVVGDMKNYMKQAFVSLTSIEELTISGSFLTQYLSKGCLSMQLPGVFDHLKKICIEKCFWNWTEVLGACSIFQNAPTFRELEIWSFPRPEAYRRKTIWDQDQTEIEEPTLHHLVTVAINDFVGLNCEVALVGLLLSWSPALEDLKIFRAKNVNDEYMCICKGLTKLLALPRASSKAKITVI

SEQ ID NO: 126232 - protein, 1714 aa, Oryza sativa
  unsure (1)..(1714): unsure at all Xaa locations
  Clone ID: PAT_MRT4530_2879C.1.pep
MSSSFVDNNVNTSLSQALPASTMLVWTQVGEIVFPVYTTTPISTGPPMTENENAVATNQGDSMSKNPPVEMENGSSTTSKLGKDSDTAKPCPSDMNHEPAKMTSEATRSWCPIHKTKKHTLQDCWELNVRVEIRACKERGIQRTSPTRDVYCPIHKTKNHDLSSCKVFLGAMKAPSPKSYVSVRDNGKEQGATPALDRFIGVIDIDHHEPSVLHLLEDYGSSTTSVPREVLAIDDVGTSAQANAEVANQSTTPTQHIRAVQAILRETPYDPVLNDDLERWTERLRESVTNLSNAFEEAATATHQDQXQLATPMVKIRNGGNHLNEPLLHLAALGSARSWLMHLPPYSISSWADXFVANFQGTYKRHAIEDDLHALTQNSGESLREYVRRFNECRNTIPEITDAFVICTFKSGVRDRYTTQELATRRITATRRLFEIVERCTHVDDALRRKNDKLKTGGEKKSATEASESSKKKNRKNGKRKAQAKVLAAEYANRPKHPDSQDSDTKKSWCPIHKTDIHSLEDCLVFKKSLEKHMAFEKGKRVCVVEKNEETAPHESDSAYPDSDLHISHIFCSSTTYSSKREYKKVEREVCSTWRGAAPKMKWSEQKIEFSEEDHPKTVVIPGRYPIVVEPTIRNIKVARVLIDGGSSINLFFASTLDAMGIPQTYNANIGRTALAKFMAASHYAYQVLKMPGPKGTITIQGNAKLAVQCDKRSLDIVEQTPSPPATTEPPKKPSDMPGVPREVIEHKLMVRPDAKPVKQRLRRFAPDRKQAIREELDKLLKAGFIREVLHPEWLANPVMVRKANGKWRMCVNFTDLNKACPKDHFPLPRIDQLVDSTAGCELLSFLDAYSGYHQIRMAKEDEEKTAFITPFGGALSNQLGNNVEAYVDDIVVKTKTSDSLIDDLRETFDNLRRYRLMLNPEKCTFGVPSGKLLGFLVFGRGIEANPEKIKAIENKKSPTRLKEEAEEAFIALKRYLSNPPVLFAPQPNEELFLYIAATPYSVSTVIVVEREKVQRLVYYVSEALYDAKTRYPQIQKLLYAVIMTSRKLRHYFQAHRVTVVSSFPLGKVVRNKDVVGRIAKWVIELSQFDVHFVPRTAIKSQVLADFVADWTMPDNKSDNQGDNETWTMAFDGALNSQGAWAGFILMSPSGDQFKHAIHLNFRATNNTAEYEGLLAEIRAAAALGAKRLIVKGDSELVANQVHKDYKRSNPELSKYLVEVRKLEKRFDGIEVRHVYRKDNVEPDDLARRASRREPLEPSTFLDILTKPSVKEVSGEVSPNTPDISSEVIEAERAVADIETTDDWRIPSIKFISSEELPEDDTEAEKITRKAKIYCMVGNDLYKKALNGVLLKCVSTDDGRHLLLDIHEGICGSHAAGRTLVGKAFRQGFFWPTALKDACDMVQRCEACQFHSKHTKLLVQALQTIPLTWPFSCWGLDILGPFPRGQGGYRFLFVAIDKFTKWIEEVPTGEIKADNAIKFIRGIFCRYGLPHRIITDNSSQFISADFQDYCIGLGVKICFASVSHPQSNGQVERANSIVLQGMKTRVYDRLMSQDKKWVEELPLVLWAVRTTPTTSNKETPFFLVYGSEAMLPSELRHQSTRVQKYSDENQEEHRDIDVNLLKEHRERVAVQAASYQQSLCRYHEKRIRARILSIGDYVLRRVQTQAGRNKLSPKWEGPYMITQVLRPGAFKIADGDGRELANSWNIDQLRKFYV

SEQ ID NO: 126233 - protein, 128 aa, Oryza sativa
  Clone ID: PAT_MRT4530_287C.1.pep
ADVCHHEACCLELPLDPQHLERQRMGSGRGWSEGEGEGERESEARRGRGRSNPPAPTTWRSDPDIGRRRRPEATRGRGRGGALGGDDDNVPRGEGAWQRWRRRPVAARDGDRESRTSGRRGRGWRRRL

SEQ ID NO: 126234 - protein, 475 aa, Oryza sativa
  Clone ID: PAT_MRT4530_28800C.1.pep
MASATASISSHSVALRDLKAARIGAVKQQVAAAPAAGTAAARAQRARAVRPLRAAEPARQPVSASAAAAPAAAPVAEDAAAAAVDAPAPAVDYEALAQELQGASPLEIMDRALAMFGSDIAIAFSGAEDVALIEYAKLTGRPFRVFSLDTGRLNPETYQLFDKVEKHYGIRIEYMFPDAGEVQALVRAKGLFSFYEDGHQECCRARKVRPLRRALRGLRAWITGQRKDQSPGTRAAIPVVQVDPSFEGLAGGAGSLVKWNPVANVDGKDVWTFLRAMDVPVNALHAQGYVSIGCEPCTRPVLPGQHEREGRWWWEDAKAKECGLHKGNIDDQGGAAAAAAHKAGGANGNGSAGAPDIFESSGVVSLTRAGVENLLRLESRAEPWLVVLYAPWCPFCQAMEASYLELAERLGGAGGGVKVGKFRADGEQKAFAQQELQLQSFPTILLFPSRTARPIKYPSEKRDVDSLLAFVNSLR

SEQ ID NO: 126235 - protein, 353 aa, Oryza sativa
  Clone ID: PAT_MRT4530_28801C.1.pep
MTEQEHRAYARVGLLGNPSDMYGGKTLSFTISNFWATVHLAPSDDGGPLVIRPHPRHDLVDFASLPQLVTRLQNEGYNGGVRLLMAICKVFYSHCIQHGIALKEQNFTLSYDTNIPRQAGLSGSSAIICAALSCLLDFYNVRHLIKVEIRPNIILDAEKELGIVAGLQDRVAQVYGGLVYMDFGKEHMDTLGHGVYTPLDINLLPPLHLIYADNPSDSGKVHSTVRQRWLDGEEFIISSMEEVARLALDGRKALLDKNYRELARLMNRNFDLRRQMFGDDVIGTVNIKMVEAARSVGAAAKFTGSGGAVVALCPDGEAQVLLLEKACRDAGFLVQRIQVAPSPLPLTEGNPPF

SEQ ID NO: 126236 - protein, 363 aa, Oryza sativa
  Clone ID: PAT_MRT4530_28802C.1.pep
VEALLARLRPDVVLFDFATPWVADVARQLGARAAHFSVFTAVTSAYLTVPARRRLHHGAASCPTVDDLATAPVGFPPSSSLATVPTYQAADFTYVFTSFHGMPSAYDRVAACDKASDVLVFKTCAEMEGPYIEYVATQYDKPILVTGPLVPEPPHGELEERWETWLSSFPDNAVVFASFGSETFLPTAAATELLLGLEATGQPFVAVLNFPRSVDAEAEVKKCMAPGFEERVKGRGVVHSGWVQQQHILRHRSVGCYVNHAGFSSVVEGLVAGCRLVLLPMKSDQFFNAALLARELRVGTEVARRDGDGWFGHDAVRDAVNAAVADAGGGDDDERKWREFLTDDAVQRRFVEEFVRELRKLVL

SEQ ID NO: 126237 - protein, 102 aa, Oryza sativa
  unsure (1)..(102): unsure at all Xaa locations
  Clone ID: PAT_MRT4530_28803C.1.pep
MAHDDSDGGAQGMDEHLRHTDVKALDAFCYMPVXKRDPWNEYQEDNIPVALIFHIHGISDLTTDLPHMLSSQDALTAAVLALGIKNHEEFISDDRRGSTRAP

SEQ ID NO: 126238 - protein, 177 aa, Oryza sativa
  unsure (1)..(177): unsure at all Xaa locations
  Clone ID: PAT_MRT4530_28804C.1.pep
GEGWRRRREVVRVATALRRWRGEMERSEARSVADGGGSKSRKCCPLRRSRKGCMKGKGGPENQRCPFRGVRQRTWGKWVAEIREPNRGARLWLGTFNTALDAARAYDSAARALYGDCARLNLLLAGICCXQLIHTFMYMHVVYVRIASVILLRVMXYTLSISKYLTPLISLIYLTVH

SEQ ID NO: 126239 - protein, 146 aa, Oryza sativa
  unsure (1)..(146): unsure at all Xaa locations
  Clone ID: PAT_MRT4530_28805C.1.pep
ESFFLVRQGLVSTHGYXNIYTRGLCDLSLRSIQXAHRHPFYFYFCFLRSGGTWHPTRGCIVFDLRRRDKSNXSVGLGNSIVYVGVVQGCIXVHSTSWIALVWMIFLSTYLSYVYVNLVLANQFISIGCFSFXGFCRYRLNRVVRLD

SEQ ID NO: 126240 - protein, 87 aa, Oryza sativa
  Clone ID: PAT_MRT4530_28806C.1.pep
VPPRRRLEAAAPRRVPRRASPPCAAVATAAVGKPPPPPLAQSPSPENRERGKSSLFLEHVDPNCEIILFINKIACNDEHPTCDYAMP

SEQ ID NO: 126241 - protein, 169 aa, Oryza sativa
  unsure (1)..(169): unsure at all Xaa locations
  Clone ID: PAT_MRT4530_28807C.1.pep
RARPAARRGEGEWPRAGHWASEASGRFFLVRQRLVSTHGYXNMYTWGLCNLSSRXYNSAHRHLLPFXFILSSGGTWHLTRGCIGVXSPAKGXVQCSTGPGNCIVYVGVVQGCIXVHSTSWIALVWMIYLPTYLSYVSINLVLAYQFSSIGCFSFXDLCRYRLNRVARLD

SEQ ID NO: 126242 - protein, 168 aa, Oryza sativa
  unsure (1)..(168): unsure at all Xaa locations
  Clone ID: PAT_MRT4530_28808C.1.pep
RGRDGLVGRRLRSSGERREKRGGEDFLVRQGLVSTHGYXNMCTRGLCNLSSRSIQFGASPXFYLFYFILSPSGTWHPTCGCIVFDLRRRGKSNXSVGPGNCIVYIGVVQGCIXVHSTSWIALVWMIYLPSYLSYVSINLVLAYQFSSIGCFSLXGFCRYRLNCVARLD

SEQ ID NO: 126243 - protein, 168 aa, Oryza sativa
  Clone ID: PAT_MRT4530_28809C.1.pep
MAPASGFLELKLDYSATNAYAVGDMLTSDVFSAGGFTWSVDYYPRGYEKEGNNGDYLSLFLKRRGWDDGRLLRRRRREHLLAMADRYALDRLKLMCGQRLLHSMTSDSVAGILACAETYDCPELKNKCIDFFAVEENFRRAVFTDGFAMLVQKFPLIAAELKKRIVKP

SEQ ID NO: 126244 - protein, 1731 aa, Oryza sativa
  unsure (1)..(1731): unsure at all Xaa locations
  Clone ID: PAT_MRT4530_2880C.1.pep
IPTFPESPNLQENILRNFKASKATPGLEXYIPGLEIELCSRXGCSEWLGLCNRIRRSPGQAAYGVESFVQELRTMSFLIGFETAPLYAQIPHDRDEEKCRVKVTLNSNREDIPSVMFEAGEGSYNHACXEVARIAIGELRESYNDRLADTEYRYHPRQPQGSDRGSYLEPAGIENDATTRHLVEMLWAMDETRAKIVIAAQDREDRNRGKICKLEDKVDRLEKELAALKGEAPPQKARVRLTARKRALFVPRYQLAPKMVLTRSNGNGPNPNNNNNNAENPTLAQVLAQQAQLMNLMMQQLQNQQNQGNNHAPPPNKLAEFLRVRPPTFSSTTNPVEAGDCLHAIEKKLDLLQCTDQEKVSFASHQLHGPASEWWDHFRLNRTTAEPISWLEFTAAFRKTHIPSGVVSLKKKEFRALIQGSRSVTEYLHEFNRLARCAPEDVRTDEERQEKFFEGLNDELSYPLMTGDYHDFQKLVDKAIRQEDKYNCMEQKKRRIAHFKAQQGNSQRQRLAMGPQSMLEGGSXSVVRPQRQFFNNNAGNNNRNQAPRPVAALTXNQLAKREQGSKPGVCFNCGDLGHYADKCPKPRRAKVVPAQNNSSAPATKARVNHVAAAEAQGAPDVILGTFPVNSVPTTVLFDSGATHSFLSLSFAGNHGMEVEDLRRPLMVSTPSNQALSSQRSPSVRTEIQGVPFLANLILLESKDLDVILGMDWLARYKGVIDCANRKVTLTSNDGQVVTVHALPSELLRSSLNQITLEEIPIVREYPDVFPDDLPGMPPKRDIEFRIDLVPGTTPIHKRPYRMAANELAEVKRQVDDLLQKGYIRPSSSPWGAPVIFVEKKDHTQRMCVDYRALNDVTIKNKYPLPRIDDLFDQLKGATVFSKIDLRSGYHQLRIKEEDIPKTAFTTKYGLFECTVMSFGLTNAPAFFMNLMNKVFIEYLDKFVVVFIDDILIYSRTNEEHEEHLRLALEKLREHQLYAKFSKCEFWLSEVKFLGHIISAGGVAVDPSNVESVTNWKQPKTVSEIRSFLGLAGYYRRFIENFSKIAKPMTRLLQKDVKYKWSEECEQSFQELKSRLISAPILILHDPKKGFQVYCDASKLGLGCVLMQDGKVVAYASRXLRPHEKNYPTHDLELAAVVHALKIWRHYLFGTRTEVYTDHKSLKYIFIXSDLNMRQQRWLELIKDYDMGIHYHPGKANVVADALSRKGYCNATEGRQLPLKLCKEFERLNLEIVSRGFVAALEAKPTLIDQVREAQINDPDIHEIKKNMRRGKAIGFLEDEQGTVWLGERICVPDNKDLKDAILKEAHDTLYSIHPGSTKMYQDLKERFWWASMKREIAEYVAVCDVCXXVEAEHQKPVGLLQPLKIPEWKWEEIGMDFITGLPRTSSGHHSIWVIVDKLTKMAHFILVRTTYSGSRLAELYMARIVCLHGVPKKIVSDRSSQFTSKFWKKLXEEMGSKLNFSTAYHPQTDGQTERVNQILEDMLRACALDFGGCWDKNLLYAEFSYNNSYQASLQMAPYEALYGRKCRTPLLWDQMGERQVFGTDILREAEEKVKIIQERLRVAHSRHKSYANNRRRDLSFEEGDHVYLRVTPLQGVHRFHTKGKLAPRFVGPYKIVSRRGEVAYQLELPQSLAGVHNVFHVSQLKKCLRVPTEEANLEQIVVQEDLTYIEKPIRILETDERRTKNRVIRFYKVQWSNHSEEESTWEREDELKSAHPHLFASSSKSRGRDSV

SEQ ID NO: 126245 - protein, 108 aa, Oryza sativa
  unsure (1)..(108): unsure at all Xaa locations
  Clone ID: PAT_MRT4530_28810C.1.pep
MAETIVCMKARHIFDNKSNPTAXGGVCPLDGTTTRLXIPEVHLPGPINLLLPPTAXTDYSSKGAVNAGDNANAGLAPAXIWKDPTSQANGHNLCLSSHIETXNKWWWG

SEQ ID NO: 126246 - protein, 144 aa, Oryza sativa
  unsure (1)..(144): unsure at all Xaa locations
  Clone ID: PAT_MRT4530_28811C.1.pep
ESFFLVVQGLVSTHGYXNMYTWGLCNLSSRSIXRRIATFYLFYFILSSDGTXHLTRGCIGVRSLAKGXVQCSVGPGNCIVYVGVVXAASIHSTSWIALVWMTHLPTYLSYVYVNLVLAYQFNSIGCFSFXGFCRYRLNRVARLD

SEQ ID NO: 126247 - protein, 84 aa, Oryza sativa
  Clone ID: PAT_MRT4530_28812C.1.pep
LCFYYFFFFMIFVFYKFFCYTGEKSRNDLSKPKRNREPFKKGIERGGGVPPDGGRGSTHQTQNTLELPFFIPASHALREGKFFS

SEQ ID NO: 126248 - protein, 139 aa, Oryza sativa
  unsure (1)..(139): unsure at all Xaa locations
  Clone ID: PAT_MRT4530_28813C.1.pep
QGLVSTHXGINMYTRGLCNLSSRSIQFGASPXFYLFYFILSTGRTWHLTWGYIVVRSPAKGXVQCSVGPGNCLIYIGVVQGCIXVYSTSWIALVWMIYLPTYLSYVYVNLVLAYQFSSIGCFSFXGFCRYRLNRVAILD

SEQ ID NO: 126249 - protein, 455 aa, Oryza sativa
  Clone ID: PAT_MRT4530_28814C.1.pep
MDTRGVIRTFEEYDAAVEWSRSAEADAVKISLPGFKMEEIRVLVDNHGHLRTRGERPVARQQVEPLPEGLPAPRRLQRRRHPRQVRERGAHHHAPQEDPLATASVAQVVAGGAWQCGVLQEKNNAAGQPIGHLSTEEAISDPSKNGILLRWSVPITDDYIDIGHKRSSSSSIPISISSSSRVEAYLQRSDRSAAARGFKREEIRVLVDNHGHLRTRGERPVAGNRWSRLQKDFQLPADCNVDGIRAKFENEALTITLPKKTPSPLTPSPTPSPVTPPPQQPPQPEPRRPPAAPLPGVRTPPSPPRRAPAPAPAPLTPALSQRFLAERRPAPVPEPVTRKRSDLGTLMKPKEDKVEETTKPLPPPAAAAAAAEEEEERMAREARGKMEEDKKKANEEVTDMAQLRRPASASRRQLVNVAVAAVVLLGITLYVWNTLRNAATGGGGNGHGASYSDEM

SEQ ID NO: 126250 - protein, 148 aa, Oryza sativa
  unsure (1)..(148): unsure at all Xaa locations
  Clone ID: PAT_MRT4530_28815C.1.pep
VSCGYSFFVRQGLVSTHGYXNMYTRALCNLSSRSIQFGASPPFIFSXFILSSGGTXHLMRGCIGVRSPAKGXVQCSVAPGNCIVYVGVVQGCIXVHSTSWIALVWMIYLPTXYYVSVNLVLAYQFSSIGCLSLXGFCRYRLNRVARLD

SEQ ID NO: 126251 - protein, 171 aa, Oryza sativa
  Clone ID: PAT_MRT4530_28816C.1.pep
MDTRGVIRTFEEYDAAVEWSRSAEADAVKISLPGFKREEIRVLVDNHGHLRTRGERPVAGNRWSRFQKDFQLPADCNVDGIRAKFENEALTITLPKKTPSPLTPAPLTPALSQRFLAERRPAPVPEPVTRKRSDLTLMKPKEDKVEETTKPLPPPAAAAAAAEEEEERMAR

SEQ ID NO: 126252 - protein, 60 aa, Oryza sativa
  Clone ID: PAT_MRT4530_28817C.1.pep
EGKYIIQTRAVQEVECTDAALNDADVNDTIAWADGTLDLPFRRRSNTDAAPRQVPSSAET

SEQ ID NO: 126253 - protein, 56 aa, Oryza sativa
  Clone ID: PAT_MRT4530_28818C.1.pep
MAQLRRAASAIRRHLVNVAVAAVVLLGITLYVWNTLRNAATGGGGNGHGASYSDEM

SEQ ID NO: 126254 - protein, 170 aa, Oryza sativa
  unsure (1)..(170): unsure at all Xaa locations
  Clone ID: PAT_MRT4530_28819C.1.pep
LLGARAAARGARRAPPSARTGTRGGPSFLVRQELVSTHGYXNMYTRGLCNLSSRSIQFGASPXFYLFYFILSSGGTWHLTRGCIGVRSPAKGXVQCFAGPGNCIIYVGVVQGCIXVHSTSLIALVWMIYLPTYLSYVYVNLVLAYQFSSIDCFSFXGFCRYRLNRVVRLD

SEQ ID NO: 126255 - protein, 253 aa, Oryza sativa
  unsure (1)..(253): unsure at all Xaa locations
  Clone ID: PAT_MRT4530_2881C.1.pep
ATKLARLNFARARGDYVDTPIFFSWFQVLLPMFPRLXPSFEKTSNAVAELKTTRAIYEXSVILRINVXDQDAFERNFYQLKAFYMDTRGIIPPSPDEYPILGLNLLRLLAQNKIAEFHVELELLSLXLDYPCIKXALNLEFSFMEGAYSQLFNARQTVPHEAYDFFIDLLAETIRDEIADCSAQAYDYLSISYAKKMLLFSCDQQLLKFISEAKHEWDVQNCLVLFDMAKSKPPAIPSLQQNKRSISYVKELD

SEQ ID NO: 126256 - protein, 167 aa, Oryza sativa
  unsure (1)..(167): unsure at all Xaa locations
  Clone ID: PAT_MRT4530_28820C.1.pep
LSPEFRVGRRGRTREEEAVERQESFFLFRQGLVSTHGYXNMYTRGLCNLSLRSIQFGAXHPFLLLLLFLRSDGTWHPTRGCIXLRSPAKGXVQCSAGPGNCIVYVGVVQGCIXHSTSWITLVWIIYLPGYLSYVYVNLVLASQFSSISCLSLXGLCRYRLNRLARLD

SEQ ID NO: 126257 - protein, 169 aa, Oryza sativa
  unsure (1)..(169): unsure at all Xaa locations
  Clone ID: PAT_MRT4530_28821C.1.pep
GEGGGVGVGVGTVGAGEAVASAAVSFFLVRQGLVSTHGYXNMYTRCLCNLSLRSIQXAHRHLFYFYFCFLRSGGTWHPTRGCVXLRSPAKGXVQCSVGPGNCLIYIGVVQGCIXVHSTSWIALVWMIYLPTYLSYVSINLVLAYQFSYIGCFSFXGFCRYRLNRVARLD

SEQ ID NO: 126258 - protein, 296 aa, Oryza sativa
  Clone ID: PAT_MRT4530_28822C.1.pep
MDPMDIVGKSKEDVSLPKSTMFKIIKEMLPPDVRVARDAQDLLVECCVEFINLLSSESNEVCSREDKKTIAPEHVLRALQDLGFREYIEEVQAAYEHHKHDTLDSPKASKFTGVEMTEEQAVAEQQRMFAEARARMNNGAAKPKEPEPEAQQQTQQPPQPQLHPQPQQPLQPQLQLHPQPQQQPSQLHPQQLLHPQSQQTPQPQPQVHPQPQQPPQLQPQPQLLQQPQLPQQLQPQSQLPPQPQQPPQLQLQSQLHPQPQQPPQLQPQPQLHQQPQPQAELQSQSQPQTEHGLDSS

SEQ ID NO: 126259 - protein, 171 aa, Oryza sativa
  Clone ID: PAT_MRT4530_28823C.1.pep
PVRPSVRKLKRYKECGGGELIAIKIFVILSLLALAASSASAQFDACTYGQSQQQPFMQPIMNSCNGGGRRQCSPVSLPWEQSHRLKLSSCQVMRQQCCRRMRLMAQQYRCQAIFTMVQAIMQQVQLDASLFGVPQAQAQAQVALNLPSMCGVYPRYCNTPCIVATSRCGSW

SEQ ID NO: 126260 - protein, 64 aa, Oryza sativa
  Clone ID: PAT_MRT4530_28824C.1.pep
FLVGENFVSQGMGYLQALWHTGTMDHKLVTHRTILGGGFAGLATHEKKNSNLIFCNLPTGSVGG

SEQ ID NO: 126261 - protein, 43 aa, Oryza sativa
  Clone ID: PAT_MRT4530_28825C.1.pep
IMKQRTINHPILYEAGVNKKITDYDPGQKTYAGLGRRTLHDGN

SEQ ID NO: 126262 - protein, 247 aa, Oryza sativa
  Clone ID: PAT_MRT4530_28826C.1.pep
MTAGSKGGGGGVAAARAAAAGPRTVLITGVSRGLGRALALELARRGHAVVGCGRSADHVRSLEAEIATPARHFLTVADVRSDSNMAELAKAVVEKKQVPDIIVNNAGTINKNNKTWSVPAEEFDTVVDTNIKGTANVLRHFIPLMIEKKHGIIVNLSSGWGRSAAAEVAPYCASKWAIEGLTRSLAKELPPGLAAIALSPGVVNTDMLNSCFGSSASLYQSTEQWAPKAATMILSLGLDDNGSSLTV

SEQ ID NO: 126263 - protein, 40 aa, Oryza sativa
  Clone ID: PAT_MRT4530_28827C.1.pep
NGILDPSDPFGYRHRLTPRGLADGLSSRRRCRLVADSKVQ

SEQ ID NO: 126264 - protein, 500 aa, Oryza sativa
  Clone ID: PAT_MRT4530_28828C.1.pep
MAILKKLTAEEIYAEMTDLKVAEEWMVDELVYKEMSSPLGSWLGNPRRSLDLASSLFAGMSSNKIELDHKDMVHDSAIDYYGKSLATASSDSTVQISSIGGASAPSQLLATLSGHYGPVWRVAWAHPKFGSILASCGYDGRVVVWKEGAAGQWSQAHVFDNHKSSLNSIAWAPYELGLCLACGSSDGSISVMTMRPDGGWDSTTIEQAHPVGVMAVSWAPATALGSIVGSGELVQKLVSGGFDCVVKVWAFVNGSWKLDSVLPSDMHTDCVRDVSWAPVLGLAKFTIASASEDGKVVIWTKGKEGDKWEGKVMHDFEAPAWRVSWSLTGNILSVAAGSGDITLWKEASDGQWEKVTKPVGVDNTFRRKFDKEEYLERARQREREEKEEARKGKEKGPPVQRQPLKHRDYEVDLESRLGKTQVQKRFESLKKRKDPGSFSEQDLDERILKQQQEDEERKRQRKEKKKEKKKELAAQNEPEEDIDPDVAAMMGFGGFRSSKK

SEQ ID NO: 126265 - protein, 96 aa, Oryza sativa
  Clone ID: PAT_MRT4530_28829C.1.pep
CLLSVSNASRLEIVSPSSKISRCLCHFSGSQAVDSKGPTWTCSKRKWHRIQPVQKGNVRGRMIILLAKCLEYSTLWFLPVFHSSSSITDFSVSILP

SEQ ID NO: 126266 - protein, 935 aa, Oryza sativa
  Clone ID: PAT_MRT4530_2882C.1.pep
MDIHHYIPRIRPPAGAGAPVFAALRALTIRCSTFDSLEMERRLVSSLCPRGCRISRSSPTSSRSPTVRPHRALRVAGARDWTFAAASTAGSPSRRRQRLNTASVAAPNLGDVPWRDIYDPRRHLFVQAPRHVRKLKELGVEASSAAAASSSIHAPHRTRTSLPAAASSPVHGPHRSSSPTTVSSVGSSSLVTVPVVHASAGGRVLHAGARRRRRRHHPAGSSAVHAPRQSSSPAPSLSPRRILRRPCDHAPRRSSPVAAFSTAELVIGVTTITTSGYLATSNEQVERFVQGGISAASHEDHDCPCSQPENQLRSRIDGIVLDSLQEVEMRNFTGATDDLGTVKLLLRCKPIPKRVSFHLSHQIRNNADLLVNGCRSMYTPFNDDAWEKIRDRPVLFPHPASNLLSPVALVARSANATPPVALLHPHGSGVATSVPTHHPSSTFLVIPQKLSLLSLIPKPLSEGIWPKFGCRLRGSLKRMSPPRCRARNSGDGGEGVDRISHLPEELIQNILVRLPSVDAAARTSVLSRRWRRVWTRLPSLSFQCDSEKPGAIDAALAAYSAPALNRLALSAAHALEAATVAPWLEFASRRVAGNLTLNFSVAGGLELPACERATSINLHVGHLRLPPAGSFAALASLAIVGARMQGGDFEAVCSPRCPRLRRLAVRSVTLVGGAADVSVRSGSLEWLVFMAQGVGRLEVAAPRLRYFRAEAKAAAGDVSDVSVASPVLEDVAWYGEFDPRRHRFAEAGHRLRKLMVMDMPTAALMRRFYIVDELVLSFGISPGIRGYKTFLNATSMIAKCEVLEVQVTTRRHAFSSAVLHLLRKSGDDETKLLIRLPRMGNKSCTEGCPCSLTDSCNTDKIQLDSLKEVEILEFQGEFNQMKFINLLLDCQAPILKKVYVRIPKDVKSISNTKSKKIRSIIDGHPEIDVEFKLWS

SEQ ID NO: 126267 - protein, 107 aa, Oryza sativa
  unsure (1)..(107): unsure at all Xaa locations
  Clone ID: PAT_MRT4530_28830C.1.pep
MPKATAAEEEEFRAEVEERLINEEYKIWKKNTPFLYDLVITHALEWPSLTVQWLPDRAEPAGKDHSVQKMVLGTHTXDNEPNYLMLAQVQLPLDDAEADARHYDDDH

SEQ ID NO: 126268 - protein, 198 aa, Oryza sativa
  Clone ID: PAT_MRT4530_28831C.1.pep
MVTAARLLPLILFLTAVAVGCSAWEMNIRLPTERMAYGGGEAVVAPIIHALRPLLGSGRQLAARAGVACDSWRLGVEAHNVIDWRTVPAECEGYIGHYMLGEHYRRDFVVVVDEAVAYAETLKLAGNGKEIWVFDIDETSLSNLPYYAKHGFGATPYNATSFHEYVAEGSAPALPETRRLYHRLLELGVKPVFLTGRT

SEQ ID NO: 126269 - protein, 44 aa, Oryza sativa
  Clone ID: PAT_MRT4530_28832C.1.pep
MCDASLTGRSLGLLARCTAWTSAILGGLEDDTSRKQVKGPSISK

SEQ ID NO: 126270 - protein, 852 aa, Oryza sativa
  Clone ID: PAT_MRT4530_28833C.1.pep
MAELVVSSAKGAVRSLLGRISTMLVNEAQLLGRVRRDMQFIKDEMEMMDAFLLLLLHQQAGTLDHHYHNQCTPWIRQAMELARDCQDCVEQYAQCIAAGPSSKSLLLGRLRRVSRLVRSLPERHRLAVQIQDIKVRLGEVSHRRKAYDICANLNSYRPPEQDNGGEQEDEAAWRRYLASAEPPADLKNTVNELVRWLMEDQPAGLRIIPVVGICVDTSAIIAERVYQHSSVTSLFDCKAWITVRDCQSHLQILKDILCQLVLPLNKFRSEMIGWNEEQLVEKLRCYLRGKIFLIVLHDVRDESIWSHIKLAFPDDCSAGSAIIITTDDDKVAESFSAYKIFNPDSPGYVLDFFLSKAIALLKHENEKQLRKILPCMLIHLEPETFFMKMLLRYLYYGRYATLRLRDALQHTSSLHDYWPKNMHQEDQLSKFRTCIVPDLVHDALTDLVARGSNITSVDTVLAPPELARHLSIRFSTKLHMSPSEPINSILSFLKSLHSSSRLGLLKVLDLDGCKGLKRRHLKNICGIYLLKYLSLRDTDVTRLPKEIENLIYLETLDIRQTKISVFPRKSLVLPMLKHLFSGHTVYPSEDIFRQQESFSAIHIPHQIGRMKNMEILSHVKVSHGGMQLIAVGQLLKLRKLGVVIHDTDKDGFDSLLHVIGKLNKCLRSLSVQIRSPSAADGSNGFDMSMMYSTYPRLLESLTICGIKSGLPPWIEHLHQLTKVTLHNTSLTESAIHVLGKLVGLCYLRLRHRSYIRGDLTISTREFKNLRFLFIEGPDIVNISFDEGAAPRLERMVWRFTRMVSLVGIGHILSIRELELEGDSDLEKIGVILRDIKAHPNDPSLKHIPAAGN

SEQ ID NO: 126271 - protein, 170 aa, Oryza sativa
  unsure (1)..(170): unsure at all Xaa locations
  Clone ID: PAT_MRT4530_28834C.1.pep
VGSHVLTAKFGNRQRRHRLRIIIGCSFFLVRQGLVSTHGYXNMYTRGLCNLSSRSIQFGASPXFYLFYFILSSGGTWHLTRGCIGVRSPAKGXVQCSVGPGNCIVYVGVVQGCIXVHSISWITLVWMIYLPTYLSYVYVNLVLTYQFSSIGCFSFXGFCRYRLNRVARLD

SEQ ID NO: 126272 - protein, 114 aa, Oryza sativa
  unsure (1)..(114): unsure at all Xaa locations
  Clone ID: PAT_MRT4530_28835C.1.pep
YIYYNFYIFFFKFYYYFFILYSNLFFYYFFSFIFFILYFLXYYIFIIFLNIIIFIFNLFXILFLISYFLLYFLIFIIYLNYYFXFIFNLIIYLYLLIFHTLLYILLLLIFYIIY

SEQ ID NO: 126273 - protein, 56 aa, Oryza sativa
  unsure (1)..(56): unsure at all Xaa locations
  Clone ID: PAT_MRT4530_28836C.1.pep
WARSAQPMVQPNLAWRRQMQRLVGRLGLXPNDGWRAFPTFPTVISCLEKAFTSLPP

SEQ ID NO: 126274 - protein, 50 aa, Oryza sativa
  Clone ID: PAT_MRT4530_28837C.1.pep
LPRNVLLKFASLCDESYNPTNKLVVWALPSSLAATRGISDLISFPLPTKL

SEQ ID NO: 126275 - protein, 142 aa, Oryza sativa
  Clone ID: PAT_MRT4530_28838C.1.pep
SFSPFPGTLALLAAGPFFSKIKKRGPVLPVGVEVARFLGPGGNFFVGENSGPFGKVKSLLRSPPWEVGLPFSKKGGGFFSPKKSVWRPDFFPPPFFCFPGPGGGGGLFFSGGQSGPPPPKIKKTFSPLFFFFFFLSFFPPLF

SEQ ID NO: 126276 - protein, 57 aa, Oryza sativa
  Clone ID: PAT_MRT4530_28839C.1.pep
MDGINAVEDGGGRPAALGMEATGWRRSEGRGATGEEGDGAAQRLDVLMRSLRTRGLA

SEQ ID NO: 126277 - protein, 436 aa, Oryza sativa
  Clone ID: PAT_MRT4530_2883C.1.pep
MRAIGAAAAAARRHAHLPTSYSAAFSSFSGIGGGAGRGRGRGLPPSATPPRAPGSPVPDDDDGGGADPFSSPAPIGRGRGEAVIPSVSSPPLPGAGRGRGSPPPLGEVAPKQPVPAKLFDAPAAEASSSEPPPPPPPRTLPSAGAGRGVPRMQQPPVEMPQEENRFIRRREEKKKAASAARPAPSGQPKLSPEDAVKRAMELLGGGGDDDGGRGGRGRGARGRERGRGRGRDGGRGRRSADMEEKHGIYLGDNADGDRLQKRLGEDKMKIFNEAFDEAADNALPDPKQDAYLEACHTNNMIEFEPEYHVNFNNPDIEEKPPMSLEDMLQKVKPFIVAYEGIQNQEEWEEAVKDVMARAPHMKELIDMYSGPDVVTAKQQEEELQRVANTLPGNIPSSVKRFTDKTLLSLKNNPGWGFDKKCQFMDKFAREVSELYK

SEQ ID NO: 126278 - protein, 129 aa, Oryza sativa
  Clone ID: PAT_MRT4530_28840C.1.pep
MGWALAAGRRARPLGRRGAAAGRRGKVVRVERRQGCGTMPWQHRTGGLVVRQRNSTVARSPHRAAGRERCGAAWLAHTRRYGPSLERPTVDPLAPMLAMVDLAAPECLVADPPTPVLTAADPAPWSWRH

SEQ ID NO: 126279 - protein, 264 aa, Oryza sativa
  unsure (1)..(264): unsure at all Xaa locations
  Clone ID: PAT_MRT4530_28841C.1.pep
LRQQFPDRRRDFSGPVERSCRIGVPCIPPHRXRDRVAESSSATSPTVVMASSPEKKDPPSCGSRDSQPIPCTDDPPLSESPTTDLGCHDPRDEDADHPAPPMGKGDIDEDSDDDGYADEETTCPGQNFTKEQAKEIIRKWLETYDKRNREFMVACEEFQKQGGDETSASCPVFPLKPLPETTDFCTTKSLCYHREYKTNDTSETASTIXWLEPKEMLQIFSLRLSSSMSYPISVYGIFAVRDYLDPLRXYVFHRTRDDPVIVEQ

SEQ ID NO: 126280 - protein, 363 aa, Oryza sativa
  Clone ID: PAT_MRT4530_28842C.1.pep
MATKPSAVARRGGGNGRSCSVDVMTAKHHRAATARIGGSLQRSISINSSCPAMTLGVKTVVDALEVSAQPPSPPDLKEAAALRQQFPDRRRDFSGPVERSCRIGVPCIPPHREDSDDVFASANSHNMLIGDIDEDSDDDGYADEETTCPGQNFTKEQAKEIIRKWLETYDKRNREFMVACEEFQKQGGDETSASCPVFPLKPLPETTDFCTTKSLCYHREYKTNDTSETASTIGWLEPKEMLQIFSLRLSSSMSYPISVYGIFAVRDYLDPLRNYVFNRTRDDPVIVEQDSFTLPLCSPCRGMYVVEYALFEVDLWVKMEGGVSNDKQLVSAVLKLSYKYPQRLTVTILVMAEIVGGTVHKEA

SEQ ID NO: 126281 - protein, 97 aa, Oryza sativa
  Clone ID: PAT_MRT4530_28843C.1.pep
REKKPFRSRGEGSPKDFSSGRGGAEPPPPGAGNPPTPKPGGEEPPKGPAPAEKGEGKPPSSSEGFGLDDLMKGAQSLMEKKGRGEENPRSGGPPGGL

SEQ ID NO: 126282 - protein, 605 aa, Oryza sativa
  unsure (1)..(605): unsure at all Xaa locations
  Clone ID: PAT_MRT4530_28844C.1.pep
GHWKNTFKSWPSLEKTTPEKNWTTWYKXVSASKKVHWDEIGIGQALALTTANSAKDEPLMAAVTYFWSNTINSFLFNQGPMTPTLIDITMITGLDVTSSANPMSMNTKNQFDFRTKRIWGWSGYVAAYMGQRPVTPREHVAFLLMWLEKFLFCGSSSDPTTNWQFVAEALESKKQFPLGKILLGYLYQMLNNASAKIAVGSVVGAEAEFPRLEPTVDDDGEERTHRRCMSYGEYASAPTDARAKLSAELLKDWFCSFYEGFQKDARVWFPYEDSADLDLPSDFRFEDINHERYQKTREVFSTLLNLQGPPLGSTENIELAGFKSRNFDRWWGEWKLHLFPQSASMYMTNLFPDVIPQTIDSSPPRQSNSGRDIEYAPGLIPNGGGLSPPVIGYHAPRTSTLLQGLIREPADVGKKRRTRSSAVDALAPAPKKKAKSKKTKPTDDLPALDPSIEQALDEEEIGEDVDQAAAKVSDTEETSSASPQQTPPTPSALAHFSRLQKKKAAVKKRPAATILKQAPPVLADLFSFDIRDYLDDAEEDTSSKALAPLSDDVKKTLEDISHRLEASSLDSLVVDCGSIRTRLHEIQALVPEELADVLTPAAYLE

SEQ ID NO: 126283 - protein, 63 aa, Oryza sativa
  Clone ID: PAT_MRT4530_28845C.1.pep
MAEPKTAIDKELVESDTKASTSRGKCYRCRACRLATQQLRLQSYHIIVAKGIEENEQDTECPL

SEQ ID NO: 126284 - protein, 335 aa, Oryza sativa
  Clone ID: PAT_MRT4530_28846C.1.pep
MSSSASPSTTPSAEYAETWLNLMVMKVVNRPSVIEAEFPMQEPIVEDNGEERTHRRCMLYGEYASTPTDAGAKLSAELLKDWFCSFYEGFQKDARTIDSSPPRQSNSRRDIEYAPGLIPNGGGPSSPVIGYHAPRTLTLLQDLIREPADAGKKRKTRSSAVDVLALAPKKKTKSKKTKTTDDLPALDPSIEQALDEEEIGEDVDQAAAEVSDTEKTPPASPKKTPPTPSAPTHFSRKKKTAVKKKPAATILKSAPPPPPPPPSVQQSSSDRTPSAVGSHHIEEEEQPAAPTIPPHVHKQVYKQEPGSIHDKPSDKTTMLQPTEYAIAEDNQKSFA

SEQ ID NO: 126285 - protein, 810 aa, Oryza sativa
  Clone ID: PAT_MRT4530_28847C.1.pep
MWARKARVRGRHGRRGPGGADARHGGGCGRGGERLEVGGGPDRYFLETIYNFNLGLGKNFGKTTPEKSWTTWYQRVSASKKVHWDEIGIGQALALTIANSAKDKPLIAATTYFWSNTINAFLFNQGPMTPTLIDITMITGLDVTSSANPMSMNTKNQFDFRTKSIGGWSGYVAAYMGQGSVTPREHVAFLLMWLEKFLFCGSSCGPTTNWQFEAKALGSKKQFSLGKILLGYLYQTLNNVSAKIAVGSVVGAEAEFPLPELIVEDDGEERTHRRCMSYGEYASTPTDAGAKLLAELLKDWFCSFYEGFQKDAREVLIVAISPCILPVGIHQGRNIQVSYEFYHPMSSTRQLGLGQLPIGLFFADKIQCRGEITSTLMMDQLLNLPGPPLGSIDNIELAGFKSRNFDTLTNGGTIDSSPPRQSNSGGDIEYAPGLIPNGGGPSPPVIGYHAPRTLTLLQGLIREPADAGKKRKTRSSAVGTLALAPKKKPNSKKTKPTDDLPALDPSIEQALDEEEIGEDVDQAAAEKKKTAVKKKPAATIVKSAPPPILYNTCLFYSLLLLLLLPYSNRQVTELHRLWGVIILRKKNNQLLLLSQDYLDEAEEDTSSKALAPLSDDVKKTLEDISRRLEASSLDSLVVDCGSIRTRLHEVQALISEELADVLTPATYLEQHQFKLEKAKLRLAERRERKEIEATIQVNRQLVHQEKVKLDQLSEGPIKSNIDRLEARKIELLAQLEECNAELDLEHKKLADLPKSIEEQKARLKSAINNVADLTKSLKVISGTDAQDAQAIEEVEKIRQRAISTIQQYLS

SEQ ID NO: 126286 - protein, 878 aa, Oryza sativa
  unsure (1)..(878): unsure at all Xaa locations
  Clone ID: PAT_MRT4530_28848C.1.pep
VVMSSSSSPSTTPSAEYAEHPSNLIAIPSLSHENHYFIGPIGNLDPIDFIIGETNRIPFLGHWKNIFNKKVHWDEIGIGQALALTIANSAKDEPLMAAATYFXSNTINAFLFNQGLMTPTLIDITMITGLDVTSSANSMSMNTKNQFDFRTKSIGGWSGYVAAYMGQGSVTPXEHVAFLLMWLGKFLFCGSSCGPTTNWQFVAETLKSKKQLPLGKILLGYLYQILNNASAKIVVGSVVGAGGPLWLLQTXLNLIVMKVVNRPSVTEAEFPRLEPIIEDDGEERTHRRCMSYEEYASTPTVAGAKLSAELLKDWFCSFYQSFHKDARIWFPYEDSMDLDLPSDFRFEDINHEKYQISKEVLIAAISPCILPVGIHQGINIQVSYEFYHPISSTRQLGLGQLPIGLFFTDKIQCRGEISSSLMMDRLLNLQGPPLGSIDNIELAGFKSRNFDRWWGEWKLHLFHQSASMYMIDLFPDVIPQTIDSSPPRQSNSGRDIEYAPGLIPNGGNQPMQAXKRRTRSLAMDALAPAPKKRAKSKKTKSTDDLPSLDPSIEQALDEEEIDEAVDQAPADVSDTEETPSASPKQTPPTPSAPVHFSRKKKTAMKKKPAATIFKPAQPPPPPSPPGQQSSSDRTPSAVGSHHVEEEVQPTAPAIPVLADLFSFDIRDYLDEAEEDTSSKALAPLSDDVKKTLEDISHRLEASSLDSLVVDCGSIRTRLHEVQALIPEELADVLTPAAYLEQHQFKLEKSKLRLAERWKRKEIEATIQVNRQLVHEEKVKLDQLFEGPIRSNIDRLEARKIELLAQLEECNAELDIEHKKIADLPKSVEEQKAKLKNVVDLTKSLKVISGTDAQDAQAIEEVEQIRQRAISAIQQYLSW

SEQ ID NO: 126287 - protein, 66 aa, Oryza sativa
  Clone ID: PAT_MRT4530_28849C.1.pep
CLRLVRRVPLFANMDERLLDAICERLKPSLCTEATYILREGDPVDEMLFIIRGRLESSTTDGGRMV

SEQ ID NO: 126288 - protein, 37 aa, Oryza sativa
  Clone ID: PAT_MRT4530_2884C.1.pep
LCRCCWMPSSSLLADLSSVDWFLRFHGCVTSSPLIGV

SEQ ID NO: 126289 - protein, 152 aa, Oryza sativa
  Clone ID: PAT_MRT4530_28850C.1.pep
MYMIDLFPDVIPQTIDSSPPRQSNSGRDIEYAPGLIPNGGGPSPPVIGYHAPRTSTLLQGLIREPADAGRKRRTRSLAMDALAPAPKKRAKSKKTKSTDDLPSLDPSIEQALDEEEIDEAVDQAPADSLLLQKKKTAMKKKPAATIFKPAQP

SEQ ID NO: 126290 - protein, 155 aa, Oryza sativa
  Clone ID: PAT_MRT4530_28851C.1.pep
MTYSRGTGCQANDAGCASSHERRQRAGRSCARDVDGMGYDTGSIPRFASSHARRWRRTAVGAWLPLRRGSLPSSPFAGVPLCRDPPPQLVAPAAEMACRSGPAEVAKAAVSLTRMNRSAEFETASTADDAKPTFACVLLPLPPPVLPRLPMWLYV

SEQ ID NO: 126291 - protein, 202 aa, Oryza sativa
  Clone ID: PAT_MRT4530_28852C.1.pep
MSSSASPSTTPSAEYAENTFKSWPSLEKTTPEKSWTTWYKRVSASKKVHWDEIGIGQALALTIANSAKDEPLMAAATYFWSNTINAFLFNQGLMTPTLIDITMITGLDITSSANPMSMNTKNQFDFRTKSIGGWSGYVAAYMGQGSATPREHVAFLLMWLEKFLFCGSRYGPTTNWQFVAEALESKKQFPLGKILLGYLYQM

SEQ ID NO: 126292 - protein, 214 aa, Oryza sativa
  Clone ID: PAT_MRT4530_28853C.1.pep
MAGGQYYYRQCGGVAEEDSRSPYGGGGAAVDCTLSLGTPSTRRAEAGAYGGGLQPWDVPSSARPGGGGGGKQDGAGVAPCNKEAPAAGRLPRRCANCDTMSTPLWRNGPRGPKSLCNACGIRYKKEERRAAAAVAPTPPPSLDTGAGYAYCYSRQPPPPPAPQWGCYGQAAAKSASYAMFDAADDGPCLSWRLNMMPSSPAFAVGERPGLFQYY

SEQ ID NO: 126293 - protein, 33 aa, Oryza sativa
  unsure (1)..(33): unsure at all Xaa locations
  Clone ID: PAT_MRT4530_28854C.1.pep
ITLIARCSVQSPETHQNYRQKYXHSNLFIGTAI

SEQ ID NO: 126294 - protein, 80 aa, Oryza sativa
  unsure (1)..(80): unsure at all Xaa locations
  Clone ID: PAT_MRT4530_28855C.1.pep
HSAEFLPVRVDFFHRWVSTARAGQSGIVTSLYTEXNRDLVRAVRQRXELAQPVEKAFXRKRSFRNKLKKQALHKSTALLS

SEQ ID NO: 126295 - protein, 160 aa, Oryza sativa
  Clone ID: PAT_MRT4530_28856C.1.pep
MVKGGKPVMLVGIDDSDHSYYALEWTLKHFFALGQPQQYHLVLLTSKPPASAVIGIAGLGTTELLPTLELDLKRGAARVIEKAKEMCSQVIDASYEVLEGDARNILCEAVERHHADMLVVGSHGYGAWKRAVLGSVSDYCSHHAHCTVMIVKRPKHNTHS

SEQ ID NO: 126296 - protein, 81 aa, Oryza sativa
  Clone ID: PAT_MRT4530_28857C.1.pep
PKLDATLWVTSTGVQQKLSVRQDHMGGVTHVPCRRGAPERPRGWGKTTTTTRSLATRDAGQAGSQDNRTWSEAFFVAGKTG

SEQ ID NO: 126297 - protein, 91 aa, Oryza sativa
  Clone ID: PAT_MRT4530_28858C.1.pep
FFFFGGYGKMIFRKKPKLNSCTIVQQSGSSPPKYVVCLSVEQFKLTFPACVLFCRHTNQCITRSNWPQSPPAQSKPVWQTVVCTFPNPCGP

SEQ ID NO: 126298 - protein, 140 aa, Oryza sativa
  unsure (1)..(140): unsure at all Xaa locations
  Clone ID: PAT_MRT4530_28859C.1.pep
SHSAPSNAAPGPTRAADDVGGPFGMGAVRGSLFHFLKGTYNSPNGERLVGGAQAVRMNAXRVGDSFAVWGDLFSAFDCTMVFMHQKEDLWNSIIAGAATSGFLSMRQAPAAAARSALMGGMLLALIEGAGLMLNRVLASP

SEQ ID NO: 126299 - protein, 493 aa, Oryza sativa
  unsure (1)..(493): unsure at all Xaa locations
  Clone ID: PAT_MRT4530_2885C.1.pep
MPGGFTNRLAFTATDWCFRLYGWRTSPPLLGVYDFTAGLPPSPPTGVLAYMVGWSHHRSWAXISSPTSWPLAPPTGVFACTAGLLCRHCWASTTSPPACLCRRRLVSSPIRLVGHTTVHGRPHLHRPXAFTAANWCFRLHGWSIMPLLLGVYDFTAGLPPSPPTGVLAYTVGWSHHRSWASTSSPXPAGLHRRQLVFSLARLAYYAAAVGRLRLHRRPASVAADWCPRLYGWLVTPPFIGVHIFTXTGWPSPPPTGVSACTAGLLCHRCWAIHGFKLISYAPGMDQSEHHHRLAVVAADWCLRLYSWLITPSLLCVYIFTXRLAFVAANWCLRLYGWLVTPPLLGVYIFTAGLPSPPLTRVIACTAGLXYAAVVGCLHLHRRLAFVATDWCLRLYGWLVTPPLLGVYIFTAGLPSPPPTGVTACTAGLLCRCCWVSMSSPTGRLVRRRLVSPSARLAXMPPLSDVYIFTDRPLHMTPIXCYRLHGWPRCRHHK

SEQ ID NO: 126300 - protein, 224 aa, Oryza sativa
  Clone ID: PAT_MRT4530_28860C.1.pep
MGTPETSREPCPDRILDDVGGAFGMGAVGGSLFHFLKGTYNSPNGERLVGGAQAVRMNAPRVGGSFAVWGGLFSAFDCTMVFMRQKEDPWNSIIAGAATGGFLSMRQGPGAAGRSALMGGMLLALIEGAGLMLNRVLATPPPLPVDDPNLPAVMGGGGGIPGIPQVPVAPPEVASSSGGGSGWFGSLFGKKEEEKKASPKRRQVGYVGELSTRRSTPIPTFKCK

SEQ ID NO: 126301 - protein, 75 aa, Oryza sativa
  Clone ID: PAT_MRT4530_28861C.1.pep
MRILFSLPRREANSRFLCRRWPSQGVGSKLNMGEGSFPNISKGQRAIYRKEGGGLDKSGRMAAAAEAQPQRDGTD

SEQ ID NO: 126302 - protein, 88 aa, Oryza sativa
  unsure (1)..(88): unsure at all Xaa locations
  Clone ID: PAT_MRT4530_28862C.1.pep
LFXNRPHSXFPRKSSTHNQKSMLPTSKNKLMAAAGNSFXNQDPTMMGSGMXHMYFASSSHGTGAHYQSPGGAPITMAVPDMGFFVCKG

SEQ ID NO: 126303 - protein, 110 aa, Oryza sativa
  unsure (1)..(110): unsure at all Xaa locations
  Clone ID: PAT_MRT4530_28863C.1.pep
TXFSHLPXPSXSPNRWNLXFLXRXXITILXXXXPFLXCFLLELFQXLXXSFLSLISHLLXLSSRTSPPPTWYIEXVLFLLQHXTTXIPCLSXNSXKXXPHMPLFGVNTXK

SEQ ID NO: 126304 - protein, 524 aa, Oryza sativa
  Clone ID: PAT_MRT4530_28864C.1.pep
MEDKLPLALTVLSVSVLIAVVISKLVSYATKPRLNLPPGPWKLPVIGSLHHLVGSHAIHRSMRALAEKHGRHHLMQISLGEVFAVVVSSPEAAEEILRNQDVTFADRFLSTTIGVITFGGNDMAFAPYGERWRQLRKLCTLELLSAARVRSFRRIREEEVARLVRDLAASAAAGEAVNLSGRIAKLINDVVVRCCVGGRSEHRDEFLDALRTALDQTTWLTVADVFPSSKLARMLGTAPRKALASRKKIEHILEQIIQERKRIMDRSSHGGDGDGEAMNTSECFLDVLLRLQKDGNTPIPITNEVIVVLLFDMFSGGSETSSSTLIWTMAELIRKPKVMAKAHVEVRQAFQGKNTITEDDGVNELTYLKMVIKESLRMHCPVPLLGPRKCRETCKVMGYDIPKDTTVFVNAWAICRDPKYWDDAEEFQPERFENKSIDFKGSNFEFLPFGSGRRMCAAMNLGIANVELPLASLLYHFDWKLPDGMMPEDVDMQDAPGILVGKRSSLIMCPVTRVAPSNPQVIAS

SEQ ID NO: 126305 - protein, 51 aa, Oryza sativa
  Clone ID: PAT_MRT4530_28865C.1.pep
FALIHVYIISAWVKLNRSIWLGPQVLKRLYNWCAQNFLHHFNCNVWVLNVP

SEQ ID NO: 126306 - protein, 310 aa, Oryza sativa
  Clone ID: PAT_MRT4530_28866C.1.pep
MWRAAAYHLLLLRRAAHPPPSPATATGAACALRHVRLFSPPPHPPSSRPTEAEAEVTAAEARRLVRLVGVEALKRRLRDGREEVVGYGELLDACVEAGAARTRRDAEALARAMDEAGVVLLFRDKAYLHPEKVVELVRRAVPLALSPENDSRKEELKKLQEKKEEIDKLAHKQVRRILWSGLGFFMCQVGLFFRLTFWEFSWDVMEPIAFFTTASGLLVGYAYFLITSRDPTYEDFMERLYLSRHRKLCAKNSFDMAKYLELQKHCKCPLEGHYPPGPMPQGLSNIVFLPIKMSTHRKIARLAIGKELDE

SEQ ID NO: 126307 - protein, 112 aa, Oryza sativa
  Clone ID: PAT_MRT4530_28867C.1.pep
PGQFLATGSPVSGGYPAFPHQVAVVIKQLCAVNPLCPISLLSPCCCTHIGLSRAIPPNFPTTHTINCSRVPQPIHTGCPHSPCGVSASNCSLQRTTPQPLQIIAVLLAPTCA

SEQ ID NO: 126308 - protein, 43 aa, Oryza sativa
  Clone ID: PAT_MRT4530_28868C.1.pep
LGLHWSLLRAPFTTDLEFVEPMPPMCHQVTNRAKLYWLCRWQL

SEQ ID NO: 126309 - protein, 136 aa, Oryza sativa
  Clone ID: PAT_MRT4530_28869C.1.pep
MVTTSKVHGDHSGEELVLLGPHPTATELQLLQQPILPTGGTGLPHAAYSSSAAVWAGRAGQPEKAVTTAGDGERHGERRLAQEVALHAKGAGEGEKRETRREGEGDLIGKHRRAVQERTATTMTLRAKGRTSGGDN

SEQ ID NO: 126310 - protein, 717 aa, Oryza sativa
  unsure (1)..(717): unsure at all Xaa locations
  Clone ID: PAT_MRT4530_2886C.1.pep
MLVMDSRHLSFPVNRPRVHSAGLSSPPPLLISTTTSPPACLHRRRXWCLRLHGWPIMPPLLGVYDFTTGLPPSRPTGVSAYTAGLLCRRCWASTTSQSACLRSRRLVISPIRLVGHTAVHGRPRLHRLAYFRRRRLVSSPIRLVGHTAVLGHPRLHRPAATSAADWCFRLHSWPIMPLLMGVYVITTGLPLSPPTGVLAYTVGWSHHRXWASSSTPPACLRRRRLVSPPIRSVGHTTVDGHRHLHRRPASVAADWCPRLYGRLVTPPLMGIAIYTAGLPPLPPTGVLAYKVGRSHHRSWASTSSPXACLCRRQLESLPTWLAYYAAVGGHLRFHHRPLSSPPTGVFIVIDGQLCSHIGSIIFTSDTTHPICLFCRIQIQICIKGIHGFKLISYALGMDQSEHHHRXPSPPPTGVSACMAGLXYAAVVGRLRLHRPACLRHRRLVFPPARLAYYAAVVGHLRLHRPAASSAADWCFRLHGWPTMPPLLGVYDFITGMPPSQPTGVLAYTVGWSHHRSWASTSSPTGFPLPPTGVFAYTVVWSHHRCWASTSSPTGLPSPPPTGVSACTAGLLCRRCWASTSSPTGRLVRRQLVFPPARLAYYAAVVGRLRHHRPAASYTTDWCFRLHSWPVMTPTDAIFFTAGYVAVTANSRHHLQRKLSTSAADWCFYLHNCASSLPVHFITATQLCHHGGATSSLLSSEPANSIAATSQVLLHHQP

SEQ ID NO: 126311 - protein, 329 aa, Oryza sativa
  Clone ID: PAT_MRT4530_28870C.1.pep
MAAAAAAETSEASTAGLALAEANINWQRLDKTRFHVIGAILFTAQQGVLHPTAVVKTRMQVAEGGLSHMSGFSVFRRILRSDGIPGAFRGFGTSAVGALPGRVFALTSLEVSKEMAFKYSEHFDMSEASRIAVANGIAGLVSSIFSSAYFVPLDVICQRLMAQGLPGMATYRGPFDVISKVVRTEGLRGLYRGFGITMLTQSPASALWWSSYGGAQHAIWRSLGYGIDSQKKPSQSELVVVQATAGTIAGACSSIITTPIDTIKTRLQVMDNYGRGRPSVMKTTRVLLEEDGWRGFYRGFGPRFLNMSLWGTSMIVTYELIKRLSVKPE

SEQ ID NO: 126312 - protein, 131 aa, Oryza sativa
  unsure (1)..(131): unsure at all Xaa locations
  Clone ID: PAT_MRT4530_28871C.1.pep
LYILGTCLLCGSSFDDYSPRCRCSHCRMLVLVCSTCQDSTKDYVCELCQKNGKQCCQTSPRQGCKTESELIDSSDFGIPMIINXSATSTIPRSNGSEQLKKLKILCLHGFRQNVLNFKGRTSSLAKKFKYF

SEQ ID NO: 126313 - protein, 350 aa, Oryza sativa
  Clone ID: PAT_MRT4530_28872C.1.pep
MSSGQEAGSSSGGSGDGGAAAPRRNTRKPKYSKFTQQELPACKPILTPKWVISVFVLVGVIFVPIGLVSLKASRKVVEIVDRYDDACVPANTTDKLAYIQNPTISKNCRRTLKVPKDMDAPIFVYYQLDNFYQNHRRYVKSRSDAQLRDPKKANDTSTCDPEGTANGMAIVPCGLIAWSIFNDTYGFVRNSKNLPVDKKNISWKSDREHKFGRDVFPKNFQNGSLIGGKTLDPNKSLSKQEDLIVWMRTAALPTFRKLYGRIHTDLKKGDTITVTLENNYNTYSFSGKKKLVLSTSTWLGGKNDFLGLAYLSVGGLCFFLAFAFTLLYLIKPRKMGDNNYLSWNRNPAGR

SEQ ID NO: 126314 - protein, 401 aa, Oryza sativa
  Clone ID: PAT_MRT4530_28873C.1.pep
MACSTHLLSQSLYPLNRANPAAARGHLRFQASPSVRLGSGTSRRRALGLRVAASAEQGRRQVEVEYDLQAKFNKLADQIDQNAGITRLNLFSPCKINVFLRITGKRPDGFHDLASLFHVISLGDTIKFSLSPSKSKDRLSTNVAGVPVDESNLIIKALNLYRKKTGTDNFFWIHLDKKVPTGAGLGGGSSNAATALWAANQFSGCIASEKELQEWSGEIGSDIPFFFSQGAAYCTGRGEIVEDIRNPLPANLPMVLVKPPEACSTAEVYKRLRLEHTSQTDPLVLLKEITENGISQDACVNDLEPPAFEVLPSLKRLKKRIIAANRGDYDAVFMSGSGSTIVGIGSPDPPAFVYDDDDYKDTFVSEACFLTRNENEWYREPISSKITSEEDLPPEVASVSD

SEQ ID NO: 126315 - protein, 238 aa, Oryza sativa
  Clone ID: PAT_MRT4530_28874C.1.pep
MGEEANCNVAMESAAPKENGHTTGGAAAEAKAAAAWAEIAVTDAAAVPKPTPPPAAVAVDPRLQGISDAIRVVPHFPKQGIMFNDITPLLLRPGVFKDAVDIFVERYRGMAIAAVAGIEARGFIFGPAIALAIGAKFIPLRKPKKLPGEVISETYVLEYGTDCLQMHVGAIEPGERVLIVDDLVATGGTLCAAIRLLERAGADVVECACLIGLPKFKDFYKLNGKPVYVLVESREYEK

SEQ ID NO: 126316 - protein, 137 aa, Oryza sativa
  Clone ID: PAT_MRT4530_28875C.1.pep
MDAGSGGQGWREDFRQWRGDEHRISADDRGAHARHRGRMTGGATRAGPHVAVTPGIAAKWCGGGLEAEAEEDQDEMRELLAVAAAAAVLATSLVGTASAADAPAPSPTSDAPVAAPAFAAAAAAAASLTALAFGYLF

SEQ ID NO: 126317 - protein, 316 aa, Oryza sativa
  Clone ID: PAT_MRT4530_28876C.1.pep
MAATTTTVEDLPGDVLACALRRLDGPSLAAAGCATSGLRALADDPDTWRALCLSRWPSLAAAEQRCVLSAAGAVSPRRLFADAFPFPCVDDAAAAAPLDGDDQRLPGELVSAVDVYHGGAAVVSRVVETSTSSSWFLASPFRVDAVEGKSPAPAPASVASSWSPAELELSWILLDPSTGRAVNVSSRRPVAVERHWYTGDTLVRYAVVLAGCKFEATVSCSEEAGQITEVSLAADDADGAAISGEGCLRLLAAAMAGPRKGGRGQEGEAKRRYDEFVRRKRGRKESKARREVLVDLCCSAVSAVAVISFLAAVVLR

SEQ ID NO: 126318 - protein, 68 aa, Oryza sativa
  Clone ID: PAT_MRT4530_28877C.1.pep
MVRWRWHLPIFYNVRRWGVDELRKEIKLDVFEADLEKRRWLEVKELGDQALFLGTSCSRAILSSDYGS

SEQ ID NO: 126319 - protein, 408 aa, Oryza sativa
  Clone ID: PAT_MRT4530_28878C.1.pep
MDKLSGSARLIIVSDLDHTMVDHHDEENLSLLRFGALWESVYCQDSLLVFSTGRSPTLYKELRKEKPMLTPDITIMSVGTEITYGEAMVPDDGWEEYLNNKWDRNPETEQRPHKVSFFVDKKSAQEVIKSLSGNMEKCGLDVKIIYSGGQDLDILPQGAGKGQALAYLLKKLSSCGKPPNNTLVCGDSGNDAELFSIPGVHGVMVSNAQEELLQWYAENAKGNPKIIHATERCAAGIIEAIGHFKLGPSVSPRDVGFPYVKEDHIKPTDAVVKFYVLYEKWRRAEVPKSDSVVQYFKNITHANGVIIQPSGLECSLHASVDALSSCYGEKQGKKYRTWVDRLFVSQSGSDSWLVRFDLWEAEGDARLCCLTSLALNVKPETPAGFLITHVHKTWLKGYSSADEQSSKL

SEQ ID NO: 126320 - protein, 153 aa, Oryza sativa
  unsure (1)..(153): unsure at all Xaa locations
  Clone ID: PAT_MRT4530_28879C.1.pep
RNRCAARHNHARAGTLEAPPFAKCPLSSLASTMQLSTHFLLVAGSSLNSLLHPSLHKALNCSIEGFIPLSKAPKSSLFVRMQMSTQCLWSMVPSFSSSLQCSEHTASSISFSSVARTTATTATRVARSRAMVLFWAISTVSIEGNWCGRVXRT

SEQ ID NO: 126321 - protein, 306 aa, Oryza sativa
  unsure (1)..(306): unsure at all Xaa locations
  Clone ID: PAT_MRT4530_2887C.1.pep
IPSAAAPRTPAARQRRKDDGGWPGWLISQLARLAWRGAPGSGDDDKPLVRQRCEQIQQYRGCQPACLRRRRLVPRPTRLVYYAAVDGRLRLHRPAVSSAADWCFRLHGWPIMPLLLGVHILTNRLAFAAADWCLRLHGWPIMPLLVGVHIFTNRLAFAAADWCLRLHGWPIMPSLLGVHDLTASLPXIATDWCFCLHGWPIMPPLLGVYDFTGLSLSPPTGVLAYTVGWSHHRSWASTSSPTGLPLPPPTGVSAYMAGLLXRRWWASSLSPSTAXLSPPTGVFIVIDGRLCSHIGHLGLPSYDDNW

SEQ ID NO: 126322 - protein, 89 aa, Oryza sativa
  Clone ID: PAT_MRT4530_28880C.1.pep
QGPSGVHLRVRHRFAPPARTCSQAACHTKPNQDEKRREEHKKDRGQNPNTRDSVICSSGRSQVKHAPFSCKTLQQLFEQKSCKLPCFLV

SEQ ID NO: 126323 - protein, 158 aa, Oryza sativa
  Clone ID: PAT_MRT4530_28881C.1.pep
MAAAGRGGDRMRRRQAGVVKAADIVVVKAADVVEAAAVVVVSAGNVPAAGRLLTTIRHHLLRTLPLPLAAPLLGHLLLRRRVREAASIIHWLCRPDSPQRPNSATFTFAVAADGHNSDNGDQAGVARQRPARRRRTGPAQIRRVAVADGQILRKEKSF

SEQ ID NO: 126324 - protein, 133 aa, Oryza sativa
  Clone ID: PAT_MRT4530_28882C.1.pep
MSIAGEALRTNITTLGPLVLPLSEQLLFLAMVVLHRVFLAGVKTYLPDFTPALDHFCIHAGGRGVLDELERSLKLSAWHMEPSWMTHGDGFMLHLTAFALGHWPKEAVVWSASGAGKPGKPKCNNSTSLENIE

SEQ ID NO: 126325 - protein, 107 aa, Oryza sativa
  Clone ID: PAT_MRT4530_28883C.1.pep
IGAPILISQDIMHTWCRYINAIMSRVDACLCWLSPKLKPMARWLSICPDMCGDYPRYCSTPCKGATGHCGTWECVPSYIYSWITIVSHIIVLCHVTRMGIAFGCSYE

SEQ ID NO: 126326 - protein, 95 aa, Oryza sativa
  Clone ID: PAT_MRT4530_28884C.1.pep
EEPYIPVRNFSTVDFQFEYKVYHSIKKKKKKKKKKKKKKKKKKKKKKKKKKKKKKKKKKKKKKKKKKKKKKKKKKKKKKKKKKKPRAGVFFFFFF

SEQ ID NO: 126327 - protein, 263 aa, Oryza sativa
  Clone ID: PAT_MRT4530_28885C.1.pep
MEIQERAMKHVMEIGEERKRSSLKRRLMMRLRKDGYDASLCRSSWVATAEHPGGDYEYIDVLVAVGHGADTSSTSRLIVDVDFRSQFQLARPAPWYAHLSSRLPPVFVGPPEKLRQAVALLCMAAQRSLRESGLHVPPWRRPSYVQAKWLPCRGVQASALPPGGESAAAANGGDGPRAVVQWSVGKERRRRGGGHRRSGLSVELSDSGAGESSTILSPWPIAAFARRKEKKEVAKHSRSLNWASMAGRRKRYIWPKAQLGLYG

SEQ ID NO: 126328 - protein, 646 aa, Oryza sativa
  Clone ID: PAT_MRT4530_28886C.1.pep
MSLPAISLYTSPPPGAVYSSEFDPSSRGSSPPCSTAPPSTSHRPPAAAGGLSCLFSSPAAAASPPRAPPHDELGALWQDRSDEPAFAGGGGGYSSSPLKWRDLHHHHHHSPVSVFQGPSSSRGASRSPPASWLAGRDRDRERLFAGFVRNALGSCVDYAPALSPRSEVGGGELAFELDENLAEASPACEPCARELLAGAQARHRIFHEELVVKTFFEAEKAHRGQVSKLSHLSKLARDNNTASRIVEADRLHTMLLAMADARAVLIKLADRVHNMKTLEALPLGKQQRFAKETMEIFVPLANRLGIASWKDQLENLCFKHLNPEEHKDLSSKLTKSFDEVLITSAVDKLDRGLRDAGLSYHNLSGRHKSLYSIHNKMLKKNLTMDEIHDIHGLRLVFEKEEDCYRALDVVHELWPQVPGRFKDYISRPKLNGYRSLHTVVMSENVHPFEVQIRTKEMHLQAEYGFAAHWRYKEGTCRHSFVLQMVEWARWVLTWQCEAMNKERPASLGDSDAIRPPCPFPMHSEDCPYSYTRQCDHDGPIFVILLEHDKMSVQEFQANSTVMNLMDRVGTNTPRWSPYRIPMKEDLRPKVNHEPISDLNRKLSMGDVVELTPALPHESLPNYREEIQRMYDRGGFALATRGGSSRR

SEQ ID NO: 126329 - protein, 180 aa, Oryza sativa
  unsure (1)..(180): unsure at all Xaa locations
  Clone ID: PAT_MRT4530_28887C.1.pep
MDKTTIIVSAVGGXLGLLSAILGFAAEGAKRTRALYSSTNPSALGLGVCAAIFLVMAQVTVTAVGGCCGCCKSRAIPSETKRIVGVVCAVISWIAAVIAFVMFLDAGIVASECFIVREGFFAGAGVLALIATALGLTSYIVLRPQPDAAAGRGEPTPIGIPMDAVPGYPPRPPHPPPQQV

SEQ ID NO: 126330 - protein, 153 aa, Oryza sativa
  Clone ID: PAT_MRT4530_28888C.1.pep
MEGGGKGAAALLVLLLVAASLNAGVAVAAARRLGEDGGGRRQQPPPLVSVSKASSGPSGCSNDPHISGRPCAPPKMPYGVFGGQIPGGKLGPYVQPEDGLLSDTAGGGGACISSKQAARRRHGSGAGGMQRRRRDEQHNHHHHHRGRRLHLHQ

SEQ ID NO: 126331 - protein, 306 aa, Oryza sativa
  Clone ID: PAT_MRT4530_28889C.1.pep
MGISGERKGAARQYNRSKVPRLRWTAELHRSFVRAIDCLGGQQKATPKLILQLMDVRGLTISHVKSHLQMYRGTRHGIGQNDMQPQLHLKQHSFGSDEQSPKEFMCPPIKRAKVGTEASGKYRCMEGSSDMRSSAPPAGTRYFIDDCMRLQEVSMDRRRSDQHDAAAAARARAPAAAASSLHQALGFWVQGRREEPFMVHQISKPKAHQLNHMVRNMKISCKENHESRFFMVRSATRDEQVKKRAPPLSLAVDQKAANAISSWPSEASCVISPSPRNFSTDCSGPPGCSFVGRRVNLELSLSICGS

SEQ ID NO: 126332 - protein, 82 aa, Oryza sativa
  Clone ID: PAT_MRT4530_2888C.1.pep
LLGGVFTRAFQSCELPTCYWFFTNRFKLADCHSSCITIFPLPLILIKSKNNFFSLCFLGNIRFFAIAFFFSPNFFKLCYHRL

SEQ ID NO: 126333 - protein, 110 aa, Oryza sativa
  unsure (1)..(110): unsure at all Xaa locations
  Clone ID: PAT_MRT4530_28890C.1.pep
IYRKQLVKQSSXESIDRCTRRPHTPHDPLSLTLDLPLTTYVHYFTTTSWCNALRHTTPLRHXLDGLVDXHGRLYDGYGRTRDGVVRWSDDIGGLVLLDGRLTRTTLERTD

SEQ ID NO: 126334 - protein, 868 aa, Oryza sativa
  Clone ID: PAT_MRT4530_28891C.1.pep
MSTLAAHPPLGPAAAAQEKAASRNKRKYRAEPPSAELGSFGLEYPLTADCVGFEFMSPEKAAIAAAAAAAAVAAEGVNLDLIPGSCDCKDIHPTAEELLECQRYVNWNDPNEALLEEILLKGLDATFDNAVGVIIAMGYSEPTARAAVLRAATQYNWRESLAGFGEAAVEVLKTEGDMLSEGASEEDMRKIEQAVLGGMIALVNQAQPFYTTGDVMFCLLMSDMNVANACAMDYNPASLPAVDTQVIAQPVVGNYEPNNPSSDLSVSITNPQTGVTFRGKLTPVPPNSYNTAKADSSATPANLNVPSSKPSVSGKAQSEIPNLKPKENSNPVPDHSEEQPFVAAATQPVKDDKPIPSKRGSSKRDSLHRQKLMSFDKSSRALGSKGSLRSSKHSSLGSAVLDRKCRSFSDSTTSSLKASSKVGKGFSASMKGPEVPPDLSFTGAALPSNPSFDAKLSSNLNPLPAASTDLSLSLPLPSSNDSPAPSSNHDANTEGMDSSSKINLSYDEDQKVWIPQDKKDEMVLILVQRQKELQAHMRDWTDWAQQKVMQVTRRLAKEKEELHSLRKEKEEADRLQEERHNLEESTRKKLLEMESAISRANTQLEKAESSARRREAENEQLRIQMEAAKRHALVSATNILELSKKDENSHKRSQHWESERALLQEDLAAQRNKLSQVHQQLHHAKEQKDQIQARWRQEEAGKIEAIARVSLEKKERDQIETSLRSEENFLHLKAENDTQRYKSQIRALEQQISQLKVSLDSLRVGAPPKWGADNRTNALRLSEGRKNGSAQILANIAAVPQDFDFDDIQRDRECVMCLSEEMSVVFLPCAHQVVCAKCNDLHDKQGMKECPSCRTPIQRRVCARLAGC

SEQ ID NO: 126335 - protein, 102 aa, Oryza sativa
  Clone ID: PAT_MRT4530_28892C.1.pep
MEMASRPNTHHGQDMEGFVAELVCMAFVVGFPAELECTRICPLSSKFPHQVRCEVHGIPSYLPNMVVTACAGIVDHACEEAALKMMVVGVASMLHISKIQVQ

SEQ ID NO: 126336 - protein, 810 aa, Oryza sativa
  Clone ID: PAT_MRT4530_28893C.1.pep
MATLPDLGVSAFINILGAFVFLLIFAALRLQPINDRVYFPKLYLTGQRRHHPHPHGFVNLDLCSYLRFLAWVPGALRMSQPDLIHHAGLDSAVYLRIYTLGLKIFLPIMTVALLVLIPVNVSGGTLLNLRKEIVFSDIDKLSISNVNPGSNRFFIHLLMAYVFTFWTCFMLYKEYSNVAFMRLHFLASQKRCADQFTVIVRNIPHVSSHSTSETVDEFFRRNHPDHYLGQQAVYNANRYAKLVKKKERLQNWLDYYQLKFERHPGKRPIGRTGCLGFCGREVDQIDYYRARISELDKKLASERQRVLNDPKAVMPVAFVTFDSRWGAAVCAQTQQSKNPTQWLTDWAPEPRDVYWQNLAIPFFSLSIRKFLISIAVFALVFFYMIPIAFVQSLANLEGIEKVAPFLRPVIDTPVVKSFLQGFLPGLALKIFLYILPTVLMIMSKVEGYVSLSSLERRAASKYYYFMLVNVFLGSIIAGTAFEQLNAFFHQPPSQIPRTIGVAIPMKATFFMTYIMVDGWAGIANEILRVKPLVIYHLKNMFIVKTERDRERAMDPGSIGLAENLPSLQLYFLLGLVYAVVTPILLPFIIIFFAFAFLVYRHQIINVYNQEYESAAAFWPQVHSRIIASLLISHVTLFGLMSTMKAAYSTPLLIFLPLLTIWFHKYCKSRFEPAFRKYPLEEAMEKDNLERTSEPNLNLKSYLQNAYLHPIFHMFEQQQQQEQEQQREEKVEVRIDKAQQHHHRQVEEEEEESKSSQATTHYYHHHHEQTTTTTHHHYHQHEHMSHYHMGPSDTADSPSPPHFVYHYGVDP

SEQ ID NO: 126337 - protein, 506 aa, Oryza sativa
  unsure (1)..(506): unsure at all Xaa locations
  Clone ID: PAT_MRT4530_28894C.1.pep
AAASPIVVTRAARRRHLPSSPTHATRHRPSPIAVIASSPVRAPSPLARVPACCRRRVASSHPAALCVPLSSPPSVPRPXPPSSPPPPAPXPRACAPPPPPPPDVVPPPPSAPXPPAGPPARRPPPSPLRPDLGGREGGEPPPAASRRPAPPASPHPPPARSGGXEGEKPPPATPRPTPXRPSPDAVRPSPDGIRPSPPSAGLPHPLRPDLEGREGGEPPPXPPCARPPVRALPDAVRPSPPASPLPPPARSGGEGGXEPPPXPPLPPPQPPRRLAPQRPPPAVPPPPPPREGPPPPPPPPPPPPPPPPPPPPLPPPLAPRCEPPLPLPLPLHHLPIYHRNSIAPPPXKPLPARRYTAPAPPPASIRVQPPHQAPPPPPPPSRXEPRPPPCHRAPPSIASSXTPPPVTSPPFLGADXRSLPPPPSPPXPPPPPPXPPPHGTTPPPTSFLPDPAGTHKSXAVPPFQMPSSPLPLRGERSEAPPPPPAAPPPPRTPPPPPWRRTPSPRS

SEQ ID NO: 126338 - protein, 429 aa, Oryza sativa
  Clone ID: PAT_MRT4530_28895C.1.pep
MEAAADEEQEGISAQSPAQAPPSSASSLPKEQSQVELELRVLQALEFYPPSKLKGIHRHFVIYGLMEYLRKSLDRQFSADEVLQLLDRFFNLEMLPQTQPPPPPPPPPTSAAHHAYHYQYQYQYEQPKPHQYPQPQQANPSDHSHAVLHSLLRRVAALESTLPRCFASPPVPPPLHRNPRHRPRAAAHREEEDDEEEEDDDEDAPASLPPPPRRARAPPSPARERAARTIQAHFRRFLARRSRTLRHLKELAVLRSKAAALRGSLSGRGRVGDPAAISEAAMALLFHLDSIQGGDPMIREGKRAVSRELTRILEFVDKVLVKEHGEMAMNGELDCKDYHEGCNAAFAANPSAMNKKKVGFCGNGKVQELHDEAEQEHGSDADESSETSSSAEAEARKRSNSKRGAHAKPGLAAPMPVYMEPRRIDEERR

SEQ ID NO: 126339 - protein, 100 aa, Oryza sativa
  Clone ID: PAT_MRT4530_28896C.1.pep
MIVHQMKLKPTKDDALIKLRRCVAPPLAVGLAAARFSKQKRGSVTNYSYMSVNHWKFLSKLEMISYREMQRFQWKLKKQQCYLQCRHLQELKRVQISIPL

SEQ ID NO: 126340 - protein, 92 aa, Oryza sativa
  Clone ID: PAT_MRT4530_28897C.1.pep
LGFGPPKKFLTKRVRFPAGGGLGKGKGGVQGQVHPPGPPQGPGRQVGVLHEHAFPPCGPLKVPMNQLGLFMACPFILTKNPRVMCQFLVKCE

SEQ ID NO: 126341 - protein, 130 aa, Oryza sativa
  Clone ID: PAT_MRT4530_28898C.1.pep
MGKVTYIHGMDQSNGQQKLERHTTVEAITSEVAWNSPSTSLEEEEEEEGETAWRLYGYGNPDGIYRLRFGCGGAGFGLQSRGGGHTRAGGREATGFRGPSIVVHLPVIGSGMVGFFFGCRGLVSFGGLGG

SEQ ID NO: 126342 - protein, 94 aa, Oryza sativa
  unsure (1)..(94): unsure at all Xaa locations
  Clone ID: PAT_MRT4530_28899C.1.pep
KKESKTRSELIQNQIKNNADSMVRHLVKKNSMFQTMLIEKNPNANRLSTEEARSLNNNTGEEIAHFTPKIKXQTYLGLSNETDNEASERLTNER

SEQ ID NO: 126343 - protein, 132 aa, Oryza sativa
  Clone ID: PAT_MRT4530_2889C.1.pep
MAEVANVGTKSSINNNEDTSRRRRRRSTVKAKMPTNGGIIGQPFREEELEEVVDGKEVKTPKAKAKSATHEIDSIALVDRKLDATPTWRANCRNMNSAIIKGGSARDLKVDGCRDKGFRQVQALSMRGENAP

SEQ ID NO: 126344 - protein, 49 aa, Oryza sativa
  Clone ID: PAT_MRT4530_288C.1.pep
SFFFLDVTTQIYFQPIIPIFKTKIIHKQMCPQYSYSITANITLGIMLQN

SEQ ID NO: 126345 - protein, 88 aa, Oryza sativa
  unsure (1)..(88): unsure at all Xaa locations
  Clone ID: PAT_MRT4530_28900C.1.pep
MVRTMMTGTRSILVMGLQKYLVRKVERKISTITGXMKKPYLYRPGTVALLENRRYQKSTELLIRKLPFPAPCSLDPAGFLRSASAFRV

SEQ ID NO: 126346 - protein, 300 aa, Oryza sativa
  Clone ID: PAT_MRT4530_28901C.1.pep
MVQALVFAVGIVGNILSFLVILAPVPTFYRVYKKKSTESFQSVPYAVALLSAMLWLYYALLTSDLLLLSINSIGCLVESLYLTVYLLYAPRQAMAFTLKLVCAMNLALFAAVVAALQLLVKATDRRVTLAGGIGASFALAVFVAPLTIIRQVIRTKSVEFMPFWLSFFLTLSAVVWFFYGLLMKDFFVATPNVLGLLVGLAQMGLYVVYKNPKKNSAVSEAAAAQQVEVKDQQQLQMQLQASPAVAPLDVDADADADLEAAAPATPQRPADDDAIDHRSVVVDIPPPPQPPPALPAGEVA

SEQ ID NO: 126347 - protein, 146 aa, Oryza sativa
  Clone ID: PAT_MRT4530_28902C.1.pep
MQGQKNSVEQLADVFGFDHASSSGNPVMDQQGYWNNILGSVESHNLQGYQVNRSDGTIPYGNGVHQNGTFLGFWESGEASASGSSLHFGGSNEIKAEQRNIGGGLRIGERRLVAERNLSLDNVDIGLNINGNDLSGENSNVNGASQ

SEQ ID NO: 126348 - protein, 211 aa, Oryza sativa
  Clone ID: PAT_MRT4530_28903C.1.pep
MDSDHWISRLMAAKRQYALQRAQNHHHATATATATAASHSHLDRYGYDDVEPEDEVRPDFPCPYCYEDHDITSLCAHLEDEHPFESKVVRHHRLRRVAVPSNHALSLGGRDLQETYLKVLLGNSSRSSGTNAASSVTDSLLSSLVLNLSSSEAEDTAKFSALAVVENNWFKRTLPSKTWKASSSNRRLVPDPFDIDDEPMWLASYLSWKQF

SEQ ID NO: 126349 - protein, 245 aa, Oryza sativa
  Clone ID: PAT_MRT4530_28904C.1.pep
MDSDHWISRLMAAKRQYALQRAQNHHHATATATATAASHSHLDRYGYDDVEPEDEVRPDFPCPYCYEDHDITSLCAHLEDEHPFESKVVACPVCSARISKDLLDHITLQHSYLFRLQRHHRLRRVAVPSNHALSLGGRDLQETYLKVLLGNSSRSSGTNAASSVTDSLLSSLVLNLSSSEAEDTAKFSALAVVENNWFKRTLPSKTWKASSDSNLSQEERERRRRRAAVRSSFVQHLLVSTLFDD

SEQ ID NO: 126350 - protein, 183 aa, Oryza sativa
  Clone ID: PAT_MRT4530_28905C.1.pep
MAAVVRELVKRRRCAPTERTLLEKVHSQAHGYTIIAFHPRVFQGYLSTFDVAIPVRASELSGNNPTPVGRCRVVFLLESVPGEIRDSARSLLTDVKEDCESEKEAQKLERLEVQKIHACPNDCILYRGEKYENLEAYPKADYRKKPIFRNGKYVFDMVKDLKVVFGKGPGSQPIASEDGHAAM

SEQ ID NO: 126351 - protein, 308 aa, Oryza sativa
  unsure (1)..(308): unsure at all Xaa locations
  Clone ID: PAT_MRT4530_28906C.1.pep
NSGQRDKHKNCTSSCDCSLYAFRARVRIWKSGFFWPTMYEDSKAFVRRCTSWQRQGGITARDAMPLTYNLQVEIFDVWGIDFMGPFPKSRNCEYILVAVDYVSMVISDGGSHFIDKTFRDLLQDMGAKHNVATPYYPQTSGQAETSNKQMKNIVQKTVNKMGTWXKDRLLDALWXSCRLPVELEHRAYWAIRNXNMNFEGAGEXRKMKIAELEEWREKAYHNAKIYKERTKRWHDKRINIKKFKPGDKVLMFNSRVMLFGHGKLRSKWEGPFDVIDTSSHGAITLRDDSGNIFKFRCEFRDRTIGSRP

SEQ ID NO: 126352 - protein, 70 aa, Oryza sativa
  unsure (1)..(70): unsure at all Xaa locations
  Clone ID: PAT_MRT4530_28907C.1.pep
GVWDCWVVLKKKQKKXXEKPPRXKKKKFKENWIEGKLRGXKKGKKKEKEKKKKKKKKKKKKKKKKNKKKQ

SEQ ID NO: 126353 - protein, 56 aa, Oryza sativa
  Clone ID: PAT_MRT4530_28908C.1.pep
AQNYLICSPRPQLLTSSRAQLLYRVCAQDLILYNINCSLAYLNVHSEEDLFAIASC

SEQ ID NO: 126354 - protein, 217 aa, Oryza sativa
  unsure (1)..(217): unsure at all Xaa locations
  Clone ID: PAT_MRT4530_28909C.1.pep
EQIDAMDDDLTSLGFLNSLARSAPKQPPSDSPKLSSISSDSPPPFSPATAAPPTSPPNPPKKSLDAAMAPKKQPRIQLSNQQQADDNPSPSPNLSNTPPKSLNTTSPMXSNSPKNTQPTSSKRRALVDITPARSATQETSKKPPPPPPSPPLNLPRKSMANTTRTQENDRTSRIRWSNQISLRGEEDEEAERVEVRRGSLRVQSNLSSCRFLSPGIH

SEQ ID NO: 126355 - protein, 1278 aa, Oryza sativa
  unsure (1)..(1278): unsure at all Xaa locations
  Clone ID: PAT_MRT4530_2890C.1.pep
ACRRRWASRPSPPGGARRRRCASGACRRSRPWSARRGTRARRPTPRPRGSWWPRRAPGTGAPPRRRPAPPPPRRGTSRATPARAARRCTATTAAPPPPPASTSPPHPPSQLPSPPVAVEPPPPPPPPAPATSARRRRTRWWPPLCRLVFATAIADNNXRLHRRPASVAADWCLRLYGWLVTPPLLGVYIFTAGLPPSPPIGASVYTAGLLCRRCWASISSPPACLRRRRLVSSPIRLVGHTTVVGRLHLHRRPASVAADWCLRLYGWLVTPPLLGVYIFTAGLPPSPPSGASAYTAGLLCRRCWASTTSPPACLRRRRLVPPPTRLAYYAAAVGRLRLHRRPASVAAEXCLRLHGWPIMPPLLGVYDFTAGLPPSPPTGASAYTAGLLCRRCWASTTSPPACLRRRRLVPPPTRLAYYAAAVGRLRLHRRPASVAAEWCLRLHGWPIMPPLLGVYDFTAGPPPSPPSGASAYMAGLLCRRCWASTTSPPARLRRRRVVPPPTRLAYYAAAVGRLRPHRRPASVAADWCPRLYGWLVTPPFMGVHVFAXGWPSPPPTGVFAYTVGGLRRRXWASLSTPLAWFHWRRLVFLPIRLVDFASVNGLHYLHHWLGSTXPTGVFVTIDGLLRSHIGYFCCHRGXYDKAKIQIQICIKGIHGFKLISYAPGMDQSEHHHRLASTAADWCFRLHGWPIMPPLLGVYVFTDRLAFAAADWCFRLHGWPLXPPLLGVYVFTDRPPRPPPTGVSAXTAGLYAAVVGRLRLHRPAASTAADWCFRLHGWPIXRRCWASTSSPTGRLDRRRLVFPPERLAFMPPLLGVYVFTDRPPRPPPTGVSACTAGLYAAVXWASTSSPTGRLDRRRLVFPPARLAFMPPLLGVYVFTDRLPXSAAGWCFRLHGXLIMPPLLGVYVFTDRPPRLPPTGVSACTAGLLCRRCWASTSLPTGLPSSPPTDVLACTAGLYAAVVGRLRLHRPACLRRRRLVFPPARLASMPPLLGVYVFTDRXPSPPPTGVSACTAGXLCRRCWASTSSPTGXLRRRRLVFPLARLAXYAAVVGRLRLHRPACXVAADWCPRLHGWPXLCRRCWAPTSSPTGXLCRRRPMSSPARLAXYAAVVGRLRLHRPACLRRRRLVFPPARLAFMDRPPHPPLTATTTDKHHRFPSPTXMLSPTGAFIFTTARLHYRFTSLRQYNFVIMVERLHLYYLRHRETLLLLLRKFYYFTNHDVFVNLDISACNAMLFYYNKWLSNIQDFYLDIFNTYLQSSNDYSTTRSYSSRLYVQLFPN

SEQ ID NO: 126356 - protein, 71 aa, Oryza sativa
  unsure (1)..(71): unsure at all Xaa locations
  Clone ID: PAT_MRT4530_28910C.1.pep
ARPPPSRPPPLPPPPPXPPPPPPPPPPPPPPPPAPAAAGAPPPPGPPPRLPRRARRTRESAFGGGYCSEEV

SEQ ID NO: 126357 - protein, 120 aa, Oryza sativa
  unsure (1)..(120): unsure at all Xaa locations
  Clone ID: PAT_MRT4530_28911C.1.pep
FFFFFFGSHMGIINLRNTRSNDVIHASLLHNAISHPVALATQGTVNHFQTQIQQNQSSXRRAMLHHHNPITHSLQHRIWVPSRHPSVKCPRSLKHGVASKSSTTRWFLPSSQESVQHFCG

SEQ ID NO: 126358 - protein, 104 aa, Oryza sativa
  unsure (1)..(104): unsure at all Xaa locations
  Clone ID: PAT_MRT4530_28912C.1.pep
IELQSQKAERHILPXRFTPRNAGVRIKEEDEHQHIMATISKTSPTEENQKRNQSKNQTQLVAVPTEEELEEEEEEEAERAAAMADSAPPPIIGRVGGRVGGRVG

SEQ ID NO: 126359 - protein, 1495 aa, Oryza sativa
  unsure (1)..(1495): unsure at all Xaa locations
  Clone ID: PAT_MRT4530_28913C.1.pep
RTRGLARRRRRLLLDVPSIAGGGDAEGGEPDERGRGGVSSSRAASMWWSTDNGVLLRSRASSRGEEDDDDEEALRWTALEKLPTYDRVRRAVLPVVDEGGGGGGGWEAGKKVVDVLSLDPXERRALLERLVRVAEDDNERFLLKLKERIDRVGIDIPTIEVRFEHLEVEAEVRVGNSGLPTVLNSITNNLEEAENALGILPNKKQTMPILHVVSGSVKHRRMTLLLGPPRSGKTTLLLALAGRLKDLKFSGQVTYNGHQMEDFVPQRTAAYISQHDLHIGEMTVRETLSFSARCQGVGSRFDMLTELTRREKAANIKPDADVDAFMKASAMEGQESNLITDYILKILGLEICADTMVGDDMVRGISGGQRKRVTTGEMLVGPANAFFMDEISTGLDSSTTFQIVKSLRQTIHILGGTAVISLLQPAPETYDLFDDIILLSDGHIVYQGPRENVLEFFELMGFKCPERKGVADFLQEVTSRKDQKQYWAQHDKPYRYVPIKEFASAFQSFHTGRSIANELATPFDKSKSHPAALTTSRYGVSAMELLKANIDRELLLIKRNSFVYIFRTIQLMTVSAMAMTVFFRTKMHRDSVADGVIFMGALFFAVMMIMLNGLSELPLTIFKLPVFFKQRDLLFFPAWTYTIPSWILKSPMSFIEVGGFCFMSYYVIGFDPNVGRFFKQYLLMLAVSQMAAALFRFVGGAARNLIVANVFGSFMLLIFMVLGGFILARDKVNKWWIWGYWISPMMYAQNAVSVNEFLGHSWDKVLNNSLSNETLGVQALMSRGIFPEAKWYWIGFGALLGFIMLFNILFTLALTYLKPDGKSQPSISEEELKEKQANINGNVLDVDTMASSNNLAIVGSTGTGSEIADNSQPTQRGMVLPFTPLSLTFEDIKYSVDMPQEMKAHGIVEDRLELLKGVSGCFRPGVLTALMGVSGAGKTTLMDVLAGRKTGGYIEGNISISGYPKKQETFARVSGYCEQNDIHSPQVTVSESLLFSAWLRLPKDVDSNTRKMFIEEVMELVELKPLRDALVGLPGVNGLSIEQRKRLTIAVELVANPSIIFMDEPTSGLDARAAAIVMRTVRNTVNTGRTVVCTIHQPSIDIFEAFDELFLMKRGGEEIYVGPLGHHSSELIKYFEGIQGVSKITDGYNPATWMLEVTTVSQEQALDVDFCDIYRKSELFQRNKALIQELSTPPPGSSELYFPTQYSQSFLIQCLACLWKQHLSYWRNPPYNAIRLFFTTVIALIFGTIFWDLGGKMGQSQDLFNAMGSMYAAVLFIGVLNGQSVQPVVSVERTVFYRERAAGMYSALPYAFGQVAIEFPYTLVQSVIYSIIVYSMIGFQWTVAKFFWYLFFMFFTLLYFTFYGMMAVGLTPSYHVASIVSSAFYAIWNLFTGFVISRPLNSIFPGPCAQATPVWWRWYCWICPVAWTLYGLIVSQYGDIVTPMDDGIPVNVFVENYFDFKHSWLGFVAVVIVAFTMLFAFLFGFAIMKLNFQKR

SEQ ID NO: 126360 - protein, 171 aa, Oryza sativa
  Clone ID: PAT_MRT4530_28914C.1.pep
RSSGLSIVTVAVNHFPLCYHRCQLSLSKFSHCHQAVRQQQHARCKLHRGAGHIHRAAWHGTHWQHRVSQLSPGVACRQVARAAGCRHGRTGGAQHSMQGVGTAQHGLCRWCGTACPKSTLWLCAVAGGCSTMGSPQCVTSSTKQAPHPTHHTGQPMSGHLPTYLHEQSGTD

SEQ ID NO: 126361 - protein, 789 aa, Oryza sativa
  Clone ID: PAT_MRT4530_28915C.1.pep
MNGELKLMASYVSKLKFILQKDQQQEPHTANLLVLLGSSNQDKRNGLSQGENRMDTCTRKKPRRYQLLTMQQKETLNRAFQSCPNPDRNDLKKLAKELNMTETQIKYWFQNCRTKMKKFKNNEERKLLQKENEELKKENAELRNRMKNSTCRACDLPLFHIDCRHWENPMLNKGNHGVTSNLIPQAVSSLLPSSSGFVASGSNLSSNAVLMPVSAMPSSVLQPAPAVSGANFPILHNLSANANDGYTEKNVLDLANRAMEEFFSLMKENESLLVKKKENGPLWLPHMDILGVESLNYQEYLAKSRTIGQKPVDFKVVVTRDTAIVNGSCVDLVKSLLDANRWRELFPGIVASANTTKIISTGPSNLHDGLLQLKNLQMRAELQVMSPEVPVCDVTFLRQSVQFGSGLWCVVDVSIDTILPGESKTAQSSVQTSSTAARRMEVRLLPSGCVIEEMENGYSKVTWMVHAAYDERAVPVLYHSLLRSAKALGACRWVASLQRHSQFLSGLHKYIFCPDSTMTEVVMRRKVLYLVKQMTSSFTGLFASMSKATLQDGDDTHFAHQIVGGATGEPAGLLLSATTTIWLPGVNPRHVYDHLRDEQCHGEWRCLLGEQLHQGNALPYGAPLNGETVPEFYRMVNGLHEGHAISLISPREMGGNISNTLLLQEARTDLSGSLIVYARTDVNTVHSIMNSGLNPATVFLVSSGCAILPDCLESFPLHPAATADQAGTSSAAIASRSETGGSFVTVTYQMFFSSQGGAAPASSSIHQGRDALKKATDIFKVVLDTLTVA

SEQ ID NO: 126362 - protein, 1444 aa, Oryza sativa
  Clone ID: PAT_MRT4530_28916C.1.pep
MDAAAEMQKVVSLRRGGGGSSSRGAASMWWSADNGVFSRSRASSSGEDGEDDEEALRWAALEKLPTYDRVRRAVLPVVEEGGGGGEAGKKVVDVLSLGPQERRALLERLVRVAEDDNERFLLKLKERIDRVGIDIPTIEVRFEHLEAEAEVRVGNSGLPTVLNSMTNKLEGAANALGILPNKKQTMPILHDVSGIVKPRRMTLLLGPPGSGKTTLLLALAGRLGKDIKFSGQVTYNGHQMEDFVPQRTAAYISQHDLHIGEMTVRETLSFSARCQGVGSRFDMLTELSRREKAANIKPDADIDAFMKASAMEGQETNLITDYILKILGLDICADTMVGDDMVRGISGGQRKRVTTGEMLVGPANALFMDEISTGLDSSTTFQIVKSLRQAIHILGGTAVISLLQPAPETYDLFDDIILLSDGQIVYQGPREGVLEFFELMGFKCPERKGVADFLQEVTSRKDQKQYWMQHDKPYRYVPVKDFASAFQSFHTGKSIANELATPFDKSKNHPAALTTSRYGVSAMELLKANIDREFLLMKRNSFVYIFRACQLMVVSAIAMTVFFRTKMHRDSVTDGVIFMGALFFSVMMIMFNGLSELPLTIFKLPVFFKQRDLLFFPAWTYTIPSWILKIPMSFIEVGGFVFMSYYVIGFDPSAGRFFKQYLLMLAINQMAAALFRFVGGAARNMIVANVFGSFMLLIFMVLGGFILVREKVKKWWIWGYWISPMMYAQNAISVNEFLGHSWDKVLNNSLSNETLGVQALRSRGVFPEAKWYWIGFGALLGFIMLFNGLFTLALTYLKPYGKSQPSVSEEELKEKQANINGNVLDVDTMASSTNLAIVDNTETSSEIADNSQPTQRGMVLPFAPLSLTFDNIKYSVDMPQEMKAHGIVEDRLELLKGVSGSFRPGVLTALMGVSGAGKTTLMDVLAGRKTGGYIEGNITISGYPKKQETFARVSGYCEQNDIHSPQVTVSESLLFSAWLRLPKDVDSNTRKMFIEEVMELVELKPLRDALVGLPGVNGLSTEQRKRLTIAVELVANPSIIFMDEPTSGLDARAAAIVMRTVRNTVDTGRTVVCTIHQPSIDIFEAFDELFLMKRGGEEIYVGPLGHQSSELIKYFEGIKGVSRIKDGYNPATWMLEVSTISQEQALGVDFCDIYRKSELFQRNKALIQELSTPPPACLWKMHLSYWRNPPYNAIRLFFTTVIALLFGTIFWDLGGKTGKSQDLFNAMGSMYSAVLFIGVLNSQSVQPVVSVERTVFYRERAAGMYSAFPYAFGQVAIEFPYTLVQSIIYGIIVYSMIGFKWTAAKFFWYLFFMFFTFLYFTFYGMMAVGLTPSYHVASIVSSAFYGIWNLFSGFIIPRPKVPIWWRWYCWICPVAWTLYGLVASQFGDIMTPMDDGTPVKIFVENYFDFKHSWLGVVAVVIVAFTMLFAFLFGFAIMKLNFQKR

SEQ ID NO: 126363 - protein, 65 aa, Oryza sativa
  Clone ID: PAT_MRT4530_28917C.1.pep
MTVGTAVRTEPGLSDPTPAFPTIGMRGFPEPSSYLARRARIPRYHKGGATRIQGSTTYRNWCDYW

SEQ ID NO: 126364 - protein, 724 aa, Oryza sativa
  Clone ID: PAT_MRT4530_28918C.1.pep
MQTHRTDRTANNGFAKFGSWPPKSQLPPGKKNGSRPQVVARVAVEVSQQIRPAFTRGSARGCFPTLASIRAMDLLTSAMKRCCNGKTLLRGGRTCRCSSASAIGSSGVRGKEEASTSAADSEPDKKRWRKKRFWRKKKKKAKKDHYGDAAATEHGSERASCRRYENDAVADLVNDISSKSDVCNVYAAEGILRITHQNIPSMVLTYRQLCNATDSFSPNNLLGEGGFGRVYRGHLEEINEIVAVKQLDKDGFQGNREFLVEVLMLSLLHHPNLVKLLGYCTDMDQRILVYECMRNGSLEDHLLDLPPKAKPLPWQTRMKIAVGAAKGIEYLHEVANPPVIYRDLKTSNILLDEDFNSKLSDFGLAKLGPVGDKSHVSTRVMGTYGYCAPEYAMTGKLTKTSDIYSFGVVLLEIITGRRAIDTSRPTHEQVLVQWAAPLVKDKKRFVRLADPLLEEKFPLKGLYQALAIASMCLQEDASNRPMISDVVAALSFLAEQKYHPQDGPDQAARKSRDRDCSNPPRKTDMVSEIKADDEIKHRLLELAGLSALLQSQVIGANYRYDENDKNDDITISQLYRKCSLPGVRQGEPDRMLPPRVPPPRGFKKPRELTWVTGVVLAVLTASFGVTGYSLPWDQIGYWAVKIVTGVPDAIPIESWICHIRIHDQRCLHIQSTRLAVLEPSMIGEPADPFATPLEILPEWKFKIEFGYYNYRWGDYRYRRGDYHI

SEQ ID NO: 126365 - protein, 111 aa, Oryza sativa
  unsure (1)..(111): unsure at all Xaa locations
  Clone ID: PAT_MRT4530_28919C.1.pep
REIDSKDFYQEVGPLTKFPPKPIRKKSSVKLLTTKFGNSSIGDEDKTEAESKTEIVLETEQESVKVRISXDQNRQSSSRTRDMFGKKSAVKTYGILEFVIDKSRVRHGHIL

SEQ ID NO: 126366 - protein, 314 aa, Oryza sativa
  unsure (1)..(314): unsure at all Xaa locations
  Clone ID: PAT_MRT4530_2891C.1.pep
YTTPKTDGVTLLDTSDIYGPHTNELLLCKALQGGVRDKVELATKFGIAFEDXKRDVRGDPSYVRAACEGSLQRLXMIDELKKLVEEGKVKYIGLCEASASTIRRAHAVHPINAVQLEWSLWSRDVEEDIIPTCRELGIGIVAYSPLGRGFSYRVKSCYHMWSLVPVKIKWLLAPTRENQVAGRENRNDLYDFLKRSPIGMETNLPRFQPENLEKNAKIFDRVNAMAMRKGCTAAQFALAWIHHKGDDVCPIPGTTKIENFDQNVGALSLELTRDEMAELESYAAAADVHGDWYAQMANTWKDCETPPLSSWKEE

SEQ ID NO: 126367 - protein, 1991 aa, Oryza sativa
  Clone ID: PAT_MRT4530_28920C.1.pep
MSGQAGDGNDGGKGANIPYDYPSTSISYNPEDPTKEDDENKHKNAQAANAILSALSGSTDSVRESKMEILKGQFERFVMLDGESPSDMYDRLSKIVNEIKGLGSKDMTDEVVVKKMVRAITPRNFTLVTIIRERPDYKTLTPHDLLGRILAHDMLVQESKDVIQYINQSSTASIKKEDLALKAKEEEEENRKSKSKAEIDDEEMALFVKKFGKFMRRSGFFKGGSSKHYSNKSSGRHSARVCYVCKEPGHFIADCPHLKDGSHIKEDKKKDEKKEKHKHSKSEHYGQAHLGMIFGSDSKSSSSDEEGVATFAVKPSSPPRLFNYSSDENAKVPSPLKSFNVDLVSDEEDEVEDEVMDDELFKSITKESLPHLSELLGRIEDQYVTLERQETLLIHEKERSHELKSELAKEREKNEALVRLYKQTKESHANLEVANAQLQERVDGLDKAYLTLEEKFKTLKNSVSLPSEPSCSKIVPSNEPCVRCKDIDIEACATNSISLSALQKQNEKLMGLLHNGLLKCHMDSKALKEYLGYQRDNFYHQGLGYVPPPKEKVDKSVLIRRPQGLSNFVKAKSILPNDYASHCSFDASYVLRKNASCRVVAKYVGPRGKNISIKRVLWVPKTLVTNMRGPKQGKVMGLGKIAISNDLSIANVLLVKSLNYNLLSVSQLCSMGYNCLFTDVDVTVYRRNDSSVVFKDVLKGKLYLVDFSSSKAKHETCLVAKSNTGWLWHRRLAHVGMRNLHKLLKHDHILGQTNVQFEKDRVCSAYQAGKQIGAHHPVKNVMTTTRPLELLHMDLFGPIAYLSIGGNKYGLVIVDDFSRFTWVFFLHDKSETQAIFKKFARRAQNEFDLKIKNIRSDNGKEFKNTKCYILNKKARSSKFAPKVDEGFLLGYGSNECAYRVFNKTSGIVEIARDVTFEETNGSQVEQVDSHVLGEEEDPSEAIKRLALGDVRPREPQQGVSSSTQVEPPTSTQANDPSISSLDQGEEGEQVPPSPINLARPRIHQSIQRDHPTDNILGDINKGVSTRSRIANFCEHYSFVSSLEPLRVEEALNDPDWVMAMQEELNNFTQNEVWNLVERARQNVIGTKWIFRNKQDEAGVVIRNKARLVAQGFTQIEGLDFGETFAPVARLESIRILLAFVTNLNFKLYQMDVKSTFLNGPMNELVYVEQPPGFEDPKYPNRVYKLHKALYGLKQAPRACEEFSRMMTKRFEMSMMGELKFFLVLQIKQLKEGTFICQTKYLKDMLKKFGMENAKPIHTPMPSNGHLDFNEQGKDVDQKVYRSIIGSLLYLCASRPDIMLSVCMCARFQAAPKECHLVAMKRILRYLVHTPNLGLWYPKGARFDLIGYANVDYAGCKVDRKSTSGTCQFLGRSLVSWSSKKQNSVVLSTTEAEYVSAGSCCAQLLWMKQTLRDYGLNVSKIPLLCDNESAIKIANNPIQHSRTKHIDIRHHFLRDHSIRGDIDIQHVRTDKQLADIFTKPLDEARMPPRKQTSHKSKRPRDRSPTPSSHDDSDSDWSGGEDAVPQVAWVARRSTQAHGGGGDGEGSSRQPQTPPHQPNVPIGPLRIHTPERDPAVIHQVYDWWRKSEVVAPRRDEDLRSFRRTATDLRFWTLFQQDFYESVIKSKTHPTVPMQWINWEELQAHNDPVIDSVIANCDLMGIRSFMTLQQNWCNEVIAQFYATVYFDRYRAMHWMTQGSWYSVSYQQLAEIWGFRLRSLLNLDDLHNLQILANTELLPLYTPNDPNVVLGKVDGLKPYFAYLNRMFRRSFVPKDGDASSINHLSRTVLLRFDPPPHRFHVYHFVWEEIRMASIQYKKGLVYAPHIMWMIETVTQLQFRHDVTHSQLQLRLLKAPRSSAARDIPSSSTQPPPAPERPASVARREPSPLFRILRSLFGLCSTEAKKNHRLRNSAKKTARDVKFLKARYYEDHHIDIPPSPPGFEAEPDEPEDEEIEDPFAGLPSDFDFFGYGHGYGYPPPRPSLESSSHRPLFLVS

SEQ ID NO: 126368 - protein, 688 aa, Oryza sativa
  Clone ID: PAT_MRT4530_28921C.1.pep
MLDEYKTSDRFWAEAVNTACHAINRLYLHRLLKKTPYELLTGNKPNVSYFRVFGSKCYILNKKARSSKFAPKVDEGFLLGYGSNECAYRVFNKTSGIVEIALDVTFDETNGSQVEQVDSHVLGDEEDPSEAIKRLALGDVRPREPQEGASSSHKVEPPTSTQADDLSTSSLDQGEEGEHVPPSPINLARPRIHQSIQRDHPTDNILGDINKGVSTHSRIANFCEHYSFVSSLEPLRVEEALNDPDWVMAMQEELNNFTRNEVWTLVERPQQNVIGTKWIFRNKQDEAGVVVRNKARMMTKRFEMSMMGELKFFLGLQIKQLKEGTFICQTKYLKDMLKKFGMENAKPIHTPMPSNNHLDFNEQVIGPGKRMRFLRLRGWLGAALSLLGGPLKLLVAVVRAPLINRKRRHTNPMSPLAHDDPVLNYVISNCELMGLRSFMTLQQDWCNEVIAQFYATAFFDGFRAIHWMTHGSCINHLSRTVLLRFDPPPHRFHVYHFVWAEIRMASIQYWKGLVYAPHIMRMIETVTQLQFRHDVSHSQLHLRLVKASRSSQAGTSAAGDIPSSSTQPPPACDRPSPVARREPSPLFRILRSLFGLCSAEAKKNRRLRNAAKKTARDVKYLKARYHEDHHIDVPPSPPGFEAEPDEPEEEQLEDPFVGLPPDFDFFGFGHGYGYPPPPPEDPPQAPFV

SEQ ID NO: 126369 - protein, 82 aa, Oryza sativa
  Clone ID: PAT_MRT4530_28922C.1.pep
FSTDGQSWGEAPALRLSLTALLFVSILKISITTQERSCNTAICVTHKMAGWLSRSGSVFKNNFMPINMGSKVLGRRRRQPQA

SEQ ID NO: 126370 - protein, 115 aa, Oryza sativa
  Clone ID: PAT_MRT4530_28923C.1.pep
TSRNPLRFLYTHPLVAVHPPLQRASQQGHTPQPPLAAPVRAPQNHTSGKTVGPPLFDSGPTWFCLRGRIPSPSSCMHRPCRPGPTAQRESSAPFVLDRAHGLAGRRRICTRGDLP

SEQ ID NO: 126371 - protein, 596 aa, Oryza sativa
  unsure (1)..(596): unsure at all Xaa locations
  Clone ID: PAT_MRT4530_28924C.1.pep
DVTLKEYLGYQRDNFNHEGLGKNASGRVVAKYVGPRGKNISIKRVLWVPKALVTNMRGPKQEYVSGGRSWVIDSGCTNHMTGEESMFSSLDPNGTSQDNIVFGDDGKGKVMGLGKIAISNDLSIANVLLVKSLNYNLLSVSQLCSMGYNCLFTDVDVTVYKRNDSSVVFKGVLKGKLYLVDFSSSKAKHETCLVAKSNTGWLWHRRLAHVGMRNLHKLLKHDYILGLTNVQFEKDRVFFLHDKSETQAIFKKFARRAQNEFDLKIKNIRSDNGKEFKNTCIESFLDEEGIKHEFSAPYSPQQNGVAERKNRTVIEMARTMLDEYKTSDRFWAEAVNTACHAINRLYLHRLLKKTPYELLTGNKPNVSYFRVFGSKCYILNKKARSSKFAPKVDEGFLLGYGSNECAYRVFNKTSGIVEIARDVTFDETNGSQVEQVDSHVLGEEEDPSEAIKRVEEALNDPDWVMAMQEELNNFTRNEVWTLVERPRQNMIGTKWIFRNKQDEAGVVIRNKAELYQMDVKSAFLNGPINELVYVEQPPGFEDPKFPNHVYKLHKALXGLSKPLELGIIMIFLCAKYMSMTLYLVLLTSLLVKSLVG

SEQ ID NO: 126372 - protein, 131 aa, Oryza sativa
  Clone ID: PAT_MRT4530_28925C.1.pep
MPSPTLWRTSFGRTSALVRKLRITDLLFPLRDDKGAMAEDVELVDLQASRDAEPRSSAGPPPPFFQAHQLPLPLNLPSATSPSLLSLGRKENEEEDTDTRAPYFLLKCESHIFFELGHHISETRHPYYYGI

SEQ ID NO: 126373 - protein, 1149 aa, Oryza sativa
  unsure (1)..(1149): unsure at all Xaa locations
  Clone ID: PAT_MRT4530_28926C.1.pep
MSGQTGNGKDGDKGATFPYDYPSASTSYVSTYSGKAPYFNGTDYAAWKHKMKMHLKSINPLIWRIVEKGYVLHNPEEPTKEDDENEHKNAQAANAILSVLSGSEFNRVDGIESGKVIWDTLRNLHEGTDSVRESKVEILKGQFEWFVMLDGESPSDMYDRLSKIVNEIKGLGSTDMTDEVVVKKMSKEAIQYINQTSTTIIKKEDLALKAKEEEEESRKSKSKAEIDDEEMALXRQEVRQVHEAKRLLXGSSSKYSSNKSSGRHSAREPKVPSPLKSFNVDLISDEEKDVEDEVMDDELFKSIAKESIPHLSELLGRIENQYATLERQEELLIREKEWSHELKSELSKERERNEALVRLYKQTKESHANLEVTNAQLQERVDGLDKAYLSLEAKFETLKNSVSLPSEASCSKIVPSNKPCVRCKDIDIEACATNSTSLSALQKQNEKLMGLLHNGLLKCHMDSKALKEYLGYQRDYFNHEGLGYVPPPKGKEYVSGGKSWVIDSGCTNHMTGEESMFSSLDPNGTSQENIIFGDDGKGKVIGLGKIAISNDLSISNILLVKSLNYNLLSVSQLCSMGFNCLFTDVDVTVFRRDDSSVVFKGVLKGKLYLVDFSSTKAKHETCSVAKSNTGWLWHRRLAHVGMRNLHKFLKHDHILGLTNVQFEKDRVCSACQAGKQIGAHHPVKNVMTTTRPLELLHMDLFGPIAYLSIGGNKYGLVVVDDFSRFTWVFFLHDKSETQAIFEKFARRAQNEFDLKIKNIRSDNGKEFKNTCIESFLDEEGIKHEFSAPYSPQQNGVAERKNRTLIEMARTMLDKYKTSDRFWAEAVNTACHSINRLYLHHLLKKTPYELLTGNKSNVCYFPVFGSKCYILNKKARSSKFAPKVDEGFLLGYGSNECAYRVFNKTSGIVEIARDVIFDETNGSQVEQVDSHVLGEEEDPSEAIKRLALGDIGKADSTLFTKRHYNDIFVCQIYVDDIIFGSTDKSFSEEFSRMMTKRFEMSMMGELKFFLGLQIKQLKEGTFICQTKYLKDMLKKFEMENAKPIHTLMPSNGHLDLNERGKDVDQKVYRSIIGSLIYLCASRPDIMLSVCMCSRFQAAPKECHLVAMKRILRYLVHAPNLGLWYPKGARFDLIGYADADYAEFDLPSSSF

SEQ ID NO: 126374 - protein, 118 aa, Oryza sativa
  Clone ID: PAT_MRT4530_28927C.1.pep
MVLPTILPKIAAHWLFTFYRAARKLRGHAFQYCRSSSATTTKPPPPSPVSPAAKCTVVFPDAADKAVVFGFDGALMRSAALFPYFMLVACEGGSLLRALLLLCAFPLVWALGERSDAG

SEQ ID NO: 126375 - protein, 1741 aa, Oryza sativa
  Clone ID: PAT_MRT4530_28928C.1.pep
MSGQTGEGKDGDKGAIFPYDYPPISTSYVSTYSGKAPYFNGTDYAAWKHKMNMHLKSINPFIWRIVEKGYVLQNPEDPTKEDDENKHKNAQAANAILSALSGSEFNRVDGIESAKVIWDMLRNLHEGTDSVRESKVEILKGQFERFVMLDGESPSDMYDRLSKIVNEIKGLGSKDMTDEVVVKKMVRAITPRNSTLVTIIRDRPDYKTLTPHDLLGRILAHDMLVQESKDVIQYINQSSTTSIKKEDLALKAKEEEEENRKSKSKAEIDDEEMALFVKKFGKFMRRSGFFKGEPGHFIADCPHLKDGSHIKEDKKKGEKKDEKKEKYKHSKREHYGQAHLGMIFGSNSESSSSDEEGVATFAVKPSSPPRLFDYSSDEDAPICLMAKEPKLPSPLKSFNVDLVSDEEDEVEDEVMDDELFKSITKESLPHLSELLGRIEDQYATLERQKALLIREKERSHELKSELAKEREKNEALVANAQLQDRVDGLDKAYLSLEEKFETLKNSVSFPSEPSCSKIVPSNEPCVRCKDIDIEAYATNSISLSALQKQNEKLMGLLHNGLLKCHMGSKALKEYLGYQRDNFNHEGLRYVPPPKGKVDKSVMIKRPQGLSNFVKAKSILPNDYASHCSFDASYVLRKNVSGRVVAKYVGPRGKNISIKRVLWVPKALVTNMRGPKQEYISGGRSWVIDSGCTNHMTGEESMFSTLDPNGTSQDNIVFGDDGKGNVMGLGKIAISNDLSIANVLLVKSLNYNLLSVSQLCSMGYNCLFTDVDVTVYRRNDSSVVFEGVLKGKLYLVDFSPSKAKHETCLVAKSNTGWLWHRRLAHVGKRNLHKLLKHDHILGLTNVQFEKDRVCSAYQAGKQIGAHHPVKNVMTTTRPLELLHMDLFGPIAYLSIGGNKYGLVIVDEFSRFTWVFFLHDKSETQAIFKKFARRAQNEFDLKFKNIRSDNGKEFNNTCIESFLDEEGIKHEFLAPYSPQQNGVAERKNRTLIEMARTMLDEYKTSDRFWAEAVNTACHAINRLYLHRLLKKTPCELLTCNKPNVSYFRVFGSKCYILNKKARSSKFAPKVDEGFLLGYGSNECAYCVFNKTSDIVEIARDVTFDETNGSQVDAFLNGPINELVYVEQPPGFEDPKYPNHLYKLHKALYGLKQAPRAWPDIMLSVCMCARFQAGLKECHLVAMKRILRYLVHTPNLGLWYPKGARFDLIGYADADYAGCKVDRKNTSGTCQFLGRMPPRKQTSHKSKRPRDRSPTPSSHDDSDGDWSGGEDAVPQVARGARGGNLPSRRSTQALGGGGDGEGSSRQPQTPPHQPNVPIGPLRIHTPERDPAVIRHVYDWRRKSEVVAPRRDEDPRSLRRTATDPRFWTLFQQDFYESVIKSKAHPTVPMQWINWEELQAHNDSVINSVITNCDLMGIRSFMTLQQNWCNEIIAQFYATVYFDHYRAMHWMTQGSWYSVSYQQLAEIWGFRLRSLLNLDDLHNLQIPANTELLPLYSPNDPNVVLGKVDGLKPYFAYLNRMFRRSFVPKDGDASSINHLSRTVLLRFDPPPHRFHVYHFVWEEIRMASIQYKKGLVYAPHIMRMIETVTQLQFRHDVTHSQLHLRLDKAPRSSAARDIPSSSTQAPPAPERPAPVARREPSPLFRILRSLFGLCSAEAKKNRRRNSAKKTAHDVKFLKARYYEDHHIDVPPSPPGFEAEPDEPEEEAIEDPFAGLPPNFDFFGYGHGYGYLPPPPPEDPPQAPFA

SEQ ID NO: 126376 - protein, 134 aa, Oryza sativa
  Clone ID: PAT_MRT4530_28929C.1.pep
MAASPGQIFALFALIALFASAPSAFPPIQFFPPPLPLGPMDPCRRALVPPLGLGCSPPLFFFQPMGLFQHQCCFHLQGLVPQCPFGPRCPIFLGLPPVFCAGLGPPPIFNMSLPMPFFCSMAPVNFQLFSCGCC

SEQ ID NO: 126377 - protein, 564 aa, Oryza sativa
  Clone ID: PAT_MRT4530_2892C.1.pep
MAEVANVGTKSSINNNEDTSRRRRRRSTVKAKMPTNGGIIGQPCKRKHQSTATKVSQRLSFPLTDLDQVREEEVEEVVDGKEVKTPKAKTKSATHEIDSIALVDGKLDATPTWRANCRNMNSAIIKGGSARDLKVDGCGDKGFRQVQALSMRALRFTVHIFYILPPFHNGNSKRAGLVGVGVWQSREAAKRGSKLRTTPTRDESSASIKAAGEESGGVDGKRVLSPKEETIQFIMSGGSGDSSPSSGRASFSSLSGASGDLAKKKTFPALFHLFQQGFLQSGEVHIFGYARSNISDDGLRERIRGYLKGASDEHISQFLQLIKYVSGSYNSGEGFASLNNAISENETSKNNKPGSSRRLFYLALPPSVYPSVCKMIRSYCMNPSSHSGWTRVIVEKPFGKDLESAEELSAQLGELFNEQQLYRIDHYLGKELVQNLLVLRFANRLFLPLWNRDNIANVQIVFREDFGTEGRGGYFDQYGIIRDIIQNHLLQVFCLVAMEKPVSLKPEHIRDEKVKVLQSVTPIKHDEVVLGQYDGYKDDSTVPDDSNTPTFASLVLRVNNERWE

SEQ ID NO: 126378 - protein, 727 aa, Oryza sativa
  Clone ID: PAT_MRT4530_28930C.1.pep
MVMQEELNNFTQNEVWTLVERPRQNVIGTKWILRNKQDEAGVVIRNKASAFLNGPINELVYVEQPPGFEDPKYPNHVYKLHKVLYGLKQAPRAWYECLRNFLVKNGFEIGKADSTLFTKRHDNDIFVCQIYVDDIIFGSTNKSFSEEFNRMMTKRFEMSMMGELKFFLGLQIKQLKEETFICQTKYLKDMLKKFGMENAKPIHTPMPSNGHLDLNEQGKDVDQKVYCSIIGSLLYLCASRPDIMLSVCMCARFQAAPKECHLVAVKRILRYLVHTPNLGLWYPKGARFDLIGYADADYAGCKVDRKSTSGTCQFLVFFAFLRMPPRKQTSHKSKRPRDRSPTPSSHDDSDSDWSGGEDAVPQGARVARGGNLPPLRSTPGGGGDGEGSSRQPQTPPHQPNVPIGPLRIHTPERDPTVIREVYDWRSKSEVVAPRRDEDPRSLRRTATDPRFWTLFQQDFYESVIKSKAHPTVPMQWINWEELQAHNDPVIDSVIANCDLMGIRSFMTLQQNWGPGILFLISSWLRFGASVFVLCSTLMTFIIFKFLLPLYTPNDPNVVLGKVDGLKPYFAYLNRMFRRSFVPKDGDASSTNHLSRTVLLRPPAPQLLGTSPPLPLSRLLLLSALPLWLVSLFGLCSAEAKKNRRLRNSAKKTAHDVKFVKARYYKDQHINILPSPPGFEAEPDEPEDEEIEDPFAGLPPNFDFFGYGHGYGYPPLPPPEDPPQAPFA

SEQ ID NO: 126379 - protein, 399 aa, Oryza sativa
  Clone ID: PAT_MRT4530_28931C.1.pep
MAAENGHRGSGIAAIMGIGKAVPAHVFPQKSFPDYYFDISNSNHMVDLKAKFTKISAIEESLSLAVLSLSLLITITQAKCAYRSASGKNMELANHGVPRLGAEAARAAIADWGGRASDITHLVFVTSTSGCLPGADFELLGLLGLPPSTKRAMVYQAGCYGGGTALRLAKDLAENSPGARVLVVCSEVIALVLRGPSESHVGNLVGQAIFGDAAGAVVVGSCPAAAAGERAMFEIVSASQEVVPGTRDAVVSELREEGIVFTLHRDVPRQIGDSIGRLVERALLAQQQPANAAIGAADAAAPDLNGMFWVVHAGGREILDRMESKLGLGKEKLEASRAVMAQYGNTRSSCVVLVMEEMRRRSEERGLRTAGEGLDMGMLVGFGPGLTVETIVLRALPIN

SEQ ID NO: 126380 - protein, 168 aa, Oryza sativa
  Clone ID: PAT_MRT4530_28932C.1.pep
AVPGIYPVFQMFWGFGGGLSPLFLAFDPRFPPNKIKGALVGGGPLLIFFFGPRPGNFLFPGVRGKGFSPLVFQKGAPPSEKFWGSPKGFFSPFGTGGGGPNPKKNFFFSFLQRAREAPQGGWPPPPPEEKICFLPFPLSSFPGISPPLGGPFFFLNPPFSISGDFVFV

SEQ ID NO: 126381 - protein, 1832 aa, Oryza sativa
  unsure (1)..(1832): unsure at all Xaa locations
  Clone ID: PAT_MRT4530_28933C.1.pep
MKMHLKSINPSIWRIVEKGYVLQNPEDPTKEDDENEHKNAQAANAILSALSGSEFNRVDGIESAKILKGQFERFVMLDGESPSDMYDRLSKIVNEIKGLGSKDMTDEVVVKKMEEEEDSHKSKSKEEIDDEEMALFVKKFGKFMRRSGFFKGNSSKHHSNKSSGRHSARVCYVCKEPGHFIADCPHLKDGSHIKEDKKKGEKKDEKKEKYKHSKREHYGQAHLGMIFGSDSESSSSYEEGVATFAVKPSSPPRLFDYSSDEDAPICLMAKEPKVPSPPKSFNVDLVSDEEDEVEDEVMDDKLFKSITKESLPHLSELLGRIEDQYATLERQEALLIHEKERSHELKSELAKEREKNEALARLYKQTKESHANLEVANAQLQERVDGLDKAYLSLEEKFETLKNSVSLPSEPSCSKIVPSNESCVRCKDIDIEACATNSISLSALQKQNEKLMGLLHNGLLKCHMDSKALKEYLGYQRDNFNHEGLGYVPPPKGKVDKSMMIKRPQGFSNFVKAKSILPNDSASHCSFDASYVLRKNASGRVVAKYVGPRDKNFSIKRVLWVPKALVTNMRGPKQVWEYLSGGRSWVIDSGCTNHMTGEESMFCSLDPNGSSQENIVFGDDGKGKVMGLENVSYFRVFGSKCYILNKKARSSKFAPKVDEGFLLGYVSNECAYRVFNKTSGIVEIARDVTFDETNGSQVEQVDSHVLGEEEDPSEAIKRLALGDVRPREPQQGVSSSTQVEPPTSTQADNPSTSSLDQGEEGEQVPLSPINLAHPKIHQSIQRDHPTDNILGDINKGVSTLCKFLVEEALNDPDWVMAMQEELNNFTRNEVWTLVERPRQNVISTKWIFRNKQDEAGVVIRNKARLVAQGFTQIEGLDFSETFAPIARLESIRILLAFATNLNFKLYQMDVKSAFLNGPINELVYVEQPPGFEDPKYPNHVYKLHKALYGLKQAPRAWYECLCNFFVKNGFEIGKADSTLFTKRHDNDIFVYQIYVDDIIFGSTNKSFSEEFSRMMTKRFEMSMMGELKFFLGLQIKQLKEGTFICQTKYLKDMLKKFGMENAKXIHTPMPSNGHLDLNEQGKDVDQXRPNIMLSVCICARFQAAPKECHLVAVKRILRYLVHTPNLGLWYPKGARFDLIGYADADYAGCKVDRKSTSGSCKFLGRSLVSWSSKKQNSVALSTAEAEYVSAGSCCAQLLWMKQTLRDYGLNVSKIPLLCDNESAIKLANNPVQHSRTKHIDIRHHFLRDHSTRGDIDIQHVRTDKQLADIFTKSLDEARFCELRRWFPSLNSFQITGSPVILLVVLECILMIRGQFKNQLYSRRGSMSSQGRSPSSKARHAIRRMSESRKDAIDAQAQASDQAAQVANVECGAPLPLRRSRVSGEGSSAPASKVRRGNPTDSSEPGHGSGSHAPSFEEEIQLEEDIAAQQAAQEEGPFFITAPSRDPNYHRRVVRWNRKWTEVEKECKKDPYKFQQLSTDPRFWNLFQQDYYEIVIAPKKGAILMQWVDWKYMEELHDPIIDEVIEACARQNLKELMGLQYPCVICQVCCHFGVSGSNRVKIHDEKPMDTNSLHFLYQDVDYELGTIKGLLPFYAYLNKLLRKTLNPKEGDASNVLAYTRNLLYKMKAHPQLFDAFDFIFEEIRLISMMPKRGLSYGPYITKMIEIVSKKKFHKEVAHTGYQVRPIKAAVVPAGRTTRASSRAGHSATVTKPDSNSSLRFFKSIFNLCKTISVRQAKERRARKKDTRRLKNLLRNAHLPCSPDGSEVEDSGEDVIEDPFAAEASSSHADRGKAPMEEEEEEKEGNLSPFVMASRILGFCVLLCAIIYYPCSNV

SEQ ID NO: 126382 - protein, 90 aa, Oryza sativa
  unsure (1)..(90): unsure at all Xaa locations
  Clone ID: PAT_MRT4530_28934C.1.pep
MEVGDSGGVTDVAKLGDGDTNTTEDDGGGADPVRSDGGGLEAVCSGGGGSEVVRGSGGCSDAVCGGGSGXNAVIRCGGGGVDAAQGGGGC

SEQ ID NO: 126383 - protein, 1907 aa, Oryza sativa
  Clone ID: PAT_MRT4530_28935C.1.pep
MSGQTGDGKDGDKGATFPYDYPSTSTSYVSTYSGKAPYFNGTDYAAWKHKMKMHLKSINPSIWRIVEKGYVLQKPEDPTKEDDENEHKNAQAANVILSALSGSEFNRVDDIESAKVIWDTLRNLHEGTDSVRESKVEILKGQFERFVMLDGESPSDMYDHLSKIVNEIKGLGSKDMTDEVVVKKMVRAITLRNSTLVTIIRERPDYKTLTPHDLLGRILAHDMLVQESKEVIQYINQSSTTSIKKEDLALKAKEEEEESRKSKSKEEIDDEEMTLFVKKFGKFMRRSGFFKGSSSKHHSNKLSGRHSARVCYVCKEPGHFIADCPYLKDGSHIKEDKMGEKKDEKKEKHKHSKRERYGQAHLGKIFGSDSESSSSDEEGIATFAVKPSSPPRLFNYSSDEDAPICLMAKEPKVPSSLKSFNVDLVSDEEDDVEDEVMDEELFKSITKESLPHLSELLGRIEDQYATLERQEALLIREKERSHELKGELAKEREKNEALVRLYKQTKESHANLEVTNAQLQERVDGLDKAYLSLEEKFETLKNSVSLPSEASCSKIVPSNEPCARCKDIDIDACATNSTSLSALQKQNEKLMGLLHNGLLKCHMGSKALKEYLGYQRDHFNHEGLGYVPPPKGKVDKSVLIKKPQGLSNFVKAKSILPNGHASHCFFDASYVLRKNASGRVVAKYVGPRGKNVSIKRVLWVPKALVTNMRGPKQEYHSGGRSWVIDSGCTNHMTGEESMFSSLDPNGSSQENIVFGDDGKGKVMGLGKITISNDLSISNVLLSLRVFSRTSFYLVDFSSTKAKHKTCLVAKSDMGWLWHRRLAYVGMRNLHKLLKHDHILGLTNVQFEKDRMCSACQAGKQIGAHHPVKNVMTTTRPLELLHMDLFGPIAYLSIGGNKYGLVIVDDFSRFTWVFFLHDKSETQAIFKKFERRAQNEFDLKIKNIRSDNGKEFKNTCIESFLDEEGIKHEFSAPYSPQQNGVAERKNWTLIEMARTMLDEYKTSDRFWAEAVNTACHAINCLYLHRLLKKTAYELLTGEEEDPSEAIKRLALGDVRPREPQQGASSSTQVEPRISTQADNPSTSSLDQGEEGEQVPPAPINLAHPRIHQSIQRDHPTNSILGDINKGVSTRSRIVNFCEHYSFVSSLEPLRVKEALNDPDWVMAMQEELNNFTWNEVWTLVERSRQNVIGTKWIFRNKQDEAGVVIRNKARMYFRVVLGRDKIGKADSTLFTKRHNNDIFVCQIYVDDIVFGSTNKSFSEEFSRMMTKRFEMSMMGELKFFLGLQIKQLKERTFICQTKYLKDMLKKFGMENAKPIHTPMPSNGHLDLNEQGKDVDQKGARFDLIGYADADYAGCKVDRKSTSGTCQFLGRSLVFWSSKKQNSVALSTAEAEYVSAGSCAQLLWMKQTLRDYGLNVSKIPLLCDNESAIKIANNLVQHSRTKHIDIRHHFLRDHSTSGDIDIQHCILMIKGQFKNQVYSRRGSMSSRGRSPSSKARHAIRRMSESRKDAIDAQAQASEQAAQVANVERGAPLTPRRSRVNGEGSSAPASKVRRGNPTGSSEQGQVYEELHDPIIDEVIEACAWQNLKELMGLQYPWCKEIIAQFYATVYFEPIKEKTIHWMTDGIIYSVTYAKFAAILGFPARSRTNHVKIHDEKPMDTNSLHFLYQDVDYELGTIKGLRPFYAYLNKLLHKTLYPKEGDASNVLAYTRNLLYKMKAHPQLFDAFDFIFEEIRLISMMPKRGLGYGPYIMKMIEIVSKRKFHKEVAHTGYQVRPIKAAAVPAGRTTRASSHAGPSTTVTTSDSNSSLRFFKSIFNLCKTISVWQAKERRARKKDTRRIKNLLHNANLPCSPDGSEVEDSGEDVIEDPFAAEASSSRADRGKAPLEEEEEEEGDYAEESSEEDEDSDEDE

SEQ ID NO: 126384 - protein, 191 aa, Oryza sativa
  Clone ID: PAT_MRT4530_28936C.1.pep
MATRIRPKMTVVARIQFAATAAAWKRSAAEAVARRWSAAAAAARMRSAAAAVARMRVAGSGILLPLCLRAVASTLGVPFGLSSSSSDSMANSIHGEVWLSPVKPTPKSTAQQQISNLCNFYEGDRRGLLVRQAVCMLKETQGCNRRGFAAAPCRFAPSALPSFRRLFMFLVQFSILCILLFLLTMFGGLPS

SEQ ID NO: 126385 - protein, 1242 aa, Oryza sativa
  Clone ID: PAT_MRT4530_28937C.1.pep
MSGQTGNGKDGDKGATFPYDYPSTSASYVSTYSGKAPYFNGTDYAAWKHKMKMHLKSINPLIWRIVEKGYVLQNPVEPTKEDDKNEHKNAQAANAILSALSGSDFNRVDGIESAKVIWDTLRSLHEVTDSVSEFKVEILKGQFERFVMLDGESPSDMYDRLSKIVNEIKVLGSKDMTNEVVVKKMVRAITPRNSTLVTIIRERPDYKTLTPHDLLGRILAHDMLEQESKEVIQYINQTSTTSIKKEDLALKAKEEEEESRKSKSKSKAEIDDEEMALFVKKFDKFMKQSGFFKESSSKYSSNKSSGRHSARVCYVCKEPEHFIDDCPHIKDCPHFKEDKKKLEKNEKHKHSKHDRYGQAHLGVIFGSDFESSSSDEEGVATFAVKPSSPPRLFNYSSDEDAPICLMAKEPKVPSPLKSFNVDLVSDEEEDVEDEVMDDELFKSIAKESIPHLSELLGRIENQYANLERQEELLIREKERSHELKSELAKEREKNEALVRLYKQTKESHTNLEVANAQLQERVDGLDKAYLSLEEKFETLKNSVSLPSEASCSKIVPSNEPCVRCKDIDIEACSTNSTSLSALQKQNEKLMGLLHNGLLKCHMGSKALKEYLGYQRDNFNHEGLGYVSPPKGKVDKSVMIKNPQGLSNFVKAKCILPNDYASHCSFDTSYVLRKNANGRAVAKRDDSSVVFKGVLEGKLYLVDFFSTKAKHETCLVAKSNMRWLWHRRLTHVGMRNLHKLLKHDHILGLTNVQFEKDRSETQAIFKKFERRAQNEFDLKIKNIRSDNGKEFKNTKCYILNKKARSSKFAPKVDEGFLLGYRSNECAYRVFNKTSGIVEIARDVTFDEINGSQVEQVDSHVLGEGEDPNETIKRVEEALNDPDWGMAMQEELNNFTRNEVWTLVERPRQNVIGTKWIFRNKQDEARVVIRNKAKLVAQGFTQIDGLDFGETFAPVARLESIRILLAFATNLNFKLFQIDVKSVFLNGPINELVYVEQPLGFEDPKYPINVYKLHKALYGLKQAPRAWYECLHNFLVKNGFEIGKADSTLFTKRYDNDIFVCQIYVDDIIFGSTNKSFNEEFSRMMTKRFEMSMMGELKFFLGLQIKQLKEGTFICQTKYLKDMLKKFGMENAKPIHTPMPSNGHLDLNEQGKDVDQKVYRSIIGSLLYLCASRPDIMLSVCMCARFQAALKECHLVAMKRILRYVHTPNLGLWYPKGASFDLIGYADADYAGCKVDRKSTLGTC

SEQ ID NO: 126386 - protein, 107 aa, Oryza sativa
  unsure (1)..(107): unsure at all Xaa locations
  Clone ID: PAT_MRT4530_28938C.1.pep
AEAELRVGIHIMVKFEQKKQNLYKQSQILTQNKPYPKLQCSYFLQETHTGQEFTSHTSCSSDPWMDHDLNELFELPMDLRSLYGPDDVSSCSIPPARRXXXRFCHSR

SEQ ID NO: 126387 - protein, 1885 aa, Oryza sativa
  unsure (1)..(1885): unsure at all Xaa locations
  Clone ID: PAT_MRT4530_28939C.1.pep
MSGQAGDGNNGDKGAKIPYDYPSTSTSYVSTYSGKAPYFNGTDYAAWKHKMKMHLKSINPSIWRIVEKGYVLQNPEDPTKEDDENEHKNAQAANAILSALSGSEFNRVDGIESAKVIWYTLRNLHEGTYSVRESKVEILKGQFERFVMLDGESPSDMYDRLSKIVNEIKGLDSKDMTDEVVVKKMVRAITPRNSTLVTIIRERPDYKTLTPHDLLGCILTHDMLVQESKDVIQYINQSSTASIKNEDLALKAKEEEEENRKSKSKAEINDEEMALFVKKFGKFMRRSGFFKGGSSKHYSNKSSGRHSAKDGSHIKEDKKKSEKKDEKKEKHKHSKREHYGQAHLGMIFGSDSESSSSDEEGVATFAVKPSSPPRLFDYSSDEDAPVCLMAKEPKVPSPHKSFNVDLVSDEEDEVMDDELFKSITKESLPHLSELLGRIKDQYGTLERQESLLIRKKERSHELKSELAKEREKNEALVRLYKQTKESHANLEVANAQLQERVDGLDKAYLTLEEKFETLKNSVSLPSEPSCSKIVPSNEPCVRCKDIDIEACATNSISLSALQKQNEKLMGLLHNGLLKCHMGSKALKEYLDYQRDNFNHEGLGYVPPPKGKVDKSVMIKRPQGLSNFVKAKSIIPNDYASHCSFDASYVLRKNASGRIVAKYVGPRGKNISIKRVLWVPKALVTNMRGPKQEYVSGGRSWVIDSGCTNHMTGEESMFSTLDPNGTSQDNIVFGDNGKGKVMGLGNIAISNDLSIANVLLVKSLNYNLLSVSQLCSMGYNCLFTDVDVTVYRRNDSSVVFKGVLKGKLYLVDFSSSKAKHETCFVAKSNTGWLWHRRLAHVGMRNLHKLLKHDHILGLTNIQFEKDRVCSTCQAGKQIGAHHPVKNVMTTTRLLELLHMDLFGPIAYLSIGGNKYGLVIVDDFSRFTWVFFLHDKSETQAIFKKFARRAQNEFDLKINKARSSKFAPKVDEGFLLGYGSNEYAYRVFNKTSGIVEIARDVTFDETNGSQVEQVDSHVLGEEEDPSEAIKRLALGDVRPREPQQGASSSTQVEPPTSTQADDPSISSLDQGEEGEQVPPSPINLARPRIHQSIQRDHPTNNILGDINKGVSTRSRIANFCEYYSFVSSLEPLRVEEALNDPDWVMAMQEELNNFTRNEISVKLLRRAFLNGPINELVYVEQPPGFXHVYKLHKALYGLKQAPRAWYECLRNFLVKNGFEIGKADSTLFTKRHDNDIFVCQIYVDDIIFGSTNKSFSEEFSRMMTKRFEMSMMGELKFFLGLQIKQLKEGTFICQTKYLKDMLKKFGMENAKPIHTPMPSNGHLDLNKQGKDVDQKVYRSIIGSLLYLCASRPDIMLSVSMCARFQAAPKECHLVAVKRILRYLVHTPNLGLWYPKGARFDLIGYADADYAGCKVDRKSTSGTCQFLGRMPPRKQTSHKSKRPRDRSPTPSSHDDSDSDWSGGEDAVPQVARVARRSTQAHGGGGDGEGSSRQPQTPPHQPNVPIGPLRIHTPERDLAVIRQVYDWRRKSEVVAPRRDEDPRSLRRTATDPRFWTLFQQDFYESVIKSKAHPTVPMQWINWEELQAHNDPVIDSVIANCDLMGIRSFMTLHQNWCNELNLDDLHNLQIPANTEFLPLYTPNDPNVVLGKVDGLKPYFAYLNRMFRRSFVPKDGDASSINHLSRTVLLRFDPPPHRFHVYHFVWEEIRMASIQYKKGLVYAPHIMRMIETVTQLQFRHDVTHSQLHLRLLKAPRSSAARDIPSSSTQPPPAPERPASVARREPSPLFRILRSLFGLCSAKAKKNRRLRNSAKKTARDVKFLKARYYEDHHIDIPPSPPGFEAEPDEPEDEAIEDPFAGLPSDFDFFGYGHGYGYPPPPPPEDPPQAPFA

SEQ ID NO: 126388 - protein, 232 aa, Oryza sativa
  Clone ID: PAT_MRT4530_2893C.1.pep
MTKSTNHEDDDVGDPVNSGVIADDNDEDAHQHETTSDEDGKANQHWQNHAVMEVKKPVGSHGKRGDTSQRRMRRPVGEDVDAQQRRHKGQPCRRKHQSAAVEASVGGGEGKPVGEDVDAQQRRHKGQPCRRKHQSAAAKASRSAETPVGSGEGKPVGKDVDAQQRRHKGQPCRRKHQSAAAKASRSAETPVGSGEGKPVGKDVDAQQRRHKGQPCRRKHQSAAAKASRSVKT

SEQ ID NO: 126389 - protein, 78 aa, Oryza sativa
  Clone ID: PAT_MRT4530_28940C.1.pep
MAIYTLPLFLSLHTHSLSLTGSGGDGAEEPPRGRCPSSRPVFAHNARVVAAAAFMLDLGGLLVFAVLHWPCLCVLLGD

SEQ ID NO: 126390 - protein, 120 aa, Oryza sativa
  Clone ID: PAT_MRT4530_28941C.1.pep
MAATLKLRLLAVAAAAAVLATSLVGTASAADAPAPSPTSDAPVAAPAFAAAAAAAASLTALAFGYLLYINAVAIDWFTLDFHGLVLLVTSSVSQCKSFMDDAMTAAAAAAARSLSRSVAA

SEQ ID NO: 126391 - protein, 64 aa, Oryza sativa
  Clone ID: PAT_MRT4530_28942C.1.pep
MRLSHRRIRWRVGHRRASRGGRLHVKREYVEVERAEDDGIVDGVRRARDTYAARAGDQHMPAWY

SEQ ID NO: 126392 - protein, 63 aa, Oryza sativa
  unsure (1)..(63): unsure at all Xaa locations
  Clone ID: PAT_MRT4530_28943C.1.pep
GALGVPDXPPTTPKFTLSXSPDPXRAASPGPDPPLVXPSPLPXALASTPVAPIVGPHXYRPPD

SEQ ID NO: 126393 - protein, 50 aa, Oryza sativa
  Clone ID: PAT_MRT4530_28944C.1.pep
YTIVRVDLALPVVGDVSDDDVGQLFSFLPLPLLPPASPGPVYPLDFAFLL

SEQ ID NO: 126394 - protein, 34 aa, Oryza sativa
  Clone ID: PAT_MRT4530_28945C.1.pep
MHGPPGARPPAAVVLPWLAVAVRRRPPPRRPLSV

SEQ ID NO: 126395 - protein, 77 aa, Oryza sativa
  Clone ID: PAT_MRT4530_28946C.1.pep
RICRTAYLCIKEEGFVRIQIVHSFLYRNKCPAMSTYMIYLDEVYQFHLLLLILCRHLFQALMPIKIVWNLENKTSRG

SEQ ID NO: 126396 - protein, 136 aa, Oryza sativa
  unsure (1)..(136): unsure at all Xaa locations
  Clone ID: PAT_MRT4530_28947C.1.pep
SHGRGLHLGGGCFENRLGSWQSGYFSYGGREIRITCCISSIPLFTMGFXKLLEEFHKKMVGVRGRFYWQGVEKKRKYHMVKWQALCRPMEYGDMGFXKYLKFMNLCLLCKWVMKIEGNLDDMSAVLLSRKVLLLLL

SEQ ID NO: 126397 - protein, 324 aa, Oryza sativa
  Clone ID: PAT_MRT4530_28948C.1.pep
MEALYLVASLATTLLTSTFLSLLLLLRLLLTRRPPLAGGGDGGAAVRLYEGRVRHSRRRPAAHAFEYPVRYALVDLDRLPLPGHLSPDDARRVASTSGPVHLLTIPKSVGYEQNPLSIYYCYDSAEQGEDEKLKMCIAEVTNTPWGERVMFTFQPGSDLVAKPLHVSPFMDMLGNWSIRAESPGDSLYVVILVQHPTLGNYFTAALHAKLVEKTSSSLRLATFFWLMPHKVAAGIYWEAIRLWLKNVKFLDHPRYLNLNYRDEAQKRDLEIRSSCSFLQKQKLNDQRTGRADETAEITDHHDHNGEESVVKRWCVWTDAQWPWS

SEQ ID NO: 126398 - protein, 159 aa, Oryza sativa
  Clone ID: PAT_MRT4530_28949C.1.pep
WWRRTVAATAVAHGGCDGGGERGTAKARRGAAASWRRRGGSMRRRGGVEAAARRRGGGGVVEWRRRAARRGAHGDATATATCERWRRRAAMRRRWRRRAARGARRRDGAAGVRRGGARDGDVTGERRRRRPTATAVAAVRGVRCGARARRRRGSGAGLG

SEQ ID NO: 126399 - protein, 471 aa, Oryza sativa
  Clone ID: PAT_MRT4530_2894C.1.pep
MAGGREGTQATTADAEVASDAGGRQAHSAVKMAEAGCEYITVLGVDFMSENVRAILDQAGYSKPRMMGACAFKRTLTTSFLILNCVRDIGNAASSSAYTHFLKEASRSPPSLHVIYINTSLETKAHAHELVPTITCTSSNVVATILQAFAQIPGLNVWYGPDSYMGANIADLFQRMAVMSDEEIAEDGNCIVHDMFGHEVVDKIKEQYCDAFLTAHFEVPGEMFSLSTDAWARGMGVVGSTQNILDFIKNHLMEALDRNIDDHLQFVLGTESGMITSIVAAVRELFDSYKTSQQSANIEVEIVFPVSSDAVSNTSVNGSHHLDSSTVTDLDNVSVVPGVSSGEGCSIHGGCASCPYMKMNSLRSLLKVCHQLPDRDNRLVAYQASRFNAKTPLGKLVAEVGCEPILHMRHFQATKRLPDKLVHHVIHVTPTECNLQLKSATTNFVADDEISLFMALLLVEKRETRICKVNL

SEQ ID NO: 126400 - protein, 147 aa, Oryza sativa
  unsure (1)..(147): unsure at all Xaa locations
  Clone ID: PAT_MRT4530_28950C.1.pep
XGFGTRPARERVSGCRRWRRRRGGARVRRRAPSGSICAGWGGAPVGSTKPWSGERRAARTSSAGPGATAMDEMAARPLPVDSRCDANLTPLHRWYLLHATCHYCLEFLTRSMTKEPGALIPSGFVLRDSSCLAWKRPLYFHIAMLGP

SEQ ID NO: 126401 - protein, 69 aa, Oryza sativa
  unsure (1)..(69): unsure at all Xaa locations
  Clone ID: PAT_MRT4530_28951C.1.pep
RIVNTSAPSILYGFSHPPSRQGHITQATRSRGGTTTGLWHHTYRAGWGYAXHHPQGGILGGPTVSCGMA

SEQ ID NO: 126402 - protein, 191 aa, Oryza sativa
  Clone ID: PAT_MRT4530_28952C.1.pep
MNSGDAEAAAASKKARCKKEKKKKRKDDCGAAEASAADEEIVHDKKRKKQLQQKKNGDDVAVPNRKTTLAGQIARAATVFRIDEVVVFDSNSSVENSGDDVESGARFLVRILQYLETPQYLRRRLFPMHNNLKFVGLLPPLDAPHHLRKHEWSEFREVHARLAGRAGKHAAAGSLRRATAHGIKVVDDSGG

SEQ ID NO: 126403 - protein, 171 aa, Oryza sativa
  Clone ID: PAT_MRT4530_28953C.1.pep
MNSGDAEAAAASKKARCKKEKKKKRKDDCGAAEASAADEEIVHDKKRKKQLQQKKNGDDVAVPNRKTTVSIAVAGSIIDNAQSLELATLLAGQIARAATVFRIDEVVVFDSNSSVENSGDDVESGARFLVRILQYLETPQYLRRRLLPMHNNLKFVGLLPPLDAPHHLRKH

SEQ ID NO: 126404 - protein, 102 aa, Oryza sativa
  unsure (1)..(102): unsure at all Xaa locations
  Clone ID: PAT_MRT4530_28954C.1.pep
VCPILSWYESPVGYQLPSHXSFPRAMKKNCPEEAXATRSLQLKXTILXLNVNGRAVCHPSPSRSKIYTPNTALNQTGEHHTTTNDHGLLSARSLEQQSTNME

SEQ ID NO: 126405 - protein, 842 aa, Oryza sativa
  Clone ID: PAT_MRT4530_28955C.1.pep
MSGQAGDGIDGDKGAKIPYDYPPTSTSYNPEDPTKEDDENEHKNAQAANAILSALSGSEFNRVDGIESAKVIWDTLRNLHEGTDSVRESKVEILKGQFERFVMLDGESPSDMYDQLSKIVNEIKGLGSKDMTNDVVVKMMVRAITPRNSTLVIIIRERPDYKTLTPRDFLGRILAHDMLVQESKDVIQYINQSSTASIKKEDLALKAKEEEEENRKSKSKAEIDDEEMALFVKKFGKFMRRSGFFKGGSSKHYSNKSSGRHSARVCYVCKEPGHFIADCPHLKDGSHIKEDKKKGEKKDEKKEKHKHRKREHYGQAHLVMIFGSDSESSSSDEEGVVAFAVKPSSPPRLFDNSSDEDAPICLMAKEPKVPSPLKSFNVDLVSDEEDEAKSILTNDYASHGSFDASYVLRKNASGYVVANACQAGKQIGAHHPVKNVMTTTRPLELLHMDLFGPIAYLSIGGNKYGLVIVDDFSRFTDNGKEFKNTCIESFHDEEGIKHEFSAPYSPQQNGVAERKNRTLIEMAKIMLDEYKTSDRFWAEAVNTACHAINRLYLHRLLKKTPYELLTVNEGFLLGYGSNECTYRVFNKTSSIVEIARDGATTRSLFLNTSRTTYINPSRRSLYLKLESRVEEALNDPDWVMAMQEELNNFTWNEVWTLVERPRQNVIGTKWIFRNKQDEAGVVIRNKVRPINELVYVEQSPGFEDPKYPNHVSKLHKALYGLKQAPRACRMMTKRFEMSMMGELKFFLGLQIKQLKEGTFICQIKYLKDMLKKFGMENAKPIHTPMPSNGHLDLNEQGKDVDQKGARFDLIGYADADYAGFVSTCIISGSSLHHLLLLEVEDS

SEQ ID NO: 126406 - protein, 79 aa, Oryza sativa
  unsure (1)..(79): unsure at all Xaa locations
  Clone ID: PAT_MRT4530_28956C.1.pep
IPRAAGIRQEEEPGLXQQDLKREXIVIWSLFLXXPLLXKIFLFKPVXLFFXVLXRLFYLAEPFIPFYERKIRGQNKKNK

SEQ ID NO: 126407 - protein, 1191 aa, Oryza sativa
  Clone ID: PAT_MRT4530_28957C.1.pep
MDLFGPIAYLSIGGNKYGLVIVDDFSRFTWVFFLHDKSETQAIFKKFARRAQNEFDLKIKNIQSDNGKEFKNTCIESFLDEEGIKHEFSAPYSPQQNGVAERKNRTLIEMARTMLDEYKTSDRFWAEAVNTSCHAINRLYLHRLLKKTPYELFTGNKPNVSYFCVFGSKCYIHNKKARSSKFAPKVDKGFLLGYGSNECAYRVFNKTSGIVEIARDVTFDESNGSQVEQVDSHVLGEEEDLSEAIKRLALGDVRPREPQQGVSSSTQVEPPTSTQADDLSTSSLDQGEEGEQVPPSPINLARPRIHQSTQRDHPTDNILGDINKGVSTRSRIANFCEHYSFVSFLEPLRVEEALNDPDWVMAMQEELNNFTRNEVWTLVERPRQNVIGTKWIFRNKQDEAGVVIRNKARLAQGFTQIEGLDFDETFAPVARLESIRILLAFATNLNFKLYQMDVKSGFLNGPTNELVYVEQPRGFEDPKYPNHVYQLHKALYGLKQAPRAWYECLRNFLVKNGFEIGKADSTLFTKRHDNDIFVCQIYVDDIIFGSTNKSFSEEFSRMMTKRFEMSMMGELKIFLGLQIKQLKEGTFLCQTKYLKDMLKKFGMENAKPIHTPMPSNGHLDLNEQGKDIDQKVYRSIIDSLLYLCASRPDIMLSVCMCARFQAAPKECHLVAVKRILRYLVHTPNLGLWYPKGVRMPPCEQISHKSKRPRDRSPTPSSHDDSDSDWSGGEDAVPQGVRVARGGNLPPRRSTPGGGGDGDGEGSSRQPQTPPHQPNVPIGPLRIHTPERDPAVIRQVYDWRRKSEVVAPCRDEDPRSLCRTVTDPRFWIKSKAHPTVPMQWINWEELQEHNDPVIDSVIANCDLMGIRSFMTLQQNWCNEIIAQFYATVYFDRYRAMHWMTQGSWYSVSYQQLAEIWGFRLRSLLNLDDLHNLQIPVNTELLPLYTPNDPNVVLGKVDGLKPYFAYLNRMFRRSFVPKDGDASSINHLSRTVLLRFDPPPHRFHVYHFVWEEIRMASIQYKKGLVYAPHIMRMIETITQLQFRHDVTHSQLHLRLIKAPRSSAARDIPFSSTQPPPAPERPASVARREPSPLFRILRSLFGLCSAEAKKNRQLRTKKTARDVKFLKARYYEDHHIDMPPSPPGFEAEPDEPEDEEIEDPFAGLPPDFDFFGYGHDYGYPPPPPPEDPPQAPFA

SEQ ID NO: 126408 - protein, 105 aa, Oryza sativa
  Clone ID: PAT_MRT4530_28958C.1.pep
TVLAILAEPPSNPLRRAATAPTPRRGPGIKQESPPSPCFTSIHVVGLERERVREKNGSPLPRTRPSSVAILRRQAATARGQTPGRKLAAGFNTRGFLYRFRPLAF

SEQ ID NO: 126409 - protein, 333 aa, Oryza sativa
  unsure (1)..(333): unsure at all Xaa locations
  Clone ID: PAT_MRT4530_28959C.1.pep
MAMQEELNNFTRNEVWTLVERPRQNVIGMKWIFRNKQDEAGVVIRNKASNLNFKLYQMDVKSAFLNGPINELVYVEQPPGFEDPNYPNHVYKLHKALYGLKQAPRACEEFSRMMTIRFEMSMMGELKFFLDLQIKQLKEGTFICQTKYLKDMLKKFGMENAKPIHTPMPSNGHLDLNEQGKDVDQKVYRSIIGSLLYLCASRPDIMLSVCMCARFQAAPKECHLVAVKRILRYLVHTPNHGLWYPKGARLDLIGYTDADYAGCKVDSKSISGTCQFLGRSVVSWSSKKQNSVALSTTEAEYVSAGXSCCAQLLWVKQTLRDYGLNVSKIPLLC

SEQ ID NO: 126410 - protein, 1184 aa, Oryza sativa
  Clone ID: PAT_MRT4530_2895C.1.pep
MPINGGVTNRPCRRGHQSAATEAGRRLSFPLTDLDQVREEELEEVVDGKEAKTPKAKAKSATHEIDSIALVDRKLDAIPTWRANCRNMNSAIIKGGNARDLKVDGCGDKGFRQVQALSMRVPNMAWLLLPPFNSIRLLMLVLPLTIPYASGSIPRDGGSSSNGTGDDLSALLAFKARLSDPLGVLAGNWTTKVSMCRWVGVSCSRRRPRVVGLKLWDVPLQGELTPHLGNLSFLRVLNLGGINLTGPIPADLGRLHRLRILRLAHNTMSDTIPSALGNLTKLEILNLYGNHISGHIPAELQNLHSLRQMVLTSNYLSDNQLSGPVPPAIFNMSSLEAILIWKNNLTGPIPTNRSFNLPMLQDIELDTNKFTGLIPSGLASCQNLETISLSENLFSGVVPPWLAKMSRLTLLFLDGNELVGTIPSLLGNLPMLSELDLSDSNLSGHIPVELGTLTKLTYLDLSFNQLNGAFPAFVGNFSELTFLGLGYNQLTGPVPSTFGNIRPLVEIKIGGNHLQGDLSFLSSLCNCRQLQYLLISHNSFTGSLPNYVGNLSTELLGFEGDDNHLTGGLPATLSNLTNLRALNLSYNQLSDSIPASLMKLENLQGLDLTSNGISGPITEEIGTARFVWLYLTDNKLSGSIPDSIGNLTMLQYISLSDNKLSSTIPTSLFYLGIVQLFLSNNNLNGTLPSDLSHIQDMFALDTSDNLLVGQLPNSFGYHQMLAYLNLSHNSFTDSIPNSISHLTSLEVLDLSYNNLSGTIPKYLANFTYLTTLNLSSNNLKGEIPNGGVFSNITLISLMGNAALCGLPRLGFLPCLDKSHSTNGSHYLKFILPAITIAVGALALCLYQMTRKKIKRKLDTTTPTSYRLVSYQEIVRATESFNEDNMLGAGSFGKVYKGHLDDGMVVAVKVLNMQVEQAMRSFDVECQVLRMVQHRNLIRILNICSNTDFRALLLQYMPNGSLETYLHKQGHPPLGFLKRLDIMLDVSMAMEHLHYHHSEVVLHCDLKPSNVLFDEEMTAHVADFGIAKLLLGDDNSAVSASMPGTIGYMAPEYAFMGKASRKSDVFSYGIMLLEVFTGKRPTDAMFVGDMSLRKWVSEAFPARLADIVDGRLLQAETLIEQGVRQNNATSLPRSATWPNEGLLLPIFELGLMCCSSSPAERMGISDVVVKLKSIRKDYFSFTGAI

SEQ ID NO: 126411 - protein, 1036 aa, Oryza sativa
  Clone ID: PAT_MRT4530_28960C.1.pep
MAMQEELNNFTRNEVWTLVERPRQNVIGMKWIFRNKQDEAGVVIRNKASNLNFKLYQMDVKSAFLNGPINELVYVEQPPGFEDPNYPNHVYKLHKALYGLKQAPRACEEFSRMMTKRFEMSMMGELKFFLDLQIKQLKEGTFICQTKYLKDMLKKFGMENAKPIHTPMPSNGHLDLNEQGKDVDQKVYRSIIGSLLYLCASRPDIMLSVCMCARFQAAPKECHLVAVKRILRYLVHTPNHGLWYPKGARLDLIGYTDADYAGCKVDSKSISGTCQFLGRMPPRKQTSHKSKHQRDRSPTPSSHDDLDSDWSGREDAVPQVARVAWADTLPPRRSTQALGGGGDGEGSSHQPQTPPHQPNVPTGPFRIHTPKRDPAVIRQVYDWKRKTEEELQAHDDPVLNFVIANCELMGIRSFVTLQQNWCSEVIAQLYATVFFDPYCAMHWMTQGSYYYVSCPRFVEIWGFDVCSLLNLPDMHDLPIPANTNLLPLYTPNDPNVVLGKVDGLKPYFACLNRMFCRSFVPKDDSLKITLGGNEFSVAFSRAWFALTGSLLEIESAEEVRAVPPHESPEALLENEVPDFIKEEAEPSETLELPIMELPPRPPFELKPLPEGLRYAFLHNDREAPIIISDKLSEDETQRLLSMLEKHRVVLGYSLQDLRGINPALCTHRIPIDLESTPSREPQQRLNNAIREVVKKEVLKLLHAGIIYPIPYSIIKFPSIRRTKDLRSLSANARPLTNLLAKDGPIEFDDACLKYFEILKKALISAPIIQPPDWTLPFEIMCDTSDFTVGAVLGQTKDKKHHAICYASKTLTRAQLNYATTEKELLAIVFAIDKFRSYLMGLNYMVSKYIPPGENQRKLKYDSRRNIWDEPYLYRVCSVGLLRRCVPTEQGLKIIERCHASPYGGHYGAFRTQAKIWQCGFFWPTMYEDSKEFVRRCPSCQRQGGITARDAMPLTYNLQVEIFDVWGIDLFLSHVTASCKFILVAVDYVSKWVEAMLCSAADAKHTKKMLIEIIFPRFGTPRMVISDGGSHFIDKTF

SEQ ID NO: 126412 - protein, 764 aa, Oryza sativa
  Clone ID: PAT_MRT4530_28961C.1.pep
MPRLPKCASVRRNVKRRSIHDDDDFVTPPSRKKAVRVKFVAPVSRCVPSSITPIIQRFSAEKKELVAEMGFEGLLHMPLITNHRDFSYWLLSRVSPTRSAIELESGEVLPLSPEDVKKVLGIPCVGEELQAPNVEFVSHVKRLIAERMKVASFKDVNKEVLEDVLDKHHRGQMSKAEKESFKTAFLMLVMMKFLAPQSNMDNKCPRYFSALLDPNEIAKFNWSGYVLNEILDAAATVQKKHADGTKCGYITGCSIYLQVHYLDNVDFGGDLNLEHNIFPRIALYDRDTIKERYQLDISERNYYQATQFGKLKLRPKNEVCYKRTCERTSVTDSGGNENVQIESQHAAELIQKAQELKSFWISCIGNLDKATESLVKVTEASKNMPSVTIPISDEVDVSKGYTCTTVNDDAENGIEVNQTPSLGNDVEDVSAAAANCTPMVHTHNLKEESIDLNRTVPHRTYTGLDFDPPSFDLNIDYSPSNNTGYFPTRICLLPDFHVSHSKYPYCSFFFPWLVVHADSEARESWSKLSFKVQVDKDEEDYKCVCKLFEHMGILCCHVIKVMTHIGCRSIPDKYILRRWSISAREGSGSNLESFRNDKDAASSRTHRHTLLYHACIDLSKQGDISVDAFHLAMKHITDALDEIKLVAGTNESPMGYTDPPNDEPAGPDQGGEQNEDPAAHQAVQSLPLPPDRRAKRGRPRSTRLKSPVDGGVRKKRICSNCHLKGHYRTGCPTNPENTSKNKVIKVCTKCKLAGHYASTCGVGV

SEQ ID NO: 126413 - protein, 955 aa, Oryza sativa
  Clone ID: PAT_MRT4530_28962C.1.pep
MSSHRKNFRRRTDDAEDAYGDDSSNSKPTATKTQTPPVPKPRSPRRQGASRLSFVEDEDDDDAEEGPLSQRRRPAATVRQARTASPAAATLHRLTPARDRLKSSTAVAAAVPAPKPSNFQSHAGEYTPERLRELQKNARPLPGSLMRAPPPPPPPTAEAPRQRLPGAAASPAPATNTTAAAVEPVVILKGLVKPMSQASIGPRNPSQNEDKDEDESEEEEEEEEGPVIPDRATIEAIRAKRQQLQQPRHAAPDYISLDGGGVLSSREAAGGSSDEDDDETRGRIAMYAEKSDSQRSTKGVFGVINNRGPAASLGVINDGFREVEDEKDDDEDEEERKWEEEQFRKGLGRRVDDASAQRAANGGPAPVQVQPQPSGYSIDPRYQPSFSGVLPGTSIFASGSAEFLSIAQQADVASKALQENIRKLKETHKTTVDALVKTDTHLTEALSEISSLESGLQDAERKFVYMQELRNYISVMCDFLNDKAFYIEELEEHMQKLHENRVTAVSERRAADLADESSVIEAAVNAAVSVLSKGSSSAYLSAASNAAQAAAAAARESSNLPPELDEFGRDINMQKRMDLKRREEDRRRRKIRSESKRLSSEGRSANNEHIEGELSTDESDSESSAYLSSRDELLKTADLVFSDAAEEYSSLRIVKDKFEGWKTQYPLAYRDAHVALSAPSVFTPYVRLELLKWDPLHETTDFFGMEWHKILFDYGEQNSESGTDPNNVDKDLIPVLVEKVALPILHHRIMHCWDILSTQRTKNAVDAINMVISYLPTSSKALHQLLAAVNSRLTEAIADISVPAWGSMVTRTVPGASQYAAHRFGVAIRLLKNVCLWKDIFAKPVLEKLALEELLKGKILPHMKSIILDAHDAIARAERISALLKGVWSSPSQKLQPFIDLVVELGNKLERRHMSGISEEETRGLARRLKDILVELNEYDKARAILKTFQIREAL

SEQ ID NO: 126414 - protein, 1052 aa, Oryza sativa
  Clone ID: PAT_MRT4530_28963C.1.pep
MSGQTGDGKDGDKGATFPYDYPSTSTSYVSTYSGKAPYFNGTDYAAWKHKMKMHLKSINPSIWRIVEKGYVLQKPEDPTKEDDENEHKNAQAANVILSALSGSEFNRVDDIESAKVIWDTLRNLHEGTDSVRESKVEILKGQFERFVMLDGESPSDMYDHLSKIVNEIKGLGSKDMTDEVVVKKMVRAITLRNSTLVTIIRERPDYKTLTPHDLLGRILAHDMLVQESKEVIQYINQSSTTSIKKEDLALKAKEEEEESRKSKSKEEIDDEEMTLFVKKFGKFMRRSGFFKGSSSKHHSNKLSGRHSARVCYVCKEPGHFIADCPYLKDGSHIKEDKMGEKKDEKKEKHKHSKRERYGQAHLGKIFGSDSESSSSDEEGIATFAVKPSSPPRLFNYSSDEDAPICLMAKEPKVPSSLKSFNVDLVSDEEDDVEDEVMDEELFKSITKESLPHLSELLGRIEDQYATLERQEALLIREKERSHELKGELAKEREKNEALVRLYKQTKESHANLEVTNAQLQERVDGLDKAYLSLEEKFETLKNSVSLPSEASCSKIVPSNEPCARCKDIDIDACATNSTSLSALQKQNEKLMGLLHNGLLKCHMGSKALKEYLGYQRDHFNHEGLGYVPPPKGKVDKSVLIKKPQGLSNFVKAKSILPNGHASHCFFDASYVLRKNASGRVVAKYVGPRGKNVSIKRVLWVPKALVTNMRGPKQEYHSGGRSWVIDSGCTNHMTGEESMFSSLDPNGSSQENIVFGDDGKGKVMGLGKITISNDLSISNVLLSLRVFSRTSFYLVDFSSTKAKHKTCLVAKSDMGWLWHRRLAYVGMRNLHKLLKHDHILGLTNVQFEKDRMCSACQAGKQIGAHHPVKNVMTTTRPLELLHMDLFGPIAYLSIGGNKYGLVIVDDFSRFTWVFFLHDKSETQAIFKKFERRAQNEFDLKIKNIRSDNGKEFKNTCIESFLDEEGIKHEFSAPYSPQQNGVAERKNWTLIEMARTMLDEYKTSDRFWAEAVNTACHAINCLYLHRLLKKTAYELLTGEEEDPSEAIKRLALGD

SEQ ID NO: 126415 - protein, 107 aa, Oryza sativa
  unsure (1)..(107): unsure at all Xaa locations
  Clone ID: PAT_MRT4530_28964C.1.pep
ACFLIANKGFIGVSADELSGRCIGSXGLHPIGLYWIILLFYYIXHQPIAFILLSTXTYSRLLKPYRYRLDQTDWHARISPRFGPALELSRSPRPVYSIFSSTPTQIV

SEQ ID NO: 126416 - protein, 1499 aa, Oryza sativa
  unsure (1)..(1499): unsure at all Xaa locations
  Clone ID: PAT_MRT4530_28965C.1.pep
MSGQAGDGNDGDKGVKIPYDYPPTSTSYVSTYSGKAPYFNGTDYAAWKHKMKMHLKSINPSIWRIVEKVYVLQNPEDPTKEDDENEHKNAQAANAILSALSGSEFNRVDGIESAKMIWDTLRNLHEGTDSVRESKVEILKGQFERFVMLDGLGSKDMTDGVVVKKMVRAITPRNSTLVTIIRERPDYKTLTPHDLLGRILAHDMLMQESNDVIQYINQSSTTSIKKEDLALKAKEEEEENRKSKSKAEIDDEEMALLVKKFGKFMRRSGFFKGGSSKHYSNKSSGKHSARVCYVCKEPGHFIADCSHLKDGSHIKEDKKKGEKKEKHKHSKQEHYGQAHLGMIFGSESESSSSDEGVATFAVKPSSPPRLFDYSSDEDAPICLMAKKPKVPSPPKSFNVDLVSDEEDEVMDDELFKSITKESLPHLSELLGRIEDQYATLERQEVLLIREKERSHELKSELAKEREKNEALQNEKLMRLLHNGLLKCHMGSKALKKYLGYQRDNFNHEGLGKNDSGRVVAKYVGPRGENISIKRVLWVPKALVTNMRGPKQEYVSGGRSWVIDSGCTNHMTGEESMFSTLDPNGTSQDNIVFRDDGKGKASPCWYEESSQASKARXHILGLTNVQFEKDRVCSACQAGKQIGAHHPVKNVMTTSRPLELLHMDLFRPIAYLSIGGNKYGLVIVDDFSRFTWVFFLHDKSETQAIFKKFARRAQNEFDLKIKNIRSDNGKEFKNTCIESFLDEEGIKHEFSAPYSPQQNGVAERKNRTLIEMARTMLDEYKTSDRFWVEAVNTACHAINRLYLHRLLKKTLYELLTGNKPNVSYFRVFGSKCYILNKKARSSKFAPKVDEGFLLGYGSNECAYHVFNKTSGIVEIACDVTFDETNGSQVEQVDSHVLGEEDPSEAIKRLALGDVRPREPQQGASSSTQVEPPTSTQADDPSTSSLDQGEEGEQVPPSPINLACPRIHQSIQRDHPTDNILGDINKGVSTRSRIANFCEHYSFVSSLEPLRVEEALNDPDWVMAMQEELNNFTRNEWIFRNKQDEAEVVIRNKARLVAQGFTQIEGLDFGETFAPVARLESIRILLAFATNLNFKLYQMDVKSAFLNGPINELVYVEQPPGFKDPKYPNHVYKLHKALYGLKQAPRAWYECLRNFLVKNGFEIGKADSTLFTKRHDNDIFVCQIYVDDIIFGSTNKSFSEEFSRMMTKRFEMSMMGELKFFLGLQIKQLKEGTFICQTKYLKDMLKKFGMKNAKPIHTPMPSNGHLDLNEQGKDVDQKVYRSIIGSLLYLCASRPDIMLSVCMCARFQATPKECHLVAVKRILRYLVHTPNLGFWYPKGARFDLIGYADADYAGCKVDRKSTSGTCQFLGRSLVSWSSKKQNSVALSTAEAEYVSAGSCCAQLLWMKQTLRDYGLNVSKIPLLCDNESTIKIANNPVQHSQTKHIDIRHHFLRDHSTKGDIDIQHVRTDKQLADIFTKPLDETRFCELRSELNILDSRNVA

SEQ ID NO: 126417 - protein, 1656 aa, Oryza sativa
  Clone ID: PAT_MRT4530_28966C.1.pep
MSGQTGNGKDGDKGGTFPYDYLSTSISYVSTYSGKAPYFNGTDYAASKHKMKMHLKSINPLIWRIVEKGYVLQNPEEPTKEDDENEHKNAQAANAILSALSGSEFNRVDGIESAKVIWDTLRNLHEGTDSVRESKVEILKGQFERKIVNEIKGLGSKDMTDEVVVKKMVRAITPRNSTLVTIIRERPDYKTLTPHDLLGRILAHNMLEQESKEVIQYINQTSTTSIKKEDLALKAKEEEEESRKSKSKAEIDDEEMALFVKKFGKFMKQSGFFKGSSSKHSSNKSSGRRSARVCYVCKEPGHFITDCPHIKDCLHFKEDKKKLEKKEKHKHSKHDRYGQAHLGMIFGSDSESSSSDEEGVATFAVKPSSPPRLFNYSSDEDAPICLMAKEPKVPSPLKSFNVDLVSDLEEDVEDEVMDDELFKSIAKESIPHLSELLRRIENQYATLERQEELLIREKERSHELKSELAKEREKNEALVRLYKQTKESHANLEVANAQLQERVDDLDKAYLSLEEKFETLKNSVSFPSEASCSKIVPSNEPCVRCKDIDIETCATNSTSLSALQKQNEKLMGLLHNGLLKCHMGSKALKEYLGYQRDNFNHEGLGYVPPPKGRVDKSVMIKKPQCLSNFVKAKCILPNDNASHCFDASYVLRKNASGRVVAKYVGPRGKNISIKRVLWVPKALVTNMRGPKQEYVSGGRSWVIDSGCTNHMTGEESMFSSLDPNGTSQENIIFGDDGKGKASPCWYEESSQTSKARHILGLTNIQFEKDRVCSACQAGKQIGAHHPVKNVMTTTRPLELLHMDLFGPIAYLSIGGNKYGLVIVDDFSCFTWVFFLHDKSETQAIFKKFARRAQNEFDLKIKNIRSDNVKEFKNTCIESFLDEEGIKHEFSAPYSPQQNGVAERKNRTLIEIARTMLDEYKTSDRFWAEAVNTVCHDINRLYLHRLLKKTPYELLTGNKPNVSYFRVFGSKCYILNKKARSSKFAPKVDGGFLLGYGSNECAYRVFNKTSGIVEIAPDVTFDETNGSQVEQVDSHVLGEEEDPREAIKRLALGDVRPREPQQGASSSTQVEPPTSTQANDPSTSSLDQGEEGEQVPPSSINLAHPRIHQSIQRDHPTDNILGDINKGVSTRSHIANFCEHYSFVSSLEPLRVEEALNDPDWVMAMQEELNNFTRNEVWTLVERSRQNVIGTKWIFRNKQDEAGVVIRNKARLVAQGFTQIEGLDFGETFAPVARLESIRILLTFATNLNFKLYQMDVKSAFLNGLINELVYVEQPPGFKDPKYPNHVYKLHKALYELKQAPRAWYECLRNFLVKNGFEIGKADSTLFTKRHDNDIFVCQIYVDDIIFGSTNKSFSEEFSRMMTKRFEMSMMGELKFFLGLQIKQLKEGTFICQTKYLKDMLKKFGMENAKPIHTPMPSNGHLDLNEQGKDVDQKVYRSIIGSLLYLCASRPDIMLSVCMCARFQAAPKECHLVAVKRILRYLVHTPNLGLWYPKGARFDLIGYADADYAGCKVDRKSTSGTCQFLGRSLVSWSSKKQNSVALSTAEAEYISTGSCCAQLIWMKQTLRDYGLNVSKIPLLCDNESAIKIANNPVQHSRTKHIDIRHHFLRDHSTRGDIDIQHVRIDKQLADIFTKPLDEARFCELRSELNILDSRNVA

SEQ ID NO: 126418 - protein, 56 aa, Oryza sativa
  unsure (1)..(56): unsure at all Xaa locations
  Clone ID: PAT_MRT4530_28967C.1.pep
YXXSTLGLELVEHPRVLQTXLXIRXPXXKXQXDTPLYHYLYXQQTRIPSIFIFFKR

SEQ ID NO: 126419 - protein, 1413 aa, Oryza sativa
  Clone ID: PAT_MRT4530_28968C.1.pep
MSPTGPIAYLSIGGNKYGLVIVDDFTWVFFLHDKSETQAIFKKFARRAQNEFDLKIKNIRTDNGKEFKNTCIESFLDEEGIKHEFLAPYSPQQNGVAERKNRTLIEMARTMLDEYKTSDCFWAEAVNTACHAINRLYLHRLLKKTPYELLTGNKPNVSYFRVFGSKCYILNKKARSSKFAPKVDEGFLLGHGSNECAYRVFNNTSGIVEIARDVTFDETNGSQVEQVDSHVLGEEEDPSEAIKRLALGDVRPREPQQGASSSTQVEPPTLTQADNPSTSSLDQGEEGEQVPPSPINLAHPRIHQSIQRDHPTDNILGDINKGVSTHSRIANFCEHYSFVSSIEPLRVEEALNDPDWVMAMQEELNNFTQNEVWTLVERPWQNVIGTKWIFRNKQDEAGVVIRNKARLVAQGFTQIEGLDFGETFAPIARLESIRILLAFATNLNFKLYQMDVKSAFLNGPINELVYVEQPPGFEDPKYPNHVYKLHKALYGLKQAPRAWYECLHNFLVKNGFEIGKADSTLFTKRHDNDIFVCQIYVDDIIFGSTNKSFSEEFSRMMTKRFEMSMMGELKFFLGLQIKQLKEGTFICQTKYLKDMLKKFGMENAKPIHTPMPSNGHLDLNEQGKDVDQKVYRSIIGSLIYLCASKPDIMLSVCMCARFQAAPKECHLVAVKRILRYLVHTPNLGLWYPKGARFDLIGYADADYAGCKVDRKSTSGTCQFLGRSLVSWSSKKQNSVAPSTAEAEYVSTGSCCAQLLWMKQTLRDYGLNVSKIPLLCDNESAIKLANNPIQHSRTKHIDIRHHFLRDHSTRGNIDIQHVRTDKQLADIFTKPLDEARFCELRRWFPSLNSFQITGSPVILLVVLECILMITGQFKNQVYSRRGTMSSRGRSPASKARHAIRRMSESRKDAIDAQAQASDQAAQVANVEHGAPLPPRRSRVSGERSSAPAKKVRRGNPTDSSEPGQGSGSHAPSFEEEIHLEEDIAAQQAAQEEGPFFITAPSRDPNYHRRVIRWNRKWTEVEKERKKDLYKFQQLSTDPRFWNLFQQDYYETVNAPKKGPILMQWVDWKYMEELHDSIIDEVIEACARQNLKELMGLQYPWCKEIFAQFYATLYFEPNKEKIIHWMTDGIIYSVTYAKFAAILGFPTRSRTNRVKIHDEKPMDTNSLHFLYQDVDYELGTIKGLLPFYAYLNKLLRKTLNPKEGDASNVLAYTRNLLYKMKAHPQLFDAFDFIFEEIRLISMMPKRGLGYGPYIMKMIEIVSKKKFHKEVAHTDYQVRPIKVAAVPAGRTTRASSRAGPSATVTKPDSNSSLRFFKSIFNLCKTISVRQAKERRARKKDTRRIKTLLRNTHLPCSPDGSEVEDSGEDVIEDPFAAEASSSRADHGKAPMEEEEEEEEGDYAEESSEEGEDSDKDE

SEQ ID NO: 126420 - protein, 126 aa, Oryza sativa
  unsure (1)..(126): unsure at all Xaa locations
  Clone ID: PAT_MRT4530_28969C.1.pep
ITGRILESLRMDPRKAVDASYDLYEEERDDLLKRLYRRAKAMEGAFNSIVRITCIMTECAMYLFPRIYLPQKACEADWAVNXAPDACYGVHLCDTTGIVVTTGSVFGQVARTWHVRCTILPQEEKI

SEQ ID NO: 126421 - protein, 108 aa, Oryza sativa
  Clone ID: PAT_MRT4530_2896C.1.pep
MLRLLWKNWLQRLGVSPFCICDISRQQRDYQTSSCTMLSMVKENLHHRCSWSSINFVHLVTENTTVTPTECNLQLKSATTNFVADDEISLFMALLLVEKRETRICKVR

SEQ ID NO: 126422 - protein, 1511 aa, Oryza sativa
  Clone ID: PAT_MRT4530_28970C.1.pep
MSGQTGEGKDGDKGATFPYDYPTTSTSYVSTYSGKAPYFNGMDYAAWKHKMKMHLKSINPSIWRIVEKGYVLQNPEDPTKEDDENEHKNAQAANAILSALSGSEFNRVDGIESAKVIWDTLRNLHEGMDSVRESKVEILKGQFERFVMLDGESPSDMYDRLSKIINEIKGLGSKDMTDEVVVKKMVRAITPRNSTLVTIIHERPDYKTLTPHDLLGRILAHDMLVQESKEVIQYINQSSTTSIKKEDLALKAKEEEEENHKSKSKEEIDDEEMALFVKKFGKFMRRSGFFKGNSSKHHSNKSSGRHSARDGSHIKEDKKKDEKKEKYKHSKREHYGQAHLGMIFGSDSKSSSSDEEGVATFAVKPPSPPRLFDYSSDEDAPICLMAKEPKVPSPLKSFNDDLVSDEEDEVEDEVMDDELFKSITKESLPHLSELLGRIEDQYATLERQEALLIREKERSHELKSELAKEREKNEALARLYKQTKESHANLGVANAQFQERVDGLDKAYISLEEKFETLKNSVSLPSEPSCSKILPSNESCVRCKDIDIEACATNSISLSALQKQNEKLMGLLHNGLLKCHMGSKALKEYLGYQRDNFNHEGLWYVPPPKGKVDKSMTIKRPQGLSNFVKAKSILPNDYASHCSFDASYVLRKNASGRVVAKYVGPRGKNVSIKRVLWVPKALVTNMRGPKQEYLSGGRSWVIDSGCTNHMTGEESMFCSLDPNGSLQENIVFGDDGKGKVMGLGKIAIYNDLSISNVLLVKSLNYNLLSVSQLCSMGYNCLFTDVDVTVFRRDDSSIVFKGVLKGKLYLVDFSSTKAKHETCLVAKSDMGWLWHRRLAHVGMRNLHKLLKHDHILGLTNVLFEKDMVCSACQARKQIGAHHPVKNVMTTTRPLEFLHMDLFGPIAYLSIGGNKYGLVIVDDFSRFTWVFFLHDKSETQAIFKKFARRAQNEFDLKIKNIRSDNGKEFKNMCIESFLDEEGIKHEFSAAYSPQQNGVAERKNRTLIEMARTMLDEYKTSDHFWAEAVNTACHAINRLYLHRLLKKTPYELLTGNKPNVSCFRVFGSKCYILNKKARSSKFAPKVDEGFLLGYGSNECAYRVFNKTSGIVEIARDVTFDETNGSQVEQVDSHVLGEEEDPSEAIKRLALGDVRPREPQQGASSSTQVEPSTSTQVDNPSTSSLNQGEEGEQVPPSPINLAHPRIHQSIQRDHPTDNILGDINKGVSTRSRITNFCEHYSFVSSIEPLKVEEALNDPDWVMAMQEELNNFTRNELYQMDVKSAFLNGPINELVYVEQPPGFEDPKYPNHVYKLHKALYGLKQAPRAWYECLRNFLVKNDFENGKADSTLFTKRHDNDIFVCQIYVDDIIFGSTNKSFSEEFSRMMTKRFEMSMMGELKFFLGLQIKQLKEGTFICQTKYLKDMLKKFGMENAKPIHTPMPSNGHLDLNEQGKDVDQKALSDRQGCYGPVVIFVHASASSSVAPVVSRLRPKITGAMWGPPVRSLSTSGCPPPEP

SEQ ID NO: 126423 - protein, 1310 aa, Oryza sativa
  Clone ID: PAT_MRT4530_28971C.1.pep
MSGQTGNGKDGDKGATFPYDYPSTSASYVSTYSGKAPYFNGTDYAAWKHKMKMHLKSINPLIWRIVEKGYVLQNPVEPTKEDDKNEHKNAQAANAILSALSGSDFNRVDGIESAKVIWDTLRSLHEVTDSVSEFKVEILKGQFERFVMLDGESPSDMYDRLSKIVNEIKVLGSKDMTNEVVVKKMVRAITPRNSTLVTIIRERPDYKTLTPHDLLGRILAHDMLEQESKEVIQYINQTSTTSIKKEDLALKAKEEEEESRKSKSKSKAEIDDEEMALFVKKFDKFMKQSGFFKESSSKYSSNKSSGRHSARVCYVCKEPEHFIDDCPHIKDCPHFKEDKKKLEKNEKHKHSKHDRYGQAHLGVIFGSDFESSSSDEEGVATFAVKPSSPPRLFNYSSDEDAPICLMAKEPKVPSPLKSFNVDLVSDEEEDVEDEVMDDELFKSIAKESIPHLSELLGRIENQYANLERQEELLIREKERSHELKSELAKEREKNEALVRLYKQTKESHTNLEVANAQLQERVDGLDKAYLSLEEKFETLKNSVSLPSEASCSKIVPSNEPCVRCKDIDIEACSTNSTSLSALQKQNEKLMGLLHNGLLKCHMGSKALKEYLGYQRDNFNHEGLGYVSPPKGKVDKSVMIKNPQGLSNFVKAKCILPNDYASHCSFDTSYVLRKNANGRAVAKRDDSSVVFKGVLEGKLYLVDFFSTKAKHETCLVAKSNMRWLWHRRLTHVGMRNLHKLLKHDHILGLTNVQFEKDRVCSACQAGKQIGAHHPVKNVMITTRPLELLHMDLFGPIAYLSIGGDKYGLVIVDDFSRFTWVFFLHDKSETQAIFKKFERRAQNEFDLKIKNIRSDNGKEFKNTKCYILNKKARSSKFAPKVDEGFLLGYRSNECAYRVFNKTSGIVEIARDVTFDEINGSQVEQVDSHVLGEGEDPNETIKRVEEALNDPDWGMAMQEELNNFTRNEVWTLVERPRQNVIGTKWIFRNKQDEARVVIRNKAKLVAQGFTQIDGLDFGETFAPVARLESIRILLAFATNLNFKLFQIDVKSVFLNGPINELVYVEQPLGFEDPKYPINVYKLHKALYGLKQAPRAWYECLHNFLVKNGFEIGKADSTLFTKRYDNDIFVCQIYVDDIIFGSTNKSFNEEFSRMMTKRFEMSMMGELKFFLGLQIKQLKEGTFICQTKYLKDMLKKFGMENAKPIHTPMPSNGHLDLNEQGKDVDQKVYRSIIGSLLYLCASRPDIMLSVCMCARFQAALKECHLVAMKRILRYVHTPNLGLWYPKGASFDLIGYADADYAGCKVDRKSTLGTC

SEQ ID NO: 126424 - protein, 632 aa, Oryza sativa
  Clone ID: PAT_MRT4530_28972C.1.pep
MAQFPLMSKSRKIHRMVMEHEAEQPAGQRRRRRRRRRGSEGSNAGEEGDEQTEIEEAEEEEEDEEEEEEGQAFCIAFPDFPGGPGTFETAAKFCYGVRVELTAWNVAPLRCAAEYLEMTEEHAEDNLAARAEAFLEQAVLRHPGEATKALKSCEELLPHAEELGIVGRCVEAIAARSSAASRSWFDDLAVLGLHMYKRVMAAMAARADVRTEARESCLVSYARGTIPGLSRSMRRRLASAPVSSEVEQRDLLEAVVASLPADKCSGRVVTAKFLFALLRTAHILRASDAACAALERKAATQLEHATLEDVLIPSYSGATETLYDVDCVERVVRHFLAEEEDHGEAEASTSAAAAITEEAPAPAATTLSRPSAVAMVHVGKLVDSYLAEIASDANLKPAKFCELALALPDHARVYDDGVYRAVDIYLKAHPRLAAEERDRVCGVVDCRKLTVEACTHAAQNERLPLRAVLQVLFFEQLQLRRAITGTLLSSAGAGATQTRLHLHRYQQPRPAAMAARHSADAGGGRGEAAWRSTATQDSQVLRLDMDSMRNRVQDLERECSSMRRAIKKIDGRSAAASPRHSDAGDDDAASADGSSRPANWRSRYGCKFSTQVCDSHARNVVASRASRMGMSP

SEQ ID NO: 126425 - protein, 365 aa, Oryza sativa
  Clone ID: PAT_MRT4530_28973C.1.pep
MTGPATRQQTAVPWSRVKMSASASPEAAPKIVPARAPLISRYGHRTDKLHREDDGLSRTSPTAAACAVWAQRRRRRLGCAPTAHAIAACAVQVLGSYLGTLVRKPHLAPLNILKWNDKLYKRIYHPKLISEVQRKFAIHGRAKDWLLHQLDGKWRQYKSNLKKKYYKANLPMERVLQTVPQTVNESQWPTLVSYWYSEDSKKISDQNQENAQNIKHPHTLGRKSFARKRKELEHDGVEVDRATFFDECHKTKDGRYVNDATQDKMNEVYMKLAEKRVDGQELSEADFEQAMLEVFGKDHNGRVRGMGPTITPTDYYGGRFSNMSGRSEQGSSSSNVNGFISFMVSYLAEKYPEDNLMSRLPPSLC

SEQ ID NO: 126426 - protein, 810 aa, Oryza sativa
  unsure (1)..(810): unsure at all Xaa locations
  Clone ID: PAT_MRT4530_28974C.1.pep
YYPYYLSDNTKNVLLSCAFIHLEKKEFIKQFSEISSINQRILLSGPAGSEIYQETLIKALAKHFGARLLVVDSLLLPGAPSKDPESQKDAAKSDKSGDKAGSEKLAILHKNRSSLADAMHFRRPAVQPSSVHADIVGTSTLHSASLPKQESSTATSKSYTFREGDRVRYVGPAQQSSLSQRGPSYGYRGRVMLAFEENGSSKIGVRFDKQIPDGNDLGGLCEEDHGFFCSADLLRPDFSGGEEVERLAMAELIEVISEEHKAGPMIVLLKDVEKSFTGITESLSSLRNKLEALPSGVLIIGSHTQMDSRKEKAHPGGFLFTKFASSSQTLFDLFPDSFGSRLHERNKESPKAMKHLNKLFPNKISIQLPQDETLLTDWKQQLDRDVETLKAKSNVGSIRTFLSRNGIECSDLEELFIKDQSLTNENVDKIVGYAVSYHLKHNKVEISKDGKLVLASESLKHGLNMLQNMQSDNKSSKKSLKDVVTENEFEKRLLADVIPPNDIGVTFDDIGALENVKDXLKELVMLPLQRPELCCKGQLTKPCKGILLFGPPGTGKTMLAKAVATEAGANFINISMSSITSKWFGEGEKYVKAVFSLASKIAPSVIFIDEVDSMLGRRENPGEHEAMRKMKNEFMVNWDGLRTKDKERVLVLGATNRPFDLDEAVIRRFPRRLMVNLPDASNREKILKVILAKEELAPGIDMDSLATMTDGYSGSDLKNLCVTAAHYPIREILEKEKKEKNVAKAEGRPEPALYGSEDIRPLTLDDFKSAHEQVCASVSSDSANMNELLQWNDLYGEGGSRKKKALSYFM

SEQ ID NO: 126427 - protein, 55 aa, Oryza sativa
  Clone ID: PAT_MRT4530_28975C.1.pep
SARSSRMGAAVVVDGVEAAGWTSPPPDLAARTVWRWWPRWCGGSGGFTGDIGRDD

SEQ ID NO: 126428 - protein, 89 aa, Oryza sativa
  Clone ID: PAT_MRT4530_28976C.1.pep
RLNLFFSRGARLTFPSLKDLRFVHIVISEFTLHYSFSLSRGVHSFQIGAIYARLCISLPELEHLMLSLNCDCQNGEQQLENLTIQWFSR

SEQ ID NO: 126429 - protein, 65 aa, Oryza sativa
  Clone ID: PAT_MRT4530_28977C.1.pep
MQHEGHTDTSAPPHTALAGGLRAWACGSASFPHSSSLQHEGHASVGHVIATAPLELYASRTWQAR

SEQ ID NO: 126430 - protein, 90 aa, Oryza sativa
  unsure (1)..(90): unsure at all Xaa locations
  Clone ID: PAT_MRT4530_28978C.1.pep
ARTRAFSLYGYNKIVLVTLSIRIHYXQTDNGEYHDLPMELNXSSLLITIGDNQVNALIAPASLLAHNAELDGKLRFITSMTASVKSFTMR

SEQ ID NO: 126431 - protein, 39 aa, Oryza sativa
  Clone ID: PAT_MRT4530_28979C.1.pep
MSIIINFLEKSLIVEGKREKKKVERLTMQVSSLQREPFT

SEQ ID NO: 126432 - protein, 335 aa, Oryza sativa
  unsure (1)..(335): unsure at all Xaa locations
  Clone ID: PAT_MRT4530_2897C.1.pep
MGVHVFTDQLAFAAADWCFRLHGWPIMPPLLGVYDFTTGLPPSPPTGVPAYTASVSSTQAAYVCHGCRLVFPPARWPIMPLLMGVYVFTDRLAFAAADWCLRLHGWPIMPSLLGVYDSTTGLPPSSPTGVSACTLAYYATVDGRLRLHRPXAFAATDWCLRLHGWPIMLSLLGVYDSTTGLPPSPPTGVSVCTAGLLCRRCWASTTPPPACLHRRRLVFPPARWPIMPPLMGVCVFTDRLAFAAADWCLRLHGWPIMLSLLGVYDSTTGLPPSPPTGVSVCTAGLLCRRCWASTSSSTGRLVRRRLVSPPTRLAYYAAVVGHLHLHRRSSRLLLT

SEQ ID NO: 126433 - protein, 181 aa, Oryza sativa
  Clone ID: PAT_MRT4530_28980C.1.pep
MASGQRAVGEGSGGLRPTTHVAGGGGSARGEYFRCKTCSKTFTSFQALGGHRTGHTRMAARQRQEHGAAGAAVVGATNNQRRVVSAHQWHLCAVCGVEFRMGQALGGHMRRHRGEAAAATPPPAAAAASAGAVSSMEPPEMIDLNSPPAVEEAGEGDQRLSVRNRSPICLICSCRVVFSVW

SEQ ID NO: 126434 - protein, 140 aa, Oryza sativa
  unsure (1)..(140): unsure at all Xaa locations
  Clone ID: PAT_MRT4530_28981C.1.pep
IGVNYVQGKNLGFFFYHMYQPDTAFHIFSTKSKLAPGYIGPYKIQARREEVAYQLELLEEFAGIHLVFHVSQLRKCLRKPTNQVPLQELELQPDLKYEEMPERILETDERRPRNRSTTFCXVQWKNHTEDEATWEKRLEL

SEQ ID NO: 126435 - protein, 84 aa, Oryza sativa
  Clone ID: PAT_MRT4530_28982C.1.pep
TLFRPSAHAATLQQFADLYFRLGIWLKLTASIGLLTCHLDYGIYPSVTMVHPVPLPPLAVLLYMSFNSTSGFGKLKHKLRYHHI

SEQ ID NO: 126436 - protein, 100 aa, Oryza sativa
  unsure (1)..(100): unsure at all Xaa locations
  Clone ID: PAT_MRT4530_28983C.1.pep
MLSSNLTAPSMPTVIPLKPPCPLTFSPPPNFKTLNRGLLEFRARQSLLPADEAMMTCILSRRWRNLWKSTSVLLIIDMQRWKSXSSKEFNRFFNHRVQFH

SEQ ID NO: 126437 - protein, 57 aa, Oryza sativa
  Clone ID: PAT_MRT4530_28984C.1.pep
NNKDTPAHFIYYLYLVALLDLTASYVKRIPVTMQLFQPPWCSGHRVAGPFLTYIELC

SEQ ID NO: 126438 - protein, 237 aa, Oryza sativa
  Clone ID: PAT_MRT4530_28985C.1.pep
MEDTHDNQHTPTRSYNIQANIRQDTLPDIDFRDRHGYSPTVSPDTVRRYESAISDIAGHGFEEEDYPVVDYESDLQIDMSTTQSLTPQHSLVFESPLAHWFSHQYAAISHTATSIGVQGIILLAHWFSHQYAAISRTAPSIGVRGIILLAHWFSHQDAAISRTAPSIGVRGIILLAYWFSHQYAAISRTAPSIAISRTAPSIGVREIILLAHWFSHQKILFDIVEYSMSLWFYTEID

SEQ ID NO: 126439 - protein, 148 aa, Oryza sativa
  unsure (1)..(148): unsure at all Xaa locations
  Clone ID: PAT_MRT4530_28986C.1.pep
LQRLRNSYDWSSTGSVAVLVPRLQMIEGHLLTGSQPVDRSNLSYICFXWSSYDYCLWSSYDYCLVLDQRCSVSPTISTLSGRVTTTAWSSTSDVAFLPLFPLXVVELRLLPGSRPWSSYDYCLVLDQRCNDSPTTSISTKLTAGLRGT

SEQ ID NO: 126440 - protein, 53 aa, Oryza sativa
  Clone ID: PAT_MRT4530_28987C.1.pep
IRFRWFKFLNFSKIKIYMLKISTCTVYACFCTVLLILFICFSFRRFRRRAVSV

SEQ ID NO: 126441 - protein, 163 aa, Oryza sativa
  unsure (1)..(163): unsure at all Xaa locations
  Clone ID: PAT_MRT4530_28988C.1.pep
HWPWLDYSRKAISYTATFIGVREXLAHWFSHQYAAISHTATSIGVQGIILLAHWFSHQYAAISRTAPSIGVRGIILLAHWFSHQDAAISRTAPSIGVRGIILLAYWFSHQWSRYDYGSVAVLVPRLQRSLTTTTPSVETYPAVPLRRLDKASEEPKGSSAGDA

SEQ ID NO: 126442 - protein, 141 aa, Oryza sativa
  Clone ID: PAT_MRT4530_28989C.1.pep
MTDSGGVRMEGRRCRGRRRWLAAAMPEVVVARPTAHGHGGRGCRRNSSETEGEAPRATVFRQNRWQAGVEGDAPTPREDGDDDSRCTGEAAQAAGGGGVVATPLVVGEDVAPIISPRNGGDAREEEAAARPLGATARPAHT

SEQ ID NO: 126443 - protein, 76 aa, Oryza sativa
  Clone ID: PAT_MRT4530_2898C.1.pep
MASAPTGGVQIRCRGARIRSPNDGRRRPGSSAARFGAAVVVEASWRRSCGLVGGEACRAGVVEAGNVWLLEASVVR

SEQ ID NO: 126444 - protein, 457 aa, Oryza sativa
  unsure (1)..(457): unsure at all Xaa locations
  Clone ID: PAT_MRT4530_28990C.1.pep
MEDTHDNQHTPTRSHNTQAYIRQDTLPDIDFRDRHGYSPTVSPDTVRRYESAISDLAGHGFEEEGYPVVDYESDLQTAMSTTDFDEMGLRDGFFDNKLLDDFGCEEIHPARIHLSRRDWIIVINYLIRRDRTSSKIQXAVKDNDSISSDKNNFQEQLSTRVGCGRVRSIIKNILDKCGVIAPNLPTKTDDLSHSTGHGWTSREKVVAINQLXHFHWCSRDNSARSLVFAPXVAISRTXNFHWCLRDNSARSLVLAEWSSYDYXWSSTSDVAFLRLXHLEWSSYDYCLVLDQRCSVSPATSTLSGRVTTTVWYSTSDVAFLPLFPLQVVELXLLPGPRPVWSSYDYCLVLDQRCSDSPTTSISTKLIAGTQYRXVFYPEIPYHXRHLVLKPILLSLYALLTRPPRNLRELRLGMLRADKALSDPVETKDHTLRLLDRSRTVAGSRQGIRNEEMVYPPR

SEQ ID NO: 126445 - protein, 114 aa, Oryza sativa
  Clone ID: PAT_MRT4530_28991C.1.pep
FPLCHVESRGGPFVFFGFTTLARRNHPLFLVDGSSVVRALFGTELTSAFGVPPKAMRNLVLAQNQAVILPSWPEKKKKNKWALGDHRAKGGRRITSRRSRGSHGLFIRCRRSRS

SEQ ID NO: 126446 - protein, 127 aa, Oryza sativa
  unsure (1)..(127): unsure at all Xaa locations
  Clone ID: PAT_MRT4530_28992C.1.pep
RHGRAARRASRRAGGWSSRGGKPRPHRNRRRSRPPPRRSPPPSSRPXPSPPPPAPPPPLPTTSSRPPPLPLRATPAAALASRRRLRPPHRGGSPLVPLPPSRRPRAIAVTSTVRSPPSLPPPPPLLK

SEQ ID NO: 126447 - protein, 286 aa, Oryza sativa
  Clone ID: PAT_MRT4530_28993C.1.pep
MAPLPAAGAAGRIILAHGACHGGWCWYKVAALLRAAGHRVDAPDLGAAGQRGLGVGGAPASSFADHARPLLDAVRALPDGERAVLVGHSFGGMSVALAAETFPDKVAAAVFVAAFLPDCANPPSHPIDTVINSYHDDKITLSFPLIFAMNFCHCQYQESDWMDTVIDPSHVPPSILFGPEFLKKKLYQLSSPEDYTLAKSLVRASSLYVDELRRRAAFREDRYGAVRKVYVVVENDMAIVQEHQRWMVANAEVAEVRVMDAGDHMAMLSAPEELAGHLADVANTYI

SEQ ID NO: 126448 - protein, 602 aa, Oryza sativa
  unsure (1)..(602): unsure at all Xaa locations
  Clone ID: PAT_MRT4530_28994C.1.pep
YKKDLLRQPRGRGARTGSTGVGPTRTQADDPSTSSLDQGEEGEQMPPSPINLARPRIHQSIQRDHPTDNILGDINKGVSTRSRIANFCEHYSFVSSLEPLRVEEALNDPDWVMAMQEELNNFTRNEVWTLVERPRQNVIGTKWIFHNKQDEAGVVIRNKARLVAQGFTXIERLNFGDTFAPVARLESIRILLAFATNLNFKLYQMDVKSAFLNGPINELVYVEQPPGFEDPKYPNHVYKLHKALYRLKQAPRAWYECLHNFLVKNGFEIGKADSTLLTKRHDNDIFVXQIYVDDIIFGSTNKSFXSEEFSRMMTKRFEMSMIGELXFFLGLQIKQLKEGTFICQTKYLKDMLKKFGMENAKPIHTPMPSNGHLDLNEQGKDVYQKVYRSIIGSLLYLCASRPDIMLSVCMCARFQAALKKCHLVAVKRILRYLVHTPNLGLWYPKGARFDLIGYADADYAGCKVDRKSTSGTCQFLCRSLVSWSSKKQNSVALSTAEAXCCAQLLWMKQTLRDYGLNVSKIPLLCDNESAIKIANNPVQHSRTKHIDIRHHFLRDHSTRGDIDIQHVRTDKQLADLFTMSLDEARFCELRSELNILDSRNVA

SEQ ID NO: 126449 - protein, 50 aa, Oryza sativa
  Clone ID: PAT_MRT4530_28995C.1.pep
FNFFERAQSSSTPILSGAETVWLSFSSSSRRDGDRAGAVLNRSSLQTQLT

SEQ ID NO: 126450 - protein, 1650 aa, Oryza sativa
  Clone ID: PAT_MRT4530_28996C.1.pep
MSVQTGNDKDGDKRAMFPYDYPSTSTYYVSTYSGKAPYFNGTDYAAWKHKMKMHLKSINPLIWRIVEKGYVLQNPEEPTKEDDENEHKNAQAANAILSALSGSEFNRVNAVIWDTLRNLHEGMVSVRESKVEILKGQFERFVMLDGESPRDMYDRLSKIVNEIKGLGSKDMTDEVVVKKMVRAITPRNSTLVTIIRERPDYKTLTPHDLLGRILAHDMLEQESKEVIQYINQTSTTSIKKEDLALKAKEEEEESHKSKSKAKIDDEEMALKGSSAKPGHFIADCPHIKDCSHFKEDKKKLEKKEKHKHSKHDCYGQAHLGMIFGSDSESSSSDEEGVATFAVKPSSPPRLFNYSSDEDAPICLMAKEPKVPSPLKSFNVDLVSDEEEDVEDEVMDDELFKSIAKESIPHLSELLGRIENQYATLERQEELLIHEKERSHELKSELAKEREKNEALVRLYKQTKESHANLEVANAQLQERVDGLDKAYLSLEEKFETLKNSLSLPSEASCSKIVPSNEPCVRCKDIYIETCATNSTSLSALQKQNEKLMGLLHNGLLKCHMGSKALKEYLGYQRDNFNHESLGYVPPPKGKVDKSVMIKKPQGLSNFVKAKCIIPNDYASHCSFDASYVLRKNASGRVVAKYVGPRDKNISIKRVLWVPKALVTNMRGPKQEYVSGGRSWMIDSGCTNHMTGEESMFSSLDPNATSQENIIFGDDGKGKVIGLVFKGVLKGKLYLVDFSSTKAKHETCLVAKSNTGWLWHRTLAHVGMRNFHKLLKHDHILGLTNVQFEKDRVCSACQAGKQIGAHHPVKNVMTTTRPLELLHMDLFGPIAYLSIGGNKYGLVIVDDFSRFTWVFFLHDKSETQAIFKKFARRAQNEFDLEIKNIRSDNGKEFKNTCIESFLNEEGIKHEFSAPYSPQQNGVAKRKNRTLIEMARTMLDEYKTSDRFWAEAVNTACHAINRLYLHRLLKKTPYELLTGNKPNVSYVRVFGSKCYILNKKARSSKFAPKVDEGFLLGYGSNECAYRVFNKTSGEEEDPSEAIKRSALGDVRPREPQQGASSSTQVEPPTSTQADDLSTSSLDQGEEGEQVPPSPINLAHPRIHQSIQRDHPTDNILGDINKGVSTRSRIANFCKHYLFVSSLEPLRVEEALNDPDWVMAMQEELNNFTRNEVWTLVERPQQNVIDTKWIFRNKQDKAGVVIRNKERLVAQGFTQIEGLDFGETIAPVARLESIRILLAFATNLNFKLYQMDVKSAFLNGPINELVYVEQPPGFEDPKYPNHVYKLHKALYGLKQAPRAWYECLRNFLVKNGFEIGKADSTLFTKRHENDIFVCQIYVDDIIFGSTNNSFSEEFSRMMTKRFEMSMMAELKFFLGLQIKQLKEGTFICQTKYLKDMLKKFGMENAKPIHTPMPSNGHLDLNEQGKDVDQKVYRSIIGSFLYLCASRPDIMLSVCMCARFQAAPKECHLVAVKRILRYLVHTPNLGLWYPKGARFDLIGYADADYAGCKVDRKSISGTCQFFGRSLVSWSSKKKNSVALSTAEAEYVSAGSCCAQLLWMKQTLRDYGLNVSKIPLLCDNESAIKIANNPVQHSRTKHIDIRHHFLRDHSTRGNIDIQHVRTDKQLADIFTKPLDEARFCELRSELNILDSRNVA

SEQ ID NO: 126451 - protein, 733 aa, Oryza sativa
  unsure (1)..(733): unsure at all Xaa locations
  Clone ID: PAT_MRT4530_28997C.1.pep
MSGQAGDGIDGDKGAKIPYDYPPTSTSYNPEDPTKEDDENEHKNAQAANAILSALSGSEFNRVDGIESAKVIWDTLRNLHEGTDSVRESKVEILKGQFERFVMLDGESPSDMYDQLSKIVNEIKGLGSKDMTNDVVVKMMVRAITPRNSTLVIIIRERPDYKTLTPRDFLGRILAHDMLVQESKDVIQYINQSSTASIKKEDLALKAKEEEEENRKSKSKAEIDDEEMALFVKKFGKFMRRSGFFKGGSSKHYSNKSSGRHSARVCYVCKEPGHFIADCPHLKDGSHIKEDKKKGEKKDEKKEKHKHRKREHYGQAHLVMIFGSDSESSSSDEEGVVAFAVKPSSPPRLFDNSSDEDAPICLMAKEPKVPSPLKSFNVDLVSDEEDEAKSILTNDYASHGSFDASYVLRKNASGYVVAKYVGLRGKNISIKREYVSGGRSWVIDSGCPNHMTREESMFSTLDPNGTSQDNIVFGDDEKGKVMGLGKIAISDLSMANVLFGCSQGRALPCGFFLNACQAGKQIGAHHPVKNVMTTTRPLELLHMDLFGPIAYLSIGGNKYGLVIVDDFSRFTDNGKEFKNTCIESFHDEEGIKHEFSAPYSPQQNGVAERKNRTLIEMAKIMLDEYKTSDRFWAEAVNTACHAINRLYLHRLLKKTPYELLTVNEGFLLGYGSNECTYRVFNKTSSIVEXRVMEPQQGASSSTQVEPPTSTQADDPSTSSLNQGWKKLLMIRIG

SEQ ID NO: 126452 - protein, 1278 aa, Oryza sativa
  Clone ID: PAT_MRT4530_28998C.1.pep
MVSWGVFPSRCDGARERDVTLKEYLGYQRDNFNHEGLGKNASGRVVAKYVGPRGKNISIKRVLWVPKALVTNMRGPKQEYVSGGRSWVIDSGCTNHMTGEESMFSSLDPNGTSQDNIVFGDDGKGKVMGLGKIAISNDLSIANVLLVKSLNYNLLSVSQLCSMGYNCLFTDVDVTVYKRNDSSVVFKGVLKGKLYLVDFSSSKAKHETCLVAKSNTGWLWHRRLAHVGMRNLHKLLKHDYILGLTNVQFEKDRVFFLHDKSETQAIFKKFARRAQNEFDLKIKNIRSDNGKEFKNTCIESFLDEEGIKHEFSAPYSPQQNGVAERKNRTVIEMARTMLDEYKTSDRFWAEAVNTACHAINRLYLHRLLKKTPYELLTGNKPNVSYFRVFGSKCYILNKKARSSKFAPKVDEGFLLGYGSNECAYRVFNKTSGIVEIARDVTFDETNGSQVEQVDSHVLGEEEDPSEAIKRVEEALNDPDWVMAMQEELNNFTRNEVWTLVERPRQNMIGTKWIFRNKQDEAGVVIRNKAELYQMDVKSAFLNGPINELVYVEQPPGFEDPKFPNHVYKLHKALYGLKQAPRAWYECLRNFLVKNGFEIGKADSTLFTKRHNNDIFVCQIYVDDIIFGSTNKSFSEEFSRMMTKRFEMSMMGEFKFFLGLQIKQLKEGTFICQTKYLKDMLKKFEMENAKPIHTPMPSNGHLDLNEQGKDVDQKVYRSIIGSLLYLCASRPDIMLSVCMCARFQAAPKECHLVAVKRILRYLVHTPNLGLWYPKGTRFDLIGYADADYAGCKVNRKSTSGTCQFLGCLIASKLLASPSALGIGLPLLPHPLMRTRTVIGPGEKKRRPALRWPMFPGAPLSHLGAPLMGMKGPRGSLVLPLARALLAKLTPLRLLRRGLLAPSCFMLPHAILAELFVTGAKSLTLWLWSGIRILAPCRAPPLMTGSGPLSSKTTMPMQWIDWEALATLDDPDLNAVIGACEMGVRNFMTLQQAWCKEIIAQFYATAYFNGDRDIHWMTQGSWYSISYDQLANLWGFNENWMRYMTHLHNIVIPHNHDLRPLYLPGGKLGTTEGLKPYHIYQNRILRRTLTPKDGDASNINHFSRSMLLRGLPYAPHIMRMIEHVTHLQFVCEEPHTALSLRLPKRGPVPQDIPSTSSQSPFAPECPSSVARREPSPLFRILRTLFGLCSTEAKKNRRLRNLAKKTARDVKYLKARYHEDHHIDIPPSPPGFEAEPDEPEEEEIEDPFVGVPPDYDFFGYGHGYGYPPPPPPEDPPQAPLA

SEQ ID NO: 126453 - protein, 830 aa, Oryza sativa
  Clone ID: PAT_MRT4530_28999C.1.pep
MAAAAALNRLLPLVLIAAVVGRHGASGDGGFPIVFTETKCTPAPTWSRANDSAYRANVRALLGGLPSAAAPTGFASTDRSGGAGRDRAFARGICFGDPPPALSPQYCLRCLSVAAKELADGCPAKRRAAVWTDGCFASFADTSALSPDEAAFHYKIAVGALVEDDESSARFTATLAALAERLAPRAAANASRMLATATVDVPRVVAGSSRTVQVHSLAQCMPDRPAASCARCVQESARELGKCCWNMQSGGVATVIGYNCHLRLDVSVPMTPSVAEPQSIPAPTVSVRTTGGHVRGNVAAVKAAQIVPTQCTDGLRSFGSPHHFTNLSGPLTTGTILLFRTLPNHAAATRAQTLVEFSTSAPPPSPPLKAPKPKSPRFPHAPASKSLDMSEKKRRGGAGAGAASGSASKKPRVSTAASYAESLRSKLRPDASILATLRSLASACSKSKPAGSSSSSSSASKALAAEDDPAASYIVVADQDSASVTSRINRLVLAAARSILSGRGFSFAVPSRAASNQVYLPDLDRIVLVRRESARPFANVATARKATITARVLSLVHAVLRRGIHVTKRDLFYTDVKLFGDQAQSDAVLDDVSCMLGCTRSSLHVVASEKGVVVGRLTFADDGDRIDCTRMGVGGKAIPPNIDRVSGIESDALFILLVEKDAAFMRLAEDRFYNRFPCIILTAKGQPDVATRLFLRRLKVELKLPVLALVDSDPYGLKILSVYMCGSKNMSYDSANLTTPDIKWLGVRPSDLDKYRVPEQCRLPMTDHDIKVGKELLEEDFVKQNEGWVKELETMLRTRQKAEIQALSSFGFQYLTEVYLPLKLQQQDWI

SEQ ID NO: 126454 - protein, 90 aa, Oryza sativa
  unsure (1)..(90): unsure at all Xaa locations
  Clone ID: PAT_MRT4530_2899C.1.pep
TPPPACSPPPPPHSRPLPPAASPAPSTSSAAASDPPRRPPPPAPCSSCQRQERAPPPPASSTCSPRRSPPXSCSSSSSPSWRPPRTVLRR

SEQ ID NO: 126455 - protein, 198 aa, Oryza sativa
  Clone ID: PAT_MRT4530_289C.1.pep
GGDDAFNTFFSETGAGKHVPRAVFVDLEPTVIDEVRTGDYRQLFHPEQLISGKEDAANNFARGHYTIGKEIVDLCLDRIRKLADNCTGLQGFLVFNAVGGGTGSGLGSLLLERLSVDYGKKSKLGFTVYPSPQVSTSVVEPYNSVLSTHSLLEHTDVNEFQTNLVPYPRIHFMLSSYAPVISAEKAYHEQLSVAEITT

SEQ ID NO: 126456 - protein, 46 aa, Oryza sativa
  Clone ID: PAT_MRT4530_28C.1.pep
ISSPDNTSMSFGGLISTSNIVREESTVVTITSDSDLIWTISLRHHS

SEQ ID NO: 126457 - protein, 349 aa, Oryza sativa
  unsure (1)..(349): unsure at all Xaa locations
  Clone ID: PAT_MRT4530_29000C.1.pep
MSDQTGNGKDGEKGATFYYDYPSTSTSYVSTYSGKAPYFNGTDYAAWKHKMKMHLKSINPSIWRIVEKGYVLQKPEDPTNEDDENEHXNAQAANAILSALSGSEFNRVDGIESAKVIRDTLRNFHEGTDSVRESKVEILKGQFERFLMLDGESPSYMYDRLSKIVNEIKGIGSKDMTDEVVVKKMVRAIIPRNSTLVTIIRERPDYKTLTPHDLLGRILAHDMLVQESKEFIQYINQSSTTSIKKEDLALKAKXEEEESRKSKSKAEIDDEEMALFVKKFGKFMKQSVFFKGSSSKYSPNKSSGRHFARVCYVCKESGHFIVDXPHIKDCPHFKEDKKKLEKKEKHKHS

SEQ ID NO: 126458 - protein, 93 aa, Oryza sativa
  Clone ID: PAT_MRT4530_29001C.1.pep
VISRLLRPPNPGGMNTKSWSGLSNSFPILLLIFLAAAASVPQIAMWDEQSEQADPAAHEATGQIVYLDRPAGADPEEFHIRTLAPVLGSEEKV

SEQ ID NO: 126459 - protein, 261 aa, Oryza sativa
  unsure (1)..(261): unsure at all Xaa locations
  Clone ID: PAT_MRT4530_29002C.1.pep
LDSLFNLDDLHNLXIPANTDLLPLYIPNDPNVVLGKVDGLKPYFFYLNRMFRRSFVPKDGDASSINHLSRTVLLRFDPPPHRFHVYHFVWAEIRMASIQYWKGLVYAPHIMRMIETVTQLQFRHDVSHSQLHLRLVKASRSSQAGTSAAGDIPSSSTQPPPACDRPSPVARREPSPLFRILRSLFGLCSAEAKKNRRLRNAAKKTARDVKYLKARYHEDHHIDVPPSPPGFEAEPDEPEEEQLEDPFVGLPPDFDFFGFGH

SEQ ID NO: 126460 - protein, 166 aa, Oryza sativa
  unsure (1)..(166): unsure at all Xaa locations
  Clone ID: PAT_MRT4530_29003C.1.pep
TGDGNDGDKGARFPYDYPSTSTSYVSTYSGKASYFNGTDXAAWKHKMXMHLKTINPFIWRIVEKGYVLQKPEDPTKEDDENEYXALSGSEFNRVNSIESAKVIWDTLRNLHEGTDSVPESKVEILKGQLKRFVMLDSESPSNMYYRLSKDTPVVCGMNSFDWAIQA

SEQ ID NO: 126461 - protein, 85 aa, Oryza sativa
  Clone ID: PAT_MRT4530_29004C.1.pep
PSASGFIAPLTGQGAAVIKRGSAMNIAHSDCVNTGTHSSQLSTEGRKYPGASMGSSSGSTKDAHHYCRTSSPSYVKVFVNAGRVV

SEQ ID NO: 126462 - protein, 161 aa, Oryza sativa
  Clone ID: PAT_MRT4530_29005C.1.pep
MKMIEIMSKKKFHKEVAHTGYHVRPIKAAAVPAGQTTRASSRAGPSATVTKPDSNSSLRFFKSIFNLCKTILAWQAKERRARKKDTRRIKNLLRNAHLPCSPDGSEVEDSGEDVIEDPFAAEASSSRADRGKAPMEEEEEEEEGDYAKESSEEGEDSNEDE

SEQ ID NO: 126463 - protein, 38 aa, Oryza sativa
  Clone ID: PAT_MRT4530_29006C.1.pep
DVGLSDIKSDYPATIGQSDFKSDYPTWGQGQGDLTSPG

SEQ ID NO: 126464 - protein, 508 aa, Oryza sativa
  unsure (1)..(508): unsure at all Xaa locations
  Clone ID: PAT_MRT4530_29007C.1.pep
RMPLRKQTSHKSKRPRDRSSTPSSHDDSDSDWSGGEDAVPQVARVARRSTHAHDGGGDGEGSSRQPQTPPHQPNVPIGPLRIHTPERDPAVIHQVYDWRRKSEVVARRRDEDLRSLRRTATDPRFWTLFQQDFYESVIKSKAHPTVPMQWINWEELQAHNDPVINSVIANCDLMGIRSFMTLQQNWCNEIIAQFYATVYFDRYRAMHWMTQGSWYSVSYQQLAEIWGFRLRSLLNLDDLHNLQIPANTDLLPRYTRNDPNVVLGKVDGLKLYFAYLNRMFRRSFVPNDGDASSMNHLSRTMLLRFDPPPHRFHVYHFVWEEIRMASIQYKKGLVYAPHIMRMIETVTQLQFRHDVTHSQLHLRLLKAPRSSATRDVPSSSTQPPPAPERPASVARREPSPLFRILRSLFGLCSAEAKKNRRLRNSAKKTARDVKFLKARYYEDHHIDIPPSPLGFEAEPDEPEDEEIEDPFAGLPSDFDFFGYGHGYGXPPPRPSLESSAHCPLFLVS

SEQ ID NO: 126465 - protein, 59 aa, Oryza sativa
  Clone ID: PAT_MRT4530_29008C.1.pep
GNFLPNLYVQPFGNDTSGPKSREMLSTSQAIVFNVWVNSSMISLAIPVRGARILWEQEP

SEQ ID NO: 126466 - protein, 112 aa, Oryza sativa
  Clone ID: PAT_MRT4530_29009C.1.pep
MADERRGGGVGRRRRRSGKGGSGAGVDRHLLRKGGDGIDQGRTGAAPASGWASSVGEGRGLRRHQVGRRRLGKGGGGADGGHPMRPMADARPMKSRLARRRRRGKEYRTVFS

SEQ ID NO: 126467 - protein, 50 aa, Oryza sativa
  Clone ID: PAT_MRT4530_2900C.1.pep
VLNAHPCIAMYKSASVLFFTGFFEPFVPCLVSCASFQVISSWEEKDILEL

SEQ ID NO: 126468 - protein, 32 aa, Oryza sativa
  Clone ID: PAT_MRT4530_29010C.1.pep
NMLKVQSVGTRHFLCLTIWLARHRSSRHFKRL

SEQ ID NO: 126469 - protein, 230 aa, Oryza sativa
  Clone ID: PAT_MRT4530_29011C.1.pep
MANEGSDIDEVNYALDGVGEEEEDENAAQEEDDNDMEEDEEEYTFRFKTGMNPLDFVDDNDDSGIQPYQRFVRLEREALADKKRKAPEQCHSEEPPSKMAREGDISGAKIAEIMEAMDYYGMRKRSRKPKKRGRRKGSKNRVDPKLTQMQGDATFHYACGDYDRAKAVLCEVIRLAPNLHESYHTLGLVYTSLQDYKRAMALYLIAAHLDPKESPLWKTIFTWSIEQGYV

SEQ ID NO: 126470 - protein, 144 aa, Oryza sativa
  unsure (1)..(144): unsure at all Xaa locations
  Clone ID: PAT_MRT4530_29012C.1.pep
MARTAAGGVEQGVGCGGAELAAEAGGAAASADCVAGGVERRWRQAIARWLADRWRAGAAGGTVVAAVLCRPNGQGRTGLRPAGGGPPPEPRPVGEGRGRVLSPLEXCDHPRSVPPPACSTPLDPEPPSPRPWGRPTPPPSPPQT

SEQ ID NO: 126471 - protein, 309 aa, Oryza sativa
  Clone ID: PAT_MRT4530_29013C.1.pep
MPGLLEYSAGGLGLLALAALESLPLRPLLLPAAAASHLPRRLGLATPLHLRHLLAGIVSALFLLSALFSARHHLSLPTLAATALFLLYALAPLAPLRAPLPLPLLDLVLAAAFAQELLLFAHRRPSTAAGIENRYFDLFLVPVAVCLVATLLAAHDPEAVPPRLARAAGLALQGTWMVQMGFSFFTSAVAQGCALHAQSRVDYTIKCRTHDDYHRARSAATLQFNGHLALLVLAGAAAYGAAVSRRNQPPSGYRMLSKEVQMEGMPLHSQFTLDSDEEKEDERITNSAMPVANGSGSHHEITVQTSDSK

SEQ ID NO: 126472 - protein, 113 aa, Oryza sativa
  Clone ID: PAT_MRT4530_29014C.1.pep
MYDSPGRFLRVGQVKASRVERPNAANGGVTDAASRVSAKKVKTLHGLTVAIGGPKARKAILSRGLWADFSKAVVVLVANNYRASGGGRVAVKKAGRSIASENPFISPPRLACE

SEQ ID NO: 126473 - protein, 59 aa, Oryza sativa
  unsure (1)..(59): unsure at all Xaa locations
  Clone ID: PAT_MRT4530_29015C.1.pep
IPNFDMKKADDPPYFSPLSFDPCFGGVEDFPRPGFDIFEKPFSFLPSGSXSFGQQNGNS

SEQ ID NO: 126474 - protein, 481 aa, Oryza sativa
  Clone ID: PAT_MRT4530_29016C.1.pep
MCCVSPSPSASATSSRRGQIIAPDSPPSLRSYSDDSPPSTRAPAVHPEVEFEAKPAKRARVVPGGGGGGGGADAAAGDGRDRISDLPDAVLLSILSFLPFRDAGRTAVLSRRWRKLFDESLLDFNACQPFPPEEGRGCEWVIRSITDILAARPDVRIRSFRFVMYGQGFADHLADVDRWFRTLAHRGVRQLDVDMLYTVPAPLLPGSILEFSSLEILRVFNCNFLDLSLPVLRLPVLRTLDLSNVSMSQGFLQAMMSNCPSLECTKLKNITGLDKICVRSRNLVRLFGDFSYLKELVVEDAPNLEELVGIGLPLAAAKVKIVFAPKLRVLGYLGKSVRPLVIYDTVFDVPFSEKGHTIFVAQLLKCFPCLEALHIEPDSRSICRPVDVEEWDTITSVQCIEHSMNKLVFEDFGGEDCQWRFLTFLLGMARALKDIDFHCSESKDWASLKLCETESSSIVQSSTKNKWRCSFVDCGLIRSVV

SEQ ID NO: 126475 - protein, 195 aa, Oryza sativa
  unsure (1)..(195): unsure at all Xaa locations
  Clone ID: PAT_MRT4530_29017C.1.pep
FRAPQIIHKIIHKLFEHHKPFIKSSIIYLALQPPRLFVWLWKIKCVMKIKVFDWLLXLTNXNTRDMLDGRHCTKEDDDLTCALCPGGHRETRIHLFFAFPFSVACWXHLGISWDPTLEFFQMMVLERINFRRKGFLEICFIAMXHILKQRNGLIFQNVPPTFQSWRNLFNNEILLHMCRMKDPMKQIVFNWLQTL

SEQ ID NO: 126476 - protein, 148 aa, Oryza sativa
  Clone ID: PAT_MRT4530_29018C.1.pep
MSCSSSNSSVHGFLWLMLVYAFCAAVQAQQAARTDPAEVAALNTILGRWGLRASPAWNISGEPCSGVAIDETGVDNNPNINPAIKCDCSFNAGTVCHIIRLRVFSLNVVGQIPEELQNLSYLNNLDLRRNYLTGPLPSFIGNFSAMQY

SEQ ID NO: 126477 - protein, 43 aa, Oryza sativa
  Clone ID: PAT_MRT4530_29019C.1.pep
GHIFFLYIKSWSKIFKMRMALLHLECYMSALVNRTRGSLQGFR

SEQ ID NO: 126478 - protein, 268 aa, Oryza sativa
  Clone ID: PAT_MRT4530_2901C.1.pep
MWGYKRFFKRSALETSDYLKDDCLLVNCTVGVVQSHTEGPKIYTIPVPPSNMSQHIGQLLTDGKRTDITFEVDGEVFPAHKVVLAARSPVFRAQLFGPMKDKNMKRITIEDMEASVFKALLHFMYWDELPDIEELTGLNTTWVSTLMAQHLLAAADRYALERLKLLCELKLCEDVAINTVANTLALAEQHHCYQLKTVCLRFVALPENLKAVMQTDGFDYLQQSCPSLLTELLEYVAKVGEHSVSPCLYSNEVLDGGDANGRRVKPRI

SEQ ID NO: 126479 - protein, 136 aa, Oryza sativa
  Clone ID: PAT_MRT4530_29020C.1.pep
MPGAATTAVVGSRRGTQHAEGPATIIAIGTANPANIVPQDEFADYYFGLTKSEHLTELKDKMKRIFNTVDPSFYIVRSMYVKRKCQVNPIIVTTTSHRNKSGQKSGIEKRYNHPYEEIITAHPEIIDCHTLKILNI

SEQ ID NO: 126480 - protein, 36 aa, Oryza sativa
  Clone ID: PAT_MRT4530_29021C.1.pep
MKLITCEVDAEDMNREEKIPSAAGGQAKQFRVVKFC

SEQ ID NO: 126481 - protein, 130 aa, Oryza sativa
  Clone ID: PAT_MRT4530_29022C.1.pep
MTAVHRRVNSANQGRIKRGERGGIDDEEERNRFLVEENEWGGRSRGAAALLFFGWEKNRRRMDLSGRDKFTPYKNLALEIRRVRKKLLSELRALGGVASILSLRSTTFVYVFDLDRGGGDELGLRGLHES

SEQ ID NO: 126482 - protein, 755 aa, Oryza sativa
  unsure (1)..(755): unsure at all Xaa locations
  Clone ID: PAT_MRT4530_29023C.1.pep
MASYGELTISCLTAIAVAGAALLAGGAEAQCLHTCGGIDIPYPFGIGSDGDCALPFYNIDCNNKKPFYRDVEVLSISLQLGQIRVSTPISSSCYNPFSKRMYSSGWGFNLSYTPFMLSDSNKFTVVGCQSLAYISDPTSNYTSGCASSCPGGKVVSATNRTCSRIGCCQITIPRGMEFCKVSFGESMNTSGIYEHTPCSYAAIMDYSNFTFSTSNLTSLLEFNNTYSGRAPVKFDWAIXGGAKSAYMCNCSKGYHGNPYLQGSNGCEGMVRIGSSWGHKGEEACPRRFSRGWGWFFIPCPHSPYPSLMDGDAFPDGEFPVAISTSDPMCFYILMNVNILRVTRAMENATIKTADLIVSVVMHGGQLLLEMMKVEGNAGFTLYGRQEIETATNNFNKANIIGEGGQGTVYRAVLGGIAVAIKMCKEIDENRKMEFVQELVILCRVNHPNIVKLLGCCLQFEAPMLVYEFVQNKTLKELLDLQRSTRFHVTLGTRLRIAAESAGAFAHLHSLSHPILHGDVKPANILLAEGLVAKVSDFGCSTIDESTPAVPKGTPGYIDPDYLLEYQLTAKNDEAMVNGTLQDLLDSDIVDEASMRVIHRVAVLARILKTMLLVENTLPKTTYEVKQILCPLGLEVEAGSGCPPEPVVEEIFWPSPGSGSLGTGHHCYPWTQPKATLHLFDKPVAREEPAWARRERRATPRRRPQWGSTAELCGSQRWVRGAHASDGGARARGDSAGPEGNVGDETDPGVAVGGRA

SEQ ID NO: 126483 - protein, 330 aa, Oryza sativa
  Clone ID: PAT_MRT4530_29024C.1.pep
MANLPPSLSIGAASFAAPSPPPPSPGASSSSSAAAAAAPGAAKDRKMASAEQLVLDLCDPELRENALLDLSKKREIFQDLAPLLWHSYGTIAALLQEIVSIYPSLSPPTLSPGASNRVCNALALLQCVASHSDTRIPFLNAHIPLYLYPFLNTTSKTRPFEYLRLTSLGVIGALVKVDDSEVIGFLLQTEIIPLCLRTMEMGSELSKTVATFIVQKILLDDVGLRYICATAERFFAVASVLSQMVQALADQPSPRLLKHIIRCYLRLSENSRACTALNSCLPNALKDGTLNNFLQDDHVTRRWLQQLLHNMTMAGMGGAPHGGLDHIMGM

SEQ ID NO: 126484 - protein, 211 aa, Oryza sativa
  Clone ID: PAT_MRT4530_29025C.1.pep
MNIKTEKIAVLYGGTSQEREVSLHSGAAVTEALKSLGYNVEGIDTKDIAIEKLKEKGIQRVFNILHGGIGENGVLQGALEQMGIPYTGCGVMASAITLDKFRTKLLWNAVGLPTADMVVVQRGQAIDINQIIAKLSLPVFVKPSSEGSSVGVFKVKTKEELLPAITAALEFDTIVLVEEFLTGAEYSVPVLDGEVLPAVQIIPDGEFYDYH

SEQ ID NO: 126485 - protein, 139 aa, Oryza sativa
  Clone ID: PAT_MRT4530_29026C.1.pep
MSSREQRRLRRYHAICTINLSFSDTTQTTCVSMLVLKKTKAGSRPMKLSNKDWKTIEQRIEKKLSSWKGLMKVKNTFLNLGSWTVNNGPFQGNVLAPVLGSTIKKYRLAKYLPETKEGTYKWQKLCECKLRFISSFMNS

SEQ ID NO: 126486 - protein, 57 aa, Oryza sativa
  Clone ID: PAT_MRT4530_29027C.1.pep
CSGSPGTSQLGAPRKWHALLHLLPGGQPVHLCIKAVQCVAVLLFLVCHQDLYVSPFP

SEQ ID NO: 126487 - protein, 658 aa, Oryza sativa
  unsure (1)..(658): unsure at all Xaa locations
  Clone ID: PAT_MRT4530_29028C.1.pep
VQHGVALASEASPCWYEESSQASKARXHILGLTNVQFEKDRVCSACQAGKQIGAHHPVKNVMTTTRPLVLLHMDLFGPIAYLSIGGNKYGLVIVDDFSRFTWVFFLHDKSETQAIFKKFARRAQNEFDLKIKNIRSDNSKEFKNTCIESFLDEEGIKHEFSAAYSPQQNGVAERKNRTLNEMARTMLDEYKTSDNFWAEAVNTACHTINCLYLHRLLKKTPYELLTGNKPNVSYFRVFGSKCYILNKKARSSKFAPKVDEGFLLGYGSNECAYRVFNKTSSIVEIARDVTFDKINGSQVXPSEAIKRLALGDXEEGEQVPPSPINLARPRIHQSIQRDHPTDNILGDINKGVSTRSRIANFCEHYSFVSSLEPLRVEEALNDPDWVIAMQEELNNFTRNEVWTLVERPRQNVIGTKWIFCNKQDEAGVVIRNKARLVAQGFTQIEGLDFGQTFAPVARLESIRILLAFATNLNFKLYQMDVKSAFLNGPINELVYVEQPPGFEDPKYPNHVYKLHKALYGLKQAPRAWYECLRNFLVKRGFKIGKADSTLFTKRHNNDIFVCQIYVDDIIFGSTNKSFSEEFSRMMTKRFEMSMMGELKFFLGLQIKQLKEGTFICQSKYLKNMLKKFGMENAKPIHTPMPSNGHLDLNEQGKDVDQK

SEQ ID NO: 126488 - protein, 2112 aa, Oryza sativa
  Clone ID: PAT_MRT4530_29029C.1.pep
MKMHLKSINPYIWRIVEKGYVLQNPEDPTKEDDENEHKNAQAANAILSALSGSEFNRVDGIESAKVIWDTLRNLHEGTDSVRESKGQFERFVMLDGESPSDMYDRLSKIVNEIKGLGSKDMTDEVVVKKMRPDYKTLTPHDLLGRILAYDMLVQESKDVIQYINQSSTASIKKEDLALKAKEEEEENRKSKSKAEIDDEEMALFVKKFGKFKRRSGFFKGGSSKHYSNKSSGRHSARVCYVCKEPGHFIADCPHLKDGSHIKEDKKKSEKKDEKKEKHKHSKREHYGQAHLGMIFGFNSESSSSDEEGVATFAVKPSSPPRLFDYSSDEDAPVCLMAKEPKVPSPHKSFNVDLVSDEEDEVEDEVMDDELFKSITKESLPHLSELLGRIEDQYATLKRQETLLIREKERSHKLKSELAKEREKNEALVRLYKQTKESHANLEVANAQLQERVDGLDKAYLTLEEKFETLKNSVSLPSEPSCSKIVPSNEPCVRCKDIDIEACATNSISLSTLQKQNEKLMGLLHNGLLKCHMGSKALKDYLGYQRDNFNHEGLGYIPPPKGKVDKSVMIKRPQGLSNFVKAKSILPNDYASHCSFDASYILRKNTSGRVVAKYVGPRGKNISIKRVLWVPKALVTNMRGPKQEYVSGGRSWVIDSGCTNHMTGEESMFSTLDPNGTSQDNIVFGDDGKGKVMGLGKIAISNDLSIANVLLVKSLNYNLLSVSQLCSMGYNCLFTDVGVTVYRRNDSSVVFEGVLKGKLYLVDFSSSTAKHETCIVAKSNTGWLWHRRLAHVGMRNLHKILKHDHILGLTNVQFEKDRVCSACQAGKQIGAHHPVKNVMTTTRPLELLHMDIFRPIAYLSIGGNKYGLVIVDDFSRFTWVFFLHDKSEIQAIFKKFARRAQNEFDLKIMNIRSDNGKEFKNTCIESFLDEEGIKHEFSAPYSPQQNGVAERKNRTLIKMARTMLDEYKTSDRFWAEAVNTACHAINRLYLHRLLKKIPYELFTGNKPNVSYFHVFGSKCYILNRKARSSKFAPKVDEGFLLGYGSNECAYRVFNKSSGIVEIARDVTFDETNGSQVEQVDSHVLGEEEDPSEAIKRLALGDVRPREPQQGASSSTQVEPPTSTQTDDPSISSLDQGEEGEQVPPSPIKLARPRIHQSIQRDHPTDNILETSTRVEQALNDPDWVMAMQEELNNFTRNEVWTLVERPRQNVIGTKWIFRNKQDEAGVIIRNKVRLVAQGFTQIEGLDFGETFAPVARLESIRILLAFATNLNFKLYQMDVKSAFLNGPINELVYVEEPPGFEDPKYPNHVYKLHEALYGLKQAPRAWYECLRNFLVKNGFEIGKADSTLFTKRHDNDIFVCQIYVDDIIFGSTNKSFSEEFSRMMTKRFEMFMMGELKFFLGLQIKQLKEGTFICQTKYLKDMLKKFGMENAKPIHTPMPSNSHLNLNAQGKDVDQKVYRSIIGSLLYLCASRPDIMLSVCMCARFQAAPKECHLVAVKRILRYLVHTPNLGLWYPKGARFDLIGYADADYAGCKVDRKSTSGFFGLSEKFSDISEKHQNRAQPFWILSDISENFRKYQKISESLYITPWTPFSLLSTLFPHGLTPSSLPTGDPPATTSSPATSRGSPPLQPRGSTFGALLGTYIVDLHRVLLVFFTFLRMPPRKQTSHMSRSPRDRSPTPSSHDDSDSDWTGGEDAIPQGARVARGGNLPPRRSSHGGGGDGEGSSRQPQTPPHQPNVLIGPLRLHTPERDPAVIRQVYDWRRKSEAHNDPVIDSVIANCDLMGIRSFMTLQQNWCNEIIAQFYATVYFDRYRAMHWMTQGSWFSVSYQQLAEIWGFRLRSLLNLDNLHNLQIPANTELLPLYTPNDPNVVLGKVDGLKLYFAYLNWMFRRSFVLKDGDASSINHISRTVLLRFDPPPHRFHVYHFVWEEIRMASIQYKKGLVYAPHIMRMIETVTQLQFRHDVTHSQLHLRLIKAPRSSAARDIPSSSTQPPPAPERPASVARREPSPLFRILRSLFGLCSTEAKKNRRLRNSVKKTARDVKFLKARYYEDHHIDIPPSPPGFEAEPDEPEDEEIEDPFAGLPPDFDFFGYGPGYGYPPPPPPEDPPQAPFA

SEQ ID NO: 126489 - protein, 83 aa, Oryza sativa
  Clone ID: PAT_MRT4530_2902C.1.pep
ELGRSRTEHARGSAVCSILWLLVKPALNLRNLFNVIYLKPLIYLQPTCAGSSPIICILYIILMIYECDMICLKKKKKKKTLVP

SEQ ID NO: 126490 - protein, 921 aa, Oryza sativa
  unsure (1)..(921): unsure at all Xaa locations
  Clone ID: PAT_MRT4530_29030C.1.pep
MIFGSDSESSSSDEEGVATFAVKPSSPPRLFDYSSDEDAPVCLMAKEPKVPSPLKSFNVDLVSDEEDEVEDEIMDDELFKSITKESLPHLSELLGRIEDQYAILERQETLLIREKERSHELKSELVKEREKNEALPRGAPEGGLAGTADGEAARSHPDGRRRRPPARRSGARERGGKGEAKRRSTAHPGSTATTETATEAERGGGAARVDGNGGVPAVGWRNGGVDEVGEDAAEPKEATPRREKDVTLKEYLGYQRDNFNHEGLGYVPPPKGKVDKSVMIKRPQGLSNFVRAKSILPNDCASHCSFDASYVLRKNASGRVVAKVYSACQAGKQIGAHHPVKNVMTTTRPLELLHMDLFGPIAYLSIGGNKYGLVIVDDFLRFTWVFFLHDKSETQAIFKKFARRAQNEFDLKIKNIRSDNGKEFKNTCIESFLDEEGIKHEFSAPYSPQQNGVAERKNRTLIEMARTMLDEYKTSDRFWAEAANTACHAINRLYLHRLLKKTPYELLTGNKPNVSYFRVIGSKCYILNKKARSSKFAPKVDEGFLLGYGSNECAYRVFNKTSGIVEIARDVTFDETNGSQVEQVDSHVLGEEEDPSEAIKRLALGNVRPREPXSSSTQVEPPTSTQADVPSTSSMDQGXEEALNDPDWVMAMQEELNNFTRNEVWTLVERPRQNVIGTKWIFRNKQDEAGVIIRNKARLVAQGFTQIEGLDFGETFAPVARLESIRILLAFATNLNFKLYQMDVKSAFLNGPINELVYVEQPPGFEDPKYPNHVYKLHKALYVLKQAPRAWYECLRNFLVKNGFEIGKADSTLFTKRHDNDIFVCQIYVDDIIFGSTNKSFSEEFSRMMTKRFEMSMMGELKFFLGLQIKQLKEGTFICQTKYLKDMLKKFGMENAKPIHTPMPSNGHLDLNEQGKDVDQK

SEQ ID NO: 126491 - protein, 77 aa, Oryza sativa
  Clone ID: PAT_MRT4530_29031C.1.pep
NMILGQRPRTINRVSLAQTRLLKTRHSFPSKSSFKSLMHHCIYPWGLYLSASNFQYTFSKQRISFFYTQSITFETFP

SEQ ID NO: 126492 - protein, 47 aa, Oryza sativa
  Clone ID: PAT_MRT4530_29032C.1.pep
YKATQRSVIYLHNIFFSTPKLLQLPLIILTTPFLSIIASNTLLSIIS

SEQ ID NO: 126493 - protein, 126 aa, Oryza sativa
  Clone ID: PAT_MRT4530_29033C.1.pep
PTNPRDEYQHWIKDMRHSNSIKDEEGYPAFALVNRVTGEAIKHSQGEGHPVKLVPYNPGYQDESVLWTESRDVGHGFRCIRMVNNIYLNFDALHGDKDHGGVRDGTTVALWKWCEGDNQRWKIVPW

SEQ ID NO: 126494 - protein, 133 aa, Oryza sativa
  Clone ID: PAT_MRT4530_29034C.1.pep
MAPTPYLSLAAWLDRCGCFPFRLWASQRLGQATVRSGQEVFGEMRESHHRRELLACWGRRTHARFGSGGYLGRGGNLWTRYYVGCSLVGFYSVETSNLSGLIRLLSFFFADSKTSAVISEKTMAELSEEADEV

SEQ ID NO: 126495 - protein, 507 aa, Oryza sativa
  Clone ID: PAT_MRT4530_29035C.1.pep
KCLRATIGESDKQTGRGARAEGASGTWQAARLGLGAALAAARRTEREGEAAAWTPDSPLPAGACRRQRRAGRRGAGRRRRRGDGTRRDREPESESAGLVAAVGDELGGVAPPHDLALLLVEAALGGVQGGLQLHDPLLLPLLQQLVQPPLQRPRRHAAVRRALVPAAAAAVLLLFFLLPLLVILFVLLVVVVVFLDHLSAIATFCHVVVVVDDAAPRRAVRHVALRRRLHLESVHGGRSATLLAVRGGDAAALQAAQLHLELRLHPVHHHGGASSAAAAAAGAVGHRVVGDGGAGDGILHGGGAATIGFLRARTGGGGGGGGGVLVLALRLLPDLRHERLHLRAELHHLVQLHGALGQEQHQARAQPKVHRHDLLLLLLLPISPLVERARTPRRVERQIRRPPDDLDPGRAALLRRRQHRLRADTGGGDGAEPPGQQHPAPELLAFSAGAVFASLQDARQHPARRLVFLDAPSCACVLCALRPDGSRRRRRRHGGEARRRRQRQRLH

SEQ ID NO: 126496 - protein, 75 aa, Oryza sativa
  Clone ID: PAT_MRT4530_29036C.1.pep
VPELNQNGVLFILCGVEVNELLPNGFHGLSAKSSKMTILSILSNSVTCFFLCLKADVVILKILSSHLLWHWIAKP

SEQ ID NO: 126497 - protein, 142 aa, Oryza sativa
  Clone ID: PAT_MRT4530_29037C.1.pep
MALRWPVRGGAASRGRLAAAARGRRGVAWRSGAPAVGREATMLARCGWPAPAPQAFNDAMVGGAAAKLMCGVGDRRCLSYFSPFHFFVLFLRPDKNQMKTGERRKRWKKKEIDGKDDGSGMVLNLQNSSGTATNRRIVMTFF

SEQ ID NO: 126498 - protein, 215 aa, Oryza sativa
  Clone ID: PAT_MRT4530_29038C.1.pep
MTVELEKIAGSFFISKGWKTFVHRTGLLSGQYIRFQVLTPSKINVLLFDKKKDSKLPMIPSSKKQIKTAPKRSTGITINDMPTSKHASMLISHTSNKETSSDSRTESMTDIPSSSDNSAVTPDIKNYISIIGQFLQRSSKFYIVTMNNTFMKQDRLVEAAGSDSVTMLLHKSSDDRCNLKRGWATFAATNAIHLHSVCIFHFYKAPNVKITIDVL

SEQ ID NO: 126499 - protein, 76 aa, Oryza sativa
  unsure (1)..(76): unsure at all Xaa locations
  Clone ID: PAT_MRT4530_29039C.1.pep
ADPAPPWPPPPLPSSPPPSSPPTXPPPXPPPPPPXPPPTPTLPPRAXSSPXSSTPSSARSRGRAPGRSSSTAAPSP

SEQ ID NO: 126500 - protein, 109 aa, Oryza sativa
  Clone ID: PAT_MRT4530_2903C.1.pep
GKNISATKSSRIVYNSATAIKKKKENRKNRKTEHKSKRTRSNRYISLHFTIPIELQSYRRLQIDKADLSTKLNFHRNILRRYFHRQNLAPSPPLPCHLSALYGHRLRSS

SEQ ID NO: 126501 - protein, 44 aa, Oryza sativa
  Clone ID: PAT_MRT4530_29040C.1.pep
RRRCQTGNQKRAAHGKSNHKFTIHSSPRRGAKPKTRRDESRHHA

SEQ ID NO: 126502 - protein, 44 aa, Oryza sativa
  Clone ID: PAT_MRT4530_29041C.1.pep
ARPEGSIAEAYVANEIYMKDLQTAGSHDVEGNLAKEFPGWFRKH

SEQ ID NO: 126503 - protein, 84 aa, Oryza sativa
  Clone ID: PAT_MRT4530_29042C.1.pep
SASFFLGGRGGLFKGTGGYTIVLLAAVLLQALLPASAAEGLVRNALKKRPNEENRRVDARIFGEERAPRLGLRSANSLWRGRGE

SEQ ID NO: 126504 - protein, 89 aa, Oryza sativa
  unsure (1)..(89): unsure at all Xaa locations
  Clone ID: PAT_MRT4530_29043C.1.pep
DAWADAWAXRVYRLALKGGGGTVVAVKRLWKGDAARVMAAEMAILGKIRHRNILKLHACLSRGELNFIVYEYMPRGNLYQALRREAKGR

SEQ ID NO: 126505 - protein, 812 aa, Oryza sativa
  Clone ID: PAT_MRT4530_29044C.1.pep
MHGKLGGSRIVGGCEAFQEAFTNNRNMFEVQEFQRNGDSYEETFRYIFEGDEQEEQAFQNDGNLFKEQSVQNNGNSMEVQICENNGNSCEEQIFQNNRNYFQGEASQNDGNSIKEQSGYGNSCEEKTFQSNRNYFQGQAFQNDGNSFKEQSVQNNGNSIEEQICENNGNSCEVQIFQNNKDYFQGQASQNTEKSFIEQAFQNNGNSFEQTFQWFSETNKQEEHEFENNGSPFEEYVFPNMSSWFQKHVSLNCENLYEEKSFQNSENPFEELVLLNKKDLLEELESQNNNNLSEEKTLQNIKHSMSRDDPNVKAILSRSGGLPQRRIDCLPFLPTPESRRRRPERAAAHEDRTARRRSRCPLRRISCACDDRGCLPASPAFDFDDRRSSDHLADLVLVSVKDSKSRCLLLDQLDWDRNKTLFDSLDLLRLRSLTVFGPWESFFISNKMGVLRVLDLEDACDVTDVDVENIGKVLHRLKFLSLRGHKITYLPDSFGGLRHLQTLDIRCTSIINLPTSITKLKKLHDATAVSRLFELRETWTSRHRGQQPAVAGTCNGGIVVPRGIRKMTTLHTLGVIDVSVAKKGRAILEELKNLTQLRKLGVSGISRRNCREFCSAISENLKSLKLYGYADDKLPEWITLLRKLSKLNLQMAMLPSGDLGRLEAATSGGDATAISSSPPPPTTTRRRWARSGRAGPRLARIRRQRASSCPDPTATLGEECRGDLGRRERLAVEAAEGGGGSEASSGGSGVGGGSESGDGRRGRERGWAAAAGVGASGGAGSGDGRRWEREQVAAGAASELGKNPRAEAITDTA

SEQ ID NO: 126506 - protein, 162 aa, Oryza sativa
  Clone ID: PAT_MRT4530_29045C.1.pep
MLLRSPARSSPHLRSLLRARGFISSASPSAATAAEGDDGKIVASVLFERLPVVIPKIHPVVYAFQEFSFRWRQQYRRKYPDDVLGKADARGKGDYQIDYVPAPRITDADKTNDRKSLQRALDNRLYLLLYGKAYGAPDDKPVWHFPEKVMDNEDTLRLCAES

SEQ ID NO: 126507 - protein, 94 aa, Oryza sativa
  Clone ID: PAT_MRT4530_29046C.1.pep
DDARFTSQLEWKQQLVNELESTSHKQKHISSRGELVKETIIGSQEKMIRLLNEHIQNLQQQLLQCRVNNRTANSSGSSLTSYIGEIQRQQMMDD

SEQ ID NO: 126508 - protein, 355 aa, Oryza sativa
  Clone ID: PAT_MRT4530_29047C.1.pep
MWESVALTLAGAAGNNVGKVLQKKGTHILPPLSFKLKVIRAYALNRLWISGFLMDMCGAALMLTALSQAPVSVVQPIAGCGLAILCVFSHFYLKESMNGLDWVAITLAGLGTIGVGVGGEEQKVDKIPLFNIPWLVLSIVILFVDVNHMASFIIIKESVNHRTKLFWEHFPLTPKFFSTLGFISTKGKGVNKSWISSVISKTGFVMSEMGFPKIVVPAAISCSVGCSAVGFVYQTRGLKHGRAIVVSTCTSVASIVSGVVAGMIALDEHLPTAPTGRFFLLLGWFFIITGVILLVSSTRIIARLPRSMQKFLKSNVERTHSIRRPSSARGKDPIPSTTIHASTLHLLTSPSKEKA

SEQ ID NO: 126509 - protein, 209 aa, Oryza sativa
  Clone ID: PAT_MRT4530_29048C.1.pep
MAMQLSLPVLPTGFRFHPTDEELVINYLQRRATGLSCPIPIIADVEIYNFNPWELPSMALFGEHEWYFFTLRDHRYPNSVRPSRSAASGFWKATGTDKPVQVANMQSTPVAMKKALVFYVGRPPMETKTTWIMHEYRLTNTGGSTASHPSLSSSTAHPSVKLDEWVLCKIFNKSPEPDNTAPPSNVVSRLQCSPPLPPPAAPPGHFNLI

SEQ ID NO: 126510 - protein, 78 aa, Oryza sativa
  unsure (1)..(78): unsure at all Xaa locations
  Clone ID: PAT_MRT4530_29049C.1.pep
RKREPAAXGGCGASRSRHRRPRXHRPRHRSPPGPXSYPXPHHLAPPSLFAVSXLXXVTILHLRRPARSPLSXDAVPTR

SEQ ID NO: 126511 - protein, 134 aa, Oryza sativa
  Clone ID: PAT_MRT4530_2904C.1.pep
MAAAAASSSTPAAVREMQRDLESQANALSKIQKDISKNHQVRKQYTIQVGENELVLKELELVNDEANVYKLIGPVLVKQDLAEAKANVKKRIEYISAELKRMDRALKDLEEKQNSKKESIFKLQQKMQAVQAKA

SEQ ID NO: 126512 - protein, 80 aa, Oryza sativa
  Clone ID: PAT_MRT4530_29050C.1.pep
DCYIPKISHITPTNLQHRNGVRLTQSSSSCNARGMCLHVLQISITTTTSALLHCQLVKGEPCNPAQPPSASRQQSATAIA

SEQ ID NO: 126513 - protein, 69 aa, Oryza sativa
  Clone ID: PAT_MRT4530_29051C.1.pep
FFFRIIIDTESHYHNILFSKTYIGHTETVVSRQRGHRYSTVANTSREVYIGKRSRAAFSALGQNTRMVP

SEQ ID NO: 126514 - protein, 87 aa, Oryza sativa
  Clone ID: PAT_MRT4530_29052C.1.pep
MGASNLKWLRDMNDGGVSTMRATRDRDDRQSDCTSPSFRRRKNYGKNQGALEERLEDGQCHHGHSSQDGGLIHIKFKSTSDSRSGPH

SEQ ID NO: 126515 - protein, 236 aa, Oryza sativa
  Clone ID: PAT_MRT4530_29053C.1.pep
MESGKGLSLPSLSPTSSSDFPQHTYPKKRQEANCTVALQRSHAPTPPNQAPCRRKKNKALTVLRLSNSKQIYQPKLAPRPSPWNSPRPESESRPVNRRGGAPDKLGGTLAGDQATDNTIVHRVLWLSKRTNHVSDQPTNPTTTSPSGNTTGHQPSPLKPRRPAASPATSTTNSASTAPSLATTAFASHRLARLHRPAAPQFATQIPLLATATSVGYRLTRRPPPPASCASNSILPH

SEQ ID NO: 126516 - protein, 270 aa, Oryza sativa
  unsure (1)..(270): unsure at all Xaa locations
  Clone ID: PAT_MRT4530_29054C.1.pep
GGLQQDRRGGAIVVTSRGARPRPRPRXRRNRASSAVPPHLALPPTPPYVPSAHLQRSSSYLRFATAPPAGCVVAIAHALAYLEIRRGESVFSLCLRACAFASESAKFRFEEEKGREEKRRALPSLCGVSEQAIGSVPTVQDEDYFTKGVILILSXVSSTSSSQPPASSDRESTPASDNATSPDSDGTNSAGPARSRIALQLDQRSLHFSVTAWVLIVALIGILPLTPRQLQYKGYRLSLLGTTCTTGYALFAFYRVSNMSSVQIFPPCSF

SEQ ID NO: 126517 - protein, 169 aa, Oryza sativa
  Clone ID: PAT_MRT4530_29055C.1.pep
SLLLLFLLVLLLFLSPLSSWRQRAAAGVEGRRRQAPAGAEAGGGSPLRWQRRLPPPEGPVGGGGPSEGPPVGVLFLGPRRPPVCVVTRGPPRGKKISPPAKAPWCPPEEVPGLGPPPPAPSRAPPPRPLEWPGRPPPFCFFLPPRVYRMVFFRRRLWCGRCRRSREALV

SEQ ID NO: 126518 - protein, 145 aa, Oryza sativa
  unsure (1)..(145): unsure at all Xaa locations
  Clone ID: PAT_MRT4530_29056C.1.pep
MEFDRGGGGTEDGDVAGTGPRGGADHHTTGLLQQDACARRRANHPRHPGPHHPAXRHRTYHHRNHRRDNHPRQPGSNHRGASSPPVKGLVAGAIVHRRRSDSPPRLPAPPPTRPSAPMLPGRRVRGEREEDKSEDEEEEREGRGL

SEQ ID NO: 126519 - protein, 64 aa, Oryza sativa
  Clone ID: PAT_MRT4530_29057C.1.pep
MGDEVVTFARCWVFEAAERRAVPFVVFTPLAKPLTAALSSKRGDGISDELIACIYHMTTTFYTF

SEQ ID NO: 126520 - protein, 109 aa, Oryza sativa
  Clone ID: PAT_MRT4530_29058C.1.pep
GKKKHYLIKSEWEQNFLKKGHWETNGTKALGKKNARLGGTQTGEKGVQFFRGTKKFNLERKKPPANLNYHIGLREVGKLCKTGRILKPRGLKRPLKLLGQLPSKKNGQR

SEQ ID NO: 126521 - protein, 129 aa, Oryza sativa
  unsure (1)..(129): unsure at all Xaa locations
  Clone ID: PAT_MRT4530_29059C.1.pep
HADRAXXXXXQKXXPXQEEDXXPRSXXRERREPREXRXXXXDXXRKPXXESXEXAXKXTSESQXXXXERQEXXEGXNXKXEQQGPXXXXERQXXXEAXEGEKXXHHXXPETRGXXXPKEQTGSTKXRRP

SEQ ID NO: 126522 - protein, 71 aa, Oryza sativa
  Clone ID: PAT_MRT4530_2905C.1.pep
LQPAESDFFLRPCCVECCLVNSCCHVGVGLHGGLKTRPKMAHILNVTSYKFDLEFCMADEKRVPCSLPRAK

SEQ ID NO: 126523 - protein, 1053 aa, Oryza sativa
  unsure (1)..(1053): unsure at all Xaa locations
  Clone ID: PAT_MRT4530_29060C.1.pep
WVLYVTVSFKCRWGLSGTEIWRIQDFKPVPLPKADYDDLXKGGGAYLFDIHFWIGKDSSQDEAGTAAIKTVELDTMLGGRAVQHRELQGYESDKFLSYFKPCIIPLEGGFASGFKTPEEDKFETRLYICKGKRAIRVKEVPFARSSLNHDDVFILDTEKKIYQFNGANSNIQERAKALEAIQHLKETYHNGVCDVAIVDDGKLQAESDSGEFWVLFGGFAPIGKKAICDDDVVLETTAPKLYSINNGQLKLEDTVLTKSILENNKCFLVDCGSDLFIWVGRLTQVEERKAASAAVEEFIATQNRPKTTRVTRVIQGYENHTFKSKDDVVLETTAPKLYSINNGQLKLEDTVLTKSILENNKCFLVDCGSDLSIWLGRLTQVEERKAASAAVEEFIATQNRPKTTRVTRVIPGYQNHTIKYKFESWPVNSAGSTPAEEGRAIVAAQLIXKGLDIKAASDRSAPVEEEVQLFPLFHRKAILKGGISSGYQKFVEEKGLKDETYSGDGIALFRISGTSIHNNKVLQVDARHDRVDLGLPLGIQCPHPYPYPHYLGRVSSNLSPTDCFVLQSXIQCLVILKGGISSGYQKCVEEKGLKDETYSGDGIALFRISGTSIHNNKVLRVDAVSSNLSPTDCFVLQSGNSMFTWIGNASSYEQQQWAAKVAEFLKPGVAVKHCKEGTESSAFWFALGGKQNYTSRNATHDVVREPHLYTFSLRNGKLEVTEIFNFSQDDLLTEDMMVLDTHGEVFVWMGQCVDAKEKQKAFEIGQKYAEHAAAFESLSPDVPLYKVVEGNEPCFFRTYFSWDNTRSVIHGNSFQKKLSLLFGMRSESGSKSSGDGGPTQRASALAALSSAFNPSSQKNKGNDRPKSSDGGPTQRASAMAALTSAFNPSAKPKSPPQRAGQGSQRAAAVAALSNVLTAEGSSQSPRIGRSSPMAGDADTAELTPSAASPLSEGASEFSADKDAPGDGALSEGGRTEPDVSVEQTANENGGETTFSYDRLISKSTNPVRGIDYKRRETYLSDSEFQTVFGITKEEFYQQPGWKQELQKRKHDLF

SEQ ID NO: 126524 - protein, 787 aa, Oryza sativa
  unsure (1)..(787): unsure at all Xaa locations
  Clone ID: PAT_MRT4530_29061C.1.pep
MSSAKPVLDPAFQGVGQKPGTEIWRIQDFKPVPLPKADYGKFYNGDSYIVLQTTCSKGGGAYLFDIHFWIGKDSSQDEAGTAAIKTVELDTMLGGRAVQHRELQGYESDKFLSYFKPCIIPLEGGFASGFKTPEEDPFRPRLYICKGKRAIRVKEVPFARSSLNHDDVFILDTEKKIYQFNGANSNIQERAKALEAIQHLKETYHNGVCDVAIVDDGKLQAESDSGEFWVLFGGFAPIGKKAICDDDVVLETTAPKLYSINNGQLKLEDTVLTKSILENNKCFLVDCGSDLFIWVGRLTQVEERKAASAAVEEFIATQNRPKTTRVTRVIQGYENHTFKSKFESWPVNGAGSAGAEEGRGKVAALLKQQGVDIKGASKSSAPVDEEVPPLLEGDGKLEVYCVNGSAKTALPKEELGKFYSGDCYIVLYTYHSGDKREEFYLTYWIGKDRIPEDQEMAFQTANSNXNSLKGRPILGXVFIEGKEPPQFIALFQPMVIPKGGISSGYQKFVEEKGLEDETYSGDGIALFRISGTSIHSNKVLQVGAVSSNLGPTDCFVLQSGNSMLTWIGNASSYEQQQWAAKVAEFLKPGVAVKQSFEADASSAFWFAXGGKQNYTSRNATHDVVREPHLYTFSLRNGKLEVTEIFNFSQDDLLTEDMMVLDTHGEVFVWMGQCVDAKEKQKAFEIGQKYAEHAAAFESLSPDVPLYKVVEGNEPCFFRTYFSWDNTRSVIHGNSFQKKLSLLFGMRSESGSKSSGDGGPTQRASALAALSSAFNPSFQKNKVMIGLK

SEQ ID NO: 126525 - protein, 96 aa, Oryza sativa
  Clone ID: PAT_MRT4530_29062C.1.pep
FVTSNPNNTLFSKVLKKGDVFVFPVGLIHFQFNPNPHQPAVAIAALSSQNPGAITIANAVFGSKPPISDEVLAKAFQVEKGTIDWLQAQFWENNHY

SEQ ID NO: 126526 - protein, 50 aa, Oryza sativa
  Clone ID: PAT_MRT4530_29063C.1.pep
ARAAPLLLLVASLAGFWALKKANGFSSVLLVRALYNQHIRRPRIQLITQK

SEQ ID NO: 126527 - protein, 131 aa, Oryza sativa
  Clone ID: PAT_MRT4530_29064C.1.pep
MGGVTVPGGPILRFPFGTMPPDKGVWGPPPGGFPPIRFNGGGGPMAKVLSFPPGPRACVGQNFPMVKAKAVVPPKLRGFRLGPSPGGGPGPPGGIPLPPKRGPPRGVPRVPGWGGTKRFVPPRGGVICVPL

SEQ ID NO: 126528 - protein, 48 aa, Oryza sativa
  Clone ID: PAT_MRT4530_29065C.1.pep
METHELTHGMAEYMSFLPPQMVHQGQSVPRHDHRPVKTMETFTWSDSN

SEQ ID NO: 126529 - protein, 61 aa, Oryza sativa
  Clone ID: PAT_MRT4530_29066C.1.pep
ELDALQGTEKEPNREFLLLQGVRFAFRVHQFAGGFDEESMKAFEELRSKMCTTQTSAPQIS

SEQ ID NO: 126530 - protein, 170 aa, Oryza sativa
  Clone ID: PAT_MRT4530_29067C.1.pep
GTRQRHVLVVSRKDGLDSLADVKKEHLPLLRRMHSAGVKWAQKFLEEDSSLVFRLGYHSVPSMRQLHLHIISQDFNSASLKNKKPWNSFTPTFFLDSVDVIEEIDQRGSATISSDDRVLAMELRCPRCRSAPPNIPKLKSPIASCKSSFPSHLLQKDRLLSSSPMHMDCP

SEQ ID NO: 126531 - protein, 52 aa, Oryza sativa
  unsure (1)..(52): unsure at all Xaa locations
  Clone ID: PAT_MRT4530_29068C.1.pep
EIKKGRLGMMAFVGLCVQQXEYPGTGRLEKVDSLLWEPWDRNIVDIIMQRGI

SEQ ID NO: 126532 - protein, 126 aa, Oryza sativa
  Clone ID: PAT_MRT4530_29069C.1.pep
MQQGDGTEAQVTWEDQQNINRFGRLNNRLHELHDEIKLAKEANENLDDAGNELILSDEDVVRFQIGEVFAHMPRDDVETRLEQMKEDAAKKLERLEQEKESIVSQMAELKKILYGKFKDAINLEED

SEQ ID NO: 126533 - protein, 88 aa, Oryza sativa
  Clone ID: PAT_MRT4530_2906C.1.pep
GGPMLFKPIPKIVEGGFLLTPATARKVDLEFQANLGAGFNALFARPKKKPKKADPPPKKDLVLTVAPPPQQTRASIFSQNPVGGIQVG

SEQ ID NO: 126534 - protein, 387 aa, Oryza sativa
  Clone ID: PAT_MRT4530_29070C.1.pep
MTEMLLNWNKDLTEQVDKNRSTPLHFAASLCKDFAASLSEYTVITWMSRTPLIPVLLANPVQLYQQDSEGLYPIHVAASSGAIRTIKYLIEEQPDEIAGLVDFKGRTFLHVAVERGRRNIVEYAHRTRSLARIFNMQDNDGNTAMHIAVRNGNKYIFCILLRNRKNPEKLILLALTHCNASGGCRRADHFQKKQADEAKESEKLTTSTQTLGIGSVLIVTVTFGAILAIPGGYKADDHYNGGTPTLAGSSVISLGAAFMLGMYLVLAPVARWTAIAICVMMMIASLCLFTEPLHAPRVAIAMYVRKGNQDIQRTYIINCGTPNNMHGNYRQVILVDRILRALGPLTNSSGLPLFPQAVTTTATVTTRRSIAGRDDDGGDSAWICCRP

SEQ ID NO: 126535 - protein, 493 aa, Oryza sativa
  Clone ID: PAT_MRT4530_29071C.1.pep
MDTFPFQWPMDPAASSGLDAGFLPPPAAVAPDDGVGYYDPPAGADVDAAALPEFAAAFPPCAPDAAAAVLAMRREEEEVAGIRLVHLLMSCAGAIEAGDHALASAQLADSHAALAAVSAASGIGRVAVHFTTALSRRLFPSPVAPPTTDAEHAFLYHHFYEACPYLKFAHFTANQAILEAFHGCDHVHVIDFSLMQGLQWPALIQALALRPGGPPFLRITGIGPPSPTGRDELRDVGLRLADLARSVRVRFSFRGVAANSLDEVRPWMLQIAPGEAVAFNSVLQLHRLLGDPADQAPIDAVLDCVASVRPKIFTVIEQEADHNKTGFLDRFTEALFYYSAVFDSLDAASASGGAGNAMAEAYLQREICDIVCGEGAARRERHEPLSRWRDRLTRAGLSAVPLGSNALRQARMLVGLFSGEGHSVEEADGCLTLGWHGRPLFSASAWEAAGDGGGDNNNNSNSNVSGSSGSDSNNSGSSNGKSSGARDGSSVCL

SEQ ID NO: 126536 - protein, 38 aa, Oryza sativa
  Clone ID: PAT_MRT4530_29072C.1.pep
TQAQAQALLALNLPSKCGIYPKYYIAPRSIPPVGGVWD

SEQ ID NO: 126537 - protein, 79 aa, Oryza sativa
  Clone ID: PAT_MRT4530_29073C.1.pep
FGGTISLIIICYPILVAYLCKWLKQFYFYLIALPFKLYYCFRLCDELSCKIFKAYFKVDKLCTNFSIMFAFVRAREYMH

SEQ ID NO: 126538 - protein, 164 aa, Oryza sativa
  Clone ID: PAT_MRT4530_29074C.1.pep
MPWRLAMARQQAEPPTGAAALQRSNSDGGGGMAAGADQEARSVRCECCGMAEECTPRYIGRVRERFHGKWVCGLCSEAVKERQKREPALTVDGAVDAHAALCERFNSTVRLNPKLSLASSMRDIARKSCQHRATATGADVIPSACSGAGAATMARSTSCALPYV

SEQ ID NO: 126539 - protein, 710 aa, Oryza sativa
  Clone ID: PAT_MRT4530_29075C.1.pep
MKISGLLTSAGINIALSVLFISLYSVLRKQPANVRVYFGRRIAEEHNRLREAFILERFVPSTGWIVKALQCTEEEILAAAGLDAVVFNRILVFSLRIFSLAAILCVFGILPLNYFGQDIHHVRIPSESLDIFTIGNVKEYKHIARLRLRHLTCAMPNPSHFTVLVRGIPKETKESCSNAIDDFFTKYHGSSYLFHQVVYKVGKVQKIMLLATGLEQNQGKSDLQDSSLKLDDQVELVISQILALLLECAAAFVYFRTRYAALVASEILQTSNPMKWVTDLAPEPDDVYWSNLWLPYKQLWIRRIATLLGSIVFMLFFLIPVTFIQGLSQLEQLQQRLPFLKGILEKKYMSQLVTGYLPSVILQIFLYAVAPIMILFSTLEGPISHSERKRSACCKVLYFTVWNIFFGNVLSGTVISQLNVLSSPKDIPVQLARAIPVQATFFITYVLTSGWASLSSELMQLFGLIWNFVRKYILRMPEDTEFVPSFPYHTEVPKVLLFGLLGFTCSVLAPLILPFLLVYFFLGYIVYRNQLLNVYRTRYDTGGLYWPIAHNAVIFSLVLTQIICLGVFGLKESPVAAGFTIPLIILTLLFNQYCRNRLLPLFRTTPAQDLIDMDREDERSGRMDEIHHRLHSAYCQFHDTEDIPLEKIQTVGSDEEQGCSSDKSNGKESFEEPRAELSHPTLNGLPVSRLRHAVKSITFLVRLQKRGLSE

SEQ ID NO: 126540 - protein, 99 aa, Oryza sativa
  Clone ID: PAT_MRT4530_29076C.1.pep
MAAFVFLTASGEFEMGESSRGPLLGLDGVGVESQGGRCVWVEKRMGSATPPPATLRRLRQLRVDTARCLSPAPGSGAASLPARAEGRRTASLHVCAEGS

SEQ ID NO: 126541 - protein, 81 aa, Oryza sativa
  Clone ID: PAT_MRT4530_29077C.1.pep
MTITMVDRKTTSFWHSHWLENKDAQDNCIGYLRSLKAKEQNSLQGPFLRPGFVTFNYYKSQRKNGVNRFLRNRDLSTSPRT

SEQ ID NO: 126542 - protein, 86 aa, Oryza sativa
  unsure (1)..(86): unsure at all Xaa locations
  Clone ID: PAT_MRT4530_29078C.1.pep
PSSAPXPQEDXXTXLQKDRQGXXYFFYDTLRSCRDKEYIMKTGHDTLIHKKDFPVKQQIGDQCRFHVCHNMRLLYREKVKTLAEFE

SEQ ID NO: 126543 - protein, 75 aa, Oryza sativa
  Clone ID: PAT_MRT4530_29079C.1.pep
HLHMCKTANELLIRQFICVLPSLKCSRSTASTSPKLTIPVSAPLTSSTTQTYPTLRARTCAMTATSELSAWYAAT

SEQ ID NO: 126544 - protein, 2041 aa, Oryza sativa
  Clone ID: PAT_MRT4530_2907C.1.pep
MGFVSGIDDFAFPPGQAFRFGSLNFITNDFSKISLLDSDSNQSGRDQVPMPFGIPNSAEAYSKIISPESASNHSGEIQSTLPRPDQDDGSYPSILMKLPDNLAAVFTAKTSPTRRSRRAPASAPIQSRSREVGVILQPLGTVSTEELDGYLSSPGVSSRPTEILDYDDFGYHYDHGDLDNFDDSYEDNYTPLFFGVFMADNEMEEQRQAREADQDRARQEAERRRLEEERQRQERERLQREQQDRERIAKEAEDRRQRALESGRRARELIGQQDVDGTAVFRTPQQNAVAAITLLNTLLKEDALNQADHVVNILNQTKTMIAVSVPANSASTRTPTGSRVPHFRSHDYHQPSLSITGTGSSRRSRGHDERSVHSPPERHRERRVERPRSPPHQCPVDLRDTVNQRRATRGHRHSPNRYDDDVDGVAAFINDLRRVLMLEVRDFLLWQKKVAFQAFLISDTLAICSSFAVAFICIIAKWEDLQFLLHYRFITKKLMWFSYMATIRTFATSLCQGYGSENAVATTLDDSMSKNPPVEAENGTSMTSEPEKDLSAAKPCPSDKNHEQTRTTSEMTRSWCPIHKTRKHTLQACWVFLNVQAEIRACKERGIQRTSPTHEVYCPIHKTKNHDLSSCKVFLSAMKTPPPKVQQSRISLRDTDKEQGATLISDRFVGVIDIDPHEPSVLHFLKDYGSSSTSTPRDVFAIDGTSTSARANVKAENQVVTPAQHIGVINAILRETPYDPVLNDDLAQWTERLRESVTNLSNTFEEAAAAAHPEQPPAGDRHPRRTYDRRKPTAPIAGCRAFNRSLPDVRWPERFRPGAIEKYDGSTDPEEFLQVYSTVLYAAGADDNALANYLPTTLKGSVRSWLMHLPPYSISSWANLWQQFVANFQGTYKCHAIEDDLHALTQTPGKSLRDYVRRFNECRNTIPQITDASVIRAFKSGIFDRCAHADDALRRKKDKPKTGGEKEPAKDAPESSKKKNCKSGKRKAQAEVLATKYADPPKRPVPQSSDMKKIWCPIHKSNRHTLEDCLVFKKSLAKHMALEKGKQVHVVEKDAEVATQESDSAYLDSDLHVSHIFGGSTAYSSKREYKKVEREVCSTWQGAAPKMKWSEQKIKFSEEDHPKTAVIPGRYPIVVEPTIRNIKVARVLINGGSSINLLFASTLDAMGIPRSELTPTDQPFHGITPQSSSKPLGKITLPVTFGQANNFRTEQITFDVAEFDTAYNAIIGRTALAKFMAASHYAYQVLKMPGLKGTITIQGNAKLAVQCDKRSLDMVEHTPSPPATAEPPKKLSDMPGVPREVIEHKLMVQPDAKPVKQKLRRFAPDRKQAIREELDKLLKAGFIREVLHPEWLANPVMVRKANGKWRMCVDFTDLNKACPKDHFPLPRIDQLVDSTAGCELLSFLDAYSGYHQISMAKEDEEKTAFITPFGVFYYVKMPFGLITAGNTFQRTVQGALSNQLGNNVEAYVDDIVVKTKTSDSLIDDLRETFDNLRRYRLMLNPEKCTFGVPSGKLLGFLVSGRGIEANPEKIQAIENMKSPTRLKEVQKLTRCMAALCRVTVVSSFPLGEVVRNKDVVGRIAKWVVELSQFDVHFVPRTAIKSQVLADIVADWTIPENRSNSQTNNETWTMAFDSALNSQGAGAGFILTSPSRDQFNHAIHLNFRATNNIAEYEGLLAGIRAAAALGVKRLIVKGDSELVANQVHKDYKCSNPELSKYLAEVRKLEKRFDGIEVRHVYRKVNIEPDDLARCASRREPLEPGTFLDVLTKPLVKDANGEDSPVAPDISSGATEAEHAVADIETTDDWRTPLIKFISSEELPEDDAEAEKITCQAKIYCMIGNDLYKKAPNRILLKCVSFDDGGHLLLDIHEGICGSHAAGRTLVGKAFRQGFFWPTALKDACDMDYCIRLGVKICFASVSHPQSNGQVERANGIVLQGIKTRVYDRLMSHDKKWVEELPLVLWVVRTTPTTSNQETPFFLVYGSEAMLPTKLQHHSTRVQKYFDEDQKEKRNDDVNLLEEHRERVTVRAASYQQALRRYHEKRI

SEQ ID NO: 126545 - protein, 47 aa, Oryza sativa
  Clone ID: PAT_MRT4530_29080C.1.pep
MEKGGHPDSYYQWIMGDPNLTSIQTPPRRTPTNYIIIYVIKLNLSYL

SEQ ID NO: 126546 - protein, 125 aa, Oryza sativa
  Clone ID: PAT_MRT4530_29081C.1.pep
MTGVRPVTDRSLSSTTRQFSKLHVCPSSYNDFLAMVGMKPGIYLTGTDVPSSGAGTPSPARDKCLEALINPTGRGGRGAPALGVETGAVRPLGETKGGVATSPSGPTPPPPRGSGHVGDRGCPSL

SEQ ID NO: 126547 - protein, 85 aa, Oryza sativa
  Clone ID: PAT_MRT4530_29082C.1.pep
MTGVRPVTDRSLSSTTRQFSKLHVCPSSYNDFLAMVGMKPGIYLTGTDVPSSGAGTPSPARDKCLEALINPTGRGEACNRPPATT

SEQ ID NO: 126548 - protein, 101 aa, Oryza sativa
  Clone ID: PAT_MRT4530_29083C.1.pep
TVINTSQIIQNALQHGSLTSHNFTKSHFILNKTIYEINFLLPKYANHIKSKGEMQLFSSLAVGLPRASAFSSCSLISGKQALPSSSNSLHRASCDNGLPPL

SEQ ID NO: 126549 - protein, 43 aa, Oryza sativa
  Clone ID: PAT_MRT4530_29084C.1.pep
IYSWLRRPVSHRRSTTNQINQLTNYGSGEGGRRRQEEEEQGDE

SEQ ID NO: 126550 - protein, 42 aa, Oryza sativa
  Clone ID: PAT_MRT4530_29085C.1.pep
APAAPPPTRPSSPPSSPSSSPTSSASSSSTSPSLPHRRSRLP

SEQ ID NO: 126551 - protein, 60 aa, Oryza sativa
  unsure (1)..(60): unsure at all Xaa locations
  Clone ID: PAT_MRT4530_29086C.1.pep
FIASILPSTTSCLIRTLTIIYRHMGKPLLHHIIIPDRDPSTREVSGTVLVGDXESCLQEL

SEQ ID NO: 126552 - protein, 142 aa, Oryza sativa
  unsure (1)..(142): unsure at all Xaa locations
  Clone ID: PAT_MRT4530_29087C.1.pep
MKLSMKQPPYNRTSRMGLPFPGAPELLSLLETXTPRVHEDXSSWSGYCQCEVIEKLCHDASHVLRQGSCVGQSRSVSKINLFEXESVEEKPLSVRLRIQQDDRSALQRRHHDGLLHVREEVPTQLAHQVPHILGPAQHFRGP

SEQ ID NO: 126553 - protein, 211 aa, Oryza sativa
  Clone ID: PAT_MRT4530_29088C.1.pep
MAGKKVQVCALFLALNVLFTMQMGAVVQACEPYCPTPTPPVTPPPSPPSGGGNNQCGSCPSPGGGGGGGGGGGGGGGGRGGGGGSGGGSGGGGGSGGGGSGGGGSGGGGSGGGGGGGSGGGGGGGRCPIDTLKLGVCANVLNGLINVQLGTPPRQPCCSLIQGLADLEAAVCLCTALRANILGINLNLPINLSLLVNYCGRSVPSGFQCSN

SEQ ID NO: 126554 - protein, 56 aa, Oryza sativa
  unsure (1)..(56): unsure at all Xaa locations
  Clone ID: PAT_MRT4530_29089C.1.pep
NLNLARSYIRVTSLXXGILFLDCLGNFKEPFSEFVSICFMFFFLNRRVIYLSWDIP

SEQ ID NO: 126555 - protein, 57 aa, Oryza sativa
  Clone ID: PAT_MRT4530_2908C.1.pep
YCSSDCANSYNCKQFSGVYFDQTQAQAQLGGLQLPSIWGISPNTIVLPGPSPVVFLY

SEQ ID NO: 126556 - protein, 111 aa, Oryza sativa
  Clone ID: PAT_MRT4530_29090C.1.pep
ATTWTYIQSMKLLRNSFSTTKFKASAHMKEIASYRFATGIEMPCSEQQIDRCSTESVTMSSNTSLAICSVISSVSIVNSLIQPFPSTSSCIILSKIIPALSSLFAAKLPSP

SEQ ID NO: 126557 - protein, 114 aa, Oryza sativa
  Clone ID: PAT_MRT4530_29091C.1.pep
MRSNEEAGFGERWWRQCTRTGSGRLAGEEGGAAASEDERPEQAGERVATGGVEWGDSGSGRARIQSSVAAASRSWRVSAGRGVGRLSVSPGGETPKTVAAAIDAMSSSTPLISF

SEQ ID NO: 126558 - protein, 137 aa, Oryza sativa
  unsure (1)..(137): unsure at all Xaa locations
  Clone ID: PAT_MRT4530_29092C.1.pep
RPRPARPFAAGCRSSVGQPPPAPVIPPPANPPPAPAAMRPPPVAPPPARPPPTPIAPPPATPPLAPTTPRPPPVAPLPAPPPPAPVAPPPATPPXAPRRPKPSPVTPLPPPXPPGPQPPDPPPXPSPDPSPTILPWP

SEQ ID NO: 126559 - protein, 317 aa, Oryza sativa
  Clone ID: PAT_MRT4530_29093C.1.pep
MELEGMRFALHQPTWMKDSRGTKTAAEPLEALGLDRTPEKAAKSAAAAIWMRVCMGAAAVAPSSCGSILGRAKSIICRADTPAWTDRRTLAGLSRCSCSLRVDGAEEDENETASVDNNESETRCIVVGCPLPVVYDEQALNRGGFINTTTAPYHKRVPVGTPPQPSMGADERLKCIVIRISAGTAAAAARVVVKSSGQELKKRNTRAAFNSAVRPLGSAAAAPPRIHPLRPRDSVALLAGSRADLVRYDACTVVGATRLHGRAGSPTTTRARAPARSSAGTGTETRLARTRAGGMRVPGAPARTDAETQHFVPGFGT

SEQ ID NO: 126560 - protein, 1035 aa, Oryza sativa
  Clone ID: PAT_MRT4530_29094C.1.pep
MHPLPPLPSPPPPPTPPPSPSNRNHRHPASRVGAARGGPRSDPATPIPVSPRVSVMRRGGGGGGGGGGGGGGGGGGRGGRGGHARRDARPRDDRGRDGPRDDRVRHGDRRPHDYRPRRTPSPGRDHRIRRTPSPYRDRRRIPDYHPRRTPSPHRDRDRDRHAAGRPRGRGDDDRDRDPPRGRSPPPYRGDDRGRYDGPPDYMLPDHPSSLRPARKDGEFFGEPGMTLRVCSTEMGRTSSLYLDRRSPPLPPRPPPPPVRVASPPLYTLVPPAETGFLTGGSAMKAGENFGTGSSRSLLDGGGEFQYRDRLDDPYVERSREREIDRLYAGRSLHLERDGEMDRLYPSKGVLGADLAPSAYAGSSSSLLAKERPYRLHDGTSYEPTNGYAMEELGRLSHDTLGHVSGHAHRFSGSPLEHGSGRDGKILLDITRQKHSNHSPRDASMEYVRRDPVNAYLPPENLHGNGPQVSSPSVRRMFGSSSLTGRKDERIDHQVRLPLRMAEDEDTFQGMHDGMERDVQHSYRGDALTRHRRTRNSDVRYSRSPESERIKLGRHPVQHGYSSFDDTHEFSDQEVSPVVSRGRPRKAMYRDHVTEHYQTDDSPLGREYYDDDVDSYDLSPQRMAEPYDMVDDQDKYDARYDLPNNRNVFSRITLRDDNNDGWADEDQENNHQSNSITYGHSQNKPISQRLSRPTGHSQFGGFPMHGRGRGKSAKKRLRSALPQFHVGSTQGGDGFVRPNKRFKLTEVNHDDPEMSHEDAPEDEDISMQKDPPEGSEEFTKQVHQAFLKYTKLLNESPTVQKRYREAAKGSLSCCVCGSVPRKFPDIDALISHAYDTCKMGLKTKHLGFHKALCVMMGWNWHVAPDTTKTYHSMPDEEVNAMKDDLMLWPPVVIIHNSSIATKAKATDAKIVSKEEIEGVLTEIGVACDKAKISHGRPANQSVFLVKFLPTISGFQEAMRIHEHFTVKSHGKEEFQHIKGGKGKKDAPVDELEELLYAHIAVAEDLGYLDEETKKRCLVRSKNDIEAKADATLNLDS

SEQ ID NO: 126561 - protein, 208 aa, Oryza sativa
  Clone ID: PAT_MRT4530_29095C.1.pep
MRCGVRVLTRLPWARARLDVPANTTSRREAFPDCGRHYASPRSADCAASTTTETSQRPGGRSASTPTSYAMFDACPYPRGPKGCSPWLHLAKVADEKAVEVATRSAPRSCSWGLDPFPGGLPPHQLGELKLPRAAGLQRDPAAARGRVHANHSHAAAWNGPCMVATCRLAWHGRRWHETTIMDTGWKGGDERRCKSSPRLARQGQLPR

SEQ ID NO: 126562 - protein, 160 aa, Oryza sativa
  Clone ID: PAT_MRT4530_29096C.1.pep
MADGSFLDRMVSQLRSTCRYYTGYPKDLGPSRIIPFTSERQFVQLLHEGRPVVVAFTIKCTYTQHLDKVLEEAAATFHPHVKFVRVECPKYPGFCLTRQKNEYPFIEVFYNPEQAASPGKVVDPNVTKYSVKVLPFNYDQSMYGFREYFKKHGFKYFETN

SEQ ID NO: 126563 - protein, 91 aa, Oryza sativa
  Clone ID: PAT_MRT4530_29097C.1.pep
MASPLRADALFSARSSGRGGGGRSSGLPRGGGSALPSAKSSGRGGGSKGGALPSHPGGGGFLLDVYPFFVLVLTFLVFDLFLDTLEFLNAN

SEQ ID NO: 126564 - protein, 79 aa, Oryza sativa
  unsure (1)..(79): unsure at all Xaa locations
  Clone ID: PAT_MRT4530_29098C.1.pep
SAXLVNFIFXLIIXYVLLXYPARMVLSXPSHPXXCTMHVIIXSIRTLLXRCLDYNXCQCSGMLICSSKKKKKKKKKKKK

SEQ ID NO: 126565 - protein, 83 aa, Oryza sativa
  Clone ID: PAT_MRT4530_29099C.1.pep
MKDKALQIEANYDHSLTTIMAAATMANVALLLLFLVQVMSVIGGGAAAARPLLLQADGGAVIGMVTEMLGGAKSRGNLRTHCC

SEQ ID NO: 126566 - protein, 371 aa, Oryza sativa
  Clone ID: PAT_MRT4530_2909C.1.pep
MSMVVQQEQEVVFDAAVLSGQTEIPSQFIWPAEESPGSVAVEELEVALIDVGAGAERSSVVRQVGEACERHGFFLVVNHGIEAALLEEAHRCMDAFFTLPLGEKQRRSGARGRTAYASSFTGRFASKLPWKETLSFRYSSAGDEEGEEGVGEYLVRKLGAEHGRRLGEVYSRYCHEMSRLSLELMEVLGESLGIVGDRRHYFRRFFQRNDSIMRLNYYPACQRPLDTLGTGPHCDPTSLTILHQDHVGGLEVWAEGRWRAIRPRPGALVVNVGDTFMALSNARYRSCLHRAVVNSTAPRRSLAFFLCPEMDTVVRPPEELVDDHHPRVYPDFTWRALLDFTQRHYRADMRTFQAFSDWLNHHRHLQPTIYS

SEQ ID NO: 126567 - protein, 112 aa, Oryza sativa
  Clone ID: PAT_MRT4530_290C.1.pep
CTHTYVRMLSSGRPRFLFLGDDDYDDTGCMNASPSSTTSIDPGTRISLCGLGGGGIRASGRITMLSKTHTKRRRDSTGKYLAYTPPSAAFVDGSMILLSSTPAEVPDDYWGR

SEQ ID NO: 126568 - protein, 134 aa, Oryza sativa
  Clone ID: PAT_MRT4530_29100C.1.pep
MKKVLTKFDQECDHHYDGSQGNLHRWNDHISAFTQVSKQLGTVTWSYKKNGEGEAALASGKRTRQHQRAARGQGEGKATPASGERMRRQTLPPDPEAERLPLRDRPRHQGPRQCHRRCCSSRSPCAPCRRHHRH

SEQ ID NO: 126569 - protein, 36 aa, Oryza sativa
  Clone ID: PAT_MRT4530_29101C.1.pep
QVTSSSFYGFSIVNNIVFQHRTALYCSLGINILPEL

SEQ ID NO: 126570 - protein, 152 aa, Oryza sativa
  unsure (1)..(152): unsure at all Xaa locations
  Clone ID: PAT_MRT4530_29102C.1.pep
LKKCHFFMWLVVQNWCXNRLARRVLPHPDHCPHCDQQDETIDHLLTNCLFARQFWYSLLQRFGLNSLPPLNDDXFEWXNRINEATNGSVQNGLNSIVILGVWTFWKHRNRCVSDGVNPNLASALILAEEKGRLWCLARARGLSFYIAKVLGG

SEQ ID NO: 126571 - protein, 392 aa, Oryza sativa
  unsure (1)..(392): unsure at all Xaa locations
  Clone ID: PAT_MRT4530_29103C.1.pep
MAPRKPTKAGSTGEDPRSLGEGWSCFLGKSLVKEADFGELVLSSSLTEGQGSCGGEAVVPLPRDGRTVVFAAYFATGLRLPCDNFLPSVLSMYEVRLPQLSPLAFPKLALFAWMCRTCGFAPTAELFAALFTACASTKDVQTPAGPRKTIFSCVNFMLRPERSDAWPVLASMAKWDRNWMQKWFYISNPYSAKDAQANRLLFERFAVSINAKPNVEINGTVESRLILLRKVARRLSTRDLCKEFCLLRISPLARVWDVSVNEGEEVLGLPRLVLPAGAEMRTLEDAEIEALKMIGALTTAEFARLLQRQADGRMNHVYTGELPSRSNPSRAGDDEAGTSKKRKRAVAKGGQVRTRRSXKAAVESDGEEEEEKNAEAGSEEDGSHAAKTGDDC

SEQ ID NO: 126572 - protein, 593 aa, Oryza sativa
  unsure (1)..(593): unsure at all Xaa locations
  Clone ID: PAT_MRT4530_29104C.1.pep
MAPRKPTKDGSIGEDPVSLGEGWSCFLGKSLVKEADLGELRAKDRAGARPLFPRLGMGERLSLPHTLLLGLRLPCDDFLPSVLSTADIGRXAEIEASKMIKALTTAKFARLHQRQADGRVNRVYTGELPSRSNPSRAGDDEAGTSKKRKRAVSKGSQVRTRRSVKTAVESDREEEDKEDADAGSEEDGSRGYTPSPTPAKSRAGSHVSPTXPQDIVVANTLLAISSTAAKLVMAVRRKNKKGKVVQVGHGFSDSEGSDGTPTSSVLRRATFRGRRMXPPPASNAEAATGGSASTPTAGSNVAEDERVDAVPSPILQREGKAPAVEASVSDVTLTALHFVPTDIATRPEITPFMDGVCQSEEDFHHKEDERHVVALKKANVENRSLRSNLEASRQRDAERDXQLASAEEKIKSLEACLASAEATAATLVPAIESAKEACYTLRLALNDLGARAEGAPGEGGTALDFSEXTQEAAGSIVEVAGAYXGLXTRVSAGFVLSLLHAHGCDHIGDFPXFVKXEWPSNTQCSGAALRAFRKGFWEDGGRDCAKIRLRENLEWIARNEKAAAANSEKGPGPSGRSPGHEGEGDGGQDHPEV

SEQ ID NO: 126573 - protein, 90 aa, Oryza sativa
  Clone ID: PAT_MRT4530_29105C.1.pep
MWGKPPHLLRQQRPGGHSTPSHPMPPPRIPPRIPPTIAFASPPLLLSTLVAWLKRKRREDWHGAVPLPAFLPTSGGERGKINVTDKWAPQ

SEQ ID NO: 126574 - protein, 109 aa, Oryza sativa
  unsure (1)..(109): unsure at all Xaa locations
  Clone ID: PAT_MRT4530_29106C.1.pep
TATPSPCCTAAAPALPTPPSSAAAASLIPALTAXKPTPTPSSSLSPDWTAPPHLPTARRPPGQPAREPARQPSPTSRTSRSPSPSTCGHRRAPATARMPSAEMLSSPPP

SEQ ID NO: 126575 - protein, 533 aa, Oryza sativa
  Clone ID: PAT_MRT4530_29107C.1.pep
MQKWFYISNPYFAEDAQANWLLFERSAVSINAKPNVEIDGTLESRFILLRKVARRLSTRDLCEEFCLLRISPLAHVLDISVNEGEEVLGLPRLVLPAGAEMRTLENAEIEASKMIGALTTAEFACLLQRQADGRREGRRESDGEEEEEEDADAGLEEDGSHGYTPSPTPAKYGAGSHVSPTRPQEIVMANTLLAISSTAAKPVMAVRRKKKKGKVVQVGHGFSDSEGSDGTPTSPVLRRATSRGRRMSLPPASDAEAATGGSASAPATGANVAEDERVDVVPLPIRQREGKAPAVEASISDVTLTAPHFVPADFATLSEITPFVDGVCQVIAPTEGLGLFTELNKFGESCAAVESLFVRGLAAHLSAKKSALERLDGYRLRLRKSEEDLRHKEDERRVVEETLKKANAENRSLRSDLEAARKRDADQDRQLASAEEKIKSLKARLAPAEATSATLEEWPSNTQCSGAALRAFRKGFWEDGGRDCAKIRLRENLERIARNEEAAAANSEKDPGPSKRSPGHEGEGDGGPDHPEV

SEQ ID NO: 126576 - protein, 83 aa, Oryza sativa
  Clone ID: PAT_MRT4530_29108C.1.pep
MATTHAQRRRCLLFMALVFAVAVAAVAAARPPPSFSGTADGDDGNVLVAAAEMRWQIGMDNEQNFVFLCVLLDFALGKIDLQI

SEQ ID NO: 126577 - protein, 106 aa, Oryza sativa
  unsure (1)..(106): unsure at all Xaa locations
  Clone ID: PAT_MRT4530_29109C.1.pep
KPTPTPSSSLSPDWPAPPHLPTARRPPRQPAREPARQPPPPRRPSLPPDPXNPGGGRPPPPNPGGXPPSPPDPGWDRSPSPSTCGHRRAPATARMPSAEMLSSPPP

SEQ ID NO: 126578 - protein, 1555 aa, Oryza sativa
  unsure (1)..(1555): unsure at all Xaa locations
  Clone ID: PAT_MRT4530_2910C.1.pep
MSYYVDPRTSVPQYPLYPVYGYPPSTVARQVGGLGAQASTTMTSSFVDNSVNTSPIQGVPTSTMLVWTQVGEIVFPVYATVPISAGPSMARNENAVAITPDNSKSKDPPAIVENGTSTSCEPEKVPSAAKPCPSDKNHEPTRTTSEVTKPWCPIHKCRKHNLQAYWVFLNVQAKIRDCKEHGTQRTSPTRDVYCPIHKMKNHDFSSYKVFLRAMKTLLPKVQQSKISLRDADKEQGAALISDRFVGVIDIDPHEPSVLHLLEDYGSSSSSTPRDVFAIGGTSTSAHANTEAENQAVTPAQHLGTINAILRETPYYPVLNDDLAXWTERLRESVANLSNAFEEAATRAQPEHSTAGGADSETPEQWTSPRRATPPPRGTGDLRDHLNDRREARRARDDENCSRHRVSSRCRKNEERGGRSNEDRHHDNRHNRHDRDDRKQRTLDDTGRGRRHDSDDNGDXRQDNNGGRRQNSREPKRRPRNRTPDPSDPSSSSSSSSFSSSDRHPRRTYDRRQPTAPSAGCRAFNRSLCDVRWHERFRPGAIEKYDGSTDSEEFLQVYSMNPGESLRDYVRRFNECXNTILEITDASVIRALKTGVRDRYTTXELATRRITTTRRLFEVVDRCAHVDDALRCKNDKPKTGGXKNPAKDAPEPSKKKSGKSGXRKAQAKVLTSEYERPPKNPDPQGSDTKRIWCPIHKSDRHSLEDCLIFKKSLEKXLALEKGKRVRVVEKAAEATTQDSDSAYPDSDLHVSQIFGGSTAYSSSAAPKMKWSEQKIEFSDEDHPKAAVTLGRYPIVVEPTIRNIKVARVLIEGGSSINLLFASTLDAMGIPRSELTPTDQPFHGITPQSSSKPLSKITLFVTFGQTNNFRTEQITFDVAEFDTTYNAIIGRTALAKFMAASHYAYQVLKMPGPKGTITIQGNAKLAVQCDKRSLDMARHRASVVVRLSAVWPVAGVIGVVRVGGVGIVASSVVVVAAKMPSDMPGVLREVIEHKLMVRPDAKPVKQKLWRFAPXAIREELDKLLKAGFIREXKCTFGVPSGKLLGFLVSGRGIEENPEKIKAIENIKLPTRLKEVQKLTGCMAALSREKVQQLVYYVSEALHDAKTRYPHIQKLLYAVIMTSRKLRHYFQAHRVTVVSSFPLGEVVRNKDVVGRIAKWVVELSQFDVHFVPRTAIKSQVLVDFVADWTMPDNRSDNQIDNETWTMAFDGALNSQGAGAGFILTSPSGDQFKHAIHLNFGANNNTAEYEGLLAKIRAVAALGVRRLVVKGDSELVANQVHKDYKCSSPELSKYLAEVRKLEKRFDGIEVRHVYRKDNIEPDDLARRASRREPLEPGTFLDVLTRPSVREVSGEDSPVVLNNSSGATEAKCAVADIETKDDWRTPLIKFIGSEELPEDDAEAEKITRKAKIYCMIGNDLYKKAPNGSNGQVERANGIVLQGIKTSIYDRLMSHDKKWVEELPSVLWAVRTTPTTSNKETPFFLVYGSEAMLPTELRHQSTRVQKYSDEDQEELRYDDVNLPEEHRERVAVRAASYQQALRRYHEKRIRARTLSIGDYVL

SEQ ID NO: 126579 - protein, 622 aa, Oryza sativa
  Clone ID: PAT_MRT4530_29110C.1.pep
MAPRKPTKAGSTGEDPGSLGEGWLCFLGKSLVKEADLGELVSSGSLTEGQGSCRGEAVIEASKMIGALTTAEFARLLQRQADGRVNRVYTGKLPSRSNPSRAGDDEASTSKKCKRVVTKGGQVRTRRSAKAAVKSDGEEEEEEDAEAGSEEDGSHGYTPSPTPTKFGAGSHVSPTRPQDIVMANTLLVISSTAAKPVMAVRRKKKKGKVVQVGHGFSDSEGSDGTPTSPVLRRATSRGRRMSPPPASDAEAATGGSASAPTVGANVAEDERVDAVPSPIRQREGKASVVEASVSDVTLTAPHFVPADFATRPEITPFMDGVCQSEEDLRHKEDERRVVVETLKQSNAENRSLRSNLKAARKRDAERDRQLVSAEEKIKSLEARLASAEATAATLVPATESAKEACYTLRLALNDLGARAEGAPGEGGTALDFSEWTQEAAGSVVEVAGAYGDCCTRVSAGFVLSLLHAHGCDHIGNFPDFVKEEWPSNTQCSGAALRAFRKGFWEDGDRDCAKIRLRENLERIARNEEAATANSEKDLGPSERSPGHEGEGVGGQDHPEACDRKVCDRPPAENWRNSNEKFVALKGLPKVRCPFRPVYRKMVINSRSYKVFKVAGWMRAHPG

SEQ ID NO: 126580 - protein, 299 aa, Oryza sativa
  Clone ID: PAT_MRT4530_29111C.1.pep
MVKWDRNWMQKWFYINNPYSAEDAQASWLLFERSAVSINVKPNMQIDGTLKSRLILLRKVARRLSTRDLCEEFCLLRISPLALRTLEDAEIEASKMIKALTTAKFARLHQRQADGRVNRVYTGELPSRSNPSRAGDDEAGTSKKRKRAVSKGSQVRTRRSVKTAVESDREEEDKEDADAGSEEDGSRAAKLVMAVRRKNKKGKVVQVGHGFSDSEGSDGTPTSSVLRRATFRGLAAHLSAKKSALEQLDGYRLRLRKSEEDFHHKEDERHVVALKKANVENRSLRSNLEASRQRDAERD

SEQ ID NO: 126581 - protein, 560 aa, Oryza sativa
  Clone ID: PAT_MRT4530_29112C.1.pep
MAPRKPTKAGSTGEDPGSLGEGWSCFLGKSLVKEADLGELVSSGSLIEGQGSADFGRAEIKASKMIGALTTAEFARLLQRQADGRLNRVYTGELPSRSNPSRAGDDEAGTSKKRKRAVAKGGQVRTRRSAKAAVESDGEEEEEDADAGSEEDGSHGYTPSPTPAKSGAGSHVSPTRPQDIVVANTLLVISSTATKPMMAVRRKKKKGKVVQVGHGFSDSEGSDGTPTLPVLRRATSHGRRMSPPPASDAEAATGGSASAPAARANVAEDELVDVVPSPIRNREGKAPAVEASVSDMTLTAPHFVPADFATRLEITPFVDGVCQSEEDLRHKEDERRVVAETLKKANAENRSLCSNLEAASKRDAERDRQLASAEEKIKSLEARLASAEATAATLVPATESAKEACYTLRLALNDLGARAEGAPGEGRTALDFSEWTQEVAGSVVEVAGAYGDCCARVSAGFALSLLHAHGCDHIGNFPKFVKEEWPSNTQCSGATLRAFRKGFWEDGGRDCAKIRLRENLERIARNEEAAAANSEKDPGPSEQSPGHEGEGNGGQDHPEV

SEQ ID NO: 126582 - protein, 48 aa, Oryza sativa
  Clone ID: PAT_MRT4530_29113C.1.pep
MDTIGGAAATIGHDRRNLEIHNQGGVSLHSNYSGLLFNMAAIFSWVAR

SEQ ID NO: 126583 - protein, 725 aa, Oryza sativa
  unsure (1)..(725): unsure at all Xaa locations
  Clone ID: PAT_MRT4530_29114C.1.pep
MAPRKPTKAGSTGEDPGSLSEGWSCFLGKSLVKEADLGELVSSGSLXRAKDRAGVRPLFPRLGMGERLSSPXYFAAGLHLPCDNFLPSVLSMYEFYISNPYSAEDAQASWLLFERSAVSVNAKPNVEIDGTLESRLILLRKVARRLSTQDLCEEFCLLHISPLARVWDISVNEGEEVLRLPRLVLPAGAESKAGTSKKRKRAVAKGGQVRTRRSAKAAVESGGEEEDEEDVDAGSEEDGSRGYTPSPTPAKSGAGSHVSPTRPQDIVVANTLLAISSIATKPVMAVRREKKKGNVVQVGHGFSDSEGSDGTPTSPVLRLATFRGRRMSPPPASDAEAATGGSASAPAAGVNVAEDERVDVVPSPIRQREGKAPAIEASVSDVTLTAPHFVPADFAKWPEITPFVDGVCQVIAPTEGLGLFIELNEFGESCAAVESLFVWGLAAHLSAKKSALERLDGYRLRLRKSVEDLRHKEDERHVVVETLKKANAENRSLRSDLEASRKQDAERDRQLALAEEKIKSLEARLASAEATAATLVPATESAKEACYTLRLALNDLRARAEGAPGEGGTTLDFSEWTQEAAGSVVEVAGAYGDCCARVSAGFVLSLLHAHSCDHIGNFPDFAKEEWPSNTQCSGAALRAFRKGFWEDGGRDCAKIRLRENLERIARNEEAAAANSEKDPXPSERSPGHEGEGEGGQDHPEACGQKVCVRPPAKNWRNSNEKFVAL

SEQ ID NO: 126584 - protein, 101 aa, Oryza sativa
  Clone ID: PAT_MRT4530_29115C.1.pep
GEKKKKNNKKKKKKEKRKKEDKRKKKMRKQKTIKTNKKRKIIQKEKKKTWQKKKKKKKKKKKKKKITKRMEPNQDVNPNMFEAQVIYKIWAWIRSETERCV

SEQ ID NO: 126585 - protein, 759 aa, Oryza sativa
  unsure (1)..(759): unsure at all Xaa locations
  Clone ID: PAT_MRT4530_29116C.1.pep
DSRVPAHYPSQGCPAAEHPGFLRGVFSPSDFPSRPCVGHFRERGQRSSWASPPCSPRRGRNADFGRXAEIEASKMIGALTTAEFARLLQRQADGRVNRVYTGELPSRSNPSRAGDDEAGTSKKRKRAVAKGGQVRTRRSAKAAVESDGEEEEEDAEAGSEEDGSHGYTPSPTPAKSGAGSHVSPTRPQDIVVANTLLAISSTAAKPVMAVRRKEKKGKVVQVGHGFSDSEGSDGTPTSPVLWRATCRGRRMSPPPASDAEAATGRSASAPAAGANVVEDERVDVVPSPIRQQEGKAPAVEASVSDVTLTAPHFVPADFATRPEITPFVDGVCQVIAPTEGLGLFTELNEFSESCAAVESLFVQGLAAHLSAKKSALERLDGYRLRLRKSEEDLRHKEDERRVVAETLKKANAENRSLRSDIEAACKRDAERDRQLASAEEKIKSHEAHLASAEATAATLVPTTESAKEACYTLRLAHKDLGARAEGAPGEGGIALDFSEVAGAYGDCCARVSAGFVLSLLHAHGCDHIGNFPDFVKEEWPSNTQCFGAALRAFRKGFWEYGGRDCAKIRLRENLERIARNEEAIAANSEKGPGPSEQSPGHEGEGDGGQDHPEHAFSRKVCVRPPAKNWRNSNEKFMALKGLPKVRCPFRPVYREMVINGRSYKVFKVIGWMRAHPEQTIEDYDLVHTRRLEDMVRFWRNHQKTDRQDLIFQCHYSLVCISPPSPLRVVYDISSDDEPSSPDLPLEGDIDRGGEDVIYL

SEQ ID NO: 126586 - protein, 132 aa, Oryza sativa
  Clone ID: PAT_MRT4530_29117C.1.pep
MAVERGERRGGGIGCLSCCFGGGDGDGEGEELGQRAARALRTSSRWVRDRAVELPEMVALAGGRRRKPHLQHQQQQQLAGEFRYDPVSYALNFEEDGDGEAQPFKYMAFSARLPASPPPPPPPTALPVDRGS

SEQ ID NO: 126587 - protein, 386 aa, Oryza sativa
  Clone ID: PAT_MRT4530_29118C.1.pep
MESATAQRPSPLPQFLPSGATAPVAVAQRFGRRASCHIANKPLTGKGEIGASAETVQTMWYGPLGFSFSGYICPQTGLPFFTLPVLFPFLPLYTLRALFALLFFSFFAIVVLLAFRLFTSLSYATSLMAPRKPTKAGSTGEDPGSLGEGWSCFLGKSLVKEADLGELVSSGLLIEGQGSCGGKAVVPSPGDGRPVVFAAYFAAGLRLPCDNFLPSVLSMYDVRLPQLSPSAFPKMAVFAWMCRTCGFAPTAKLFAALITACASTKDVQTPAGPRKTVFGCVNFMLRPERSDAWPVPASMAKWDRNWMQKWFYISNPYSTENTQANWLLFERSAVCINAKPNVEIDGTLESRLILLRKVARRLSTRDLCEEFCLLRISLSPVCGTFL

SEQ ID NO: 126588 - protein, 175 aa, Oryza sativa
  Clone ID: PAT_MRT4530_29119C.1.pep
MDAYAWCRRGGAADCEEQEEDIGSPSTSAGSSARSSGSSSELADDASSSSSSSSAERRFEMSDLMTQLPFKRGLSRFFDGKSQSFASLAAVASLEDLAKPPRKRLKPSQSCGGGLDAHRGRVLSPRRHCPKAVVAGAKKATARAALSMLAASPRRPPLAAPARPEGVAAKFLVVN

SEQ ID NO: 126589 - protein, 421 aa, Oryza sativa
  Clone ID: PAT_MRT4530_2911C.1.pep
MGGEERCEDKKRAERDSRSDKHVTTRDTTNDSRAPSTRRAAKGTKRDNSATNKKATTGENTSARRTHPGTGGQAGQNRGEGIAANQPAPEKAAKPRNKQRNKKKKDAALAAAAAVARLRGRLRVRRAATGLPVSVRWFIGEGGGGDDDDDDEQHQHRKGKGKVDGLAVREGVEFYSNGDCYEGEFHRARCSGSGVYNFFGKGKYEGDWVDGKYDGHGVESWARGSRYRGQYRQGLRHGHGVYRFYSGDCYAGEWAAGQSHGIGAQTCSDGSSYAGEFKGGVKHGLGCYHFRNGDRYSGEYFADRIHGFGVYSFANGHCYEGSWHEGKKQGLGMYTFRNGDRRSGEWDAGALKNPLPLSDQAVQRAVLAAQRAAENAFHLPRVDEQVHRAVMAANRAATAARVAAIKAVQNRIDGKFCHTDV

SEQ ID NO: 126590 - protein, 469 aa, Oryza sativa
  Clone ID: PAT_MRT4530_29120C.1.pep
MHMMRRLKSIASGRSSVSDPGGDSGTKRPKFDQDGAGDIVIEPHLTDDKPMRVDQESSSSHRDAEASTSTSKNPGRTEEAGADILPKEMNEMTISDDKVDGHNDKESEGVIVNANGTETGQIIVTSIGGQNGKPKQKVSYMAERVVGTGSFGVVFQAKCLETGETVAIKKVLQDKRYKNRELQTMQLLDHPNVVQLKHHFFSTTERGEVYLNLVLEYVSETVYRVAKYYNRMNQRVPILHVKLYAYQMCRALAYIHRVVGVCHRDIKPQNLLVNPHTHQLKLCDFGSAKKLVPGEPNISYICSRYYRAPELIFGATEYTTAIDIWSVGCVLAELLIGQPLFPGESGVDQLVEIIKILGTPTREEIRCMNPNYSEFKFPQIKAHPWHKLFGKRMPPEAVDLVSRLLQYSPNLRCTAVDACAHPFFDELRDPKTCLSNGRSLPPLFDFSAAELEGLPVELVHRIIPEHMRK

SEQ ID NO: 126591 - protein, 347 aa, Oryza sativa
  Clone ID: PAT_MRT4530_29121C.1.pep
WIKPASTSNRDSRAIPTYTVCLWAKQVKQKSLASGTLIKWTKSFAIDEMVGKDVVAELNMAIRSQGLDMKVTALVNDTVGTLAAGRYVNHDTIAAVILGTGSNAAYIDHADAIPKWHGSLPKSGNMVINMEWGNFKSSHLPLTEFDQELDAESLNPGKQVYEKSISGMYMGELVRRILLKMAQETRIFGDNIPPKLERPYILRTLDMLIMHHDTSSDLRTVANKLKEVLGIEYTSFTTRKLVLDVCEAIATRGARLAAAGIYGIIQKLGQHSDSPSTRRSVIAVDGGVYKYYTFFSQCMESTLSDMLGQELAPSVMIKHVNDGSGVGAALLAASYSQYHQAESADSS

SEQ ID NO: 126592 - protein, 1016 aa, Oryza sativa
  Clone ID: PAT_MRT4530_29122C.1.pep
MASSSSSSFSSVLGHPVSEKLTRDNYLVWRAQVLPAVRGVQLTGFLDDTKEVPSPMISVVKKVDDKIVKEMIDNPAYSRWIAQDQQVLGYLLSSLTREVLVQVAHLDSAREVWTAIGEMYSSQSRERIIQIRSQLAREQKGDSSAAVYFTKMKSLADEMAAAGKKLDDDDVISYILAGLDADYNPLVASVSAKDYVSLSDLYAQLLSFEAHLKLQADGGYQSSANTASRGGYQNRGHGRGGFVRGRGGRGHGGGEDTRPVCQLCSKIGHTVQSCWKRFDRSYRGDERQVQRSASSAMASSYGVDTNWYVDTAATDHITSELDKLTTKEKYHGSDQVHAANGTGSGHEDNTSSSKILRENNVTVSEPHRDVVCDACQQAKSHQLPFPKSTSRSSAPLDLVFSDVWGPAPQSVGRFKYYNKSDVFSVFTNFQHLVERQFNRKILSMQTYWGGVYSKDTSASIFPLAVYISRDVVFDETIFPFVDLHPNAGALLRSEICLLPSSLLNSRGMHDSDSMLINATNPGDTSSVPAMQGSGENLEQINEDLAHDFVSTTTGHHDGQPEFASPAHVHSQDNIDGESAADMSGSGFSAAPASESSVQDESNTDQFISTRPHTRLQSNIRKPRIWTDGTVRWGMVSTSEEPTNLADALRDSNWKKAMDEEYFALMENQTWHLVPYQKVVSSSDKAVSTLLQDLRSDFALKDLGKLHYFLGIEVTSISEGLILSQKKYANELLNRAGLKECKPVNTPLSISEKFSASSGKLLSDKDSTNYRSVVGGLQYLTLTRPDIAFAVNKARQYLHCPTTNHWIAVKRILRYISGTVDFRLRFTKSESNIVSGFSDADWAGCSDDRRSTGGFAVFYGSNLISWTARKQATVSRSSTEAEYKALANATAEIIWVQTLLKELGVSQPKAALLWCGNIGATYLSANPVFHARTKHIEVDYHFVRERVAEKSLEIRFISSNDQLADGFTKAQSLNKLNNFRNNLNLCPIKSDMSCLFDPPTKSISNSLSKHLYSQLSN

SEQ ID NO: 126593 - protein, 93 aa, Oryza sativa
  unsure (1)..(93): unsure at all Xaa locations
  Clone ID: PAT_MRT4530_29123C.1.pep
MIRLKVINMEWGNWKSSHLPLTEFDQELDAXSLNPGKQVYEKSISGMYMGELVRRILLKMAQETRIFGDNIPPKLERPYILRTLDMLIMHHDT

SEQ ID NO: 126594 - protein, 189 aa, Oryza sativa
  Clone ID: PAT_MRT4530_29124C.1.pep
MTERGVPHRETARAPLCRFGRGLRDGAKRASDRLSPPNPRFDRSVTGLVRRTCASPTTTTMLLSRREILERSAAAAEGQGRRAVRARVGHRDRPRRRVPGAVPAPSDASSTAGVARSGACHAAALRPSLRLRRRLAAGHVGCIVKKLSGTSSPPLLSSIRDGRSRELPPPPSSTTQLNYAWTRKMQSSF

SEQ ID NO: 126595 - protein, 216 aa, Oryza sativa
  Clone ID: PAT_MRT4530_29125C.1.pep
MDEEEHEVYGQEIPEDGDMDGADVDMASGGDDAAKLQELDQMKRRLKEMEEEAAALRDMQAKVAKEMQGGPPGGDPSASTAEAKEQVDARSVYVGNVDYACTPEEVQQHFQACGTVNRVTILTDKFGQPKGFAYVEFLEQEAVQEALNLNESELHGRQIKVAPKRTNVPGMKQRPPRGYNPYHGYPYRSYGAPYFPPYGYGRVPRFRRPMRYRPYF

SEQ ID NO: 126596 - protein, 955 aa, Oryza sativa
  Clone ID: PAT_MRT4530_29126C.1.pep
MADTGSLEKMGRELKCPICLSLLSSAVSISCNHVFCNDCLTESMKSTSSCPVCKVPFRRRDGSDCVNSGKNSKRSQKSLTRKRKVTSEMEKNTAKDATASASQPTTKPSFSTNKRIQVKPFPESETPIRAEKIMKPEEPKNNLNNDVEGKNKAVASGQPGSPSLSPFFWLREQEEQEGCTAETLSETQSLDTPLRHNAPSFSDIKDSDDEIPLNTTPNSKAAATELFDSEIFEWTQRPCSPELYSTPLKKQSKAKSKLDQIEEKGDEEDVHIGGSFDKLGNASNAAQLVNTKATKQKRKKTSPSNKNSAKLSNRAEPCIKKSDANQQGSNRRKSAALKSCQKSSSAVGRNTSGRRNKASSNSKPIHGSSDNSPESYLPKEGLDVEAPDKPLSERIQNLEKTSRRKGSARKLEMAGKTISDTTEKNSEPRSKRVRRMSDHAIAKPVEVPSGSGNETEIPQLHTLTKGSIQRKSSNARRHSKVCGEQEGKNKLENTTMTPIILHGKCQNKEAVCTAPSVRTASVKYKQAKFSEQPDCFGTENFGNLQACPARNVLLKKCEVSTLKVSCAFCQTDVITEESGEMVHYQNGKQVPAEFNGGANVVHSHKNCLEWAPDVYFEDDSAFNLTTELARSRRIKCACCGIKGAALGCFEMSCRRSFHFTCAKLIPECRWDNENFVMLCPLHRSTKLPNENSEQQKQPKRKTTLKGITGFSRSSQIGSNQDCGNNWKWPSGSPQKWVLCCSSLSSSEKELVSEFAKLAGVPISATWSPNVTHVIASTDLSGACKRTLKFLMAILNGRWIVSIDWVKTCMECMEPIDEHKFEVATDVHGITDGPRLGRCRVIDRQPKLFDSMRFYLHGDYTKSYRGYLQDLVVAAGGIVLQRKPVSRDQQKLLDDSSDLLIVYSFENQDRAKSKAETKAADRRQADAQALACASGGRVVSSAWVIDSIAACNLQPL

SEQ ID NO: 126597 - protein, 237 aa, Oryza sativa
  unsure (1)..(237): unsure at all Xaa locations
  Clone ID: PAT_MRT4530_29127C.1.pep
RSSLTFVFFLSTEREQQGNTARTEGRPRATRRRPGEVRRSSGDHPPAAAALGGTGRMAAXLRHSRARLQVARTTGRVSDQIDEWEEEHRGWPVHGELVGGGTAAGAAQPXALILQTGADARYXRCRGCYRLEVLPRDGETAKGGDAWCGADEAEAASCWXRPKVFDAWFPVSSGPLLPQWRWRQHGTSPTPSNLQLWPGSLTMVISSGGERVIARCSMKCMTRERQRGMGFXWPGLA

SEQ ID NO: 126598 - protein, 995 aa, Oryza sativa
  Clone ID: PAT_MRT4530_29128C.1.pep
MADTGSLEKMGRELKCPVLGSLSLLSSAVSISCNHVFCNDCLTESMKSTSSCPVCKVPFRRREMRPAPHMDNLVSIFKSMEAAAGTNVVSTQEAPVVKLADGSDCVNSGKNSKRSQKSLTRKRKVTSEMEKNTAKDATASASQPTTKPSFSTNKRIQVKPFPESETPIRAEKIMKPEEPKNNLNNDVEGKNKAVASGQPGSPSLSPFFWLREQEEQEGCTAETLSETQSLDTPLRHNAPSFSDIKDSDDEIPLNTTPNSKAAATELFDSEIFEWTQRPCSPELYSTPLKKQSKAKSKLDQIEEKGDEEDVHIGGSFDKLGNASNAAQLVNTKATKQKRKKTSPSNKNSAKLSNRAEPCIKKSDANQQGSNRRKSAALKSCQKSSSAVGRNTSGRRNKASSNSKPIHGSSDNSPESYLPKEGLDVEAPDKPLSERIQNLEKTSRRKGSARKLEMAGKTISDTTEKNSEPRSKRVRRMSDHAIAKPVEVPSGSGNETEIPQLHTLTKGSIQRKSSNARRHSKVCGEQEGKNKLENTTMTPIILHGKCQNKEAVCTAPSVRTASVKYKQAKFSEQPDCFGTENFGNLQACPARNVLLKKCEVSTLKVSCAFCQTDVITEESGEMVHYQNGKQVPAEFNGGANVVHSHKNCLEWAPDVYFEDDSAFNLTTELARSRRIKCACCGIKGAALGCFEMSCRRSFHFTCAKLIPECRWDNENFVMLCPLHRSTKLPNENSEQQKQPKRKTTLKGITGFSRSSQIGSNQDCGNNWKWPSGSPQKWVLCCSSLSSSEKELVSEFAKLAGVPISATWSPNVTHVIASTDLSGACKRTLKFLMAILNGRWIVSIDWVKTCMECMEPIDEHKFEVATDVHGITDGPRLGRCRVIDRQPKLFDSMRFYLHGDYTKSYRGYLQDLVVAAGGIVLQRKPVSRDQQKLLDDSSDLLIVYSFENQDRAKSKAETKAADRRQADAQALACASGGRVVSSAWVIDSIAACNLQPL

SEQ ID NO: 126599 - protein, 197 aa, Oryza sativa
  Clone ID: PAT_MRT4530_29129C.1.pep
MAAVEANAATTHHEITTAAAVTAGERQQLNAGGEDDKNIGMIVTDDDDEDEDDELFELDIALIDHRDGEEYYTKRLVTSSCCVAVAAAAAAADDDDEEDGGDALLANCLLPVSSVSRAVPVTASSSFVVVSSYPVGRRYHGGGGCGDDDDDDASWRWRRFFFTSGGGGRTRIGRHNSNNSARFSFSRFQSLANFQRY

SEQ ID NO: 126600 - protein, 543 aa, Oryza sativa
  Clone ID: PAT_MRT4530_2912C.1.pep
MADNEKGNKVRSQDIGTSSSRVNEAPDTSCVAVVQHLINQNKLLIEILQQHRMPILNPSQMQPQVQLEAVQALTPQVSAPPTSQKAPHAMPHVDPKEASIICFMCDEQGHYARNCPQQKRKAPMRTEDEVRKMIITSTEWPPPGMTKHQRRNSFRGAQQLTEHLLANGGRVSGSEDSDQVSSDDEDEKSPQGFNQNKIELKACSRCGEIGHVASSCASTCVHCEEDHPPDRCPTNKITYFFCEGTDHVPKDCQFSFLLTKKMANQPASSNGEKHQGNTNPRQDHRFSLTPVPGQRNRNEKRKCRVREDICCFNCQGMGHFADKCPKPRNIAAGTSVHATPCNQKLAPQRIVIHASRSSPIARVATAPIPMNALPQGVNAQFQPQPPADKTGASICVVPLEVPIQQLRNQVQDEEPELKKGITPKTVPNQGKIDLHITANLHEADIPIVLWSLEQTPYPGNLSEVDSEDMNHEKFWNGSITALPQPSLSQPKGAPWSKSGEEEIPPATGGQAKQFRVVKFCWKFVKTQRKKSDKKRRPPNLSSC

SEQ ID NO: 126601 - protein, 121 aa, Oryza sativa
  Clone ID: PAT_MRT4530_29130C.1.pep
MGRTGTTGDAHTVGSRKGVTPNIKRQLIKLNVLSYAVPAVCKYFLSNFDNLLFFPDANDNPNFDEGLMNWRSRLGLRRGRRGVRGGGKKVTELRGMVVEYRGLVVGGGTSAAEAVGSASRC

SEQ ID NO: 126602 - protein, 114 aa, Oryza sativa
  unsure (1)..(114): unsure at all Xaa locations
  Clone ID: PAT_MRT4530_29131C.1.pep
MRECMSIHIGQAGIQVGNACWELYWLEHGIQADGQMPSDRTVGGGDDAFNTFFSETGAGKHAPRAEFGDLEPTVIDEVRTGWXRQVFHPEQLINGKEDAVNNFARGXYTIGKEI

SEQ ID NO: 126603 - protein, 131 aa, Oryza sativa
  Clone ID: PAT_MRT4530_29132C.1.pep
MRECMSIHIGQAGIQVGNACWELYCLEHGIQADGQMPRDRTVGGGDDAFNTFFSETGAGKHVPRAVFGDLEPTVIDEVRTGCYRQLFHPEQLINGKEDAANNFARGHYTIGKEIDDLSLDRIKKLADNCTG

SEQ ID NO: 126604 - protein, 65 aa, Oryza sativa
  Clone ID: PAT_MRT4530_29133C.1.pep
RAHIFCVILSEIVLLGVVFAAAAMRSCQRLEGIHGLIRLMGCFVQTITAPVGCQPITPSDCVVLV

SEQ ID NO: 126605 - protein, 224 aa, Oryza sativa
  Clone ID: PAT_MRT4530_29134C.1.pep
MTFSGTQDKCNACDKTVHFIDLLTADSIPYHKSCFRCSHCKGTLSMCSYSSMDGVLYCKTHFEQLFKETGTFKKNFPSGTKANSEQAKIPSKLSSVFCGTQDKCTACKKTVYPLEKMTMEGECYHRTCFKCAHGGCLLTNASYASHNGILYCQNHFWQLFKKSGSYDNLLKPASAAAENTVESEVAVAEPAKEDPETEEAAKEEEEEASPEQVAEAVVEDQEHS

SEQ ID NO: 126606 - protein, 712 aa, Oryza sativa
  Clone ID: PAT_MRT4530_29135C.1.pep
MAAKSDDNSLPPGFGTRPWLVQGSRGDTLTFVDVSDLSLHETVVPEVRGKTCLGCMHGDWLLMLDESTADCFLLRITTNPRTKIQLPPLHQPPLFLSTYEMLESPESANCTILVASSTEAEEECYLLHCHPGDEMWTKSVSPYDDISFSSLMRNYGGKIYDFASNLIAIDVIDGKIELQQLGTIKDEEEDSRRCGRYHIIESCGKLFLLWIDDLGCFYDDGLLTAIRVFCLNLETLSWERVEGIGNDRAFLISGTYAFSCPSIEGVLQGNCVYLVWSSCDSERLYKFCLDDMTISFHQILPQPTKSWSRAFWAIPASTQSISMPQESTIPNNLLWRKPSKDNPPNDFDEHKEDGQENSLRPWDHLPVELLELIVSNLSLVDRIRFPTVCKAWSEVLNPIEQAKVWPWLMHISKQDGTCKLFDPLRSENYNIQVTIFDTNEDRHIFRSSKDGWVLASAGIYGNDIFIINPFTEEIVEPPMLAFLYNYNGVSFSSSNPMCLDCAFFGINSSDSGKFLSTFTWQHGEPHWIEQEFEYNVSFPVGYNNPVMFDGKFYCLGRKGNLGVFDPTSNTWRILDKPEPIHVEMDLFEEDHIGREFCYLVDMDGELISVFLRNANELPRVFKLNRTEISWVEVEDIGGGALFLDYRSSYGVASPDGGNGNRIYFPRYSKDGKPVFYDMNKKTYSPSFYGVIEPLNCVWVVPNLRKNESTSED

SEQ ID NO: 126607 - protein, 358 aa, Oryza sativa
  Clone ID: PAT_MRT4530_29136C.1.pep
MQRECIVSGPIDGSISATGDGARRGVGGMRGHRSRVRGDRGLRMHRSGSDPDSDKAHWYMSNSDDESFVDKDKDCRRGTVAPLLKKGPWTSWENSILEKYIKKHGERNWKLVQKNTGLLSFCITRRTDNEIKNYWNTRIKKCKNNRWLLYPANVCNDALNEDQYGSVDPSVREKLTNNQLEDTTSMYSAPQFSYASISNILDRRLASKDYDSIEDQRNRIEVAAEYEISLPVLKTTNNDIFPSASIFANHGISNGNLSALSTTDALQMELPLIQFDPNNQFIYSRDYATHLTNLALLNDQAEELLNHIDVLNYVVMKKELSGGSLSPTINMPCKATAYSSELPLCKGYREQDLDFYTQ

SEQ ID NO: 126608 - protein, 52 aa, Oryza sativa
  Clone ID: PAT_MRT4530_29137C.1.pep
GFITRPPHSHNSNESNNVREHTDSLYHDRMIVTFVIGAVKRNTGTEGINKAR

SEQ ID NO: 126609 - protein, 395 aa, Oryza sativa
  Clone ID: PAT_MRT4530_29138C.1.pep
MHESDSGPDSDRTHWYMSNSDDESFVDKDKDCRRSTVALLLKKGPWTSWEDSILEKYIKKHGERNWKLVQKNTGLLRCGKSCRLRWMNHLRPNLKKGAFSKEEENKIINLHRKMGNKWSRMAADLPGRTDNEIKNYWNTRIKKCKNNRSPLYPANVCNDALNEDQHESADPNVREKLTNNHLEDTTSMYSAPPGFQDASISNILDRRLASKDYDSIEDQRNQIEVVAKYEIPLPVLKTTNNDIFPSASIFANHGISNGNLSALSTTDALQMELPLIQFDPNNQFVYSRAYAMHLTNFALLNDQSEELLNDTDVLNYVVMKEELSGGSLSPTINMPCEAHNSMAASNELVVPQYEGDAPPLQDDFTSYFYLNDTNLSIFEDTNELFLENKLDTKGN

SEQ ID NO: 126610 - protein, 249 aa, Oryza sativa
  unsure (1)..(249): unsure at all Xaa locations
  Clone ID: PAT_MRT4530_29139C.1.pep
MEVEYFKEYQRRLRRHAGRAXARRIVRDALYVVSIGTNDFLENYFLLVTGRFKQFTVGEFEDFLVAQAAGFLAAIHRLGARRVAFAGLSAIGCLPLERTLNALRGGCVEEYNQVARDYNVKLNAMIAGLQSSLPGLKIAYVPVYDDMLNLINNPSTLGELYIFGAVLFSFFTGLLSQIICFTYAGLENVEQGCCATGMFEMSYLCNEKNPLTCPDADKYFFWDSFHPTEKVNRFFANSTLQICLRELLS

SEQ ID NO: 126611 - protein, 125 aa, Oryza sativa
  Clone ID: PAT_MRT4530_2913C.1.pep
MAGRGGNDQRSGAQTWGGSGSAASFFVGRAGEFGQGGGGKPVHAVGCERGRRNRAGEAATWGRQWRHASGWRRAWGGNKNLQVGPMGPPVGEGGTEVMGGGEIDLAKGRAEGERPARLNALFNDF

SEQ ID NO: 126612 - protein, 365 aa, Oryza sativa
  Clone ID: PAT_MRT4530_29140C.1.pep
MTRKAIRYSQKRSRELCAVVSRLVTSQQPVKTVLLFLLWLAGHRFIRTVGSTTGSKITVFFPALEELMFGALDLSWSNLGHDLPTTGSDLPIEWNNAQYRFRAIEPQHLLAVIPLWKEVEYFKEYQRRLRRHAGRAAARRIVRDALYVVSIGTNDFLENYFLLVTGRFKQFTVGEFEDFLVAQAAGFLAAIHRLGARRVAFAGLSAIGCLPLERTLNALRGGCVEEYNQVARDYNVKLNAMIAGLQSSLPGLKIAYVPVYDDMLNLINNPSTLGELYIFGAVLFSFFTGLLSQIICFTYAGLENVEQGCCATGMFEMSYLCNEKNPLTCPDADKYFFWDSFHPTEKVNRFFANSTLQICLRELLS

SEQ ID NO: 126613 - protein, 115 aa, Oryza sativa
  Clone ID: PAT_MRT4530_29141C.1.pep
MKESGLAMGTREVSRWLVEARDDAAAMEDEWGIGDDRSATEARDQATAKTMEGGGGGKWEEELTLRGSRGEVLGAKIGHAFSAPIEGVWHCIVEFATSGQNKEKMTKQAENKRLI

SEQ ID NO: 126614 - protein, 171 aa, Oryza sativa
  Clone ID: PAT_MRT4530_29142C.1.pep
EREIMFVRSDGGYVFVSIYAGKNGWLRLRMLSTKESKNRIKNKWALKHVEKTNHERSDMPGQSPHGLLIGDDDDEQQAANPNNTSIRQNNKPKEKSRTLVEHPKMMDAMRINGDGDGDAAYKLRYPRKKRPGGATQGEEKSAGGANLEAAPTPSDRDRTVRDGVVRDVTVA

SEQ ID NO: 126615 - protein, 129 aa, Oryza sativa
  Clone ID: PAT_MRT4530_29143C.1.pep
KKKKKKKKKKKKKKKKKKKKKKKKKKKKKKKKKKGRPFWGSHFYFPRSCTVLFFFLGPLNSIPWPFFSTAVTGKPLGYPNLFALKNIPFSPVGLIGKGPPPMPFPNSFSNLIAKWNAPCTGPFSARFVG

SEQ ID NO: 126616 - protein, 227 aa, Oryza sativa
  Clone ID: PAT_MRT4530_29144C.1.pep
RGSSAEVFDPRTGIWVEVPDIAFSKAQALPTAFLAELLKPIATGMTSFGGKLYVPQSLYSWPFFVDVGGEIFDPETNSWAEMPVGMGEGWPARQAGTKLSAVIDGDLYALEPSTSSDRGKIKIYDPQEDAWKVAIGQVPVGDFAESECPYLLAGFLGKLNLIIKDVDSKINIMQTDVLKPVELSAPGNGPTCQNQQLSSEQETNLWKVIVSKNLAAAELVSCQVLNI

SEQ ID NO: 126617 - protein, 33 aa, Oryza sativa
  Clone ID: PAT_MRT4530_29145C.1.pep
MTAGHIRSLYPFTFGYIIELKVELSLADQEVDG

SEQ ID NO: 126618 - protein, 449 aa, Oryza sativa
  Clone ID: PAT_MRT4530_29146C.1.pep
MASVPDLNPWVVLDRYVRDADLVDTQRDPRWAAVKCARKEAYGCGEFGQELVDGLTLYVRRNDGPSDDLFSALAVRATDEMLRKVAAPTKIQKSLIRPLFRCQASMNARVTFVCELHAAEENLVVLSASFDHAHHIYYLVYDGIDESLTMIPSLSPHRFVAFHPRPVLRRRATGGYDLALIARYLSRKSREDGDVLLLFTKEKESSCCSDQWMEKKKGMRLPTGPLGFFCPDMIFSFKGNTFWVDLSQGFMCCDTNVLFSGDTVDFRHLSFPHQYLLHDIIKSQELGPMEMYRTMGVSGGSIKFVSINTPATDAAAGKPPGRPCHDATALANTTVAVWTLDQGGLCWKKDVEFRLGNIWSQRDYKQSGLPRMVPVWPFLRPHAHGTLYFLVPKPMTGPSDPQMYHICGLDMCTKKIQLSQYSVRSNILRPAAFPTNAFQHLDESPLATK

SEQ ID NO: 126619 - protein, 63 aa, Oryza sativa
  Clone ID: PAT_MRT4530_29147C.1.pep
SSVESKPYSVEGSRLRGSLPLFEHSWGVRHGCGGGSAPTQKQKHNLAVAGLFSNLYLALMASV

SEQ ID NO: 126620 - protein, 83 aa, Oryza sativa
  unsure (1)..(83): unsure at all Xaa locations
  Clone ID: PAT_MRT4530_29148C.1.pep
MATVSAAAATSVVARAVLAGPLGLPXHHGHDDPQGYVQLLQXGGHTGGGRQGAARPTGIAPTAAPLWRSSATDLRRRHRLYLG

SEQ ID NO: 126621 - protein, 70 aa, Oryza sativa
  Clone ID: PAT_MRT4530_29149C.1.pep
QCSRLCRIGALESCSAGGHWLRRMKDLATTTAFLVLSLFMAVEVQGSPPPSALPTGQYRRWRCYGYAGDG

SEQ ID NO: 126622 - protein, 196 aa, Oryza sativa
  Clone ID: PAT_MRT4530_2914C.1.pep
MRTSLTSSKGRGGAGKRAPPVSGTRAPVHRGPGPPRRSTAGPREPTARIGPKPIGWPRGGAAGARARHETGSAEPWCWAACGLRRQQPAAPNGGEQPEDGGAHGQWRCTRKGRGAGGGAHRACGPTRQSGRSPAAGRGGGAPRGGNDDGGSAAFREQEPAADGRRDLGKEMKRLGEAHREARGDESGDDRRTRRDC

SEQ ID NO: 126623 - protein, 143 aa, Oryza sativa
  unsure (1)..(143): unsure at all Xaa locations
  Clone ID: PAT_MRT4530_29150C.1.pep
MSLVRRSNVFDPFSLDLWDPFDSVFRSVVPATSDNDTAAFANARIDWKETPESHVFKADLPGVKKEEVKVEVEEGNVLVISGQRSKEKXEDKNDKWHRVERSSGQFMRRFRLPENAKXGDQVKAGLENGVLTVTVPKAEVKKP

SEQ ID NO: 126624 - protein, 127 aa, Oryza sativa
  Clone ID: PAT_MRT4530_29151C.1.pep
MGEERLGAPFLCRSVVGLVLSDQGLVTPTILSLSGMQELKVATIARFYVEKTAVMKLLPPMFGGPSYGSAPRLIQAEFHQVCQSQNLVEGLSQGKIWCSFAMGNQVIFDDRSSKACMEDLIAFLVLA

SEQ ID NO: 126625 - protein, 98 aa, Oryza sativa
  Clone ID: PAT_MRT4530_29152C.1.pep
FIDQGQNPPRNTPYRARSHLFSNTCTSIHGGHTNSSIYTVHVRTFSGPGTHTHTFLERPALLKTLFSFIRRQCVPRGARWAAGLTCRGQIWRGWPKRC

SEQ ID NO: 126626 - protein, 87 aa, Oryza sativa
  unsure (1)..(87): unsure at all Xaa locations
  Clone ID: PAT_MRT4530_29153C.1.pep
MAYRRKPQPPQTPPSLXPPPPPPXPPPWAPRPRRRTPSPRMPCAPPPRTATPPPSPRPTPPPPPPRPPPPPRLAGATTSPPSPRLPP

SEQ ID NO: 126627 - protein, 600 aa, Oryza sativa
  Clone ID: PAT_MRT4530_29155C.1.pep
MDLSRPESSDLSLGFHSLGHARGHAVTGPLRLFDDMEDAKPEKSVGGGGGGGGGGGEEEDGEEGGDQHFSLLGHALCVKRPRRALYGGGGGGGAGGGGGGGGEASSCSSSSSSLHPAKRQATAERGADLEARRGAVRAWGNQALAEADPDVHALMELERDRQVRGIELIASENFVCRAVLEALGSHLTNKYSEGHPGARYYGGNQHIDGIERLCHERALAAFGLDPACWGVNVQPYSCTSANLAVYTGLLLPKDRIMGLEPPSGGHVSHGYYTPSGKKVSGASIFFESLSYKVNPQTGYIDYDKLEERAMDFHPKILICGGSSYPREWDFARMRLIADKCGAVLMCDMAHISGLVAAKECRSPFDYCDVVTSTTHKNLRGPRGGIIFFRRGKNLRRRTGSFSQADENDYDFEDRINFAVPRSRQGGPHNNHIAALAITLKQVATPEYKAYIIQVKKNAQALASALLRRKCRLVTGGTDNHLVLWDLRNLGLTGKNFEKVCEACHISINKMPIYGDNGSISPGGVRIGTPAMTTRGCLEDDFEVIADFLIRATQIASNLMKEHGKMQKEFLRGLQNNKDIIELRNQVENFASQFAMPGFDV

SEQ ID NO: 126628 - protein, 254 aa, Oryza sativa
  Clone ID: PAT_MRT4530_29156C.1.pep
MKKKTAVKKRSAPAPSQQVPTPPPPSPPVQPMSSDRTPSAVGSHNIEEEQPAAPAIPILADLFSFHIKDYFDKEEEEETSSKALPSLAEDVKKNLESISHRLEASLDSLVIDLYLEQHQFNLEKARQRLADRRERKGIEATIEANRQLVHEEKSKLDQLSEGPIQSNIDRLVTKARRIDLVAQLEECKAELALETQKVANLPKTIEEQKSRLKSANKNVADLTKSVKVILGTDAQDIQAIEEVEQIRQRAISAI

SEQ ID NO: 126629 - protein, 88 aa, Oryza sativa
  Clone ID: PAT_MRT4530_29157C.1.pep
SELTWAQWDWVTKIVDIKMRIVQDPKWLWESLNLQDGGIVSHKILSVVEKWQRLETITNWGQNQSWVPRPRIIELVYEIMKLNWATNT

SEQ ID NO: 126630 - protein, 193 aa, Oryza sativa
  Clone ID: PAT_MRT4530_29158C.1.pep
MPWECEDAKHLNGIFTLLLTSVLFMTVSTGRNGHNRHWDEEYNHHTIGLDTLTGSAVLVLPQDADIDLDLAIGHKQKTTTTVTSPWQIFLHSVEGDKRTTGSAYMVSKMRGGGSGSGNGHAVPALSWSASLLEAFTLASLSQSTSLLTSPDEGHYRDNSKNENNNDNTVVKDDSGNYRMVGERVAATPTTLRC

SEQ ID NO: 126631 - protein, 133 aa, Oryza sativa
  Clone ID: PAT_MRT4530_29159C.1.pep
YGSAPIQAPTNAAALRCSLMTTSSTSASPPPSSPGAGSVTPPTWLSSAVSAPATHPASSASTTRHARMSSQPQPSKLADVLRHRGRFTFGGASSANDSVVIFDCRSQLQATHCAAPLSRSPAASLHSSSLKQR

SEQ ID NO: 126632 - protein, 411 aa, Oryza sativa
  Clone ID: PAT_MRT4530_2915C.1.pep
MGKMLDPKRLMSARQERHRRRRRRQLRPRNSEGAKRTRYSVPSLPEEIWGHIHSLMSFKDAARAACVSRAFRHSWRCHPNLICCIGILGSDFINKFDRIMKNHSGIGIKSVKFQYNSFYNTRRSTSISHHFDSWHQIAITPWIEELTISLSLSSFNMEYSFPCSLLADGRASSMRHLYLGNCGFHPTINLDLRNLTRLHLINCLSHLEVFDCRIQVVENKAPNLCSFDFGGRQMVDTPILPSKFLHLKCLTIDHTIISSSPAYNYLYLVYFLDACPSLETFLLGISQNHMEHDSIIGDSSHMRQMPGHRHDNLRSVEITGFYSAKSLIELTCYILDNTVALKYLTLDTTRGFFSCSTGEHDRCFPMDKIMITEAKRAVLAIQTYIERKVPSTVKLNVVKPCSRCHAVESYL

SEQ ID NO: 126633 - protein, 169 aa, Oryza sativa
  unsure (1)..(169): unsure at all Xaa locations
  Clone ID: PAT_MRT4530_29160C.1.pep
CVPENSIPFFISPFYGQVVPLSPHPXYGCRVIQKVLEPCPVPKPPEIVMDEIFPSVGMLAQDQYGNFFFPHVLEPGNPHERFVFFXKLVGRFLQMSPQKFPPNVVXKCLPFGGPPKREVFLNKMLGTPAENNPLPVFLKKFGFYWGPIFSWIKASYFFGGSRAIQCPLK

SEQ ID NO: 126634 - protein, 1140 aa, Oryza sativa
  Clone ID: PAT_MRT4530_29161C.1.pep
AGEVGTVRGHPPRCRVIGAGDHAGRLASCGFPPRHAKPVLADALERRTTPSSPLRPPRATHLFTACLLTSSPRFLHLPLCSPSPRRRHAGGGALLLRPPHRRRAEPGGVRHARRAPSCLLGGGGSAGAAVALGGSAVAAAAALLAAALQLVWLRWRGGDSPEEEEVSHEHDKRIVNNKALGTSTDLLDDSSYSSRRTHENVFSEPSVSGRMTVDRTDCQTDVFSGVDTVNNTTQVGSVISTYRSLDTFEGVYGPANTSSIEKVQDILPQSRSVSDGQHQSRHFANRRAQLGGLPHQFLSLSKQNEQTKNGQGPPDNKTDSEGANLLGCHQSDQGDYVDFTSLSSFKRINEHPLNFIPEAHASNLFEPRKASEFTNSYAGGSYLRAGRLVPVACLRDGPVSKQKKAMNDHDDAKLIGWSISNLLSKENPENSTSANRAGLRGTKDVPDYLRRYNSLLIDGRLKDSVDLLESMEQKGLLDMNKIHHASFLNACKKQRAVPEAVRFCKLINNPKMSTFNMLLSVCANSQDFDGALQVMVLLKEAGLKPDCKLYTTLISTCAKCGKVDAMFEVFHEMVSAGIEPNVNTYSALIDGCAKAGQVAKAFGAYGIMSSKKVKPDRVVFNALISACGESGAVARAFDVLSEMTAEASESKGSKPILPDHVTVGALMKTCIQAGQADRAREVYKMLQEYNIKGTPEVYTIALRSCSLTGDLGFALKIYEDMNKIGVQPDEMFLSALVDVAGHARRADAAFEIMKDARAKGYQVGTIAYSSLMGACCNAKDWKKALQLFEEIKSIKLMPTVSMMNALITALCDGDQVLKSFEVLSEMKRLGVCPNMITYSVLFVACERNAEAQLGLDLFEQLKIDSIDLNPTIVGCLTGLCLQMFDNDLSLGNIVVTFNLGKPQIENKWTSSAIKVYREAISTGLLPSSDVLSQVLGCLRFPHDNTLTNTFIENMGISCDIPHHPNVNSLLEGFGEYDIRAFSILEEAASLGAVESISMKDTRILVDARKSKIYTAEVSVLTTLRSLKHRLAAGARLPNVTILLPTEKKQVGLDEREKTLKLAGRVGQAVGSLLRRLGIKYHGEESHGKMRINGLTLRRWFNPKLTSTSSTGTPADLLPLPSRLAKGIADQQRNIRNLSLE

SEQ ID NO: 126635 - protein, 37 aa, Oryza sativa
  Clone ID: PAT_MRT4530_29162C.1.pep
VHTRSISSNPFVSKTCPVIDQKRISAIISLSSQEGFP

SEQ ID NO: 126636 - protein, 107 aa, Oryza sativa
  Clone ID: PAT_MRT4530_29163C.1.pep
MAIIQFNSIGLPKDSRNLQAGPTLHTRCIANLRELCAAVATGGTGFVVALGHNGECKPPGPHMCLLSDYGCHIAGVARRLAHAANTFLAELFALRPLGFGASAGALR

SEQ ID NO: 126637 - protein, 271 aa, Oryza sativa
  unsure (1)..(271): unsure at all Xaa locations
  Clone ID: PAT_MRT4530_29164C.1.pep
MFVATIYSEKRSHKVFLQSLSECGICLSEDAXCMESHCKIHVKERNLTQLTCPDTNCRSPLPPSLLKSLLRDDGYAQWESFALKKLLDAMPDLVYCPRVALSLQSFCYTQLCYFFHKKKDENDIYLMERQKLHSMPAEQLLKERRELEELMNIQEALRSSKQCPHCKMAISKIEGCNKMICVNCGGYFCYRCNQAIKGYEHFWGGNCVLFGTHAHYQIRNPQQQRDENPGDHAELLEQRVQLTYPCPNCGSRNEKYPKLELSYSSTTLDLQ

SEQ ID NO: 126638 - protein, 53 aa, Oryza sativa
  Clone ID: PAT_MRT4530_29165C.1.pep
PPPFLFFFVLVSSLALSVSQTQCLSNTVPHVTYVQAQLSFYCLNSCLCYVMSF

SEQ ID NO: 126639 - protein, 180 aa, Oryza sativa
  Clone ID: PAT_MRT4530_29166C.1.pep
MAAWRGLALAAVVAWCVAAAAAAAPDAALQSKCQQDFTKLTDCMDYATGHEEAPSSTCCGDMSATQQARPECLCYIIQQVHGGRNEVQSLGLRFDRLLAMPTACKLPNANVSLCINLLHLTPSSPDYAVFANASKAAATTPSSTTPGAAAATAGGFKVQAGLSYGVVAAAMVSAVFSSIF

SEQ ID NO: 126640 - protein, 988 aa, Oryza sativa
  Clone ID: PAT_MRT4530_29167C.1.pep
MASSSMAAAIPNPLFGLQISEKLTKQNHPLWAAQILTTLRGAQLEEHIVSTTAAPAAEIEKEDGDKDKKTKIVIPNPEYKTWFVQDQQVLGFIFSSLSREVLQQVAGARTAAQAWNMIDDMFSCKSKAGTINVLLALTTTQKGPMSISEYIAKMRSLADEMAAAGKPLDEEELVAYIINGLDSEFDAAVEGLMATARIAPVSISHVYSQLLSYENRIRIRQAYLTTSANAANRGGGRGGRGSSTGNRGGGRGGFGRGGRGRGAPSGASQGRGRGNDTRPVCQVCHKRGHVASDCWHRYDDSYVPDEKLGGAATYATLDKLTTKERYKGTDQIHTASGEGMSIKHVGHAIVPTPSRPLHLKNVLHVPEAAKNLVSVHKLVADNYAFLEIHGKYFLIKDKATRRTILEGPCRRGLYPLPARSSLRQAFVATPSFVRWHGRLGHPSKPIVLRILSQNKLPCLSNSVNESVCDACQQAKCHQLPFPRSTSVSNNPLELIHSDVWGPASESVGAKKYYVSFIDDYSKFVWIYFLKHKSEVFQKFHEFQKLVEWQFDRKILSMQTDWGGEYLKLHTFFNEIGISHHVSCPHTHQQNGAVERKHRHIVEVGLSLLAHASMPLKFWDEDFLAATYLINRLPNIPGAFGPVHGANGDLAGESASDSSSVQAQLQRQASGSATQGESEQQRSGIQPARATLPAASPTAAPPSPARAVASSSGGAQQSHQPGSSAPSESAQLSEVMRPKTRLQSGIRKEKIYTDGTVRYSCFTSSGEPQTLHEALGDKNWKEAMDSEYQALMKNKTWHLVPSKKGQNIIDCKWVYKVKQKADGSLDRYKARLVAKGFKQRYGIDYEDTFSPVVKAATIRTILSIAISRGWTLRQLDVQNAFLHGVLEEDVFMRQPPGYEQKDGYVCKLDKALYGLKQAPRAWYSRLSTKLHELGFKSSKSDTSLFFYKKLSAHEGNPLGPEDSTRYRSLVGALQYLTLTRPDLSFSVNK

SEQ ID NO: 126641 - protein, 54 aa, Oryza sativa
  unsure (1)..(54): unsure at all Xaa locations
  Clone ID: PAT_MRT4530_29168C.1.pep
LINDSIYLLDERFEQKSFELKEIXLKWLMLYXWENTPPQEREERLRVFHQWENV

SEQ ID NO: 126642 - protein, 135 aa, Oryza sativa
  unsure (1)..(135): unsure at all Xaa locations
  Clone ID: PAT_MRT4530_29169C.1.pep
MQIGRMLDDRRLLGFCCFIGXNLVSWSARKQATVSRSSTEAEYKALANATXIQAPKIAKVWCDNIGAKYMTANPVFQARTKHIEVDYFFVRERVARKLLQVEYISTKDQVADGFTKTLSVRQLEMFRNNLNLQVQ

SEQ ID NO: 126643 - protein, 98 aa, Oryza sativa
  Clone ID: PAT_MRT4530_2916C.1.pep
MARESRGVIPPTSMRAGTAGCGGFGGGGGARARAGGGCGARREMTGGSHPSARVAGGPACQRRARARGADGPRERRERGRGKWAEPAQEGRGGKKNFF

SEQ ID NO: 126644 - protein, 125 aa, Oryza sativa
  Clone ID: PAT_MRT4530_29170C.1.pep
NTTWNPHRARAQKNLRVPPPYQFFQRGQEKWGGIHSTRYFSIPHTFKKKVSQQFSRLMAQEINSPGVGWQTMGRARPGGRPLRHGPPWGERGPGAARPGGGKTGTLGGPGATCRGPWGGKGHPPP

SEQ ID NO: 126645 - protein, 1031 aa, Oryza sativa
  Clone ID: PAT_MRT4530_29171C.1.pep
MASFSMAAAISNPLFGLQISEKLTKQNHPLWAAQILTTLRGAQLEEHIVSTTAAPAAEIEKEDGDKDKKTKIVIPNPEYKTWFVQDQQVLGFIFSSLSREVLQQVAGARTAAQAWNMIDDMFSCKSKAGTINVLLALTTTQKGPMSISEYIAKMRSLADEMAATGKPLDEEELVAYIINGLDSEFDAAVEGLMATARIAPVSISHVYSQLLSYENRIRIRQAYLTTSANAANRGGGRGGRGSSTGNRGGRRGGFGRGGRGRGAPSGASQGRGRGNDTRPVCQVCHKRGHVASDCWHRYDDSYVPDEKLGGAATYAYGVDTNWYVDTGATDHITGQLDKLTTKERYKGTDQIHTASGEGMSIKHVGHAIVPTPSRPLHLKNVLHVPEAAKNLVSVHKLVADNYAFLEIHGKYFLIKDKATRRTILEGPCRRGLYPLPARLSLRQAFVATPSFERISQKCEFRYTGGIWPGGAQQSHQPGSSAPSESAQLSEVMRPKTRLQSGIRKEKIYTDGTVRYSCFTSSGEPQTLHEALGDKNWKEAMDSEYQALMKNKTWHRVPSKKGQNIIDCKWVYKVKRKADGSLDRYKARLVAKGFKQRYGIDYEDTFRPVVKAATIRTILSIAISRGWTLRQLDVQNAFLHGVLEEDVFMRQPPGYEQKDGYVCKLDKALYGLKQAPRAWYSRLSTKLHELGFKSSKSDTSLFFYSKGDVTIFMLVYVDDIIVASSSIVATNALLKNLNQEFALKDLGRLHYFLGIEVKEVNDGIVLTQEKYAMDVLKRVNMSDCKAVNTPLSISEKLSAHEGNPLGPEDSTRYRSLVGALQYLTLTRPDLSFSVNKVCQYLHAATTKHWVAAKRILRYLKHTVKLGLKISKSNSLLVSAFSDADWAGCLDDRRSTGGFAVFIGPNLVSWSARKQATVSRSSTEAEYKALANATAEIMWIQTLLHELGIQVPKIAKVWCDNIGAKYMTANPVFHARTKHIEVDYHFVRERVARKLLQVEYISTKDQVADGFTKTLSVRQLEMFRNNLNLTGSD

SEQ ID NO: 126646 - protein, 829 aa, Oryza sativa
  unsure (1)..(829): unsure at all Xaa locations
  Clone ID: PAT_MRT4530_29172C.1.pep
QANELEQVKGDASSDEQDDVMPADWTNEDFLGLVISEEHHVTXEYKENKVIXGARYAHSEDLKEAVEHCAVSLXREFRVAKSTKSVYKARCVNEECQWHVHAYKGKWNDYXKVSIVTEHKCHLQGVEKYHRNITSAFIATKMYSSIVRNIGFEPRLIISHNEDKFICTISYAKAWMEKRKIIEMMYGTFEVSYDNLLRLLASNSKKXSNTYFDIHTFPSSDEPNKRMLHRAFFALSACMNVFCGLXPILCIDGTFFTGIYRGQVLTAIGAFGNNQVLLMTFAFVESESIESXYWFIKKVCTKVMHKRPDVCIIHDRHASILQAIDYLQKDWDKKGLLARWPDVQSRWCMRHMCANFYRQFKNKHLMNHFKRLCAQNQXXKFNELWKRSDELKTKQMDEQSRWPLVEGDKPPVALGPLHDNSPSMRGRSASLIRNFSHXIENEPKEXWVLLYNTDGSRYDIMTTNLAEVYNWVMRGVQGMPLVGIVEFILHGTQAYLKDLYKKIDTSMVHNNISYGTRVTKDMVHKIVKGKRAXICQYEVICVDRSRRGIYRRQAVQKCVVKXDGRCSCNCTKPKLWHLPCSHVLATAGDCGILPDVYVSHYFWKETIFHTXSEEIYGFGILGSYTTLSPQVICIQDPTXLRVXKGRRKTRCIRNNMYMSETGDRSLXLLEXPKDAVGPSGADVGPSGTTTDGSQPQEEGITRQGIEKNHRSYLKAVXGAQLSTFRXSSATTVARRQVPWYALHEAGLLPLSRLVEVVANDTDLMKLWDADKSLLATLVGRWRPETHTYHIPCGKMALTLXDVLYLLGLSLVGEAVGLVDGDCGWAATIA

SEQ ID NO: 126647 - protein, 360 aa, Oryza sativa
  Clone ID: PAT_MRT4530_29173C.1.pep
MPLLRTYSRRRRRRRDSRLSPTRSRAPYQEEEHVVETASAKARADPLYAKEGHVPSYIAATSSSCQQADAVAQDTEVLPPSGSCLSSSPASHVWARHVKDWGLIFYIRVDLQGSFHTYPDVGGPFQSSQEADKAIDRYLEDHRDPKMHIGQNDDISSMENVIRRCLYWPDGTIKRRTKSFATWEAKKRMHQFIQALVDKYNDDHTLGDLALKLKDVLHYQPICENHIWYYHLNFTAKTKEADGLDSTSDNLFFVEVKRMGIGNYEEMLVSCFCMVNPDNGKPCKGCTNNGTVDMKHPDTDEYFAGHLDAYLPFGCFGKWSDSNDDDKYVKAREAKLRHMYENIKRLLCIYLKCPWFACSL

SEQ ID NO: 126648 - protein, 499 aa, Oryza sativa
  Clone ID: PAT_MRT4530_29174C.1.pep
GGGRGGFGRGGHGRGAPSGASQGRGRGNDTRPVCQVCHKRGHVASDCWHRYDDSYVPDEKLGGAATYAYGVDTNWYVDTGATDHITGQLDKLTTKERYKGTDQIHTASGEGTSIKHVGHAIVPTPSHPLHLKNVLHVPEAAKNLVSVHKLVADNYAFLEIHGKYFLIKDKATRRTILEGPCRRGLYPLPARSSLRQAFVATPSFVRVYVSRDVTFDEQVFPFANLHPNAGARLRAEISLLPPTLINEKTSDQGGEEHHDHLFNISMPNATDISCAESPRNVNSDIPGAFGRVHGANGDLAGESASDSASVQAQLQRQASGSATQGESEQQRSGIQPARATSPAASPTAAPPSPARAVASSSGGAQQSHQPGSSAPSESAQLSENAFLHGVLEEDVFMRQPPGYEQKDGYVCKLDKALYGLKQAPRACKGDVAMFMLVYVDDIIVASSSIDATNALLKNLNQEFALKDLGRLHYFLGIEVKEIGQDVWMIGILLGVLLFL

SEQ ID NO: 126649 - protein, 326 aa, Oryza sativa
  Clone ID: PAT_MRT4530_29175C.1.pep
MVIEWTAGIYEPIYVFCAFYLLVPYQQADAVAQDTEVLPPSGSCLSSSPASHVWARHVKDWGLIFYIRVDLQGSFHTYPDVGGPFQSSQEADKAIDRYLEDHRDPKMHIGQNDDISSMENVIRRCLYWPDGTIKRRTKSFATWEAKKRMHQFIQALVDKYNDDHNLLGDLALKLKDVLHYQPLCENHMWYYHLNFTAKTKEDDGFDSTSDNLFFVEVKCMGKGNYEEMVVSCFCVINPIDNGKPCKGCTNNGTADMKHPDTGEYFAGHLDAYLPYGCFGQWSDSDDDDKYVKAKEAKLRRMFKGLDDPRVTEKIFTLPPGVTIVED

SEQ ID NO: 126650 - protein, 1313 aa, Oryza sativa
  Clone ID: PAT_MRT4530_29176C.1.pep
MASSSMAAAISNPLFGLQISEKLTKQNHPLWAAQILTTLRGAQLEEHIVSTTAAPAAEIEKEDGDKDKKTKIVIPNPEYKTWFVQDQQVLGFIFSSLSREVLQQVAGARTAAQAWNMIDDMFSCKSKAGTINVLLALTTTQKGPMSISEYIAKMRSLADEMAAAGKPLDEEELVAYIINGLDSEFDAAVEGPMATARIAPVSISHVYSQLLSYENRIRIRQAYLTTSANAANRGGGRGGRGSSTGNRGGGRGGFGRGGHGRGAPSGASQGRGRGNDTRPVCQVCHKRGHVASDCWHRYDDSYVPDEKLGGAATYAYGVDTNWYVDTGATNHITGQLDKLTTKERYKGTDQIHTASGEGMSIKHVGHAIVPTPSRPLHLKNVLHVPEAAKNLVSVHKLVADNYAFLEIHGKYFLIKDKATRRTILEGPCRRGLYPLPARLSLRQAFVATPSFERWHGRLGHLSKPIVLRILSQNKLPCLSNSVNESVCDACQQAKCHQLPFPRSTSVSNNPLELIHSDVWGPASESVGAKKYYVSFIDDYSKFVWIYFLKHKSEVFQKFHEFQKLVERQFDRKILSMQTDWGGEYLKLHTFFNEIGISHHVSCPHTHQQNGAVERKHRHIVEVGLSLLAHASMPLKFWDEAFLATTYFINRLPSKVIKFDTPLERISQKCEFRYTGGIWPGTWSKWRLGGRIRLRFSVGPGAAAAAGLRICDAGGVGAAALGHPTSARATSPAASPTAAPPSPARAVASSSGGAQQSHQPGSSAPSESAQLSEVMRPKTRLQSGIRKEKIYTDGTVRYSCFTSSGEPQTLHEALGDKNWKEAMDSEYQALMKNKTWHLVPSKKGQNIIDCKWVYKVKRKADGSLDRYKARLVAKGFKQRYGIDYEDTFSPVVKAATIRTILSIAISRGWTLRQLDVQNAFLHGVLEEDVFMRQPPGYEQKDGYVCKLDKALYGLKQAPRAWYSRLSTKLHELGFKSSKSDTSLFFYSKGDVTMFMLVYVDDIIVASSSIDATNALLKNLNQEFALKDLGRLHYFLGIEVKEVNDGIVLTQEKYAMDVLKRVNMSDCKAVNTPLSISEKLSAHEGNPLGPEDSTRYRSLVGALQYLTLTRPDLSFSVNKVCQYLHAPTTKHWAAAKRILRYLKHTVKLGLKISKSNSLLVSAFSDADWAGCLDDRRSTGGFAVFIGPNLVSWSARKQATVSRSITEAEYKALANATAEIMWIQTLLHELGIQVPKIAKVWCDNIGAKYMTANPVFHARTKHIEVDYHFVRERVARKLLQVEYISTKDQVADGFTKTLSVRQLEMFRNNLNLTGSD

SEQ ID NO: 126651 - protein, 403 aa, Oryza sativa
  Clone ID: PAT_MRT4530_29177C.1.pep
MAAMPGGPDLAGAGGAVAVAVDAMQVDDPPRASAEEKHGPTIMGGNDPVTGHIISTTIGGKNDEPKRTISYMAERVVGTGSFGVVFQAKCLETGETVAIKKVLQDKRYKNRELQIMRSMDHCNVISLKHCFFSTTSRDELFLNLVMEFVPESLYRVLKHYKDMKQRMPLIYVKLYMYQIFRGLAYIHTVPGVCHRDIKPQNILVDPLTHQVKVCDFGSAKMLIKGEANISYICSRYYRAPELIFGATEYTTSIDIWSAGCVLAELLLGQPLFPGESAVDQLVEIIKVLGTPTREEIRCMNPNYTEFKFPQIKACPWHKIFHKRMPPEAIDLVSRLLQYSPNLRCTALEACAHSFFDELREPHAKLPNGRPFPPLFNFKQELANTHPELVSRLLPEHAQRHSGF

SEQ ID NO: 126652 - protein, 1307 aa, Oryza sativa
  unsure (1)..(1307): unsure at all Xaa locations
  Clone ID: PAT_MRT4530_29178C.1.pep
MSPVLASETEEVVATVGGGDFDFGEATASELSPIWGGGPGDLVPLLFCTQNMAHVSFKSKEADSMSRWSKYLSTEESPPSASLSWRAMGVDGPQGSASGQKHLQMEPVVQLSKVAEGLLAKMYRLNSILDYPVPNVHTFSEAFWKAGVMPNFPKLCITLSKKFPEHPTKLQLDKVDKFALDALNENAEGYFKSLLRRHLSIIHLAEQHISMDLTEGIREVLLAESFTGPFPNLQVFETPTETHGGGSAIDIISNWYIDNFVKDXFLSPFHPRYPDILTNSAHPMRAQDLANVTSYREWVLLGYLVCPDELLRVTSIDVAMVVLKENLVLSLFRDEVKIKSHVVAMYILLHENYQLYVLPKVLESKRMAKSGRTKQKEADLEYNVAKQVEKMLMEVHEQALVSADALHHERRILLKQEIGRMVLFFTDQPSLLAPNIQPNADQLSVPNTLLLQIARHSNIHIFLQMVFSALALAQSIKGYALSYLSSCAGRIRFLLGTPGMVALDLDATLKGLFQQVLHCLENIPKPQGENVPAITCDLTDLRKHWLSILMIVTSSRSSVNIRHLEKATVSTGKEGLVSEGNAAYNWSRCHLTTVFRNTMFGPEGRPQHCCAWLGAACCFPECASSIIPEEVNKIGRDSISYVESLIESIMGGLEGLINILDSEGGFGSLEMQLSPEQAAIRLNNATRAKAVSGLLAPGHESYPDNSSSVKMLEAAMQRLTSLCSVLNDMEPICVLNHVFILREYMRDCIIGNFRRRFHSMIRTDSCLQRPSVIESLLRRHLSIIHLAEQHISMDLTEGIREVLLAESFTGPFPNLQVFETPTETHGGGSAIDIISNWYIDNFVKDASRTGVVFDASQNCFRSSQPIGGGYLAEAFTDKRELKALVRLFGGYGVDRLDKLLREHTSALLNCIDSALRSNRDALEGLAGSVNSGDRIERDANLKQIIDIETLADFCIQAGQAITFRRLLVEAVGAVLEEKVPLIYSLLKGLAMQLPEEVPDKNEIIRLRRVASSVGVGDKHDAEWVHSILRQRGSANDNSWTLLPYLCAAFMASNMWSTTAYDVNTGGFSNNLHCLARCVSAVVGGSEYTRMEREHRRSSLSNGHMDELQEPELLSRVSAEANIKSAMQLYVKLSAGLVLDSWNDTSRPYIVPKLIFLDQLCEMSPYLPRSTLEVHIPYTILRSIYHQLYGASLMATEPMEPSPRQSPLISLAHASPSMKQNRADTTPRSHTFEPGYHSSSGSQYDEGYEGDRRTGERQLRSMRRSGPLDYTGTRKVKFVEGSSSGSHGAGSGSLQRFAVSRSGPLSYK

SEQ ID NO: 126653 - protein, 132 aa, Oryza sativa
  unsure (1)..(132): unsure at all Xaa locations
  Clone ID: PAT_MRT4530_29179C.1.pep
WTTATWTPPRSGPPSTRRPPPKXPPRPRPYAPPQSGGRRASRSRRRGGAARPSLQGPSTPXTPPPPSPRPXNCRWPPGPIPRPTSPSRPTPPGSSSSTPHLPHLPPASPPTTSSPPSPSPTSESTRRQPSRF

SEQ ID NO: 126654 - protein, 104 aa, Oryza sativa
  Clone ID: PAT_MRT4530_2917C.1.pep
MRIVSDVGNSAESVRKRIKFIGYYKGRIIRIRRILEIPYPHLRLHHTIHIYMHIRRISETPYHILISNGFKADQIRSDRILPNPFSPLHITQRLHHYRFFLICK

SEQ ID NO: 126655 - protein, 75 aa, Oryza sativa
  Clone ID: PAT_MRT4530_29180C.1.pep
MVSPPVTPENGEWAIVGGTGEFNMAYGTIVHTMIKHNVGTEALRKLDIHAFYTPKTAQTVHDTLITPKCTTGQAE

SEQ ID NO: 126656 - protein, 182 aa, Oryza sativa
  unsure (1)..(182): unsure at all Xaa locations
  Clone ID: PAT_MRT4530_29181C.1.pep
APPPEPPPPTXSALPPPPPXTPPPPNPXPPPPHPLPPLCTPTAASTPPPPPGPPPPRHPSPWRTTSSTPAASPPPRRSKPPRTSPTSSPPPSRTRCSPSSPGSASPARTSPRSSPPSHGSSAPRRPAXPPRRLPPPPRRLVRPPDRQPPPPARRRQGLPHMRHGPEARVLDPLLGILRDARS

SEQ ID NO: 126657 - protein, 68 aa, Oryza sativa
  Clone ID: PAT_MRT4530_29182C.1.pep
MSLCRGTEEDSYGPPVNQAASGANANTPGNRRRPRGPGAARPTGPPKPVNIDLPAIPFEELKKITSNF

SEQ ID NO: 126658 - protein, 120 aa, Oryza sativa
  Clone ID: PAT_MRT4530_29183C.1.pep
MALGAKYGHLRKFKLGWSLSFACEDQFFYADHLRVTRRGGVGRNEEERGGWRFNSSLSRQQRRLSDEEVLGRGGGGDEEVRGREGMQRLGSSLSRRRQRLSNMEVTTTMMMPPGSAAISA

SEQ ID NO: 126659 - protein, 673 aa, Oryza sativa
  Clone ID: PAT_MRT4530_29184C.1.pep
IHRFELRHDLFGLINTEGSGNVVCHVCGEVFTAHRGLLAARSPVLGAALNGPRMGSGGLYGGVTIKTNALDPLVDKPLLRYLDTDSLPPQMQQGELEEEGRAMAQHLLAAADRYGMERLRLLCEAQLCKHIEVASVASILILADQHGCSGLKNACFEFLKSPGKFAAAMATQEYDYLKTNHCALADEVVKGNQAKWMLATVETFMRHRLNSKSILETATREIALHASTSNETPPVFLDLEESLRAKGDMTLREEATLKVLKVVATLGKAISTGAIAAVGYYVPGIVGAKFGEPSLPRLPRFAMAAVTSWFAGKVMYYAILQGSTEFILKHGEERMKMELSNIILNKHSDDKTLVEAVKTQFFAEHLFSDQYQDRTLFRWHLRRTYVDSAFMERVKEIEVKSSNDGPGLISGQRIISTRPFGDLMEDPLACILGSPDSNMESNKSAEHTGTIVKRREIACPPAVLVEPIRLQPNVPICSLLARSRTGSNLEVNPVILDLEESLLAKGNMTLEEEVTIRVSKMTASVFKVFATAAFGASSYYALGLGPKIGEPPIPRFPRIGVSTGIAWFGGKFVYYTALRAGAEFILKRGEERMKMELANIILNKHSDEKTLVEAVKENFFAEHLFSDQYQDRQLFRWHLRNTYVDSAFMERVKEIEVKNSDDGWINFWAQNYK

SEQ ID NO: 126660 - protein, 101 aa, Oryza sativa
  unsure (1)..(101): unsure at all Xaa locations
  Clone ID: PAT_MRT4530_29185C.1.pep
PLAENEHKMEENRQQNRRSINXRTMSRIRLINEWAKNSEMTGPIGPKFTSLQNISRDKAASRRWAGLGQPMVRPNPRWYHWMXGFVFGRRGSLPNDGWRAI

SEQ ID NO: 126661 - protein, 153 aa, Oryza sativa
  Clone ID: PAT_MRT4530_29186C.1.pep
MASSAQPQQQQQPPQPPGQPANAPSCPPVQASLSPCVSYFIGNSSTPSDACCEQMRAMFQSQAPCLCAAVASAPSPLAPVLGGVQSLLPTACNLPPNACADATGSTSGSAPAGGSSATPSTGATAAAPAMEPAGMDPAMTAGGGSKSVPGMPY

SEQ ID NO: 126662 - protein, 45 aa, Oryza sativa
  Clone ID: PAT_MRT4530_29187C.1.pep
MAGCPTDDGKPSDPSKVTAICDQFIGPSLGNVVSGELLHYRTQMH

SEQ ID NO: 126663 - protein, 472 aa, Oryza sativa
  Clone ID: PAT_MRT4530_29188C.1.pep
MEYRRVKDQESYDVVSQKDIESPGERSLSSTSATSSLSTAGASKGKNSWKLKSIVTLALTLLTSSQAILIVWSKRAGKYEYSVTTANFSVEALKCLLSLIALYRTWNSQGVTEDNRLSTSFDEVSVYPIPAILYMVKNLLQYYIFAYVDAPAYQILKNLNIISTGVLYRIILKKKLSEIQWAAFILLCAGCTTAQLNPSSDHVLQTPIQGWVMAIVMALLSGFAGVYTEAIIKKRPSRNINVQNFWLYIFGMLFNLVAICVQDFDAVMNKGFFHGYSFITVLMILNHALSGIAVSMVMKYADNIVKVYSTSVAMLLTAVVSVFLFGFHLSLAFFLGSTWHSVLQRAENMVNAIKGLFISCDVPMAQFIVNLNASMPASDKFILHMLDPTHMFVQPHVAEMIRSSPNYQKLYYYQKSRAYEAGKVQIVSEFRNMELKFSGNGRQCKKKTSAAPSAVASWPIVFNAGPFLAFSP

SEQ ID NO: 126664 - protein, 38 aa, Oryza sativa
  Clone ID: PAT_MRT4530_29189C.1.pep
MAEVLLVLVEPREATAWVCNDCSSGATRLESASGGGGS

SEQ ID NO: 126665 - protein, 839 aa, Oryza sativa
  unsure (1)..(839): unsure at all Xaa locations
  Clone ID: PAT_MRT4530_2918C.1.pep
RRRRRGFRRIPPSPRTIKRGKSLPVIPSLFSPAFPSLSPSGSFGFAPAIFAGASMAPEMAAAVSFPSGLSLSLPALYNRSPXSLLRFRRSPLALPVGIKPAPSSSLSAVAAELRFAAVVAPDLLPLRRRLLRLRRVFVDLVRSFVSPADRRSAAVLVDPNRAAASRRFGRRFRHRRRPGVSRGPPLRFPLLSSLSAAAPPXPMAAAGDHRGAGAPPPVGRAGEAAFGRAPWLPGGARPSAARARXVRLTRGTHGAGRLCLINLQNKPNIHHNSKRLRSVKVLSLVSNLSLPFVFSLSLSKPLQQMANNEKGNKVRSQDIGTSSSRVNEAPDTSCVTLVQHLINQNRLLIEILQQHQTPILNLSQIQPQVQXRQSKHSHHESACRQHPERPMVTCHMLTQKKQARECPQQKRKTPMRTEDEVRKMIITSTEWPPPGMTKRQRRNTFRGAPQLTEHLLANGGRVFDSEDSDQVSSDDEDEMERKACSRCGEIGHVASSCATTCVHCEEDHPPDRCPTSRITCFFCEGTDHVLKDCQFSFLLTKKMANQPASSNGEKHQGNTNPRQDYSFSLTPVPGQRNQNEXRKCRVREDICCFNCQGMGHFADKCPKPRNIAAGPSVHATPCNQKLAPQRIVIHASRSSPIARVATAPTPASALPQGVNAQFQPQPSVDKTEAXSALYLWMFQHSSQXNQVQDEEPEQDHPPGECPTRKVTCFLCEETNHVPKDCQLSVLLTKTAEIQRTTLRLSHQLVSSNSNIDDIIHSTNAPPAPPNSATNHSTNTFSTNHSLHRQPQQRIVVDGRSCFSXPTPGRAKGNQPQEGDTKQKTVIRFNQQSEGSFSCE

SEQ ID NO: 126666 - protein, 102 aa, Oryza sativa
  Clone ID: PAT_MRT4530_29190C.1.pep
NGVGYGTPRPEDAAAVRGGGLLLLLPSSTPHAGLRAVELLLERLRGRPHTCLEGHHPQRGLTRPALPRQHEQLGAPKARRQTVRLQRVPHRTPLSPPVPHTN

SEQ ID NO: 126667 - protein, 417 aa, Oryza sativa
  Clone ID: PAT_MRT4530_29191C.1.pep
MAASLLSHVVSDLCIGKPPARVLPPSTPVAAALAALRTGDDPFVFVVDADEALRHSRGKKIAAGCVVVKVSVADVLCYVCGDADNLSDPAAALGRPVSALAAAVHAGGGDHHGAALRVDSLTSLLDAIDALLSNDAQTLLVPLHAHAARSRKHHHVHVSGCSPANPAAATDYCVLTREDIVRHLFSYSISLFAPVAARTVASLGLVRRDVHAVHADDDALDAIPLLRRSIADGTAVAVVADDDALVGEICPGVLGSCDIESASAAFAALSAGDVMTYIDCSLSPPEFLLRSIRAQLKGRGMDAMADLMDAADDAASSLPLSPSSSSSASSDEDSPFGRARRARRSSSGSFRWRSTKDVAACHAGSSLVAVMAQALAHRVGYVWVVDEVSGALTGVVSFGDVLAVLREHLRDGDTQMN

SEQ ID NO: 126668 - protein, 98 aa, Oryza sativa
  unsure (1)..(98): unsure at all Xaa locations
  Clone ID: PAT_MRT4530_29192C.1.pep
RCLQAPSSTYGKRLLPKILNVQPDRQRILFRVKEHSVNAVLDTRXVRDEPKLVLLEKHDPASGQDRAVPMIMDELMMKACEALRRVRSQVDRLCGKVC

SEQ ID NO: 126669 - protein, 151 aa, Oryza sativa
  Clone ID: PAT_MRT4530_29193C.1.pep
MAKPPLHERCPIQLRQVAEQVSRWKAGSPEVASAMENPPGPGPSEAGPSGSAAGKSAEASTPSSSFFNGLSGQIPAPDSPGEEVPQGEQPRFDPYSIPEVPLEHVFGAVPDRGEPSTSHTPPNPEPQLGEENAGPSNHQIQHDVIRSRLET

SEQ ID NO: 126670 - protein, 122 aa, Oryza sativa
  Clone ID: PAT_MRT4530_29194C.1.pep
FFFFFLQFHLHFSRNGNEQLNQAHGGRNISDRSIQPKQINKEKNRWVGNQEDQAFVAPVRTWQRCRASLSKWGLPPPFDLAWVLANKLILLLLDRSTRFSRVRAVVFPCRRHKQINPTSSPR

SEQ ID NO: 126671 - protein, 466 aa, Oryza sativa
  Clone ID: PAT_MRT4530_29195C.1.pep
MAPAANGGAAAAHVLVVPFPAQGHLIPLLDLAGLLASRGLRLTVVCTPATAPLLVPLLAATHQGAVSALTLPFPSHPALPAGVENAKGSGPALFAKLIVAFAGLRGPLGTWARARADTPDRVVAVLSDFFCGWTQALADELGVPRVVFSSSAVYGTAVLHSMFRLMPKREDEHDDECPLSLLYRFYKAGDEVSEGVKNNFLSNMGSSCIVSNTFRQLEGRYLERPLADLGFMRVRAVGPLAPEPDASGNRGGETAVAASDLCAWLNQFADGAVVYVSFGSMAVLQPPHAAALAAALERTGTAFVWAAGSHAAAALPEGFEERAAAGGRGKVIRGWTPQVPVLRHRAVGRFVTHCGWNSVLEAVAAGVAMLTWPMTADQFVNARLLVDEHRAAVPVSWGGIAVPPSADEVARVFEATSAAAAAASEWSEVGARVKELAGEAAAATREGGSSWREVDELARELRELGG

SEQ ID NO: 126672 - protein, 419 aa, Oryza sativa
  Clone ID: PAT_MRT4530_29196C.1.pep
MAPAANGGAAAAHVLVVPFPAQGHLIPLLDLAGLLASRGLRLTVVCTPATAPLLVPLLAATHQGAVSALTLPFPSHPALPAGVENAKGSGPALFAKLIVAFAGLRGPLGTWARARADTPDRVVAVLSDFFCGWTQALADELGVPRVVFSSSAVYGTAVLHSMFRLMPKREDEHDDECPVSFPDIPGSPSYPWRQLSLLYRFYKAGDEVSEGVKNNFLSKHGELLHRVETGFGSMGGLQPPHAAALAAALERTGTAFFWAAGSHAAGGLPEGFKERAAAGGKGKVIRGWTPQVPVLRHRAVGRFVTHCGWNSVLEAVAAGVAMLTWPMTADQFVNARVLVDEHRAAVPGSWGGIAVPPSADEVARVFEATSAAAAAASEWSEVGARVKELAGEAAAATREGGSSWREVDELARELRELGG

SEQ ID NO: 126673 - protein, 178 aa, Oryza sativa
  unsure (1)..(178): unsure at all Xaa locations
  Clone ID: PAT_MRT4530_29197C.1.pep
DECPRGRVDAHHKFAATIGDDEGACGGGRQVDSSGSHRALAWVLDHLFFPRHRRRRRGGAGSAVYGAASMMEAVRAAQAENARNLLVRAKLVCERRGVAAATVAVEGEPREALCRAAEDAGAGLLVVGSRGLGAIKRAFLGSVSDYCAAXHRASCPIMVVKPSSNAGDEDDGGHRTSN

SEQ ID NO: 126674 - protein, 53 aa, Oryza sativa
  Clone ID: PAT_MRT4530_29198C.1.pep
AQSLTRPLCKIWVRTGKNLPKKNKPGSLPNAPNLFDLTGGSELEKGWLLYHGF

SEQ ID NO: 126675 - protein, 181 aa, Oryza sativa
  Clone ID: PAT_MRT4530_29199C.1.pep
MKVLVAVDDSRGSHRALSWVLDHLFFPAAATGDGGEEEQVPRPAPELVLVHAIEPLHHVMFPVGPGSAVYGAASMMEAVRAAQAENARNLLVRARLICERRGVAAATVAVEGEPREALCRAAEDAGAGLLVVGSRGLGALKRAFLGSVSDYCAHRASCPIMVVKPPPDAGDEDDGGHCTSN

SEQ ID NO: 126676 - protein, 298 aa, Oryza sativa
  Clone ID: PAT_MRT4530_2919C.1.pep
MGRTPCCDSKVLKKGPWTPDEDKLLVDYVQANGSGNWRLLPKLAGLNRCGKSCRLRWTNYLRPDIKRGPFTPEEHKSILQLHAIVGNKWSMIAAQLPGRTDNEIKNYWNTNVKKQLRQGQAAAVGEQAALASLGGGAASCPAARHMAQWETARLEAEARLSLLSGTTSVATASVAASSSSSSTAAAGGAEAPPDIYLRLWNSEVGDSFRKSARSAAREDQEPANASDEAAPVSATFARPGDDSSAASNVTAAAAADEYQVFLDLAAEDFELFHGRHGGFPLFPAVDMLGETSLYTAFD

SEQ ID NO: 126677 - protein, 58 aa, Oryza sativa
  Clone ID: PAT_MRT4530_291C.1.pep
EEQISDFLQGPQLTAHGLSCLHKDLEEKKPCVLFWNNHWSTVIKFEEELYILASDSSF

SEQ ID NO: 126678 - protein, 114 aa, Oryza sativa
  unsure (1)..(114): unsure at all Xaa locations
  Clone ID: PAT_MRT4530_29200C.1.pep
MVNPEDLQLSPAGRKFVXAYKDKPVVSSTSNICYSRERCYFEVDLDTRRYSKTASKGWESFRARMNNGILGMVFTIQALKQDVLPEQVLCCVRLNKIEFIKHGLISTIVSLDDK

SEQ ID NO: 126679 - protein, 377 aa, Oryza sativa
  Clone ID: PAT_MRT4530_29201C.1.pep
MGDEISRRCIGLQGLHLQSQTDWHACISSTFGPALELSRSPRPFRARLCIEGIPTHARTEVTAVKLIGPRLEPSAVRGPNEDPDGDGGRPHPRYQSRSRSLWGRITGRSHSSERGGDGQGFYNEDTRGCQRNRDTYITINHIRRSRDDTEVRAPISLSAAQKQKPKRGGGSLAIDLSSSPAELFSFHHGDQGNQEQQEDPIRALTVRRRKMPFLRVEAAISFSPEGEHGVQGSPVYVPLSGGTVVTQAEDVNNNSAADLIASLTTPIVSWNVRGLNAPAKREAVRNLLQQQNATLVCLQETKLQDVDKACIIETNGVNFQNNFFFLPAEGSRGGIILAADENYFTLSHCDLRMFSLTAKVTMRETNAYWTITGAYGP

SEQ ID NO: 126680 - protein, 114 aa, Oryza sativa
  Clone ID: PAT_MRT4530_29202C.1.pep
TLAAPPSGSPLPSPSPTPSSTEPGANPKPASAAVDLLHTVLAPVLATTASTSPAVPEHAHRLTPPPLGVLISPPNVLKRYKLICGVIARETFIILEDDINLVPEAEKNAPNPGP

SEQ ID NO: 126681 - protein, 283 aa, Oryza sativa
  Clone ID: PAT_MRT4530_29203C.1.pep
MSGGRQSYWCYQCRQRVRPRGQDMECPYCDSGFVSEMDDVDALMRHFVGMDPDFHRDPRFGIMEAISAVMRHGMAGTNREVDVRGRPNIFSDLEMEFGSGPWLLFRGQLPGHLSEDNGFDVFINGRRGVGMRRANIADYFVGPGLDDLIEQLTQNDRRGPPPATQSSIDAMPTVKITQRHLSGDSHCPVCKDKFELGSEAREMPCKHLYHSDCIVPWLEQHNSCPVCRYELPPQSSTGASCSRTRSTNQSQSSSSNGRTNGRQRRRNPFSFLWPFRSSSSSSR

SEQ ID NO: 126682 - protein, 227 aa, Oryza sativa
  Clone ID: PAT_MRT4530_29204C.1.pep
MASRRRMLLKVIILGDSGVGKTSLMNQYVNKKFSNQYKATIGADFLTKEVQIDDRLFTLQIWDTAGQERFQSLGVAFYRGADCCVLVYDVNVTKSFERLNSWREEFLIQASPSDPENFPFVVLGNKIDVDGGNSRTVSEKKAKAWCASKGNIPYFETSAKEGFNVEAAFECIARNAIKNEPEEEILKSVANGNRDIFLIQLMLEVLEGNSARQAVNARRYGTSDIAS

SEQ ID NO: 126683 - protein, 130 aa, Oryza sativa
  Clone ID: PAT_MRT4530_29205C.1.pep
ATDGVYEDGYIHRLKWGFTQSNRGCQRHSTGIGQKRKWTAADQQRRGQISYRPERKRDLAGDNSNSNTSNNNNRDVVTGSHFLGDGYQDSDSTHKRKRALSDSPRREHQPSPSERYEPYGPHRPHSESRD

SEQ ID NO: 126684 - protein, 71 aa, Oryza sativa
  unsure (1)..(71): unsure at all Xaa locations
  Clone ID: PAT_MRT4530_29206C.1.pep
LCQKPEPINCPENYLFCGWTAADTNRAARTRCSHSRSCSHRKQLAEQAIAAXTAPPPVTSQQRWYAVPRPT

SEQ ID NO: 126685 - protein, 144 aa, Oryza sativa
  Clone ID: PAT_MRT4530_29207C.1.pep
MLLSFFGNVPAALAFRSPAADHHRSARILAPLRAAAAPPASRACLSPLGCRVDPPPRSPTSRPSPLCPLRRRPHSPKKKRKRRFQRKRRDKREEKEMRRKKSATDMTAACWGGGVWAAGRWAKRTSHWGCVREGIQLYFKDFDG

SEQ ID NO: 126686 - protein, 67 aa, Oryza sativa
  Clone ID: PAT_MRT4530_29208C.1.pep
LRTDTEESFQRHNSRSKSPKLDPPQTERIKHQKRTSKRAIYPASWSRLIINQQTAANEVRSKPIDPL

SEQ ID NO: 126687 - protein, 97 aa, Oryza sativa
  Clone ID: PAT_MRT4530_29209C.1.pep
CNPPGALHALPTRTIQFLVQGLSPMLRSSHQYWSPCLSYHPVAGSLLGTTMTSLSAHRCRFPPTSYLRCLQQVDGNGERRECIFPRTLLVMVEVVSL

SEQ ID NO: 126688 - protein, 2090 aa, Oryza sativa
  unsure (1)..(2090): unsure at all Xaa locations
  Clone ID: PAT_MRT4530_2920C.1.pep
KFTNGRSPTRIELGRYYTVWGLPPPSPTWRLTDPRYKRDPPGRDXGIESYRQHTHHNLRNPRTSVPQYPLYPVYGYPPSTVARQVGALGAQGSTTMSSSFVDNSVNPGINQGVSTSTMLVWTQVGEIVFPVYTTVPISTGPSMTRSENVMVTTLDDSMSKDPPAEVENGTSTTSEPEKDPSAAKSCPSDVNHEPTRTTSEATRSRCPIHKTRKHTLQACWVFLDVQAEIRACKERGIQRTSPTRDVYCPIHKTKNHDLSSYKVLLSAMKTSPPKVQQSQISLRDTNKERGATIISDRFVGVIDIDPYEPSILHLLEDQASSSTSTPRDVFTIDGISTSARANAEVEDQVVTPAQHIRAIDAILRETPYDPVLNDDLAQWIERLWESVANLSNAFEEAAARVPPEQPPTGDANGELPEQRASPRQATLPPRGTSDLRDHLNGRREARHARDNENHSXHHDSSRRRENEERGGHPSENQDCDNRHNRHDRKHREQWMLGDTGGGHRHNDDDDGDRRRDNNGGRRQDSREPVRHPRNRTPEPSHSSSSSSSSSCSSSDRHPRRTYDRRQPTAPGGGCRAFSRALRDVXWPKRFRPGAIEKYDRSTDPEEFLQVYSKVLYAAGANDNMLVNYLPAALKGSARSWLVHLPPYSISSWADLWQQFVANFQGTYKRHAIEDDLHVLTQNPGESLRDYVRRFNECRNTIPEITDASVIRAFKTGVRDRYTTQELATRRITTARKLFEIVDRCAHANDALRRKNDKPKTTGDKKLAKDAPESSKKKSHKSGKRKTQTEVLAAEYADSPEHPXPQGNDTKKIWCPIHKSDMHSLEDCFVFKKSLAKQLALEKGKRVRVVEKATEAATQDSDLAYPNSDLHVSYIFXVPRRRYPIVVEPTIRNIKVARVLIDGGNSINLLFANTLDAMGILRSELTPTDQPFHGIIPQSSSKPLGKITLPVTFGQANNFRTEQITFDVAEFDTAYNAIIGRTALAKFMAASYYAYQVLKMPGXSKLAMQRDKRSLDMVENTPNPPATAEPPKKVSKTNITPKPDGSIKIVPLSSANPDKTELALITFLRDNADVFAWQPFDMPGVPREVIEHKLMVRPDAKPVKQKLRXFAPDRKQAIREELDKLLKAGFIREVLHPEWLANPVMVRKANGKWRMCVDFTDLNKACPKDHFPLPRIDQLVDSTAGCELLSVLDAYSGYHQISMAKEDEEKIAFITLFGVXCYVKMPFGLITAGNTFQRTVQGALNDQLGNNVEAYVDDIVVKAKTSDSLIDDLRETFDNLRRYRLMLNPEKCTFVVPSGKLLGFLVFGRGIEQNPEKIKAIENMKSPTRVKEVQKLTGCMVALSRFITRMGERGQPFFALLKKQDKFVXTQEAEEAFIALKRYLSYPPVLVAPXSNEELFLYVAATPYSVSTVIVVERDKVQRPVYYISEALHDTKTRYPQIKKLLYAVIMTSRKLRHYFQAHRVTVVSSFPLGEVVRNRDVVGRIAKWVVXAKXFDVHFVPRTTIKSQVLADFVADWTMPENRSDGQTDSETWTMAFDGALNNQGAGVGFILTSPSGDQFKHAIHLDFRATNNTAEYEGLLAGIRAAAALGVKRLIVKGDSELFPNHVHKDXKCSSPELSKYLAEVRKLEKRFDGIEVRHVYRKDNIEPDDLARXRASRREPLEPGTFLDVLTKPSVKEANDEDSTVAPDISSGATEAEHAXDIETTNDWRIPLIKFITSDELPEDDAEAEKITRQAKIYCMIGNDLYKKAPNGLLLKCVSSNDGKHLLLDIHERICGSHASGRTLVEKAFRQGFFWPTALKDACDMXKHKATSASAPNYPSYLAILVLGARHTRTIPTSTGRLXFLFVVIDKFTKWIEATPMGEIKADNAIKFIKGIFCRYGLPHRIITDNSSQFISADFQDYCIGLGVKICFASVSHPQSNGQVERANGIVLQGIKTLLWAVRTTPTTSNKETPFFLVYGSEAMLPTELRHQSTRVQKYSDEDQEEQRNDDVNLLEEHRERVVVRAASYQQALRRYHEKRIRARTLSISDYFLRRVQSQAWRNKLLPKWEGLYTITQVLRPGAFKIVDGDGRELANSWNIDQLRKFYV

SEQ ID NO: 126689 - protein, 78 aa, Oryza sativa
  Clone ID: PAT_MRT4530_29210C.1.pep
SSRSLCHHEVHFLSVQYFLLSVFLRTKPKHLWEARCSENWSSVRKEFNNWESCRSCRPCCLSMTSTMIRISFRDKAGS

SEQ ID NO: 126690 - protein, 76 aa, Oryza sativa
  Clone ID: PAT_MRT4530_29211C.1.pep
KSNTATENSSMVHKAIVSTQKKLQTDGFIMLRSINVLEINLQINFTQSSQKISESPSQPCNIVRKNCQMNRLPQKL

SEQ ID NO: 126691 - protein, 83 aa, Oryza sativa
  unsure (1)..(83): unsure at all Xaa locations
  Clone ID: PAT_MRT4530_29212C.1.pep
LKLNFTDVKPCISGPKSPHDRVPLKEMKSDWHACLDSNXSVVLAAICSYTNTSNPSVIIGAGLVAKKACELGLEVCMFVHICN

SEQ ID NO: 126692 - protein, 469 aa, Oryza sativa
  unsure (1)..(469): unsure at all Xaa locations
  Clone ID: PAT_MRT4530_29213C.1.pep
WRRRPPRLTSSLSPSRRRATRCRSTTSPXLLAARGLRLTVVTTPGNAAQLAPLLAAHPDSVRPLVLPFPSHPSLPAGLENTMNCPPVYIAVFIHALAALHRPILAWARSQPAHPVVAVVSDFFCGWMQPLAAEIGVPRVVFTPSGVLGTAVPHSLFRRLVKRPVGCDDGFPVAFPAIPGEPAFEWREISMLYKAYIEGLVEEQVGESLKQNCLWNLEGWGFVSNTFRALEGRYLDAPLEDLGFKRVWAVGPVAPDTDAAGERGGEAAVAAGDLSAWLDAFPEGSVVYVCFGSQAVLTPAMAAALAEALERSAVPFVWVVSGDGVVPEGFEARAAAAARGMVVRGWAPQVAALRHAAVGWFMTHCGWNSVLEAVAAGVPMLAWPMAADQFVNARLLVEDAGVALRACAGGAGVAPDAGELAAVLADAVGEKGSGARARAKELAADAAIAVRSGGSSYEDLERFVQEIQKL

SEQ ID NO: 126693 - protein, 477 aa, Oryza sativa
  Clone ID: PAT_MRT4530_29214C.1.pep
MGKLVSKSWQESKLLWHIAFPAILTAVFQFSIGFVTVGFVGHIGQVELAAVTVVENVIEGFAYGVLLGMGSALETLCGQAVGAGQVSMLGVYIQRSWIICGATAVILTPTYVFTAGILIGLRQPTDIAAVAGTYTRWVIPQLFAYAANFPLQKFFQSQSKVWAMTAISGIALALHVVLNYIFLTRLGHGLVAAALIGNVTWWLIILAQFIYLVSGCFPEAWKGFSMLAFKNLAAFVKLSLASAIMLCLELWYYTAVLILVGLLKDAKLQVDVMSVCINYQLWTLMVALGFNAAVSVRVSNELGANRPKAAKFAVAMAVSTSAIVGAVFMAVFFIWRTQLPRFFSDDADVVRESAKLGYLLAATIFLNSIQPVLSGVAIGAGWQSLVAFINIGCYYLVGIPLGVLFGFKLKLDAMGIWVGMSLGTLLQTAILAFISFRTKWERQAMMAEERIREWGGRNDDALPSTTTPTADDHNVDR

SEQ ID NO: 126694 - protein, 125 aa, Oryza sativa
  Clone ID: PAT_MRT4530_29215C.1.pep
MAERVARLSSQRAVVIFGASNCFMCHVVKTLFSELGVSWAVHEVDKDPNGKDVERALAGMVGRTPPVPAVFIGGKLVGPTDQVMSLHLAGKLVPLLREAGALWLRDTKYSYILPANQLINYRSIN

SEQ ID NO: 126695 - protein, 80 aa, Oryza sativa
  Clone ID: PAT_MRT4530_29216C.1.pep
RLGISNKISYEVECQTSSAYVSLLSLSPPSHGGFGGGDGIFGNSGGVSGGSRGRIWLDPGHGRYQQPQQADGGARWGEEE

SEQ ID NO: 126696 - protein, 39 aa, Oryza sativa
  Clone ID: PAT_MRT4530_29217C.1.pep
FPSSYFNFCPPKTRGCTLHSSRGLLTRGEMREPDRTINY

SEQ ID NO: 126697 - protein, 150 aa, Oryza sativa
  Clone ID: PAT_MRT4530_29218C.1.pep
MDENLPPRTTKRDHVDPPKPSLTPTPTTPPQRENNEETYELPAEFRVTSPPPPSPPYPFPISPSMEEDGMIFAEDLGYMSTPCPSPPSDVDDMNPPERHPINYPNRNHPAYDDDDDFELLNEDWLFFRDHQTPPKDVHSPSTRFKRHKRD

SEQ ID NO: 126698 - protein, 305 aa, Oryza sativa
  unsure (1)..(305): unsure at all Xaa locations
  Clone ID: PAT_MRT4530_29219C.1.pep
MDRSWMYTTDLRRQYKEYRDGVLSFMKAAEEDRIRRNDKYMCCPCNDCRNDILLDDEKEVHAHLIRRGFMERHTCWVKHGEQDLGTDGATADRSGADNHEEGDEEEHDMFVPSPLGGEMVDVDPDMLQDMLRDVDDPTMNERDSMKFSRLVSDSDTPLYAGCKPKHTKLSATLDLMKLKASSGWSDKSFTELLGILKDILPQENTLPETTYEAKQVLCPLGLEVRRIHACPNDCILYHKQYADLDACPVCKASRYKRKKSAAVXGEGKKSKRGGPAKVVWYLPIIDRFKRKFANPNEAKSETTPQ

SEQ ID NO: 126699 - protein, 1732 aa, Oryza sativa
  unsure (1)..(1732): unsure at all Xaa locations
  Clone ID: PAT_MRT4530_2921C.1.pep
IPTFRESPILQEKNLRNSKASKATPGLEWLIPGLEIELYSRGXGCSVWLGLCKRMPRYKPEYLFGTEGFVQELRTMSFLIGFGIAPLYAQIPHDRDEEKCRVKVALNSNREDIPSVMFEAGGGSYIHACQEVARIAIGELRKSYNDRLADTEYRYHPRQPXGSDRGSYLEPAGIENDATTRHLVEMLWAXDETRAEIVIAAQDREDRNCDKICKLEDKVDRLEKELAALKGEAPPQKARVRLTARKRALFVPRYQLAPKMVLTRSNGNGPNPNNNNNAENPMLAQVLAHQAQLMNLMMQQLQNQQNQGNNHAPPQNKLAEFLRVRPPVLSSTTNPVEAGDWLHAIEKKLDLLQCTDQEKVSFASHQLHGPASEWWDHFRLNRTTAEPISWLEFTAAFRKTHIPSGVVSLKKKKFRSLTQGSRTVTEYLHEFNRLARYAPEDVRTDEERQEKFLEGLNDELSYPLMAGDYHDFQKLVDKAIRQEDKYNRMEQKKRRIAHFKAQQGNSXRLRLALGPQSMPQGGSSSVARPQRQFFNNNTGNNNRNQAPRPVAAPSQQQPAKREQGSKPSVCFNCGDPGHYADKCPKPRRAKVVPAQNNSSAPAAKARVNHVAAAEAQGAPDVILGMFPVNSVPATVLFDSGATHSFLSMSFAGNHGMEVEELRRPLMVTTPSNQALSSQRSPSVRIEIQGVPFLANLILLESKDLDVILGMDXLARYKGVIDCASRKVTLTSNDGQVVTVHALPFGPLRSSLNQITLEEIPIVREYLDVFPDDLPGMPPKRDIEFRIDLVPGTTPIHKRPYRMAANELAEVKRQVDDLLXKGYNRPSSSPWGVPVIFVEKKDHTQRMCVDYHALNDVTIKNKYPLPRIDDLFDQLKGATVFSKIDLRSGYHQLRIKEEDIPKTAFTTRYGLFECTXMSFGLTNAPAFFMNLMNKVFMXYLDKFVVVFIDDILIYSRTKEEHEEHLRLALEKLREHQLYAKFSKCEFWLSEVKFLGHAISAGGVAVDPSNVESVTNWKQPKIVSEIRSFLGLAXYYRRFIENFSKIAKPMTRLLQKDVKYKWSEECEQSFQELKSRLISAPILILPDPKKGFQVYCDASKLGLGCVLMQDGKVVAYASRQLRPHEKNYPTHDLELAAVVHALKIWHHYLFGTRTEVYTDHKSLKYIFTQPDLNMRQRRWLELIKDYDLGIHYHPGKANVVADALSKKGYCNAMEGQQLPLELCKEFERLNLEIISRGFVAALEAKPTLIDQVREAQINDHDIHEIKKNMRRGKAIGFLEDEQGTVWLGERICXPPDNKDLKDAILKEAHDTLYSIHPGSTKMYQDLKERFWWASMKREIAEYVAVCDVCHRVKAEHQKPAGLLXPLKIPEWKWEEIGMDFITGLPRTSSGHDSIWVIVDRLTKVAHFIPVRITYSGSHLAELYMARIVCLHGVPKKIVSDRGSQFTSKFWKKLQEEMGSKLNFSTAYHPQIDGQTERVNXILEDMLRACALDFGGSWDKNLPYAEFSYNNSYQASLQMAPYEALYGRKCCTPLLWDQTVERQVFGTDILREAEEKVKIIQERLRVAQSRHKSYADNRRRDLSFEEGDYVYLRVTPLRGVHRFHTKGKLAPRFVGPYKIVSRRGEVAYQLELPQSLAGVHNVFHVSQLKKCLRVPTEEANLEQIEVQEDLTYVEKPIRILETDERRTRNRVIRFCKVQWSNHSDEESTWEREDELKSAHSHLFASSSESRGRDSV

SEQ ID NO: 126700 - protein, 102 aa, Oryza sativa
  Clone ID: PAT_MRT4530_29220C.1.pep
MERYTCWVKHGEQDLGTDGAAADGSGANNHEEGDEEEHDMFVPSPLGGKMVDVDPDMLQDMLRDVDDLAMNERDSMKFKLLGILKDMLPQENTLAKTTYEAK

SEQ ID NO: 126701 - protein, 277 aa, Oryza sativa
  Clone ID: PAT_MRT4530_29221C.1.pep
MASAKVENRGGGGFGSKRSRNDVSVREGDWTCPQCGNVNFSFRNVCNRGACGAPRPSPSLSPRVPPPPAAGYDRPHLGYDRPHLFYGSAGTPPPIPLGSGSYGAPYPHLGLRYGYGPPVGPPASYGLFSSYGQPGPMGSPMGGMGYGPGPELGRYGYGFRGSPMPVSSPWSGGALVENNDSSASRKRRGGPDGMAENDWICPKCENVNFSFRNSCNMKKCGAPRPSPGSNATPCRKDKDAPEGSWTCPECNNLNYPFRTACNRKGCGSSRPAAATAN

SEQ ID NO: 126702 - protein, 444 aa, Oryza sativa
  Clone ID: PAT_MRT4530_29222C.1.pep
PRQPGNDIDVFLEPVIDDLEILWKEGVETWDASGQENFTLRVLLFCTINDYPALGNLSGQTVKGKKACSDCMEHTRSRWLKKSRKIVYMGHRRWLPLRHAFRRKKKIFNGKKELGSAPADLSGDQKKRKRSKEDKKRMWKKKSIFWQLPYWEDLEVRHCIDLMHVEKNVCDNLLGLLLNMPGKTKDGLNARLDLQEMNIRSELHPVTDEKTGRVYLPPACHTLSKDEKIAMLSCLANIKVPSGYCTTISKYVKLEDLKLVGMKSHDCHVLITQILPVAIRGILPPQVRHTIQRLCAFFNAIGQKIIDPEDLDGLQADIGSTLCHLEIYFPLAFFDIIGDLTVHLVKQTKICGPAFMREMWPFERYMGILKSYVRNRAKPEGSIIEGYTTEEVIQFCIDYMAETDPIRVLASRHEGRLAGVGTTSKPSFLLSVACQRTNFASLGL

SEQ ID NO: 126703 - protein, 150 aa, Oryza sativa
  unsure (1)..(150): unsure at all Xaa locations
  Clone ID: PAT_MRT4530_29223C.1.pep
IFLGTSSSAAGWFPPAPDLRGKQLSHPSGVAVPWVVLTIVGVRPPRADGLLPVRVEGMLLWGVWEXISCGAYXVAVLSSRTAVSPWGCGAPGRFGHGGSVDGNTPSLVEALLDSLGCCVVCGXYFAAXVCLLSWVSGRGLPLCSGCRRPF

SEQ ID NO: 126704 - protein, 183 aa, Oryza sativa
  Clone ID: PAT_MRT4530_29224C.1.pep
RRRRRPSWAPCRRTWAPPAARSARATTCRCPTPPPRRTRPSPSSPRRRRNPCPPSHPPVLPPDEGWRRRGRRGGGTPRGRSRRRCRCRRGGPARSSPGASGRGRPGRSRRGATTPGRSPPPRPQPAPRQRRRRSASRWPTSPPARRAPPTGSASRRLSPPPSRSRLLTHSLARGWKRGKYGNG

SEQ ID NO: 126705 - protein, 275 aa, Oryza sativa
  unsure (1)..(275): unsure at all Xaa locations
  Clone ID: PAT_MRT4530_29225C.1.pep
MDRSWMYTTGLRRQYKEYRDDVLSFMKAAEEDRIRRNNKYMCCPCSDYRNEILLEDEKEVHAHLIHHRGLFMERYTCWVKHGEQDLGTDGAAADGSGKDNHEEGDEEEHNMFVPSPLGGEMVDVDPDMLQDMLHDVDDPTMNERDSMKLSRLVSDSETPLYAGCKPKHTKLSATLDLMKLKASSGWSDKSFTELLGILKDMLPQENTLPETTYEAKQILCPLGLEVRRIHAYPNDCILYHKQYADLXACPVCKASRYKQKNSAGEGKKSKRGGPM

SEQ ID NO: 126706 - protein, 550 aa, Oryza sativa
  Clone ID: PAT_MRT4530_29226C.1.pep
MDQSWMYMTGLRRQYKEYRDGILSFMKAAVEDRIRRNDKYMCCPCSDCRNEIWLDDEKEVHAHLIRRGFMKRYTCWVKHGEQDLGTDGVAADGSGADNHEEGDEDEHDMFVPSPLGGEMVDVDPDMLQDILRDVDDPAMNERDSMKFSRLVSDSETPLYAGCKPKHTKLSATLDLMKLKASSGWSNKSFTELLGILKDMLPQENTLPETTYEAKQVLCPLGLEVRRIHACPNDCILYHKQYADLDACPVCKASRYKRKKSAGEGKKSKRGSPAKVVWYLPIIDRFKRIFANPNEAKLVRWHATKRRNDGLLRHPADSIQWRNIDRKLKGFAADPRNMRICLCTDGMNPFGDMSSSHSTWPVLIANYNLPPWLCFKRKYIMLCLLIQGPRQPGNDIDVFLELVIYDLEILWKEGVETWDAYGQENFTLRVLLFCTINDYPALGNLSGQTVKGKKACSDCMEHTRSRWLKKSRKMVYMGHRRWLPLRHAFRRKKKIFNGKKELGSAPADLSGDQVHNMVKDITNEFGKKRKRSKEDKKRMWKKKSIFWRLPY

SEQ ID NO: 126707 - protein, 150 aa, Oryza sativa
  Clone ID: PAT_MRT4530_29227C.1.pep
MAANTARGGHRLPKPTPRSPGGRGEGIGGAQASSSCPLNLAANEDPFSLTVLGEEEKAENGIWLQRQWCNDGWSTTRRWCQWTAYGLRLMMASTEISEVAAYALQMMANSERQHQMVEVKPEGWKMVEKKEDGSRLILTNDATAMDDVWG

SEQ ID NO: 126708 - protein, 100 aa, Oryza sativa
  Clone ID: PAT_MRT4530_29228C.1.pep
SIDDVERPRRNTLPRNLYTAPVQVRMRRRLGDTARRNARCTTSTTAGLDRRRRNTAAVEEFQSRWLLCSVSFKDVSFTPSPRQRPAAAPTHPLCHRRSLH

SEQ ID NO: 126709 - protein, 60 aa, Oryza sativa
  Clone ID: PAT_MRT4530_29229C.1.pep
MSTDDNINGAAEGDVDNGDGGGGAGNSSINRGNSTSYSSGEPFSGFTFVAASRGGKENEG

SEQ ID NO: 126710 - protein, 121 aa, Oryza sativa
  unsure (1)..(121): unsure at all Xaa locations
  Clone ID: PAT_MRT4530_2922C.1.pep
KXRLPLCLLVHAVLLLLLLXNLRXLPRVLLLLLPXRQLIKSXSISWICXRIVRPNNKRLXWCDSXRFNCVLLCVNRGXLLIIMSPCRDYXXTNXLXVDCGCXFVXXISDXXVXXCCXQILX

SEQ ID NO: 126711 - protein, 572 aa, Oryza sativa
  Clone ID: PAT_MRT4530_29230C.1.pep
MAGSTAAALKFTVRRKPAELVAPAGPTPRELKKLSDIDDQDGLRFHIPVIQFYRRSAAMGGRDPAPVIRAAVARALVSYYPFAGRLRELEGRKLAVDCTGEGVLFIEADADVRLEHFGGALQPPFPCLEELVFDVPGSSEVLGSPLLLFQVTRLACGGFILAVRLHHTMADAQGLVQFLGAVAEMARGGAAAAPSVAPVWGREMLEARSPPRPAFAHREYDEVPDTKGTIIPLDDMAHRSFFFGAREVAAVRSHLAPGIRERATTFEVLTGCLWRCRTAALAPDDDEVMRMICIVNARGGGKSGGGAGMIPEGYYGNAFAFPVAVATAGELRARPLGYAVELVRAAKGEVSVEYMRSVADLMVQRGRPHFTVVRAYLVSDVTKAGFGDLDFGWGKPAYGGPAKGGVGAIPGVASFLIPFKNAKGEDGIVVPMCLPGPAMDKFVEEMGKLMKPAAAATAATRQQPADMFAMIKRREGRGRRRPAHRGAGELGGEQARPGQRRTPGVLQQVSRAESQDVVGVDYLHHIKAVAGDAGGTALVAEYGIRKLICALNRSAARTMCVCDEFPLHFVPW

SEQ ID NO: 126712 - protein, 236 aa, Oryza sativa
  unsure (1)..(236): unsure at all Xaa locations
  Clone ID: PAT_MRT4530_29231C.1.pep
LIRTPRRFHAPDFSECFQQQAREWARRIRKTKDAIIYKLIAHGTIEKKSYHQQIRKAFPNNLSTIKDTQQRXFVKFRDMMGLFALXSNIVSQLSXDVNIGALNDLQQDQICAGIETGSTXSSDQADEESSILKXFYDAQVIHSAINHDAIMNAINDQKMRLETEALHVSSRTVELLSTXMLRSCDGFSVPTXTGRVSRMYAGXTLNSQLVSSSYPSETANNRFQSLQLCTLDGSTF

SEQ ID NO: 126713 - protein, 383 aa, Oryza sativa
  Clone ID: PAT_MRT4530_29232C.1.pep
MTRDGALPASGGGGAAEGPRRCSQCGHHGHNARTCTARGPVKLFGVRIGDKPPTAAAGGGGGMRKSASMGSLAQLAEGGGGGGGREEGYGSDGNDDKRRKRGEAWSEEEHKKFLLGLSKLGKGDWRGISRNYVGSRTPTQVASHAQKYFIRQTNVHRRKRRSSLFDMVIDDSDDQPLSRTSSQEVEVEENLEDGHPVTAPVIPPAPVPMLSSSLVPPPVPAMAPVAPGPVLTSASATLPVSAVAPQTDEKEQVASGSNTTETGAAIPEVMPPYGYPMMLPPYYPPAFVPMPYYGYVPVFYAPPGAVQAQHEVVKPVAVHSKPPVHIDELYSMSELSLKGEAGVKNGTPNSLLPPRPIGRPDRQSAFHGKGPSDGSSNGLIPAK

SEQ ID NO: 126714 - protein, 277 aa, Oryza sativa
  Clone ID: PAT_MRT4530_29233C.1.pep
MAAALARRGGGGLARALARGRGMCSATAAERAAGAALTSEELMRMERERSAHNYHPIPVVFSKGEGSHILDPEGNKYIDFLSAYSAVNQGHCHPKVLRALKEQAERLTLSSRAFYNDKFPIFAEYLTSMFGYEMMLPMNTGAEGVETAIKLVRKWGYEKKKIPKNEALIVSCCGCFHGRTLGVISMSCDNDATRGFGPLVPGHLKVDFGDTDGLEKIFKDHGERICGFLFEPIQGEAGVIIPPDGYLKAVRDLCSRHNILMIADEIQTGIARTGKML

SEQ ID NO: 126715 - protein, 209 aa, Oryza sativa
  unsure (1)..(209): unsure at all Xaa locations
  Clone ID: PAT_MRT4530_29235C.1.pep
MSSRMAGSAILRHVGGVRLFTASARPFLAGGEAVPGVWGLRLMSTSSVASTEAAAKAEAKKADAEKEVVVNSYWGIEQSKKLVREDGTEWKWSCFRPWETYTADTSIDLTKHHVPKTLLDKIAYWTVKSLRFPXDIFFXRRYGCRAMMLETVAGVPGMVGGMLLHLRSLRRFXQSGGWIRPLLEEAENERMHLMTFMEGANPKWYERAL

SEQ ID NO: 126716 - protein, 315 aa, Oryza sativa
  Clone ID: PAT_MRT4530_29236C.1.pep
FTSTSLRSSGSSRRCGWSESSGPSGRTSPARSRSTRASSATFSTTRLRCGSSALRLRRSQASSSRKVLGRRASAARQLVAVADRNVYNGVYGPWTVEDSDVREVLLYRSGLVTAAASFVAAASAAFLPEGNAAGDAIRQGADLLYATGAAGLGLSLVLIHIYVTPIKRFLQALWVVGVVGSIGTYVAGAQPLDESLVGYVLDHPAALWFVGPTFAALTGLVFKEGLCYGKLEAGILTFVIPGLLLGHLSGLMDNGTKAGLLGVWMVLFTVFAARKFQQPIKDDIGDKSVFMFNALPEEEKKALIQKLEMQTETDG

SEQ ID NO: 126717 - protein, 50 aa, Oryza sativa
  Clone ID: PAT_MRT4530_29237C.1.pep
LCFFFCCLMINNMRHCSSPALYCPSHDNYTRLRAQAYHAPRVILYRLINK

SEQ ID NO: 126718 - protein, 105 aa, Oryza sativa
  Clone ID: PAT_MRT4530_29238C.1.pep
MPWRGRVPLQLSTHAPRAARRVYDMRGPPAAASSLGEGATPGATAPRGAPAHTAREARLLLWLQGYDVRGFIRSLVGWSGALMCDKGREVCETDGDVGGCRFCPG

SEQ ID NO: 126719 - protein, 455 aa, Oryza sativa
  Clone ID: PAT_MRT4530_29239C.1.pep
MASTAAILALILLLLPPIALAAGDLNGFRATLTRIHQLSPGKHSEAVRRDGHRLAFLSYAATAAAGKATTTGTNSSSVNVQAQLENGAGAYNMNISLGTPPLDFPVIVDTGSNLIWAQCAPCTRCFPRPTPAPVLQPARSSTFSRLPCNGSFCQYLPTSSRPRTCNATAACAYNYTYGSGYTAGYLATETLTVGDGTFPKVAFGCSTENGVDNSSGIVGLGRGPLSLVSQLAVGRFSYCLRSDMADGGASPILFGSLAKLTEGSVVQSTPLLKNPYLQRSTHYYVNLTGIAVDSTELPVTGSTFGFTQTGLGGGTIVDSGTTLTYLAKDGYAMVKQAFQSQMANLNQTTPASGAPYDLDLCYKPSAGGGGKAVRVPRLALRFAGGAKYNVPVQNYFAGVEADSQGRVTVACLLVLPATDDLPISIIGNLMQMDMHLLYDIDGGMFSFAPADCAKL

SEQ ID NO: 126720 - protein, 355 aa, Oryza sativa
  Clone ID: PAT_MRT4530_2923C.1.pep
MADNKKGSMVRNQDVGTSSSRVNEAPDTSCMAVVQHLINQNKLLIEILQQHQTPILNPSQMQPQVQLEAVQALTPQVSAPPASQQAHRAMPLVDSKEARIICFICVEQGHYARNRPQQKRKAPMRTEDEVRKMTITGTEWPPPGMTKRQRRNFFRGAPQLTEHLLANGGRVSDSEDSDQVSSRDEDEKSLQGFNQNKKEHKACSRCGEIGHFASSCVTTCVPCEEDHPPDECPTSRITCFLCEGTNHVPKDCQFSFLLTKKMANQPASYNGEKHQGNPNPRQDYSFSLTPVPRQRNQNGKRKCQVWKDICCFNCQEVGHFADMCPKPRNIFASTSVHATPLNQKLAPQRIVIHAS

SEQ ID NO: 126721 - protein, 88 aa, Oryza sativa
  unsure (1)..(88): unsure at all Xaa locations
  Clone ID: PAT_MRT4530_29240C.1.pep
XXWXKXXXXPCAXGRXRXPXXXRXSSCVXXXXXXXCXXXXXXXXXXXXXXXXSFXXTGXXXHRXXXXLXLXXXAXPCXGPXGXXQXPY

SEQ ID NO: 126722 - protein, 97 aa, Oryza sativa
  unsure (1)..(97): unsure at all Xaa locations
  Clone ID: PAT_MRT4530_29241C.1.pep
GITAGRSRRIAATVAGDALMGRGIPAPTPPSTRRDVGALPPVQSDVTDDRPXWVSTPLAPPATWRSGKGLGARQCKGPRGVTWHPESPLAASASSKV

SEQ ID NO: 126723 - protein, 69 aa, Oryza sativa
  Clone ID: PAT_MRT4530_29242C.1.pep
MAKERNRDVLDNAFKKAMATKTSPLPVQLDSVFTWRVLSRKGREAARQRPKEGTQHPRMLPLSAQAVPS

SEQ ID NO: 126724 - protein, 111 aa, Oryza sativa
  unsure (1)..(111): unsure at all Xaa locations
  Clone ID: PAT_MRT4530_29243C.1.pep
SIHPHSLRNHRRYPKNRLCSLRSQKLTXPISSPYSDSGHGDATATTDEXLLPVAANQATPMKNRAPRRRIDLPRWRIERPHLSSPDPASVVAIFELELHASVRQRRWIGQG

SEQ ID NO: 126725 - protein, 160 aa, Oryza sativa
  Clone ID: PAT_MRT4530_29244C.1.pep
MAAVVRGVLNGIREKGLSNFLRHARDEGYFKCLLDGNLLQTKIHNIGATLVGVDKFGNKYYEKLHDTQYGRHRWVEYAEKGRYNASQVPPEWHGWLHHITDSTGDELLEQNAKAYIVDHKENFSGEGEELIYHSKGHALNPGQRDWTRYQPWEPKKEEAT

SEQ ID NO: 126726 - protein, 90 aa, Oryza sativa
  unsure (1)..(90): unsure at all Xaa locations
  Clone ID: PAT_MRT4530_29245C.1.pep
EGGGVXGEERGEAVLEGVGXXIGXRWTWEXSAARXGSAXPRRGTRWWSWVAGGPRAVTGSRMMSCVSNMLRXSSSSSSPLRRRCSISTRX

SEQ ID NO: 126727 - protein, 117 aa, Oryza sativa
  unsure (1)..(117): unsure at all Xaa locations
  Clone ID: PAT_MRT4530_29246C.1.pep
HSCAGTRSRMPTXLQLEIESERQTKQEVGCMNKRMDHMQQRVNIMEHMGMPQGVQNIQTSSYYAYNSRHAGSPMSTVLEELHSNEPTHRHLLEEPYAEPSSKDLDNILIGDDFNIPK

SEQ ID NO: 126728 - protein, 88 aa, Oryza sativa
  unsure (1)..(88): unsure at all Xaa locations
  Clone ID: PAT_MRT4530_29247C.1.pep
XRDVAAEESSTEVTSQRRGERLXRRRQRXAIFVRRRCCPTRSTTRRNXRXXTARXXQARLGGEGGGCGXEGGXCCCCCYRXXRVFAIG

SEQ ID NO: 126729 - protein, 134 aa, Oryza sativa
  Clone ID: PAT_MRT4530_29248C.1.pep
MESRCSSASGNFSSSHPRKPPPVAAKPTAPKPEKKTIVSISNRSARGPQHTGASEERGVSGRASEAAAAGGQRATAPPTAAQHRQSAGLTVEAASHVRRPVGGAPDEERLKSRRAGRGRHGGGGGDEKPLGYAG

SEQ ID NO: 126730 - protein, 94 aa, Oryza sativa
  Clone ID: PAT_MRT4530_29249C.1.pep
VTPAAEAHAEKEEHPRPWTRLKCHNILWNCTGDDMRALFRKHHSIDDVRAIHVQANQKQTTGVCNHGFRRGGSKHTQRNKFNYSKRLNKKKRRD

SEQ ID NO: 126731 - protein, 463 aa, Oryza sativa
  Clone ID: PAT_MRT4530_2924C.1.pep
MASPNSEALERYKNAITAASSVVGAAMLLRRIVADVLPDTALGALLLLPPPSSRRHCVVIEEFDGAFYNRVFLAAKAYVSTLLAAAPVPLMKASLPRGAGAEQITLAMRPGTAVVDVFDGAELTWRLSSHGGGGGGRRRGGDDAREVFKLSFDGRHKDMVLGAYLPAVMARVAAMSQGQRQAKLYSNEWGKWRPVRLRNASTFATLAMDAALREAVVDDLDRFLGRKEYYERTGRAWKRGSILLIEDVDCAVVAAPRREPHGGPDGSNPPSVNRKVTLSGLLNMVDGLWSSSGHERILIFTTTHVDRLDQALLRPGRMDMHVHMGYLGFGAFRELAATYHGVAGDDHPLFPEIEALLREVEVAPAEVAERLLMTDDAGAAIEMVAKLLRDRKAGTEEDGGGYVSQKLHAGTGRRHPRASRRGGGGGAVVATTTRRGVFGDEIGMEISHGQGRRGVRGRGRGRR

SEQ ID NO: 126732 - protein, 70 aa, Oryza sativa
  Clone ID: PAT_MRT4530_29250C.1.pep
SVETRLPSTSSVQVVPSDWLLTKWPYYAQFPEVAMPWLGLSSLIHFAMVVVYCSFSKAVVLAILCWPSLV

SEQ ID NO: 126733 - protein, 165 aa, Oryza sativa
  unsure (1)..(165): unsure at all Xaa locations
  Clone ID: PAT_MRT4530_29251C.1.pep
IPAPLQDPKTTAELFELADKVAWKEAWAWNSPGTGAAAAATPPLMGPHGPRARERPPAISQAPLLHPGRREGKAPATPADDRRGEAKKKAPTDDGDNSEDLEFQIPQGTVATLDLXGGGACAHTSRRGFKAIRRELLATVPTHEAARKAHWSEVKLTFDQSDHLT

SEQ ID NO: 126734 - protein, 86 aa, Oryza sativa
  Clone ID: PAT_MRT4530_29252C.1.pep
MAAESGRRRLARRAMRRAGRRRRMGGQLEPAGRVDGRATAWPRWRAGGGVVVTLASGRLQRGRTGGRMGGRLEPAATRFCFFFKNL

SEQ ID NO: 126735 - protein, 107 aa, Oryza sativa
  unsure (1)..(107): unsure at all Xaa locations
  Clone ID: PAT_MRT4530_29253C.1.pep
CPKAVFSSPTTVSGGGAARITMSIDSISARRIGGRGDSEAPTDVRIKAWGARSSTSTLGLVYAGLYNQRSDVERGRRXGGAPVLQWPKCGDVSGISCSRATRTWGLR

SEQ ID NO: 126736 - protein, 82 aa, Oryza sativa
  Clone ID: PAT_MRT4530_29254C.1.pep
KMQFGPQVSRGGSGQLAQRPKKEWAPSGGSPEWSLQSLGAWSAVGNPKRIAISHRGVFFLQKNFNSHSKKEIKAIKNQEFQK

SEQ ID NO: 126737 - protein, 83 aa, Oryza sativa
  unsure (1)..(83): unsure at all Xaa locations
  Clone ID: PAT_MRT4530_29255C.1.pep
PFGLQDAVEFMSXSAXEXVXKVAXIRXXXXVXXXQXLLTQRPQHRRHPNRGRSPRVRIXXXELHFXPKRLLLXRLTLLGKMIS

SEQ ID NO: 126738 - protein, 250 aa, Oryza sativa
  Clone ID: PAT_MRT4530_29256C.1.pep
QRLTPHYSQMDQGVDKNVIDNSLVSNCDFPVVKKLDKCVNEEASVQSPFENKDTRSLGMVCDHENNKSGVAEVITPPENEAIESYISKSVADEDPSYGCQTPRESIFDPFAPGPEELACAPKKKVTKAPELPSRRQLSFDSGDYPVKRLSFEFDDAEEEDQFLERICMMFIDLIISNQALETTGKDLIGSNSPRSCETPSSEPLLTGIADTCPDAPLRRPLKAVQLSPSICRKLDFDSVSPRCLFVKENK

SEQ ID NO: 126739 - protein, 1025 aa, Oryza sativa
  Clone ID: PAT_MRT4530_29257C.1.pep
MNLDHNSTDPKITGCLVRFHSDIKNRVGNRTEKPTPDTAISLFPSRIFRASRSSTINMSEESGLAAHGSEEGFPSVEIRMLKLEGNRDVCLDIDSGIRVDDDGAGRISSGAGGGAGRRGRHGRGSSGGSGRHGAEEEAARLGRGWGVARARVRLGRGAKWGRARRGVGQSARRGRRGEQGAARERQKRVGSIYLYSTGSIQVLNVTDPNMVKELANCKSLDLGKPCYLQKERGALLGMGILTSNGDLWVHQRKVIAPELFMERVKGMVNLMMEAAMSMLNSWKNEVEDRGGSAEIVVDEFLRTFSADVISRACFGSSFSEGKEIFIKIRQLQKAMAKQSMLIGVPGSRYLPTRSNRGIWNLDSSIRTLILNISKKYEHDSSTSVNKDLLHSIIQGSKDGPFASCTPEDFIVDNCKNIYFAGHETTSTTAAWCLMLLASHHEWQSRARVESLDICQGRPLDFDILRKLKKLTMVIQETLRLYPPASFVAREALNDMKLGGIDIPKGTNIWIPIAMAHRDPSVWGPSADKFDPDRFANGIAGACKPPHMYMPFGVGVRTCAGQNLAMVELKVVLSLLLSKFEFKLSPNYVHCPAFRLTIEPGKDYVIIEKEIPFFPVYVRIAKSPQCSHGKRNMSATASNPFVAGSNASNSFVASLKPSEFEENKHVHMVANPKPSKLEEHDQKSATRIDEAANAIQLYELFTIVEDENFIIKYQKFEQLNNTQEKINDRTNVRQQGTRIRFAPLLNLIYSVELEDPSGLGLDWIDFFFCWFSFCKLQERLSPHYSQIDQGVDKNVTDNSLVSNCDFPVVKKLEKCVDEEVSVQSPFENKDTRSLGMVYDHENNKSGVAEVIRPDKEAIESSSSMNVADEDPLYGCQTPRESIFDPFAPGPEELACAPKKNMIKAPELPPRRQLSFDSGDYPIKRLSFEFDDAEEDDQFLERICKMFIDLIVSNQALETIGKDLIGSNSPGSCETPSSEPLLTGIADTCPDAPLRRPLKAVQLSPSICRKLDFDSVSPRCLFVKENK

SEQ ID NO: 126740 - protein, 488 aa, Oryza sativa
  Clone ID: PAT_MRT4530_29258C.1.pep
METFLPAILSDLLGRSISYLVQRYRQQSTVQDDLEKLRLALVRVHVTVEEAEARHITNKAMLRQLDVLREAMYSGYHMLDALTYRAHADGASFSFAPSRLNAAKRLRLLAADEGAAELRRTVDSLGRTIADMREFVVFLKGYPRISTQPYSMHLLLDKLMFGRQKEVEQVVGFLLQPDVCGAGAGAGAGVLHIVGVARVGKSTLVEHVCHDERVRGRFSSIVCLSREDLEDMGDHRALTVKHGSHASHGSSLVVVDLAEDEEPVGDGAWRRLRSSAMCRARGSRIIVTSRSPETVRGIPAARAIELKFLRDDVYWYFFKVLAFGSANPDDHPRLASIAMDISAEQKGGFIGATIASSLMRANPDAHYWTLILKNMREYTRKHRAMFGKHPHDLLRNNHPVYLWRLAESSKIFLCHGFYTACPAKQEIPRVTFQEVLSGRVTPRGRFEVLAWTSQIPPCRSYLMSCSLDTPPGPHRVLDRKKRLRQLVT

SEQ ID NO: 126741 - protein, 83 aa, Oryza sativa
  Clone ID: PAT_MRT4530_29259C.1.pep
RQDNSTYRRAMTSHDAYVAGSLKGGVTSASARCEVELGRDGRAGEGTWHALEQVVRVGSPLGRRCSASVQISRASVGLCVWGE

SEQ ID NO: 126742 - protein, 101 aa, Oryza sativa
  Clone ID: PAT_MRT4530_2925C.1.pep
MEFGWALRRPMRLPDSPRHERGLPAALRGVGVKPEVWCAWLEGVMRIVLSRPLSDVDLNVNIVVCVPRLVLDGDSNAHSAWNSIREFLGVTIVMGVFHGSS

SEQ ID NO: 126743 - protein, 111 aa, Oryza sativa
  Clone ID: PAT_MRT4530_29260C.1.pep
PGKGGAANQPPPPCAPSSNPQPQKFMQLVPHPVWGEFGSPPAKGQGWIGDPRAWELDVGAMSQALYFYQDPGTPPAKRRWSSLDVGTEIPLSNHAEAEWTLSGFDILVPKE

SEQ ID NO: 126744 - protein, 135 aa, Oryza sativa
  Clone ID: PAT_MRT4530_29261C.1.pep
EAAAPRLRPWRRRGPRAGLVEEFGALAPPISDELELARVRSARAAMAGKGTPRRGRAAPSTAPARAPARRRRAAPRPRTPPQAPAGGSAPTPRPKTRSSFSGRAAPRARSPSPQRSGRKRLALLLRRRRRRRTSP

SEQ ID NO: 126745 - protein, 257 aa, Oryza sativa
  unsure (1)..(257): unsure at all Xaa locations
  Clone ID: PAT_MRT4530_29262C.1.pep
YLAPSPWWSPPVAVATIGFARRTSSTPPLLTKPTEAPPTPSSRDRRLWKLVAGRLPSSFVVVSPTGEFLSSFSSVTLELSHDLDCSGNTTPQASSTARTKPTATDDGEQRRAAATAGRSPESPAHGAEXIPTADFGGQGVDGTACTTANATVSTAQLGTAASGDRSGGGGDGGXRRRGARALEGTGELGQMGKKREGERGWRWSLNRGRGARTWPVEAGIVFSRMTPPGRNPLSPSHTANPRTLPLRPTPPPILLGP

SEQ ID NO: 126746 - protein, 205 aa, Oryza sativa
  Clone ID: PAT_MRT4530_29263C.1.pep
MARPRAGRATGRTAPERAMCDETGRGGRAQRSITAKSASERNKHVATCGNPVPYPPRQNPDLLCPFALHCPQLATISVFFVEVSGGDTVLGHGELRRRRRGAHRADAGASRSQRSQGQARQEERPSAAVVLDAAYFVKVSMDGTPYLRKVDVAAYGDYLELVEALNDMFYCSTIGLMDGYGEWEHAVVYEDGDGDWMLVGDVPWE

SEQ ID NO: 126747 - protein, 114 aa, Oryza sativa
  Clone ID: PAT_MRT4530_29264C.1.pep
MKKKPTAAAAAAALILILCAVMQAQVEARSMKRAPPPPAAHRAVNEDGTLPPAASPSPPPPLAAADAPPAGSRRTNPDAKMRGDLVHSPRLALCHQLFDCCCLIISESAANQVV

SEQ ID NO: 126748 - protein, 94 aa, Oryza sativa
  unsure (1)..(94): unsure at all Xaa locations
  Clone ID: PAT_MRT4530_29265C.1.pep
QIEHHTMEANANNKKDTTMEATNQNKNVTPKPFNQITTHTPHPAHLLQFGTXIKHTAEPHQTPLTNHKLMPTDIKNPHQIYTQAHSTKKKKKKT

SEQ ID NO: 126749 - protein, 176 aa, Oryza sativa
  Clone ID: PAT_MRT4530_29266C.1.pep
MEVEAFPIRFTRGIRSHWGRRKYQRLEAANGGGKTRATQQLGGARRGGAGWGLRLRRLLRVRVRVARAWLSSPARLLARIRDAYVGGMLAVSRKASGMSLPNAPEGLWPRRVPRRKQLPAARPGQLTDFEQRLVVEIYKSIVASKELTTMLHHSTAHLPQQHNTAAPASSGQLLVN

SEQ ID NO: 126750 - protein, 72 aa, Oryza sativa
  Clone ID: PAT_MRT4530_29267C.1.pep
MHYENGGWFDDGECTATRPVNKSENRAASEMAATEAEFYRAQAEEFPGAVAPSSLTAAASASRSAAHRRSQG

SEQ ID NO: 126751 - protein, 139 aa, Oryza sativa
  unsure (1)..(139): unsure at all Xaa locations
  Clone ID: PAT_MRT4530_29268C.1.pep
TCIKTNMDMVCGEITTKGNVDYEKIARETCRDIGYVTDDDGIDADHXKVLVNMDQQSCDIAHGVHGHLTKMAEEIGAGDQRQMFGYAHDETHELMTLSACLATIAGAGLTXVRKNGTCAWLMPDGKTQETVEYLTESGV

SEQ ID NO: 126752 - protein, 125 aa, Oryza sativa
  Clone ID: PAT_MRT4530_29269C.1.pep
LLFFFFFFFFFFFFFFFFFFFLKKGGGMHWTGKNRARGPSSNLEAKKRARSFGAHDQQIKSALFLLERHQTFQGASVSIRRLKPLTPWVRVAGPKQACPPPTLVPRFSFGGEMNRRRPPGAPPCP

SEQ ID NO: 126753 - protein, 513 aa, Oryza sativa
  Clone ID: PAT_MRT4530_2926C.1.pep
MASPNSEALERYKNAITAASSVVGAAMLLRRIVADVLPDTALGALLLLPPPSSRRHCVVIEEFDGAFYNRVFLAAKAYVSTLLAAAPVPLMKASLPRGAGAEQITLAMRPGTAVVDVFDGAELTWRLSSHGGGGGGRRRGGDDAREVFKLSFDGRHKDMVLGAYLPAVMARVAAMSQGQRQAKLYSNEWGKWRPVRLRNASTFATLAMDAALREAVVDDLDRFLGRKEYYERTGRAWKRGYLIHGPPGTGKSSLVAAISNHLRFDVYDLELGGVRSNTELRKLLIRMKNRSILLIEDVDCAVVAAPRREPHGGPDGSNPPSVNRKVTLSGLLNMVDGLWSSSGHERILIFTTTHVDRLDQALLRPGRMDMHVHMGYLGFGAFRELAATYHGVAGDDHPLFPEIEALLREVEVAPAEVAERLLMTDDAGAAIEMVAKLLRDRKAGTEEDGGGYVSQKLHAGTGRRHPRASRRGGGGGAVVATTTRRGVFGDEIGMEISHGQGRRGVRGRGRGRR

SEQ ID NO: 126754 - protein, 75 aa, Oryza sativa
  unsure (1)..(75): unsure at all Xaa locations
  Clone ID: PAT_MRT4530_29270C.1.pep
HELSCPCDCFSPSISYPATAYSTPPIIXRPVDSYTSLSSPTTTARSLSYSLASMPRSLSRLETRSDNLLTSVIGW

SEQ ID NO: 126755 - protein, 38 aa, Oryza sativa
  Clone ID: PAT_MRT4530_29271C.1.pep
PSQGIELSGCSQSQYLGSPNTIVHGRPKTQVVRSIKRF

SEQ ID NO: 126756 - protein, 354 aa, Oryza sativa
  Clone ID: PAT_MRT4530_29272C.1.pep
MTTARQWWRRAAAAAKDRRSLYLTRVAALRPASPAAAAALRNAELEAVVIRATSHDERSVDYRSAARVFALARASPAVLQPLMWALARRAGRTRCWAVALKALMLAHGLLLRSDLAPRAARLGRVPFDLADFRDRSSSPTKTSGFSAFVRAYFHFLDTRSLFAAQDMDNNDDDDADDEDARLDGVSRLQHLLDLLMQIRPYGDGMEQGLILEAMDCVVIEIFEGMRVLRKASEQSAQLTSYFELCRSLGVLNAAEFPAVERVPDDDIRDLEKLIMSHVVEDRGKEKVSEEKALVAVEDTGVASRTVVTREWVVFDDDDEDDGVAGARQGHFGHYVNPFLGAPWEAVTGSGNLLV

SEQ ID NO: 126757 - protein, 61 aa, Oryza sativa
  Clone ID: PAT_MRT4530_29273C.1.pep
DVFCFVQPSVSQCKIFFSIVYIHKDINDSKYLYVFRFINIYMNVNNARKSYIVKRRKYHFV

SEQ ID NO: 126758 - protein, 50 aa, Oryza sativa
  Clone ID: PAT_MRT4530_29274C.1.pep
MEYADIKAQMSLSTEARATNRRANGAAGSLLHCSATANERETRETRLEKY

SEQ ID NO: 126759 - protein, 109 aa, Oryza sativa
  Clone ID: PAT_MRT4530_29275C.1.pep
QITTGSFGGGGEEQCKRIVVQKSISCEKCVILYYTDEKRLQLLPLHGKAGRDAAAAAAAASVTDACMLVGDVTATADLLLLHPQHIRCIFRLLLKLNGTFIQLVQGNKC

SEQ ID NO: 126760 - protein, 42 aa, Oryza sativa
  Clone ID: PAT_MRT4530_29276C.1.pep
RGARRATTIFMSSVFKPSLHMHLHGGGVKVSDNVYNMRPLDV

SEQ ID NO: 126761 - protein, 1009 aa, Oryza sativa
  Clone ID: PAT_MRT4530_29277C.1.pep
VRSLAAESFRAYQNGPLEPTFYREASTAFSVNELEGFSIPSRYGRMLDWFAVDLEGEHSAMDGRILEEHTEYVVYAIHRILDQYKESHLARSKGRAQSSDNLPSSNDCLSRYPPIALQPSLGQFFLHVNEEWRNGYKTGLSRTSSAKLSNVVVVSVAGGIHDYQVWSFLKGQLNLKFPFILIQVRSKLALLDGIVPSTHGFMVAHTLLSMVDPLNGQPFLSSQKRLFVFAKMLQSAVPQSLSWVAPVSGVKPPNLIASGNKEASDLQQKDSLSCPPSLQWTSDGLEKDLHIQLNSVTVLAMDGKRRWLDIKKLGSNGKGHFVFVSNLSPCSGVRIHLWPEKDHSSEQNGVPASKKIVEVTSKMVQIPAGPAPKQVEPGSQTEQPPPTAFLLLSPEEMSGFRFMTISVAPRPTISGRPPPAASMAVGQFFNPEEGTSALSAARIIGSSYIPEEIFLKEDHPLALNLSFSVSRRLLPVILSLRTAGCGVKATGDQLEAEKNKLCKLRCFPPVALAWDPVSGLHIIPNIYSETLVVDSSPALWDSHQGTERSTVLVLADPHCSYEVSLRVSLSAAASRFFLLYSSQILGFMIAVMFFGLMRQSSAWEHDSSVPSVLSAIESNLRLPRAFMFLCFIPVLLFLAFLVFTREQNPPLGTFLLVTMMCYIVANGFTILLILSSKLILYVAAILHVFIKRRWQSWEDGTQSMIVRHFLTLSLPFQSLKIIKNNPSIIVAFATIPLVCLVHPAIGLGVLLLSHAFHAHSTLCSFLAASFRSITQKKDLYKSMGDNIILPENKQDGLEQLLPMDDSPTSVKSFTDCQLEVFDCRHGIMILHLLATLMFAPSLVAWLQRIGMGQNFPWFVDSVLCVGTILHGLFGSPPNVSCISFKLPGRRGRDVGLSFLYLVAGYYSFVSSMALAPYRALYALAIIGFICFASRIIETRSTRHRAHRRQGRAGCSTAAGDGPEAGTVMVCTGEEEAAEEVTAKSETVPLHEAKEGSCTAIMAMAGACGR

SEQ ID NO: 126762 - protein, 325 aa, Oryza sativa
  Clone ID: PAT_MRT4530_29278C.1.pep
MGGWYSINDCSPLPHSLITISVAKDYADVPLEKIVQIIKNNPSIIVAFATIPLVCLVHPAIGLGVLLLSHAFHAHSTLCSFLAASFRSITQKKDLYKSMGDNIILPENKQDGLEQLLPMDDSPTSVKSFTDCQLEVFDCRHGIMILHLLATLMFAPSLVAWLQRIGMGQNFPWFVDSVLCVGTILHGLFGSPPNVSCISFKLPGRRGRDVGLSFLYLVAGYYSFVSSMALAPYRALYALAIIGFICFASRIIETRSTRHRAHRRQGRAGCSTAAGDGPEAGTVMVCTGEEEAAEEVTAKSETVPLHEAKEGSCTAIMAMAGACGR

SEQ ID NO: 126763 - protein, 157 aa, Oryza sativa
  unsure (1)..(157): unsure at all Xaa locations
  Clone ID: PAT_MRT4530_29279C.1.pep
MGRLGLSCLGKSGFPWRHRYGPRGPSVVRYTAVIARGSDVVASVLKRVQEGSGSKLLDQESRRGVSSVPVSLRAQVRIIKDMGILQQGELVGNDVVADQYIKHFEAPLPMVVVKGXRALARMDGGTPLPPDVAGETDGTQPEWSDFLACIRMWRLPA

SEQ ID NO: 126764 - protein, 103 aa, Oryza sativa
  Clone ID: PAT_MRT4530_2927C.1.pep
PELRWPDGRRRRPVCRTSRTVLSRRYLLGRTARDREPACRPSMTGTLARVRPRTGGGPGPDHARRRSGPELRQHDGRGDPKLPRLDDAREAHHGVLAVAEVYR

SEQ ID NO: 126765 - protein, 154 aa, Oryza sativa
  unsure (1)..(154): unsure at all Xaa locations
  Clone ID: PAT_MRT4530_29280C.1.pep
THDSGRRKRKESMLEVKGRRLHCXLLPLLTIADAIFLTGCFLPSCAPTCQIQRPTVAPSPPSSSRSPSLPPPSPPFSXRRTTGSGGYXLTGKRIWPPMATNNGGEEMKVESGVVGEVGCEEEGDCAXGGGXGSAKFLGRRVXKQPLRFXSIDPG

SEQ ID NO: 126766 - protein, 68 aa, Oryza sativa
  Clone ID: PAT_MRT4530_29281C.1.pep
IVVHHIECLHRAPEVKQDATTSGSRVVPPRNSDDSDTYFTSTTSREAYYMDPTQSNYHDDILMLTLKC

SEQ ID NO: 126767 - protein, 558 aa, Oryza sativa
  Clone ID: PAT_MRT4530_29282C.1.pep
MKVEEKKRSITVAPFECAWDEEFRFRETGRGCITFEASAHNDVTLVFREQPGSQHYHYKMDNSRHYIVILGSHRNKRLKIEVDGKTVVDVAGIGLCCSSSFQSYWISIYDGLISIGQGRHPNNNILFQWLDPDPNRNVQYVGLSSWDKHVGYRNISLMPSAPQNSILWSQIECAYVEPDGAGGHTRKQESKDGLDQRALANFLENWDFSDSIFVVGSERKVVPAHKVVLGSCGDFPFNLMMSRPAIELPSVSYPVLHSLLEYIYTGSTQISEWQLVSLLELSSQFKVKPLVMYCEEIIGCLKMSDAVSESSKKIQLSSGGSQAHQFYYFPFKAPLNTQKIEQFLVNGEHSDVNIYVNGHGLVTHAHKLILSLWSMTFDKMFTNGMKESSASNVFFEDVPVEAFFLLIQFMYSGELKVDIEEITPVLVELLLLSDQFGITALQFECCKRIMEFLSKDSLCSVLRAVSSIPSCKLLEEMCKRNFAEHFDYCTTACTDFVLLDEATFKDILQHGHMTVTSEERVLDAILTWCMEACDCFNWTSVHELLSTSRPEKLFGGRL

SEQ ID NO: 126768 - protein, 74 aa, Oryza sativa
  Clone ID: PAT_MRT4530_29283C.1.pep
MILIGRLIMERSESMDRTCELAAASNSKNLKTSERIRITAAGADQSNNVVVTLLDVNSADSKERGGVTTMDSKQ

SEQ ID NO: 126769 - protein, 542 aa, Oryza sativa
  Clone ID: PAT_MRT4530_29284C.1.pep
MAPPPPRRPVVQRSLISLLLLPVVLLALPTAAAAGAGWAPFRARDLLPLLPRGLTWPAVGSVHSAVDLLPRFVAHVAPEASSAVAWRATCFADNEAVLTLTHSSSAAAAGRNATTAGAAALGGALLRLKTASAQSWTCMDLYVFATPYRIGWDYYITAQEHTFEIKAWEEPGEMEYVKQHGIAIFLMPSGMLGTLLSLIDVIPLFSNTIWGQDANLAFLQKHMGASFEKRTQPWSANIRKEDVHSGDFLALSKIRGRWGGFQTLEKWVTGAFAGHTAVCLKDENGTLWVAESGYENKKGEEVIAIVPWDEWWGMALKDDSNPQVAFLPLHPDVRARFNETAAWEFARSMYGKPYGYHNMIFSWIDTMSDNYPPPLDANLVMAVMSMWTRLQPLYASNMWNEALNKRLGTEKLDLHGIITETGKRGMSFNQLLTIPEQDDWEYSDGKSTTCVAFILSMYKKAGVFAPFTESIQIRDAYMLKIFEDNQTRLPSWCNSGADRLPFCQILGEYKMELPEYNTIEPYANMNENCPSSPPTYTRPLGC

SEQ ID NO: 126770 - protein, 112 aa, Oryza sativa
  Clone ID: PAT_MRT4530_29285C.1.pep
MEVENPGRPFDAVACRRNAVAAADMSRAAVPSDSPAEPPSAGGCAARVMAGDDDVIMTEKSVGVAGVSIASGFEGEIMIQERCIVWCISDQSKTIRIAVPAVMGEFNNVFRD

SEQ ID NO: 126771 - protein, 66 aa, Oryza sativa
  Clone ID: PAT_MRT4530_29286C.1.pep
MAGRDGDVGRREDGLGSGDGSLPTFGKVWKGKKKWMSSGTINAIDELGNWAWQGWQRAMRVRARSI

SEQ ID NO: 126772 - protein, 78 aa, Oryza sativa
  unsure (1)..(78): unsure at all Xaa locations
  Clone ID: PAT_MRT4530_29287C.1.pep
FFFFFFFFFFFFFFFFFFFHXKTIRVXHLFTTYIXFQAKGNTNYIXTTQDTQXSXFXXASRGGXRXTQPVANTTNANG

SEQ ID NO: 126773 - protein, 91 aa, Oryza sativa
  Clone ID: PAT_MRT4530_29288C.1.pep
MGKQMPNCSRGLLLLLLALLGCFSILGHVYGNNLDYTRSATMNEGRNNVNINGLVPVPCNIFCPSKGKSITVLLIHNWRWPQENHENKRKK

SEQ ID NO: 126774 - protein, 313 aa, Oryza sativa
  unsure (1)..(313): unsure at all Xaa locations
  Clone ID: PAT_MRT4530_29289C.1.pep
MAMIIHSRKRKRVSRREDTIHMSIEEQVAMFINTVGHNLRNRLVRTNFDRSGETDCIGAIDGAHIRASVEKNMEPYFRGRKSHATQNVMAAIDFDLRFTYVLAGXEGTAHDVVVLRDALERENGLLVPQGKFYLVDAGYGAKPGFLPPFRAVRYHLKEWGNNPVQNEKELFNLRHSSLRVTVERAFGVLKRRFKILDDATPFFPYPTQVDIVVACCIIHNWVINDGIDQFITDPLDLISETTTEPFGQANDHALMEISQNASFSSARGCNWFGHMGRIGLGQKFAIVCGGECTSIVHPSILLEMHARYLHPIF

SEQ ID NO: 126775 - protein, 1074 aa, Oryza sativa
  unsure (1)..(1074): unsure at all Xaa locations
  Clone ID: PAT_MRT4530_2928C.1.pep
MAAMGHLGDPYALRSVADLPPPFRSVFGFRYFNSLQSECFPACFLSDVNMVISAPTGSGKTVLFELCILRLLSRFLSSEWRFNLIKGTLKTIYIAPMKALVQEKLRDWNMKLGSLGISCLEMTGDNEFYNTKSIHDADLILTTPEKFDSVSRHGIRDGGLGFFSDIALVLIDEVHLLNDPRGAALEAIVSRIKMLSRLGTMKIAPLANVRFIAVSATIPNIEDIDYLRFGFAWISAEWLAVPSEGIKRFGEEMRPVKLTTKVFGMVLVSHHIANIWPKRYAPARNDFLFERRLQSFIFVGYHNGGLCLKDRSVVEGLFLKGXYSNSLHDEYFGTWDQLTCSHSGDKVNTIFQQREGSVCRIXRSMVLQNPQHYGIKKEIPRELLEKQMKDICVEKIHELGEYGLIWTDEDGFLLKPLEPGRLMTKFYLKFDTMKLIVKASACCTLEDLLHIICHSAEITWIQLRRNEKKLLNEINADKEGRLWFHVVGANGKRKKRIQTREEKIFILANDCLTGDPLVHDLSLNQEMNSICSNGCRVAKCMREYFIYKKNYKSAISSMLLAKCLHQKLWESSPFLLKQLPGIGIVTAKALKTAGIDSFESLATADARKIESVTGRNYPFGDSIKSYLPSLGPKIDINIEDAGNRQGKSTIIVTLTRLSQAVGSSKQNYADMVVGSEEDNAILFHEKINPYSVKLYVPCPPNARATLKVDVIFEEYVGLDIHKKHVVSREDFHVTKVFGIKKAEPLYNLPAESCLVSSKTTRTNQSKYHNGQNPLSKEVCVIEDDFRAKAPDKDDNDLEILGTREYNNLASLEAPSFTLLHEEDYEDVPDVLASEPVEAECKSATNNTIFDHIRKKSRDFPNLMLSKSMDSSYEPLILKKMKTSGDQFGLDQSSLHAYEVTPMVFDRTEARVSPNNTDERCRNILTRTAETRSFQFTGKMDSISQKSEILNRTQGKNSTQLAGKKAFEKSKTPDENSLHFVGKRDSSSEKSKALSKTPDENSLQFLGKMDSSSEKSKFCFSSPLADFQPMQCTKQVAASVQPLTIQDYCKDILASAKSSGTGASFLDVKSVFSFL

SEQ ID NO: 126776 - protein, 73 aa, Oryza sativa
  Clone ID: PAT_MRT4530_29290C.1.pep
MASGLSDDTAAMCRIRYAGEGSGSGSAAVAVRSSGHHVFEIRDYSILKAITPNTKCVKSGSSTPRSVSGRSRR

SEQ ID NO: 126777 - protein, 101 aa, Oryza sativa
  Clone ID: PAT_MRT4530_29291C.1.pep
KSSRSVDTVSDGTALLPSYCQAIKNEQNPNRGSAVSICLPADFMKTDIVNMPTTRSIIQMVCFFVIACGLEEQDSQLKLTLKDSGKSSTIKDMGKRSSRSG

SEQ ID NO: 126778 - protein, 150 aa, Oryza sativa
  Clone ID: PAT_MRT4530_29292C.1.pep
MSLVRSGNVLDPMSVDFWADADPFGAVRSLAERCPVLTNVRVDWKETPTAHVFTADLPGVRKDQAKVEVEDGGVLVISGERAREEDVDGKNDERWHHVERSSGKFQRRFRLPRGARVDQVSASMDNGVLTVTVPKEETKKPQLKAIPISG

SEQ ID NO: 126779 - protein, 535 aa, Oryza sativa
  Clone ID: PAT_MRT4530_29293C.1.pep
MAVLVSLMVIAASSPLVALLLRAAWVTLSCYWLTPMRIRRAMAAQGVRGPPPRPLVGNLREVSALVARATADDMPSLSHDIVGRLMPHYVLWSGTYGKLFVYLYGSEPRLCLTDTALIKEFLSSKYAHATGKSWLQRQGTKHFIGGGLLMANGARWAHQRHVVAPAFMADKLKARGRVGRMVECTKQAIRELRDAAAGRRGEEVEIGAHMTRLTGDIISRTEFNTSYDTGKRIFLLLEHLQRLTSRSSRHLWIPGSQYFPSKYRREIRRLNGELEAVLMESIRRSREIADEGRAAVATYGRGLLAMLLSEMEEKEKNGGGGGGEFSYDAQLVIDECKTFFFAGHETSALLLTWAIMLLATNPAWQEKARTEVAAVCGDHPPSADHLSKLTVLQMIIQETLRLYPPATLLPRMAFEDIQLGGLRLPRGLSVWIPVLAIHHDESIWGPDAHEFRPERFAPGARRPSAAGAARFLPFAAGPRNCVGQAYALVEAKVVLAMLLSAFRFAISDNYRHAPENVLTLRPKHGVPVHLRPLRP

SEQ ID NO: 126780 - protein, 167 aa, Oryza sativa
  Clone ID: PAT_MRT4530_29294C.1.pep
PHGLRRLPTRRPRWPPRHAAVVIVLRHLPRQHPLIPPRASTWPCHRESTTVTSSRVVGVHAGHQHTRRCTANTRATCPCDLYPAASTRAAQPPLRPIAPLVPGLVPSGKALDLVAAPPDPKPSPLLTARCAAALALKRRVAGERPRRCPPSWPLGRRQRAYDVVKAP

SEQ ID NO: 126781 - protein, 179 aa, Oryza sativa
  Clone ID: PAT_MRT4530_29295C.1.pep
MIPDTLQPAMIPDTSQPREGQVCRTYFGLLHAGHQHTRRCTANTRATCPCDLYPAASTRAAQPPLRPIAPLVPGLVPSGKALDLVAAPPDPKPSPLLTARCAAALALKRRVAGERPRRCPPSWPLGRRQRATAAARGRRGREGAATGARVHPPCRPCDRATWGPNHTKSLPMLRFLSNK

SEQ ID NO: 126782 - protein, 456 aa, Oryza sativa
  Clone ID: PAT_MRT4530_29296C.1.pep
MARRAREEEADQVERKLVLGRYELGRLLGQGTFAKVYYGRDLRSGESVAIKVIDKARLRRTEGMVEQLRREISIMRMVRHPNVVGIREVLASRARVFVVMEYARGGELFAKVARGRLTEEHARRYFQQLVAAVGFCHGRGVAHRDLKPENLLLDEEGRLKVTDFGLAALPEQLRQDGLLHTQCGTPAYVAPEVLRKRGYDGARADLWSCGVVLYVLLCGFLPFQHENYAKMYQKIFKAEYQVPPWVSGDARRLIVRLLVVDPAKRISIPEIMRTPWFKKGFVPPVPTSPVSPKKWEEDDVLLDGGDSGAMSPRTCNAFQLISSMSSGFDLSGMFESEQKAATVFTSRAPAATVIQKLEAVGRSLGYSATRGKGWKLRLEATADGANGRLAVTVEALEVAADVAVVEFAHDAGDELEFNKFCAVDVRPGLADIVWAWQGDRPAAPDVAAATVECSPA

SEQ ID NO: 126783 - protein, 245 aa, Oryza sativa
  unsure (1)..(245): unsure at all Xaa locations
  Clone ID: PAT_MRT4530_29297C.1.pep
RASPRRRRHRISPSSRARRRHRRLRLLLRRRISGVRADAASLSSALSPISISLSPSRLPPAASTPTPTSSRHDAAAARHDXDATTPPRHGTGAAQRQAATPPPGLALXXXCATPAPGGARPGTRTGRPGPTRGGDGGTSGGRGTGEARRAGAKGAGAGERAGPAAGRGGSGGQGAGSRRGERGRGGGGGARRGRENRGRGRRGAARREGARPGPRTRRAPGDRPRTKGRGAAREREGQGGKKKAT

SEQ ID NO: 126784 - protein, 80 aa, Oryza sativa
  Clone ID: PAT_MRT4530_29298C.1.pep
RVARGGAETARARTEPAFGEFPATVGSTECALLSIGPPAMFHPRLVGTAASAGRRPVDGGFLLLGLAFAAHGLYTVVSGL

SEQ ID NO: 126785 - protein, 88 aa, Oryza sativa
  unsure (1)..(88): unsure at all Xaa locations
  Clone ID: PAT_MRT4530_29299C.1.pep
PPPFVHHPQPPRIPFRLPLRSSRRQPVAAAAXSGVPDEWGDCSPSAPEPPSQPDPPIDDDEWGRDDPSSSGTGWGEPGVSEPQSXSAA

SEQ ID NO: 126786 - protein, 46 aa, Oryza sativa
  Clone ID: PAT_MRT4530_2929C.1.pep
VKSFPQVISDGNAVLGQCMLHQYFTCIHLSCSVMCHRLGPHSNKVI

SEQ ID NO: 126787 - protein, 76 aa, Oryza sativa
  unsure (1)..(76): unsure at all Xaa locations
  Clone ID: PAT_MRT4530_292C.1.pep
MRECIXXHIGQAGIQVGNACWELYCLEHGIQADGQMPSDRTVGGGXDAFNTFFSETGAGKHVPRAVFVXDLKPTVN

SEQ ID NO: 126788 - protein, 562 aa, Oryza sativa
  unsure (1)..(562): unsure at all Xaa locations
  Clone ID: PAT_MRT4530_29300C.1.pep
MHDICPYYFLSLIIHKLLYSLCRSPGCRSQTALALKSCDISTVRPXVGGSDAFARLYDRRMXPPLSTCQTKKEPPPCIKMFCPMHLADTRKSNLHLTHGAFSPNGKEVLLSYSGEHVYLFDVDLENTSSVRYTADNVQEQLCLPPFNKEPAKLISKQQKFPVNRASRNVCRVDTFKKLMQVATKSLEMGTNLMLGVEACSTILLAVDHNIDDNMKHDCLCTRAGLYLKRRWKNDVYMAIRDCNSARCIDSRSFQAHLYMAEALLQLGRLKEASEYVDALNTIVPPYSQSVKQVENIKEQLFAAELEKNKKDQVGNTYTDARHGRLRSLSDLLFRSDASGSSSQEGREDSDYDDEMELDFETSASGDESRDSDPGFVRGSLSLRFHRRDSQTDEHSGENGSAESTQNGDSAYQPEVAVDMKQRYVAHCNVGTDIKQASFLGEQGEFIASGSDDGRWFIWEKRTGRLIKMLAGDGTVVNCIQSHPYDCAVATSGIDNTIKLWTPDANATSMIAGPEIDVSSVIENNQRKLSRNREILLPFEFLERFRMHEFGEGSLHPLECAQS

SEQ ID NO: 126789 - protein, 116 aa, Oryza sativa
  Clone ID: PAT_MRT4530_29301C.1.pep
MSRSNKKSSRGIDLKLNLSLPARGDSSSRRAMAADEESSPSSCLSSENEHGLQWSNSPEATSMVLAACPRCFIYVMLPQDDPRCPQCKSPVILDFLQQDNGNNNANSNSSRKTRRG

SEQ ID NO: 126790 - protein, 107 aa, Oryza sativa
  Clone ID: PAT_MRT4530_29302C.1.pep
IFLDKKKKKKKKKKKKKKKKKKKKKKKKKKKKKKKKKKKKKKKRGGRFKGPNFTSPGLQGNSFFIGPPKLNSGAGVLPRGDGKTPGVPQFNRFEKIPFSPVGEKAKR

SEQ ID NO: 126791 - protein, 115 aa, Oryza sativa
  unsure (1)..(115): unsure at all Xaa locations
  Clone ID: PAT_MRT4530_29303C.1.pep
YVKTRGLGDLLNSSAVPKLAFGXASMLVDLILQSTRNKDKETAVKSINDSRSARTLSMRGNHHEAHQPKPTTYAVSYCRIRLNRLTPSDSNSADXAIANSDSSRFSLCFRDDFHL

SEQ ID NO: 126792 - protein, 533 aa, Oryza sativa
  Clone ID: PAT_MRT4530_29304C.1.pep
MASCSRTWLLPGMAPQATAQTVPRPLQSLKVFAGLPHRRRVLFSGVSSRTRRGRIRSVKDDSLHFDPSKIEAPPYSSYFDSTSGQLEPASGARASIPGQEYWPEGTASRVRAARAPAPVGESAGTPSFGKKPGSRRKGYKEQVASATAGRGTETSGDEGESVVAIEASSDETLEETKDSLDEYVVYEMPKEENLSEYEMDKMMGRPHPFVDPQKAMSVGEPKSSEELWWNWRRKSEENEMWSRWQRRRPDVDTVFAKAMAETGQIKIFGDHPTRTEAALAKARRHLFKEERLEAEQRRLEEIGPIAYYSEWVEAYKNKDTSREAVQKHFEETGEDENTQLITMFQHQTAGEFRIMMGTDVRIQRDPLAMRMREDQIKQIWGGDPVYPTINYVHDPDEVADYRGPEFHEPTPEVVPYLMEHGIMITKEELYARLNEEMEDINQDITYLPEVRDPMATAVDIGEHSYNEDSDDDEEDADKVVAQPESLEDDEDDGDDAEDAEGKEKSKKDQLSLKEAIADSENLTDFLMDFEEDE

SEQ ID NO: 126793 - protein, 36 aa, Oryza sativa
  Clone ID: PAT_MRT4530_29305C.1.pep
GKYLPLIRLMPDCKGHWPLLTKGSILTTQPPSSRRR

SEQ ID NO: 126794 - protein, 118 aa, Oryza sativa
  unsure (1)..(118): unsure at all Xaa locations
  Clone ID: PAT_MRT4530_29306C.1.pep
KPDMTHPELLIPDELPPXTQSRAVLSNVAYAWQPSQDFLFLKLSGAHMSYTLSLPPLFLSHSLSLSRRARQPAVAXRRRRAAGGGGGGDGGVGAAGRGGGDRERGGGGGGASLQGRSR

SEQ ID NO: 126795 - protein, 140 aa, Oryza sativa
  Clone ID: PAT_MRT4530_29307C.1.pep
FVVIFLFIISLHFIGATVIGPADVAAFIAPMNTERAIYGLSSFTVDPYLVTLAQNFTETCVLQNLDTNGYRTILQTAYAGLKGQTYTGSVEQSIGATYGYALMTDYLVPLMWLAQKVNWTCINNTCVELGKCIAYTQSIW

SEQ ID NO: 126796 - protein, 69 aa, Oryza sativa
  Clone ID: PAT_MRT4530_29308C.1.pep
PCKNGGVKFGPLKRAPPYILIFYYFYFFIFFFILLFFYFFFFFFFFIFFFFFFFFPSSLFFSHKSVSFL

SEQ ID NO: 126797 - protein, 85 aa, Oryza sativa
  unsure (1)..(85): unsure at all Xaa locations
  Clone ID: PAT_MRT4530_29309C.1.pep
EESMPMSLEQDWSSWSSEXYVGEGSSSDHGXYGERSSREXXFGDQQQQPCMTGVRLTSARQYAAQLPSMCRVERQQCSIFASGQY

SEQ ID NO: 126798 - protein, 86 aa, Oryza sativa
  Clone ID: PAT_MRT4530_2930C.1.pep
GRFALVQHALLATVAIPTTTTTPSQPVPHLVNSVHFIVHAQHTRFPTTFTRPFPDAGISHHGGITNFHPAHHSPVPKQPMKQHVNL

SEQ ID NO: 126799 - protein, 219 aa, Oryza sativa
  Clone ID: PAT_MRT4530_29310C.1.pep
MALMASRKEEFSAALLLFSARSSTSTVAGEHETPPQDRGHGRHYDRNQHRSRSAPAFSTTVTGFGGEGGRRMQKKGHLHHHRHCCRLADLEEEKGEDECRERATSTTTTVAATTLGHRQCPWPPPPRGGLLVPPAAAILALGHRRGHLARREEGEEKDGKGQRYATLSNCVRPPGGASKGVLSYDSYVVPLAAIRGSAAGVVGDVRVRGDGAGMAIFLL

SEQ ID NO: 126800 - protein, 436 aa, Oryza sativa
  Clone ID: PAT_MRT4530_29311C.1.pep
MTSGKEIDKLTKEDWTKEEWRDFENQMAACEKTMLASFLKTDQGVFKRDVTSRYLVRSSIGPHAVLGRQQCKVEEDLGKIPNQHKVFKDDERISEPVSIKSTMNKEGISMDESLDQNLGKLELMEAKCMQEEKFNQILQKLEEIEACRSKATEVTIAAIRTTTAILKASSSPTPMAPPPPTPTKCLTKCPNNNFTWVMANSSHIGEVLAPTAAWELGDNKDKGHAPCIVTNDSPKVTPAKCSNCSSPDIMLDLTVAVGVSCATTSMASMELLVGEDETSVIYIDNPHCSIATHAKCSTLGLDVNGSANQPVVVFPTITAMNGHSIIPTLPLTIMNTSVILVVKSSCASDNSIRLMTLYNGFSCVIAETKMIYVATVVRFSLCYMQMGAMKPSSVIQWLNFPYCTYDGFKRKLRGLFTNGALCIHSSQYDPPDGLCE

SEQ ID NO: 126801 - protein, 347 aa, Oryza sativa
  Clone ID: PAT_MRT4530_29312C.1.pep
MDQIPIQILNGTSLYVSLDLSNNLLTGYISFNKFSGEIPSSLGQCVSLLSLDLKHNMLNGSIPQLLGQLKSIVLLDLSQNMFVGQIPEFLVNFSFLNQLDLSNNYFEGPIPTGGIFQSSSAVILDGNTRLCSSSSYSIFGFPICPTTTLAKRKNNAHLLIIVIPPVTIVVLSFFFFMVTLLKGKQAHTTSCYKETMKKVSYVDILKATNWFSPVNKISSSHTGSIYIGSFLTECEVLRNTRHRNLVKAITVCSTVDLENNEFKAIVLEFMANGSLDMWVHPKLHQNSPKREYGMGYKISTGCDVYSFGVLLLEMLTGMRPTDAMFIDGISLHKFVSMETFTSTCIFL

SEQ ID NO: 126802 - protein, 179 aa, Oryza sativa
  Clone ID: PAT_MRT4530_29313C.1.pep
MASKNPKVFFDILIGKARAGRVVMELFADTVPKTAENFRCLCTGEKGLGASGKPLHYKGSAFHRIIPNFMCQGGDFTRGNGTGGESIYGDRFADENFKLRHTGPGVLSMANAGPNTNGSQFFICTTRTTWLDGKHVVFGKVVDGYTVVEKMEQVGSGSGGTAERVLIEDCGQLADDHAN

SEQ ID NO: 126803 - protein, 82 aa, Oryza sativa
  unsure (1)..(82): unsure at all Xaa locations
  Clone ID: PAT_MRT4530_29314C.1.pep
AKVTESTDIVTYADVAXGVDDAKXNLEDIVEFLRNPERYMRXLGARPILSVGLVGLTRTEKTLLTKANTGEDELPFITYSKR

SEQ ID NO: 126804 - protein, 538 aa, Oryza sativa
  unsure (1)..(538): unsure at all Xaa locations
  Clone ID: PAT_MRT4530_29315C.1.pep
SNRLWQTRKRRVQRLRNMGRFXEVEQEINHRLKKAKPKQEWRVKNQAPTADEVKRLAKGKSVVTASVNMVFTLPAEFGAKQADVDEVEEASARLVLSPEQTVFEKPEGTENRHLKPLYINGYVNGKPMSKMMVDGGAAVNLMPYATFWKLGRNAEDLIKMNMVLKDFGSNPLEIKGVLNVELTVSSKTVPTTFFVIDGKGSYSLLLGRDWIHANCCIPSTMHQCLIQWQGKKIEIVPSDSQLKMESPSYYFEGVVEGSNVYTKDTVDDLDNKQGQDFMSADDLEEIDIGPGYNQNFMSEEDIHKTAFRCPGAIGLFEWVVMTFGLKSAGATYQRAMNYIYHDLIGWLVEVYIDDVVVKSKEIADHIADLRKVFERTKKYGLKMNPTKRFSKGLQLLKEVEADAVEIMGDSLLVISQLAGEYECKNDTLMVYNEKCRELMNEFRLVTLKHVSREQNVEANDLAQGASGYKPMMKDVKVEVATLTADDWRTAVRSAAATGAAGDIDGQTGPDGPWVPAGPAYLMDRGPVGPGYGEGAVKG

SEQ ID NO: 126805 - protein, 1427 aa, Oryza sativa
  unsure (1)..(1427): unsure at all Xaa locations
  Clone ID: PAT_MRT4530_29316C.1.pep
MPSGTELQQRSLTEVPPKTNSPKPSGFEVHEGNIVPVTTDKLTPEQKKELDLMMQQTQHQFLNSFMETRKGTVVQKYKVLLRIDGELQQVPAATAESGSKGILEGSGDKGDSFQGVQVEDLGPDGNVVQPQFNNFQDRIDYAVQHTLINQSGVLVNTLSNMYFSPHLYFSPGSASTTKWSRREQPQHAGQNVNDDSGTGCYDDDDDSEVAAAEWVRSKKVVPCPWVKSSGKKERFDFDITKADKIFDLLLREKQIQLPAGHIIPSAEELGKRRYCKWHNSGSHSTNDCKVFRQQIQVAIEGGKIKFDDSKKPMKVDGNMTSSNKGGIMKKMMEVLILIRTVSFSDFAGKKGKSVVTALVNMVFMLPAEFRAKQADVDEVEEASARLVLSPEQAVFEKLEGTENRHLKPLYINGYVNGKPMSKMMVDGGAAVNLMPYAIFRKLGRNTEDLIKTNMVLKDFGGNSSETKGVLNVELTVGDKIEIVPADRSDNVASADLALWEMDSIDCLSGKVWDGDFXKCSIMIYSRLKMEXPNYYFEGVVEGSNIYTNNTVDDLDDKQGQGFMSADDLEEVDIGPSDRPRPTFISKNLSPEFRTKLIELLKEYRDCFPWEYYEMPGLSRSIVEHRLPIKPGVRPYQQPPRRCKADMIEPVKAEVKHLYDAGFIRPCRYAEWVSNIVPIIKKNGKVRVCIDFRDLNKATPKDEYPMPVADQLVDAASGHKILSFVDGNAGSNQIFMTEEDIHKTAFRCLGAISLFEWVVMTFSLKSAGATYQRAMNYIYHDLIGWLVEVYIDDVVVKSKEIEDHIANLRKVFERTRKYGLKMNPTKCAFGVSASQFLGFLVHERGIEITQRSVNAIRKIQPPEDKTELQEMIGKINFVRGLYLLAGEKSIGLVLIQKLEGKERVVFYLSRRLLDAETRLRHYLLSNECTVICKADVVKYMLSAPILKGKNGKWIFTLTEFDLRYESPKAIKGQAIADFIVDHRDDSIGSFEIVPWTLFFDGSVCTHGCGIGLVIISPRGTSFEFAYTIKPYATNNQAEYEAVLKGLQLLKEVEADVVGIMGDSLPNPTQLASRKLRYKALKYTLLDDELYYRKIDGVLLKCLSVDQAKVAIGEFGAIQRAPASAMNPIIKSRSFRGWGIDMIGMINPPSTKGHKFILVTTDYFTKWVEAIPLKKVDSVHAIRFVQEHIIYRFGIPQTITTDQGSIFVFDEFVQFADSMGIKLLNSSPYYAQANGQAEASNKSLIKFIKRKISDYPRQWHTRLVEALWSYQMACHGSIQVPPYKLVYGHEAVLPWEVQIGSRRIELQNELTADEYYNLMVDEREDLVQSRLRALAKVTKDKERITRHYNEKVVPKSFSEGDLVWKLILPTGTQDNKFCKWSPNWEGPFQIYKFVSKGAYMLQGLDGEVYGRALNGKYLKKYYPSVWINR

SEQ ID NO: 126806 - protein, 105 aa, Oryza sativa
  Clone ID: PAT_MRT4530_29317C.1.pep
PRVRPRVRPRVRKFPSSIFSLLASWRKRRRLLLLLAWAAVVPPGAPGFSSTSGRRVENFLDRDYHTDQKVTLTTYAGNGAGITGGGTKKNEFIFFGIQKPGKNNN

SEQ ID NO: 126807 - protein, 316 aa, Oryza sativa
  Clone ID: PAT_MRT4530_29318C.1.pep
MASEWDSPCQFCGKNFKRRGDLLNHELTCKYISDVHPQTESSGDAQARKDILGFHIPRQKRTVPAFPASDYAQGGINGATNDEPAASNNPDQVLKMCSDKGSSPVECYGGDERRVGACAIAGVEEDDLSPNVGCRGVTDCVDESNVIQKQKRQPDLSVADLRDLVEMKQQNMKADTNIHDQGHPSVMQMQKNELSLDLLPHKNSSDHEVPTLSVSSMDDPDGLVSTDTNSDKETETVNVGIDINIPEQRESSVTRMQNEKLGLNLLPRNDSSGHEVPILSVSSTDDLNSLIPTDTSSDKDTNSNVADRLGHCPAQE

SEQ ID NO: 126808 - protein, 647 aa, Oryza sativa
  Clone ID: PAT_MRT4530_29319C.1.pep
MESPNYYFEGVVEGSNVYTKDTVDDLDDKQGQGFMSADDLEEIDIGPGDRPRPTFISKNLSLEFRTKLIELLKEYRDCFAWEYYEMPGLSRSIVEHRLPIKTGVRPYQQPPRRCKADMLEAVKAEVARLYDADFIRPCRYAEWVSNIIPVIKKNGKVRVCIDFRDLNKATLKDEYPMPVADQLVDAASGHKILNFMDGNAGYNQIFMVEEDIHKTAFRCPGAIGLFEWVVMTFGLKSAGATYQRAMNYIFHDLIGWLVEVYVDDVVVKSKEIENHIANLRKVFERTRKYGLKMNPTKCAFGVSARQFLGFLVHERGIEVTQRSINAIKKIQPPEDKKKLQELIGKAEYEAVLKGLQLLKEVEADAVEIMGDSLLVISQLARQYECKNDTLMVYNEKCRELMDGFRLVTLKHVSREQNIEANDLAQGASGYKPMTKDIKVEIATISADDWRYDIFQYLQNPSQSASRKLLYKALKYTLLDDELCYRMIDGVLLKCLSADQAKVAIGEVHEGICGTHQSAHKMKWLLRQAGYFWPTMLEDCFRYYKGCQDCQKFGAIQRAPASAMNSIIKPWPFRGWGIDMIGMINPPSSKGHKFILVATDYFTKWVETISLKKVDSGDAIQFVQEHIIYQFGIPQTITTDQGSIFMYR

SEQ ID NO: 126809 - protein, 62 aa, Oryza sativa
  Clone ID: PAT_MRT4530_2931C.1.pep
REEGRTWNKNIIIDMILSILHGDCHVRHLNERDGVSCWAIYRTVFPLYWPYYVRPLEASFSL

SEQ ID NO: 126810 - protein, 86 aa, Oryza sativa
  unsure (1)..(86): unsure at all Xaa locations
  Clone ID: PAT_MRT4530_29320C.1.pep
GYYGEGASEQGSFGERQQQPGMTRVRLHRARQYAAQLLSMXRVXPQQCSIFPAGHVLGLAGLPHRLVGSPRCCVACNEIVIAANNE

SEQ ID NO: 126811 - protein, 360 aa, Oryza sativa
  Clone ID: PAT_MRT4530_29321C.1.pep
MASEWDSPCQFCGKNFKRRGDLLNHELTCKYISDVHPQTESSGDAQARKDILGFHIPRQKRTVPAFPASDYAQGGINGATSEVKVDWDPEEETDVLEALLLLREQPAYPGEETFSDDEPGAGNVDDEPAASNNPDQVLKMCSDKGSSPVECYGGDERRVGACAIAGVEEDDLSPNVGCRGVTDCVDESDVIQKQKRKPDLSVADLRDLVEMKQQNMKADTNIHDQGHPSVMQMQKNELSLDLLPHKNSSDHEVPTLSVSSMDDPDGLVSTDTNSDKETETVNVGIDINIPEQRESSVTRMQNEKLGLNLLPRNDSSGHEVPILSVSSTDDLNSLIPTDTSSDKDTNSNVADRLGHCPAQE

SEQ ID NO: 126812 - protein, 1355 aa, Oryza sativa
  Clone ID: PAT_MRT4530_29322C.1.pep
MVEDLGPDGSGLQPQFYNFQDRIDYVVQHALINQSGVLVNTLTNMVKTVVDGTIAEHEVTGPVLRTPDNQLRQHVATQVVPEHLVHNVQPDQLVIPQIIPEHLEFESLPHLAQKVTLHEQRFAEAKKKFKKINHVYPYMYGSDEEDDTKVAAAEWVRSKKVVPCPWADKNFDLLLREKQIQLPAGHIIPSAEELGKRRYCKWHNSGSHFTNDCKIFRQQIQRTYGKQQQERYFEEDDGGFDPHWDCEFFRFCWNEDQEINHQLKKTKPRQEWSVKNQAATTDEVKADEAKRLAKWKSVVTALVNMVFTLLAEFGAKQANVDEVEEASARLVLSLEQAVFEKPEGTENRHLKPLYINGYVNGKPLSKMIVDGGAAVNLMPYATFRKLGRSSDDLIKTNMVLKDFGGNQSETKGVLNVELTVGSKTVPTTFFVIDGKGSYSLLLGRDWIHANCCIPSTMQQCLIQWQGDKIEIVPADRSVNIASADLALWEMDGIDCLFGKTESPNYCFEGIVEGLNVYTKDTVDDLDDKQGQGFMLADDLEEIDIGPDDRPRPTFISKNLSPEFRTKLIELLKEYRDCFAWEYYEMPGLSRSIVEHRLPIKPGVRPYQQPQRRCKADMLEPVKAEWVSNIVPVIKKNGKVRVYIDFRDLDKATPKDEYPIPVADQLVDAASGHKILSFMDGNAGYNQIFMAEEDIHKTAFRCPGAIDLFEWIVMTFGLKSAGAIYQRAMNYIFLDLIGWLVEVYIDDVVVKSKEIENHIADLRKVVERTRKYGLKMNPTKRLEPFTPLLRLKADQEFTWGAEQQKALDNIKEYLSSPPVLIPPQKGIPFRLYLSDGEKLIGSVLIQELEGKERVVFYLSRRLLDAETRLRHYLLPNECTVICNADVVKHMLSAPILKGRVGKWIFALTEFDLRYESSKVIKGQAIADFIVDHRDDSIGSVEIVPWTLFFDGSVCTHGCGIGLVIISPRGASFEFSYTIKPYATNNQAEYEAVLKRLQLLKEVEADIIEIMGDSLLVISQLAGEYECKNDTLIVYNEKCRELMKGFRLVTLKHVSREQNVEANDLAQWASGYKPMMKDIKIEVATITADDWRYDVHHYLQNPSQSASQKLRYKALKYTLLDDELYYRTIDGVLLKCLSADRAKVPIGKVHEEICGTHQSARKMKWLLRRVGYFWPIVLEDCFKYYKGCQDCQKFGAIQKAPASAMNPIIKPWPFRGWGIDMIRMINPPSSKGHKFILVATDYFTKWVDAIPLKKVDSGDAIQFVQEHIIYRFGIPQTITTDQGSIFVSDEFVQFADSMGIKLLNFSPYYAQANGQAEASNKSLIKLIKRKISDYPRQWHTRLAEALWSYRMACHGSS

SEQ ID NO: 126813 - protein, 249 aa, Oryza sativa
  unsure (1)..(249): unsure at all Xaa locations
  Clone ID: PAT_MRT4530_29323C.1.pep
FRGWGIDMIGIINPPSSKGHKFILVEIDYFTKWVEPIPLKKVDSGDAIQFVQEHIICRFGIPQTITTDQGSIFVSDEFVQFADSMGIKLLNSSPYYAQANGLAEASNKSLIKLIKRKISDYPRQWHTRLAEALWSYRMACHVYGHEAVLPWEVRISSRRMELQVELTADEYYNLMADEREDLVQXRLRALAKVXVPKSFSKGELVWKLILPIGTXDNKFGKWSPNWEXPFKIYKVVSKGAYMLQGLDGE

SEQ ID NO: 126814 - protein, 152 aa, Oryza sativa
  Clone ID: PAT_MRT4530_29324C.1.pep
AYCANILLHPQVDSTPQDKEKSELPTHPDTVFFFFFLPFFIIFIILLFFLQCHSFRTAAAASRAPPCTLGTKWRRRKKWPGRDNAKGAVVVVVQEPDALSLSLSLSLSHTHTQLGVVGVIYLSQDTRAPLSLSLPQSPPTFSLSLKLAFFLS

SEQ ID NO: 126815 - protein, 160 aa, Oryza sativa
  Clone ID: PAT_MRT4530_29325C.1.pep
MAEKPPPSPSSIGKSEVPSKTDIPKPSGFEVHEGNIVPVTIDKLTPEQKKELDLMMQQIQHQFLNSFMETRSSKNGEVQQVPAGTVESSSKGIPEGSGDKGDGFQGVQVEDLRPDGNEVQPQFNNFQDRIDYAVQHALINQSGVLVSHPEVLLPSLKFNL

SEQ ID NO: 126816 - protein, 43 aa, Oryza sativa
  Clone ID: PAT_MRT4530_29326C.1.pep
CLLIAIDLLGRIWNNCGVIGALFYYKPPRDRVFSICTKNSAGG

SEQ ID NO: 126817 - protein, 1525 aa, Oryza sativa
  unsure (1)..(1525): unsure at all Xaa locations
  Clone ID: PAT_MRT4530_29327C.1.pep
CATRSINVMREQFGLKPKDAGNLYRHPYHEWFERVQLPNRYKVPDFSKFXGQDSVSTYEHVSRLLAQCGEASATDALRVRLFPLSLSGSAFTXFSSLPYNSINSWADLEKXFHSYFYSGVHEMKLSDLTTIKQRHDEPVQDYIQRFKKMTNRCYSLSLTDVLLADLAFXGLIASIREKFSSHDFDTLLHLAQKVTLHEQRFAEARKNFKKINHVCPYIYGSNDDDDIDSEVAAAEWVRSKKVIPCQWVKKXGKEERYDFDITKADKIFDLLLREKQIQLPAGHIIPSAEELGKRRYCKWHNSGSHSTNDCKVFRQQIQVAIEGGKIKKSXMKVDGNPFPVNMVHTSGRAADGGRSRNFQMNPARIINKYQKKYDKKQQENYYEEDDGMRLPSIEDCPGCSNVAESSSQSYNRSNRLRQTRVPVHERLGPVNXDQGDDEGGKNQWCPSGIFTKNQERRKTKPRQEWRVKNQAATADEVKADEAKRLAKGKSVVTASVNMVFTLPAEFGANQADVDEIEEASARLVLLPEQASFEKPEGTDNRHLKPLYTNGYVNGKPMSKMMVDGGATVHLMQYATFKKLGRNAKDLIKTNMVLKDFGGNPSENKGVLNVELTIGSKTVPTTFFVIDGKGSYSLLLGRDWIHANCCIPSTMHQCMIQWQGDKIEIVPADRSVNVASADLALWEMDCIDCLXWKHGKIRVCIDFRDLNKATPKDEYPKPVADQLVDAASRHKILSFMDGNAGYNQIFMAEEDIHXTAFRCLGTIGLFEWVVMTFGLKSAGATYXRAMNYIYHDLIDWLVEVYIDDVVVKSKEIEDHIADLRTVFERTRKYGLEMNPAKXAFGVSAGQFLGFLVHERGIEITQRSANAIKKIQPSENKTELQEMIGKINFVKRFISILSGRLEPFTPLLRLKADQKFVWGVEQQKVLDGIKEYLSAPPVLIPPQKGIPFRLYPSAGEKSIGSVLIQEVEGKERVVFYLSRRLLDAETRYSPVEKLCLCLYFSCTKLRHYLLSNECTVICKADVVKYMLSAPILKARVGKWIFALTEFDLRYESPKAIKGQAIADCIVDHRDDSIGSVEVVPWTLFFDRSVCTHGYGIGLVIISPRGANFEFAYTIKPYASNNQAEYEAVLKGLQLLKEVEANAIKIMGDSLLVISKLAGEYECKNDTLMVYNEKCQELMKEFRLVTLKHVSREXNVDANDLAQGASGYEPMMKDVRVEVAAITADDWRYDVHHYLHNPSQSASRKLRYKALKYTLLDDELYYQTIDGVLLKCLSADQAKVAIGEVHEGICGTHQSAHKMKWLLRLAGYFWQKMXEDCFKYYKGCQDCQKFGATQIAPASAMNPIIKSWPFRGWGIDMIGIINPPSSKGHKFILVEIDYFTKWVEPIPLKKVDSGDAIQFVQEHIICRFGIPQTITTDQGSIFVSDEFVQFADSMGIKLLNSSPYYAQANGLAEASNKSLIKLIKRKISDYPRQWHTRLAEALWSYRMACHVYGHEAVLPWEVRISSRRMELLNGKYLKKYYPSVWVNT

SEQ ID NO: 126818 - protein, 129 aa, Oryza sativa
  Clone ID: PAT_MRT4530_29328C.1.pep
MPPPAAVAAGSPSPFLLDLVKGIGGPRHVAASPPVGSSEGEGTIATFSSAGSGGGEDIAVLPPDHRLPSHRIWWRGGPCHAAAMVDGGGGGGGGEEKEEVERKREGIRREEEVDCGWETEFEGKSGRKR

SEQ ID NO: 126819 - protein, 519 aa, Oryza sativa
  Clone ID: PAT_MRT4530_29329C.1.pep
MKIERNPFQVNMVHTTGKTADKKDYRSKQLNSARIINKYQKRHDRHEEKFYEDDDSFDPHWSCEFFRFCWNEEQAVFEKPEGTENRHLMPLYINNGYVNGKPMSKMMVDGGAAVNLMPYATFSDKIEIVPADSQLKMENPSCYFEGVVEGSNVYTKDTVDDLDDKQGQGFMSADDLEEVDISPGDRPRPTFIIPIIKKNGKVSVCIDFRDLNKATPKDEYPMPVADQLVDAASGHKILNFMDGNAGYNQIFMAEEDIHKTAFRCPGAIGLFEWVVMTFGLKSAGATYQRAMNYIYHDLIGWLVEVYIDDVVVKSMKIEDHIADLMKVFERIRKYGLKMNPTKCAFGVSVGQFLGFLVHERGIEITQRSINAIKKIQPPEDKTELQEMIGKINFVRRFISNLFGRLEPFTPLLRLKADLKFTWGAEQQKALDSIKEYLSSPPVLTISIGRVFLADDVRGLFQILQGMSRLSKVWSNSKGTSIGYEPYHQAMAFRGWGIDMIGMINPPSSKGHKFILVATD

SEQ ID NO: 126820 - protein, 787 aa, Oryza sativa
  unsure (1)..(787): unsure at all Xaa locations
  Clone ID: PAT_MRT4530_2932C.1.pep
MHRLHGWPIMPPLLGVYDFTTGLPPSPPTGVPAYTVXVGHTTVDGHRHLHRRPASVAAEWCLRLHGWPIMPPLLGVHDFTTGLPPSPPTGVPAYTVGWSHHRXWASSSSPPACLRRRRLVPPPTRLAYYAAAVGRLRFHQHHHRLASTAADWCFRLHGWPIMPPLLGVYVVTXGLPSPLPTGVSACTAGXLCRRCWACTSSPXPACLRRCXLVFPPARLAXYAAVVGRIRLHRPAASSATDWCXPPARLAYYAAVVGRLRLHRPXAFAAADWCFRLHGWPXMPPLLGVYVFTXGLPRPPPTGVSACTAGLLCRRCWASTSSPXPACLRRCRLVFPPARLAXYAAVIGRLRLHRPXAFAAADWCFRLHGWPXMPPLLGVYVFTDRPPRPPPTGASACTAGLLCRRCWASTSSPTGRLVRRRLVLPPARLAYYAAVVGRLRLHRPXTFAAADWCFRRHGWPXMPPLLGVYDFTAGLPPSPPSGASAYTAGLLCHRCWASTTSPPACLRRRRLVSSPIRLVGHTTVHGRLRLHRRPASVAADWCPRLYGWLVTPPFMGVYDFTAGLPPSPPTGVSAYTAGLLCRRCWASTTSPPACLRRRRLVPPPTRLAYYAAAVGRLRLHRRLASVAAEWCLRLHGWPIMPPLLGVYDFTAGLPPSPPTGVLAYTVGWSHHRSWVSTSSPTGRLVRRRLVFPPARLAYYAAVVGRLRLHRPAASSAADWCFRLHGWPIMPPLLGVYVFTDRLAFAASDWCFRLHGWPIMLPLVGVYVFTDRPPHPPLTGVTACTAGLL

SEQ ID NO: 126821 - protein, 251 aa, Oryza sativa
  Clone ID: PAT_MRT4530_29330C.1.pep
MVLMSSSELMKEFWLVTLKHVSREQNVEANDLAQGAWGYKPMMKDVKIEIATIAADDWRIFLADNARGLFQFGAIQRAPASAMNPIIKPWPFRGWGIDMIGMINPPSSKGHKFILVASDYFTKWVEAIPLKKVDSGDAIQFVQEHIIYRFGIPQTITTDQGSIFVSDEFVQFAESMGIKLLNSSPYYAQANGQAEASNKSFIKLIKRKIFDYPRQWHTRLAEALWSYRMACHGSIQVVLPWEVRVDSRRTE

SEQ ID NO: 126822 - protein, 297 aa, Oryza sativa
  Clone ID: PAT_MRT4530_29331C.1.pep
MQKASDRADHTSVCNPTYTWQEIPDDPPLPGHDSDEGETTLQARIQHLFSESKKLSINVEHIIAQVSQAVNMNCGAEENSLLKEFDGNNPVTLPKLSDVVSARGLKHVWSEIKAFQELLKQRPVQRDIILKEISINLDLWSNFFSKPPPEIIRLMEGLRVLKGALSEEAPLPTTNLVLAQQDQINQHVDLLRTAQDKVESSCVALEALTSQYNVEQAVEEGNKRECSRQARKVRAEIAVLQARLQQVEDAHSSAQHRQDVVTENLNSHLERHRQENERKYGNVLAAACSRVGCSSSI

SEQ ID NO: 126823 - protein, 75 aa, Oryza sativa
  unsure (1)..(75): unsure at all Xaa locations
  Clone ID: PAT_MRT4530_29332C.1.pep
YRXSKYQPRTSXGPIGGKRLGMRLRAKTVGATIGQXLQKGEESPHRNQXGTCKGCTDITSKERSQSVSXTGNGNN

SEQ ID NO: 126824 - protein, 335 aa, Oryza sativa
  unsure (1)..(335): unsure at all Xaa locations
  Clone ID: PAT_MRT4530_29333C.1.pep
FLHPEDCFKYYKGCQDCQKFGAIQXAPASAMNPIIKPWPFRGWGIDMIGMINPPSSKGHKFILVATDYFTKWVEAIPLKKIDSGDAIQFVQEHIIXDRFGIPQTITTDQGSIFVSDEFVQVADSMGIKLLNSSPYYAQANGQAEASNKSLTKLIKRKISNYPRQWHIRLAKALWSYRMACHGSIQVPPYKLVYGHEAVLPWEVRIGSRRSELQDDLTADEYYNLMADEREDLVQSRLRALAKVTKYKERVARHYNKKVVPKSFSEGELVWKLILPNGTQESKFGKWSLNWEXLFQIYKVVSKGAYMLQGLDDEVYGRALNGKYLKKYYPSVWINA

SEQ ID NO: 126825 - protein, 751 aa, Oryza sativa
  Clone ID: PAT_MRT4530_29334C.1.pep
MSSSGGASSSSSSGERHGVGRSPNRLAAEHSPYLLQHAYNPVDWYPWGEEAFEKARRKDVPIFLSSMKCHVMEVESFENDEIAKILNDGFVSIKVDREERPDVDKVYMTYVSALYGGGGWPLSVFLSPNLKPLMGGTYFPPDDKYGRTGFKTILRKVKEAWETKRDALEKTGNVVIKQLRDALSAKASSQDMPNDLAVVSVDNCVEKTRFKNRDKNNIRSSIADSQLISMQLAGSYDPKFGGYGSAPKFPRPVENCVMLYKFRKHLESGQVSESQNIMKMITHTLQCMARGGVHDHVGGGFHRYSVDECWHVPHFEKMLYDQGQIANVYLDTFLITGDEYYSSVARDILDYLRRDMIGEEGEIYSAEDADSAEYDGAPRKREGAFYVWTNKEIEDTLGENSELFKNHYYVKSSGNCDLSRMSDPHDEFKGKNVLIERKQASLMASKCGKSVDEYAQILGDCRHKLFDVRSKRPRPHLDDKPEEYLGVAEKAARFIKEKLYDSSSNRLNHSYRNGPAKAPGFLDDYAFLINGLLDLYEYGGKIEWLMWAAHLQDELFLDKQGGGYFNTPGEDPSVLLRVKEDYDGAEPSGNSVAAINLIRLSSIFDAAKSDGYKCNVEHLLAVFQTRLRELGIALPLMCCAADMLSVPSRKQVVLVGNKESTEFRDMVAAAFSTYDPNRTVIQIDPRNTEEMGFWESNNAIIAQMARSSPPEKPAVAHVCQDFKCSPPVTSADALRVLLNKTVAAATSSAAA

SEQ ID NO: 126826 - protein, 188 aa, Oryza sativa
  Clone ID: PAT_MRT4530_29335C.1.pep
MPASDKQLASTVKKVTSRELPKKGADIVNMSQGTSPLPKDKGTATEPGKTVGTKRSDAPSSPGYHNVYVRRKVENDHSKVSSSQEKNEPPVAPGTTVQDDTHKSSNQYWNARFNRLQTYLESCDRSTQEGYMRMLRSLSAADRSMHAIDLEKRAIHLLVEEGKELQRMKALNVLGKVSPNGPSKQAPL

SEQ ID NO: 126827 - protein, 57 aa, Oryza sativa
  Clone ID: PAT_MRT4530_29336C.1.pep
LGSTFKLVPKVPGVVSTVGVAEATKGLNKPPKFCASLNPILNIEAFMATWPCLSPFP

SEQ ID NO: 126828 - protein, 158 aa, Oryza sativa
  unsure (1)..(158): unsure at all Xaa locations
  Clone ID: PAT_MRT4530_29337C.1.pep
NNLGGRVLITTRKKDVAFLADHNCVVELEALPHTEAWHLFCKKAFRRLEDKMCPENLRPWAEKIVTKCQGLPLAIVAIGSLLSYREFEEQEWKLFYNQLGWQLANNPELNWIANILNLSLNDLPSYLRSCFLYCSLFPEDCRIXRKMLVELWIAEGLV

SEQ ID NO: 126829 - protein, 128 aa, Oryza sativa
  Clone ID: PAT_MRT4530_29338C.1.pep
PIGDGLMGAPICSRFGKVFGMNVARTALCLSINFALNNSQLKVELAKLLQNEDYEMSALIEKYDSEKTSASKKRKGRGVSSSQMSRSPVKRKAGGSSSSRREKGVASSQMSSLPSKKKGGGNSSSRAI

SEQ ID NO: 126830 - protein, 417 aa, Oryza sativa
  Clone ID: PAT_MRT4530_29339C.1.pep
MAKTMGAKAAKGEESCWDPASPNASWAKAKWRVLASCGDDDSGSGEDENEGSDDMHIDPFIQFVHKWISWRDINETPEFESLQDLFKTIGIDRIVTLKQDYNEDLIRQFYATVWVAGDYSEMKWMSDTLQCSISRRQFRRLLNIRLDFGDDLHEEHTHNSLSIDYLSQFYEDGARYTHGKVVGLRTIPSVVNRIMRATILPRLGNNDDIRGVAWHVMDAIIQGRQFDIVSLMMQEIAISKGTFSQGIYYAPYIMRLIQDKLGAAEPNLKKHKQYKPRLQLGAPRAPRAAPSSHPGASSSSAPPPPHGYDPNAFFHPQYAYFGMQPIEYFNPVLGAINTLSKSIQHLSTGHEALHEDVRGLRTDVGDLNASMGRLHTRVGTLDSRVQMLESSQAFVYHRRRDAHHPSTSARPPSPPQE

SEQ ID NO: 126831 - protein, 765 aa, Oryza sativa
  unsure (1)..(765): unsure at all Xaa locations
  Clone ID: PAT_MRT4530_2933C.1.pep
MRAPVPVASSPTGVSVCMAGLLSRRCWASTTSPPACLRRRRLVSPPIRSVGHTTVDGHRHLHRRPASVAAEWCLRLHGWPIMPPLLGVYDFTAGLPPSPPSGASAYTAGLLCRRCWASTTSPPACLRRRRLVPPPTRLAYYAAAVGRLRLHRRPASVAAEWCLRLHGWPIMPPLLGVYDFTAGLPPSPPSGASAYTAGLLCRRCWASTSSPTGRLDRRRLVSLPTRLVYYAAAVGRLRLHRQLAFAAADWCLCLHGWSIMPPLLGVYDFTASLPPSPPSGASAYTAGLLCCRCWASTTSPPACLRRRRLVSSLLLMDDFVPTLATSAITKGXYYKAKIQIQICIKGIHGFKLISYAXRNGSVRTSPTGRLVCRRLVLPPARLXIMPPLLGVYVFTDRLAFAAADWCFRLHGWPLXCRRCWASTSSPTGLPSPPPTGVSACTAGLYAAVVGRLRLYRPACLRRCRLVFPPARLAFXMPPLLGVYVFTDWXPSPPPTGVSACTAGLYAAVVGRLRLYRPACLRRCRLVFPPARLAYYXPLLGVYVFTDRXASSAADWCFRLHGWPLCRRCWASTSSPTGRLDRRRLVFPPARLAYYAAVVGRLRLHRPAASSAADWCFRLHGWPLCRRCWASTSSPTGXPRPPPTGVSACTAGLYAAVVGRLRLHRPAASTAADWCFRLHGWPXMLPLLGVYAFTDRXAASAADWCHRLHGWPVITPTDAIFFTAGYITVTTNRHRVDWPYHLHRRSSRLLLTSALASTSGLYSYHY

SEQ ID NO: 126832 - protein, 136 aa, Oryza sativa
  Clone ID: PAT_MRT4530_29340C.1.pep
GAPRAHRTAPSSHPRASSCSAPPPLHGYDPNAFFHPQYAYFGMQPNEYFNPVLGAINTLSESIQRLSTGHDALHEDVRGLRTDVGDLNASVGRLHTRVGTLDSRVQMLESSQAFVYHRHRDASHPSTSARPPFSPQ

SEQ ID NO: 126833 - protein, 79 aa, Oryza sativa
  Clone ID: PAT_MRT4530_29341C.1.pep
MTSSSQSQSQSPRSSIGKRKISSPTTPHAPTAHESLPASALLGSRFLRGRAVRPQPDRFTFPLLLTSLSSPRRPESFDG

SEQ ID NO: 126834 - protein, 54 aa, Oryza sativa
  Clone ID: PAT_MRT4530_29342C.1.pep
FLVFVPICVLFIFFLKRKPRGEHHDQRGQNASNKGPTCAICTTGEAYTIGKGAG

SEQ ID NO: 126835 - protein, 123 aa, Oryza sativa
  unsure (1)..(123): unsure at all Xaa locations
  Clone ID: PAT_MRT4530_29343C.1.pep
RARPPPAARELTRRRRRXLGVLACRLASRAVVRFGVPEAGRFLXSLLTNDLLLSSSSQQRYAXTANAPARALXPGNAALLTXXGRFLYDLFLYRPPQRSCSTEWRAVDGEAQGETGGIRGKDE

SEQ ID NO: 126836 - protein, 74 aa, Oryza sativa
  Clone ID: PAT_MRT4530_29344C.1.pep
MALVAPTSEQRHRPRRAAGEATASAPATSSGLCLVKRRERQRRRHRWRRSRCAAALASGKQRRHVFNMPWILLT

SEQ ID NO: 126837 - protein, 307 aa, Oryza sativa
  Clone ID: PAT_MRT4530_29345C.1.pep
MAKSMAAVALNAGRASRQSDGRGTLETPDATGRLLAGGGVRKEMGLGSPKDGFARGMGIDTVVYMCSSASASSSRKDAAVVGLGRRSVLAASFRSASTSTPLIPVGVDKAPNIDPNLYFVAITGIKVASGEIVSDKAAAIMTTVSTLYTFLNPVLFDHLKKQLPPLADKGSSVLCYTKDTELPAITLVFAGKDAAMKLAPEHYSYKRSDGAVCLSILRSPLHGGVFVIGRRGGPRIFNLVRYRLRHLVVDGSGRSAPGGNSSPRRRTGGRRRLEHGGGRRGGMPDAPSARAAKAPTAPCAPAPRPKG

SEQ ID NO: 126838 - protein, 109 aa, Oryza sativa
  Clone ID: PAT_MRT4530_29346C.1.pep
PAGPTHAASFITLPILDLTDPSRVPASQIPLHANPTPPSLAEHWARLPIHGWHEVLRRPQLETQWDRGGRDEHRPTLNEILVPSEDTGRRTRARPYVPAGETGLIRPDF

SEQ ID NO: 126839 - protein, 79 aa, Oryza sativa
  Clone ID: PAT_MRT4530_29347C.1.pep
LHTWHFKGEEGRHAFQGEEEATSTWCRGSRRTWRGLGIDLEDLAERKPAAADLERRPVAAVLGMEDADLERRPAAVVLG

SEQ ID NO: 126840 - protein, 282 aa, Oryza sativa
  Clone ID: PAT_MRT4530_29348C.1.pep
MVFTLHTEFGAKQADVDEVEEASARLILSPEQVVFEKPEGIENRHLKPLYINGYVNGKPMSKMMVDGGAAVNLMPYATFSKLGRNAEDLNKTNMVLKDFGGNPSETKGDLNVELTVGSKTVPTTFFVIDGKSSYSLLLERDWIHANCCIPSTMHQCLIQWQGDKIEIVLADSQLKMESPSYYFEGVVEGSNVYTKDTVDDLDDKQGQGFMSVDDLEEVDIGPGDRPRPTFISKNLSPEFRTKLIELLKEYRDCFAWEYYEMPRFSRSIVEHRLPIKPGVRPY

SEQ ID NO: 126841 - protein, 288 aa, Oryza sativa
  Clone ID: PAT_MRT4530_29349C.1.pep
QTVFVKPKGTENRHLKPLYINGYVNGKPMSKMMVDGGAAVNLMPYATFWKLGRNAEDLIKMNMVLKDFGSNPLEIKGVLNVELTVSSKTVPTTFFVIDGKGSYSLLLGRDWIHANCCIPSTMHQCLIQWQGKKIEIVPSDSQLKMESPSYYFEGVVEGSNVYTKDTVDDLDNKQGQDFMSADDLEEIDIGPGDRPRPTFISKNLSPEFRTKLIELLKEYKDCFAWEYYEMLGLSRSIVEHRLLIKPGVRLYQQPPRRCKADMLEPVKAEIKRLYDAGFIRPCRYVEWG

SEQ ID NO: 126842 - protein, 1101 aa, Oryza sativa
  Clone ID: PAT_MRT4530_2934C.1.pep
MASSSSTAATNPLQGHPISEKLGKTNHALWKVQISAAIRGAWLQGHLTGATKEPAPEISVTADGATVKKPNPAYDDWEAADQQVLGFLLSSLTREVLMQVATCDTAAEAWSAIEGMYSTHTRARSINTRFALTNTKKGNMTTPEYFAKMKSLGDEMAIAGVRPIDEEELIQYIITGLGEGYSEVVSAVCARVEPITVSDLYSQVLNFEVRQAIYRGAHEGTVNLANRGGSNTGGSSSHGRGNPSGGRGRGNSGGGRGRGRASGGFGGVDKRPTCQVCFKRGHSAADCWYRYDEDYVPDAKHVAAAAVNSYGVDTNWYIDTGATDHVTGELEKLTVKEKYNGGEQIHTASGAVNLLGSIFYNISLKYLKSLKSSKLCTMHKGFKCLEVSTGRVYISRDVVFDESVFPFTELHANAGARLRSEIQLLTPDLFFPVRSMGHEQLMHHETNPLPNNIYDVSDASNEQADDTENPAGPGGDPDMPHEEFGSDSDAGQSPDATASGRLADRPPDATRRSLVGGSGSASRGTAQQLQHRQSARQSEPAEAPDTGESNPTAADSTSTEVDATQVGPRTRLQSGVRKEKVYTDGTIKYKHSWFTASGEPTNDLEAIKDKNWKMAMESEYDALVKNKTWHLVPPQRGKADGTLDRYKARLVAKGFKQRYGIDYEDTFSPVVKAATIRIILSLAVSKGWSLRQLDVQNAFLHGYLEEEVYMLQPPGFEDPANPHFVCKLDKALYGLKQAPRAWFSRLSKKLVDLGFQGSKADTSLFFSNKGGIIIFVLVYVDDIIVASSSERATTALLQDLKGEFALKDLGDLHYFLGIEVNKVQNGIVLSQEKYATDLLKKVGMSDCKPACTPMSVSEKLSLHEGSLLGPDDATQYRSIVGALQYLTLTRPDIAFSVNKVCQFLHAPHTVHWIAVKRILRYLKQCAQLGIEFHKSGSTLVSGFSDADWAGSLDDRRSTGGFAIFLGSNLVSWSARKQATVSRSSTESEYKAIANATAEIMWVQTLLAELGIKSPRAAKIWCDNLGAKYMSANPVFHARTKHIEVDYHFVRERVSQKLLEIDFVSTNDQVADGFTKPLSVRLLENFKSNLNLVRSGLREGVS

SEQ ID NO: 126843 - protein, 323 aa, Oryza sativa
  unsure (1)..(323): unsure at all Xaa locations
  Clone ID: PAT_MRT4530_29350C.1.pep
KGCQDCQKFEAFQRAPASAMNPIIKPWPFRGWGIDMIGMINPPSSKGHKFILVATDXFNKWVEAIPLKKVDSGDAIQFVQEHIIYRFGIPQTITTDQGSIFVSDEFVRFADSMGIKLLNYSPYYAQANGQADASNKSLIKLIKRKIFDYPRQWHTRLAEALWSYRMAXHSSIQVPPYKLVYGHEAVVPWVASIGSRRTELQNELSADEYYNIMTDEREDLVQSRLRALAKVTKDKERVSQHDNKKVVAKSFSKGELVWXLILLIGTRDNKFGTWSPNWEGSFQIHKVVSKGAYMLQGLDGEVYGRALNGKYLKKYYPSVWVNA

SEQ ID NO: 126844 - protein, 302 aa, Oryza sativa
  unsure (1)..(302): unsure at all Xaa locations
  Clone ID: PAT_MRT4530_29351C.1.pep
TEREKSGGRGWGIEEFGFSNYLSSKXHKFILVATDYFIKWVEAIPLKKVDSGDAIQFVQEHIIYRFGIPQIITTDQGSILVSDEFVQVANSMGIKLLNSSPYYAQANGQAEASNKSLIKLIQRKISDYHRQWHTRLAEALWSYWMACHGSIQVPPYKLVYGHEAVLPWEVRISSRKTDLQNELAADEYYNLMADERANLVQSRLRALAKVTKDNDRIARHYNKKVVAKSFSEGELTWKLILLIGTRDNKFGKWSPNWEGPFQIHKVVSKWAYMLQGLNGEVYGRALNGKYLKKYYPSVWVNA

SEQ ID NO: 126845 - protein, 30 aa, Oryza sativa
  Clone ID: PAT_MRT4530_29352C.1.pep
IIKANFTIERWGSFNEVQNHCRRSLLTRES

SEQ ID NO: 126846 - protein, 599 aa, Oryza sativa
  Clone ID: PAT_MRT4530_29353C.1.pep
MSWHRAGVLLLGAQSCLPVPGVPAVGGIGSVLLSMARMGWKLCHVFRLYTVVFRVPTLVEIYIDDVVVKSKEIDDHIADLRKVFERTRKYGLKMNPTKCAFGVSAGQFLVFLVHERGIEITQRSVNAIKKIQPPEDKKELQELIGKIYIVRRFIPNLSGRLEPFTPLLRLKADQKFTWRAEQQKALDNIKEYLSSPPVLIPPQKGIPFRLYLSAGEKSIGSVLIQELEGKERVVFYLSRRLLEAETRLRHYLLSNECTVICKADVVKYMLSAPILKGRIGKWIFALMEFDLRYESPKAVKAQAIADFIVDHRDDSIGSVEIVPWTLFFDGSVCTHWCGIGLVIISPREASFEFAYTIKPYATNNQAEYEAVLKGLQLLKEVEANAAEIMGDSLLLKLWVIQLVGEYECKNDILMVYSEKCRELMDGFRLVTLKHVSREQIVEANDLAQGASEYKPMMKDVKVEVATITADDWRYDVFRYLQNPSESASRKLRYKALKYTLLDDELYCWTIDGVLLKCLSADQAKVAIGEAVLPWEVRIGSRRTELQNELTADEYYNLMADEREDLVQSRLRALAKVNKDKERVARHYNKKVVSKSFFGR

SEQ ID NO: 126847 - protein, 56 aa, Oryza sativa
  unsure (1)..(56): unsure at all Xaa locations
  Clone ID: PAT_MRT4530_29354C.1.pep
DFSQGPSFRPPTKAINIQCDICMQIFICTASECXCKEQAEGKHPKNVLSVCFPPLK

SEQ ID NO: 126848 - protein, 237 aa, Oryza sativa
  unsure (1)..(237): unsure at all Xaa locations
  Clone ID: PAT_MRT4530_29355C.1.pep
RFAPTVEGTRGVLYVSSGASVQKLVVASSIATVCLNPSWPQDMPKDETSWSDKKLCIENEDWYSVAKIEAEEMALEYGKKNGLHVLTICPGIVFGPMLQTVEINTSSKVLLYMIKGGXRPTYGQQILPMVDVRDXADALLLAYHKAGPSXRYLCTLEQMDXNTLLDLMKNMYPNYTLCRHRWLMWITQVEVTSEKLKNLGWNPRKREETLADSIEFFEKAGLLDGRPCRLPYFAVQE

SEQ ID NO: 126849 - protein, 49 aa, Oryza sativa
  unsure (1)..(49): unsure at all Xaa locations
  Clone ID: PAT_MRT4530_29356C.1.pep
NQCVKKGPTYGVVKVETQKNPFXKVPPGKENGGFKLGTKCSCPDCKLGK

SEQ ID NO: 126850 - protein, 64 aa, Oryza sativa
  unsure (1)..(64): unsure at all Xaa locations
  Clone ID: PAT_MRT4530_29357C.1.pep
MRGREXQTASESSYKCVNYYSAXVMIDEXXYGWGVLCVWINLLYECCTCYIASMQMRRSSSKWD

SEQ ID NO: 126851 - protein, 151 aa, Oryza sativa
  Clone ID: PAT_MRT4530_29358C.1.pep
VLDLLERVFKIAIEKNVLDLGIVELTDLRDGGVPGWYSRAYNAISIFRPLAKIMDEVYVERVRVLLLVGAPGLFSTIWMMVQPMVPSQTRKKIFIFGGNDQAKWLDGLTNHIAIENIPAILVGKGSDENVVKGGKIEKGSFQEFKKSYPKV

SEQ ID NO: 126852 - protein, 62 aa, Oryza sativa
  Clone ID: PAT_MRT4530_29359C.1.pep
SSLHACRSTLEDPLLAAPNSLQQGEVRSSVKGSECRLMVSRCVGAEGWRVVVSAVMTASVWS

SEQ ID NO: 126853 - protein, 393 aa, Oryza sativa
  unsure (1)..(393): unsure at all Xaa locations
  Clone ID: PAT_MRT4530_2935C.1.pep
WASSSTPXGLPPSPPTGVPAYTEWISQNITTGSPSSPPTGVFAYTVDWSHHRCWASTSLPTGRFVHRRLVSSPIRLVGHTTVVGRLRLHRPACLRRRRLVSPPARLAYYATIVGRLRLHRPAASSAADWCFRLHGWPIMPPLLGVYVFTDRLAFVAADWCLRLHGWPIMPPLLGVYVFTDRXASSAADWCFRLHGWPIMPPLLGVYVFTDRXLVAADWCFRLHGWPIMPPLLGVYVFTDRPPRPPPTGVSACTAGLLCRRCWASTSSPTGLPRPPLTGVSACTAGXLCRRCWASTSSPTGLPSPLPTGVSACTAGXLCCRCWASTSSPTGRLVGRRLPTGVSACTAGLLCHRCWASTSSPTGRLVRRRLTSWATTSTLLQLFVFTVGLLRNCR

SEQ ID NO: 126854 - protein, 342 aa, Oryza sativa
  Clone ID: PAT_MRT4530_29360C.1.pep
MGMDYYNVLKVNRNATEEDLKKSYRRMAMKWHPDKNPGDKKKEAEAKFKKISEAYEVLSDPQKRAIYDKYGEEGLKASVDAGASSSMNGNRRFNPRNAEDVFAEFFGSSKPFEGMGRAKSMRFQTEGAGTFGGFGGGNENKFRSYNDSAGTSSSQPRKPPAVETKLPCTLEELYAGSTRKMKISRNVVRPTGQIGTESEILTIDIKPGWKKGTKITFPDKGNEQPNQLPADLVFVIDEKPHDLYTREGNDLLVHQKIELVDALAGTTVNLKTLDGRDLVIKLTDVVTPGYELAIAKEGMPIVKENGRRGNLRIKFDIVFPKRLSSDQRQNIRKVLGGQTQQQ

SEQ ID NO: 126855 - protein, 112 aa, Oryza sativa
  unsure (1)..(112): unsure at all Xaa locations
  Clone ID: PAT_MRT4530_29361C.1.pep
GGTARHGPGPAVPGPRLVGPARPDLHSGPCCASPRAAHTAQARPNMTRAMPGRPEGTTAHRRPTVPRVQPRHGPAVGPGRHGHDPXSRAVPCLGRAKMACLGPGLGPYGHLY

SEQ ID NO: 126856 - protein, 337 aa, Oryza sativa
  Clone ID: PAT_MRT4530_29362C.1.pep
MALRSKARAARRLSSPASAPVSLWDFADGLPTFSEYLVHLTIGTPPQPVQLTLDTGSVAATSSGQSACRAVHASTRLSLTSTGLIEVDKFTFGAGASVPGVAFGCGLFNNGVFKSNETGIAGFGRGPLSLPSQLKVGNFSHCFTAVNGLKQSTVLLDLPADLYKNGRGAVQSTPLIQNSANPTFYYLSLKGITVGSTRLPVPESAFALTNGTGGTIIDSGTSITSLPPQVYQVVRDEFAAQIKLPVVPGNATGPYTCFSAPSQAKPDVPKLVLHFEGATMDLPRENYVFEVPDDAGNSIICLAINKGDETTIIGNFQQQNMHVLYDLQNMHRGPRAT

SEQ ID NO: 126857 - protein, 456 aa, Oryza sativa
  Clone ID: PAT_MRT4530_29363C.1.pep
MSSSSLSSLISLPPLSLFPSFLIRAGGREYLCKYNLPACLPRPGRRMQLTHADAGRGLAARELMQRMALRSKARAARRLSSSASAPVSPGTYDNGVPTTEYLVHLAIGTPPQPVQLTLDTGSDLIWTQCQPCPACFDQALPYFDPSTSSTLSLTSCDSTLCQGLPVASCGSPKFWPNQTCVYTYSYGDKSVTTGFLEVDKFTFVGAGASVPGVAFGCGLFNNGVFKSNETGIAGFGRGPLSLPSQLKVGNFSHCFTAVNGLKPSTVLLDLPADLYKSGRGAVQSTPLIQYAKNEANPTFYYLSLKGITVGSTRLPVPESEFALKNGTGGTIIDSGTAMTSLPTRVYRLVRDAFAAQVKLPVVSGNTTDPYFCLSAPLRAKPYVPKLVLHFEGATMDLPRENYVFEVEDAGSSILCLAIIEGGEVTTIGNFQQQNMHVLYDLQNSKLSFVPAQCDKL

SEQ ID NO: 126858 - protein, 199 aa, Oryza sativa
  Clone ID: PAT_MRT4530_29364C.1.pep
MSDDELIPGLPEEVARECLLRVGFDQLPAARSTSRRWKAEVESPFYHRLRRARGMARPLLALAQAEPPLAAAGPANKYAGLSTSYRLVLHDPVAGGWAALPPLPGAGGLPLFCQLASVAACGGERRRLVVDTAGGIPKTWAPTDAVHVYDFLSGSWRRGAAMPGPRRSFFACAAVGRWVYVAGGHDEEKNALRSAVAYD

SEQ ID NO: 126859 - protein, 62 aa, Oryza sativa
  Clone ID: PAT_MRT4530_29365C.1.pep
KNSKITPLIKVLLLGFNFFPGNRRGKFKNKWPFLFLAPTGATNGPKKKGGGGLKNPTQKALS

SEQ ID NO: 126860 - protein, 681 aa, Oryza sativa
  Clone ID: PAT_MRT4530_29366C.1.pep
MSLTTTTSRLPICRAQGGGVAKEKRTTPPPAKITPPSSSSSEAAGLSRRRLLQSAGLGLGLGLTAARPARAEATAPEEVTSNRMSYSRFLEYLDAGAVKKVDFFENGTVAVAEVDDAAALSRVHRVKVQLPGLPAELVRKLRDKGVDFAAHPVEPSAGVMLLDLLVNFGFPLLFVASLLWRSPTMNNPGGGPSLPFGLGKSKAKFQMEPKTGVTFDDVAGVDEAKQDFQEIVQFLKFPEKFTAVGARTPKGVLLVGPPGTGKTLLAKAIAGEAGVPFFSLSGSEFIEMFVGVGASRVRDLFDRAKASAPCLVFIDEIDAVGRQRGAGIGGGNDEREQTLNQLLTEMDGFGGGDGGVVVIAATNRPEILDAALLRPGRFDRRVSVGLPDVRGREEILLVHGANKRLDPGVSLAVVAMRTPGFSGADLANLMNEAAILAGRRGKDRITVSEIDDSIDRIVAGLEGTSMTDGKSKMLVAYHEIGHAVCATLTAGHDEVQKVTLIPRGQARGLTWFLPGEEDPALVSRQQIFAGIVGGLGGRAAEEVVFGEPEVTTGAAGDLQQVTRVARRMVTAFGMSEIGPWALAEPAAQGGDVVLRMLARSSMSERLAADIDAAVRTIVDEAYEVAKAHVRRNRAAIDQLVDVLMEKETLGGDEFRAILSEHVDIGKERRETAARTQQLATA

SEQ ID NO: 126861 - protein, 92 aa, Oryza sativa
  Clone ID: PAT_MRT4530_29367C.1.pep
TTHRHTHSPAVARLLSLPLDPGGGRPSLPLVCLSTRQSTRHRAPLAFAAARHRACCHPPHRPRPRSRAVDPSSPTLRSAVTVTRPTTARPSL

SEQ ID NO: 126862 - protein, 143 aa, Oryza sativa
  unsure (1)..(143): unsure at all Xaa locations
  Clone ID: PAT_MRT4530_29368C.1.pep
VRPAGSYIMDQLELRRVALYPETNVSKGDTVILXXNFTISAGLRAAEAFLXXHQMEIITEFGAVVLPMVKHPFVVGFLVAELPELVGCTKNSETSDIPSHSFLDKSSDITPYTKGETWDFQTSGDQANYAYVTEWKNLMISRT

SEQ ID NO: 126863 - protein, 79 aa, Oryza sativa
  Clone ID: PAT_MRT4530_29369C.1.pep
MLRTYVVRSMGGWFGSLYVATSSYICKQDAPTPADLLLSMSTAKLREQQQSETTDLKNCHSDRFQLVECDGNFSQCSMI

SEQ ID NO: 126864 - protein, 35 aa, Oryza sativa
  Clone ID: PAT_MRT4530_2936C.1.pep
YGYFHIFFNAMSLSYTLSFLFIFQYTETHIRLDKY

SEQ ID NO: 126865 - protein, 135 aa, Oryza sativa
  unsure (1)..(135): unsure at all Xaa locations
  Clone ID: PAT_MRT4530_29370C.1.pep
QDIPRLSVLLFKVFFELALALSVFRXVATRKKWRIRHYIPSTTGMAITLFTXPRVPVGMCIGSLLAYLWEKMYPFLGRMLSPALASGIIYDVGVGSIFLSIKTLMGARAPICIKFLSPAGNVKLDAFLAAIQHMR

SEQ ID NO: 126866 - protein, 362 aa, Oryza sativa
  Clone ID: PAT_MRT4530_29371C.1.pep
MDALVSAALEEVSARLSAGIPVTDLWAALRGALEAAGLPIGPAVKRAVWARLIVLPVISVVLGEAEAEAEGPVVDDPKVGVEDAERLGMRLVASAALRDNFLGMYDLRHSKSEMSAVQKKALQRVGASRTSGVTQNDLCKSFGMEGNNFHYIVQSLQSQKLIVRRSTIIKFKGNGAEKEDASQNKRVTNTNSLYLTRYAKDCMNSHQRIEIIKPGLLVSNEETNIDDLQDGTFGVNSDNDVSIHDYLPAMKAICDKLEEASGRVLHRLRDAHLVEEFDAKVDDKIVPCLRLLKKFDPNEFLPKIQTSNYKLGKKGQATDQIMELSLENCIYDMISAQGPKGITLVENTIQLHCSSWFLVDSI

SEQ ID NO: 126867 - protein, 28 aa, Oryza sativa
  Clone ID: PAT_MRT4530_29372C.1.pep
CPRGICSHSVVAFTGLEPWTKFRPAGLN

SEQ ID NO: 126868 - protein, 192 aa, Oryza sativa
  Clone ID: PAT_MRT4530_29373C.1.pep
LPLEPINLAIPKKIQTSETPWMQLFSRLRRQRHVVIFVFFFSHRRAPPRAGTRSSKSAAAAGVRGRVRVNSLFGDGGGGDDGFRAVRRLVKLNSAVQNRSVRELLELAGDECLYFFGRISSIDVSQVSKNMFLLLHAMMLRHHVSFVLKPTENEGFDLGVKWSLEWKGKKLPWDLDCNITTNHVYRGMLLIK

SEQ ID NO: 126869 - protein, 138 aa, Oryza sativa
  Clone ID: PAT_MRT4530_29374C.1.pep
MAAEREGAVVAKGHEEGMKMAASLLEEFGLPLGLLPLGDVVEVGFARATGYMWIAQRRKVEHHFRMVGKHVSYDADITGYVKPRCIKKLKGVKAKELMLWPPVNEIAVDEPSTTGKIHFKSLAGVTKTFPVEAFAAGQ

SEQ ID NO: 126870 - protein, 68 aa, Oryza sativa
  unsure (1)..(68): unsure at all Xaa locations
  Clone ID: PAT_MRT4530_29375C.1.pep
LVKALCGEHKVPLVTGPSVKTFGEWAGLCKINFKGKPRKVVGCSWVVVKDYGXKFEGLNKGQGYVKSP

SEQ ID NO: 126871 - protein, 497 aa, Oryza sativa
  Clone ID: PAT_MRT4530_29376C.1.pep
MAALLWKDIHIQTEDVDAFIKDRGSMGVIPFKTLINLCGTNMQFTLNVTLEESIKERRDKLVTKVHCMIQGYTSSKIHLSHGMKIVDAIERLGVGYHFHEEIGMFMRVLNDTPARENDMAEAALRFRLLRQHHYNAPSDVFGCFLDKNGDFKETLRHDVDALLSLYEAAHLGKCDEDLLKSAVVFTTGCLSAMAENDQLPQPLLEKVEHALTSPTQRRMKRLEAKLYISIYENDEDSNHDILELAKLDFHILQQMHRDEARRFSLWYKELNVRSTLGPYIRERPVECYFWSLGVFYEPQYAKARMMFARLIKIFSLFDDTFDSYGTLEELHLFNNAVQSWDEGGAKQIGDYFGYVMSLLSKTLNEFVVDGASPLGIDCTKKTIKEASRCMLQEIIWREEGQWEKDGGGVPTAVECYMKEYGVTVQEAKKALWCLVEEQWRSINQEFLRNTTVPVPLLTRVINLARLMETLYKTTNGYTHCSGVTDLISNVLDTCVSH

SEQ ID NO: 126872 - protein, 80 aa, Oryza sativa
  Clone ID: PAT_MRT4530_29377C.1.pep
APPVLDPPLPSTTDVGSIFPHLLRPPEHCRQSHRRLHEPPHHRHPSPLPLPEPPLLVRAAADRWTHRQWGGRRRGVLRWV

SEQ ID NO: 126873 - protein, 286 aa, Oryza sativa
  Clone ID: PAT_MRT4530_29378C.1.pep
WIPSSTPQASPLPLPSPPTSTSKDEGLSMLNAGLTTQLLLSLFRVKGIVHWGIAGNADEGLQIGDVTIPEHWAHLSLWNWQRYGDGPENELPLEAAGDYTRDLGFLNFSDYTAAGPSPNELNSIWFQPEEIFPVSGKPEQRQHAFWVPVSSRYFSLAEKLEGMELPACVNATTCLPRAPRVTRVRRGCSANVFLDNAAYRQFLRAKFGCTPVEMESAAVALVAHQHAVPFLTIRSLSDLAGGGSSLGNEAGEFLAIAAQNAVDVMLNFVPLLADGGAAHDAVAADM

SEQ ID NO: 126874 - protein, 59 aa, Oryza sativa
  Clone ID: PAT_MRT4530_29379C.1.pep
MRWSDEGGPSLYEGYVTNTGAWTDEAVDCCRGEVEDKCVTFHEGMKAFHGFHPKVIVAL

SEQ ID NO: 126875 - protein, 400 aa, Oryza sativa
  unsure (1)..(400): unsure at all Xaa locations
  Clone ID: PAT_MRT4530_2937C.1.pep
WASTTSPPACLHRRRLMPPPTRLAYYATAVGRLRLHRRPASVAADWCLRLHGWPIMPPLLGVYDFTAGLPPSPPTGVLAYTVGWSHHRSWASTTSSPACLRRRGLVPPPTRLAXMPPLLDEWISQNITDRLAFAAADWCFRLHGWPLCRRCWASTSSPTGRLVRRRLVLPPARLAXMPPLLGVYVFTDRLAFATADWCFRLHGWPLCRRCWASTSSPTGLPLPLPTGVSACTAGLYAAIVGRLRLHRPACLRRRRLVFPPARLAFMPPLLGVYVFTDRPPRPPPTGASACTAGLXYAAVVGRLRLHRPACLRRRRLVFPPARLAFMPPLLGVYVFTDRXASSAADWCFRLHGWPXLCRRCWASTSSPTGHLDRRRLTSWATTSTLLQLFVFTVGLLRNCR

SEQ ID NO: 126876 - protein, 53 aa, Oryza sativa
  Clone ID: PAT_MRT4530_29380C.1.pep
SVFLYFLFTYALLNNNSFCIIYFYIMFERDQVLQKQMQNYFWKSKQNKLTLEH

SEQ ID NO: 126877 - protein, 46 aa, Oryza sativa
  Clone ID: PAT_MRT4530_29381C.1.pep
DSSIQITYVSDNVKLTISALPHLSCSSLVACTFKEMAPVMMWNHAR

SEQ ID NO: 126878 - protein, 141 aa, Oryza sativa
  unsure (1)..(141): unsure at all Xaa locations
  Clone ID: PAT_MRT4530_29382C.1.pep
MAVLALLSTGLSLSLSRADLVAVVIAKPRLLCAKADTIAASARIFTRNNRLDYQLFFRTRGAFRRLGWNGLMTEPQTKPYPLDMWKYGSALQQRPELNPYSGRGATSHNWHAPKPHRKXGFRGFERGREVYIQFHHKPTIP

SEQ ID NO: 126879 - protein, 900 aa, Oryza sativa
  Clone ID: PAT_MRT4530_29383C.1.pep
MAQDAGDAVLPALRITAERHLSLIRKIMPEDAAVRVGESRLRPRFFHEVLDFYEIHAFHLAPNVVMTLAILAHLCEMFIGVRPTMRQFLSFFVPWLLQGAVVGGCCFQPRPGTAGQYIESHLCKKWEDWKKDWFYTALPDHPRLRLPAGPPERSATWLVVSELGEEYDAVRDRLRGLRSQGLTGAMVFGDYFRRRIAPLQERSRGAWEYTSFRDRESILAVMSAVGAGRGRSRRGGAGGGAVGAGSSSASAGGSRTGNSGGDGDFRAPGPSRGPGGDSAGDPKGKRKMFESRPPSPPRGGGAERVADRPPAGHKRPAASEAGRKKKRLRKIGQTEPCRGSFIEPPKWTFKRPPSQGRSRGCDLRGAPLGGGGRSDRGPEAEVERAPGAEAGRDPEAEAGGGPEPEVEVEAESARGPEAGVLAAADSIVWEGLNAQVQALADERAALEAEWAQLAADRARVDEGRRAVDDMVEVGHKMRQAQPAEIQAREETLDSVMRETEEERQAALIASSVLDEALGDIRLQYETHAEDLAKRVEDTRGVLDAAAAQERRASEVDASLRAQSAALEAERKVLDERARSAQEFEATIHRRIEVLDRNQREQDERSWKQAQQARELEEHARALEEHTRALEERARMLDQCETTLAAHERTAAEAESSLRLREEAAAERNRTTLAVEASVAHRAEELRLREEACQERDATLAVREAEENRRGVAARWLGEQLAKREEAVTGHEARHLESARAEREAMATRSSELEAQEKELEVGGQLAGAELVSQLTAAQSTLADLGRLVQDQVGEITALRLTNEIGPGQLSDAVDRLGRAGRRIGISVRQDRKLPPTQPAVVLRLDGMAADLERLEEEVGETVKSSSALAQAMVELVLASHQARDNDFLPWRALEDFPPGT

SEQ ID NO: 126880 - protein, 623 aa, Oryza sativa
  Clone ID: PAT_MRT4530_29384C.1.pep
MASDMRSLNSQKGQSCGVSDQACHSKSKSGNDGKPSHAKANGVSSLSGSHNDEKILKENSGACNLNSDHANPLSVDGTKVSTARSELIDSSGHDGCLHVKNESCMACDDLLQESDKEQPGGTLEDLFSFNDEEDDDSDWEPSARLALSRWFCLNCTVPNMEGFTHCQNCDELKGSVVVGYDAFKAHLAQAALLSADAALPSVSTAVGFDERMLLHSEIEIKPNPHPERPDRLRAIAASLAAAGIFPSKCVMVPPREITKEELLRVHTSDHIDSVEQTKNMLYSYFTSDTYANGHSACAAKLAAGICADLANLIVSGRVRNGFAMVRPPGHHAGVKQAMGFCLHNNAAVAALAAQRAGAKKVLIVDWDVHHGNGTQEIFDGDNSVLYISLHRHEDGSFYPGTGAANEVGVMDGQGFSVNIPWSRGGVGDNDYIFAFKHVVLPIAAEFAPDITIISAGFDAARGDPLGCCDVTPAGYSRMASMLTACSQGKLLVILEGGYNLRSISSSATEVVKVLLGDSPVYDTDATEPSEEGIQTVLQVLSIQQQFWPVLVPSFASVLALQRSVFSRYTTEVNKMKRKHAGGAGPFWWKWGSKRLLYEVLFEGRCLRKTKDTGKEKLNDEAEP

SEQ ID NO: 126881 - protein, 1047 aa, Oryza sativa
  Clone ID: PAT_MRT4530_29385C.1.pep
MQLLHYKKHSNKFPIPVLALALVLLINLASLTSSCTEQDRSSLLKFIRELSQDGGLSASWQDGTDCCKWDGIACSQDGTVTDVSLASRNLQGNISPSLGNLTGLLRLNLSHNMLSGALPQELVSSSTIIIVDVSFNRLNGGLNELPSSTPIRPLQVLNISSNLFTGQFPSSIWDVMKNLVALNVSSNKFTGKIPTRFCDSSSNLSVLELCYNQFSGSIPSGLGNCSMLKVLKAGHNKLSGTLPGELFNDVSLEYLSFPNNNLHGEIDGTQIAKLRNLVTLDLGGNQFIGKIPDSISQLKRLEELHLDSNMMSGELPGTLGSCTNLSIIDLKHNNFSGDLGKVNFSALHNLKTLDLYFNNFTGTIPESIYSCSNLTALRLSGNHFHGELSPGIINLKYLSFFSLDDNKLTNITKALQILKSCSTITTLLIGHNFRGEVMPQDESIDGFGNLQVLDINSCLLSGKIPLWLSRLTNLEMLLLNGNQLTGPIPRWIDSLNHLFYIDVSDNRLTEEIPITLMNLPMLRSTSDIAHLDPGAFELPVYNGPSFQYRTLTGFPTLLNLSHNNFIGVISPMIGQLEVLVVLDFSFNNLSGQIPQSICNLTSLQVLHLSNNHLTGEIPPGLSNLNFLSAFNISNNDLEGPIPTGGQFDTFSNSSFEGNPKLCDSRFNHHCSSAEASSVSRKEQNKKIVLAISFGVFFGGICILLLLGCFFVSERSKRFITKNSSDNDGDLEAASFNSDSEHSLIMITRGKGEEINLTFADIVKATNNFDKAHIIGCGGYGLVYKAELPDGSKIAIKKLNSEMCLTEREFSAEVDALSMAQHANLVPFWGYCIQGNLRLLIYSLMENGSLDDWLHNWDDDASSFLDWPTRLKIAQGASQGLHYIHDVCKPHIVHRDIKSSNILLDKEFKSYIADFGLSRLVLPNITHVTTELVGTLGYIPPEYGQSWVATLRGDMYSFGVVLLELLTGRRPVPILSTSEELVPWVHEMRSEGKQIEVLDPTLRGTGCEEQMLKVLETACKCVKGDPLKRPTMMEVVTCLDSIDPDGLT

SEQ ID NO: 126882 - protein, 86 aa, Oryza sativa
  Clone ID: PAT_MRT4530_29386C.1.pep
MAVSAVAARSRAIARAASSSLLARGLLPTSRRATCINRLPLVSGGLLSTLPLHSAVASARLRSAIAPESQSWGLVPQGEVLGHCTF

SEQ ID NO: 126883 - protein, 146 aa, Oryza sativa
  Clone ID: PAT_MRT4530_29387C.1.pep
MVAATAEFRRVFSAFDRDADGKISAAELRLCMKAALGEDMSAEEAEALVSSADTDDDGLLDEEEFTKLAVQLEMGDEEERCRGLMEAFRMYEMEGEGRITPASLKRMLSKLGSHQGIEECQTMICRFDLDGDGVISFEEFKIMMDA

SEQ ID NO: 126884 - protein, 153 aa, Oryza sativa
  Clone ID: PAT_MRT4530_29388C.1.pep
LDLVVIVFVFFKKKIKARLTFYLFKKSTQMSLVITIVKARLGTKTWKQNSFREAQNLAFSQKTSPPPLKNFDLGANHFSSNKNSFYKNKFCFFPNGKPGGRKKTRSQNPHNKLGNKKKLMGLTTMPQFFAPNKELAPGPIFGPGGQIPFWGGV

SEQ ID NO: 126885 - protein, 64 aa, Oryza sativa
  Clone ID: PAT_MRT4530_29389C.1.pep
MAATGAGFHSGRFIIFKYGNFGNALEAGIQQCCGYVVHCNEHRHKAWDGWMSVPSQDLNPRSIV

SEQ ID NO: 126886 - protein, 772 aa, Oryza sativa
  unsure (1)..(772): unsure at all Xaa locations
  Clone ID: PAT_MRT4530_2938C.1.pep
GHRHLHRRPASVAAXDWCLRLHGWPIMPPLLGVYDFTAGLPPSPPTGVPAYTVGWSHHRSWASTTSPPACLRRRRLVPPPTRLAYYAAAVGRLRLHRRPASVAADWCPRLYGWLVTPPFMGVYDFTAGSPPLPPSGASAYTAGLLCRRCWASTTSPPACLRCRRVVPPPTRLAYYAAAVGRLRLHRRPASVAADWCPGLYGWLVTPPFMGVYDFTAGSPPLPPSGASAYTAGLLCRRCWASTTSPPACLRCRRVVPPPTRLVYYAAAVGRPRLHRRPASVAAEWCLRLHGWSIMPPLLGVHDFTAGLPPLPPSGASAYTAGLLCRRCWASTTSPPACLRRRRVVPPPTRLAYYAAAVGRLRLHRPAASSAADWCLCLHGWPIMPPLLGVYDFIAGLPPSPPSGASAYTAGLLCCRCWMPTSSPLAHLRCRRXGMDQSEHHHRLASTAADWCFRLHGWPXMPPLLGVYVFTDRLAFAAADWCFRLHGWPIMPPLLGAYVFTDRXPSSPPTDVLACTAGLYAAVVGRLRLHRPACXAAADWCFRLHGWPIXRRCWASTSSPTGXLRRRRLVSPPARLAFMPPLLGVYVFTDRXPSPPPTGVSACTAGLLXPPLLGVYVFTDRLAFAAADWCPRLHGWPIMPPLLGAYVFTAGLPPLPPTGVLACTAGLYAAVXWASTSSPTGLPSPPPTGVSACTAGLXYAAVVGRLRLHRPACLRRRRLVFPPARLAFMPPLLGVYVFTDRXPSPPPTGISIFNTSCLRLPWLPTGFFTSMAA

SEQ ID NO: 126887 - protein, 102 aa, Oryza sativa
  Clone ID: PAT_MRT4530_29390C.1.pep
SALSISDRIQLLRLATVRNVLDLLLPHDTSSADYRHNLLEMLLPRRRAPFPVGLVLFRRVMQSSFTQQSKTLDFRMHLNSQAPIYCSQNRCSCRVLPRVDSC

SEQ ID NO: 126888 - protein, 143 aa, Oryza sativa
  Clone ID: PAT_MRT4530_29391C.1.pep
STLEDPPRNPPYYTDDDAVPAVYSLARDRPADDAAATRTTRPLRTHAHPTGNYAPRADLGPVLTGEVDTWSSNVRGDPCHSAATRAAIAGVTPVTVGGDFGDGTAARSEAERAARSQAVSTHDDVEELRYVAGLVFVFLGWTW

SEQ ID NO: 126889 - protein, 280 aa, Oryza sativa
  Clone ID: PAT_MRT4530_29392C.1.pep
MPSLTYAVRLASGRSVPSVPWTGGGPLMWSRSTVDRPPRAAEMWGPLTGAAPSLDDLDPFLGTGGEGGHDGVGSAGVSSCPAAGFTAAQEGTAHCPLGVRAPAPADGVEVGTGHGGSGGREEAAAPAAGMRRQSTRGRNTGSGDGEESAAPAAGMRRQSTRGRSTGSGDGEESEALAAAVHAGKISREDAAARREIRKYQKNTELLIRKLPFQRLVREIAQLFKHDMRFQSHAVLALQEAAEAYLVGLFEDTNLCAIHSKRVTIMSKDVQLARRIRGERL

SEQ ID NO: 126890 - protein, 404 aa, Oryza sativa
  Clone ID: PAT_MRT4530_29393C.1.pep
MASLDLLLKLGFRFNPSQEEVITYYLPRLIAGHPPKDTEGYIHRADVYGADEPRDLAGKYAPVARSPNGDRFFFTGCKRVKGKFSRSAGGGTWVSQSSKDLKNREGIKIGEVKNFRFKKGGNNTDWLMEEYHLCGKEAGGVVEPVVCRIYVSPRAAPDSVAHQESAALPPPQELVPPPQELAPPPYPAAQAAPQAPAPPRQVPVITQQQAPPQKRPAAPVAEPPCATKKMKGAVSAKPMAPQSSVTASAAPPRCAVAPSQHHPPFQTYPTDPFEPPAPAASVTQPSVPATPEQGPAYVPDPADIGMEMDELMSFLDSIPVDGILPSQLYEYDELAKELEDALQGGGEEDGNDNPPRRRGRGGCDKQSQGGYRVLLKDMGDDQIDQQWLKVSLKDYHHLMKSCKL

SEQ ID NO: 126891 - protein, 66 aa, Oryza sativa
  Clone ID: PAT_MRT4530_29394C.1.pep
EMELGLWQGSKLMASCGFSLFPRVSPETWGENYHPRKLNQITQRPIRQAKFPSREQGNSGGPQTPA

SEQ ID NO: 126892 - protein, 48 aa, Oryza sativa
  Clone ID: PAT_MRT4530_29395C.1.pep
MTAGGGKAAAAAVPDSMVLTLVWWRLSLQRNISGGARLPRDRGAVHGG

SEQ ID NO: 126893 - protein, 138 aa, Oryza sativa
  Clone ID: PAT_MRT4530_29396C.1.pep
SNGASGQPTPHPRMVDAWWPLLAAAIPAVVAGQAFRVKRRRDEEQRLKAARGREKSSDEVFVCERVCTSKRMLKKVGAFSKDPIPETCVTVCGVSELDACADACARTVCVNQHQVPNWNDVCLKRCQSECLKLSSTLM

SEQ ID NO: 126894 - protein, 156 aa, Oryza sativa
  Clone ID: PAT_MRT4530_29397C.1.pep
PTRPPTRSSTRSGSVNLPNPSSPPPTPAMCPPVDTVALGCTFGAPLGHLVVGQLNFGISQANLRIRVGLIWFGCTGRALLRSVYASRSASDSTTNTGTYCTMHCQLRWRCMWCSDRTTRGFSRYLISMRPGVGRRAAWIIGLSGHLRPPVLIKDAL

SEQ ID NO: 126895 - protein, 729 aa, Oryza sativa
  unsure (1)..(729): unsure at all Xaa locations
  Clone ID: PAT_MRT4530_29398C.1.pep
MAGHDDDMFDFFSQSQAHHEAASVDADEYRFSQASSGHGGSGAGYHFPGRGSAGLDLNSQVEDFPDFGSYQQILQEDGGGIPPLFQATRSDVAPSRRPVPGSRGGRRGGRSRGRGRGRDGTIGAAAGNRMRGFVPMVRVSMSHGAGVIGRGSSMSHSATGYGGFGGGGWDAGTSSTPTEAAEEEDYNVEDDDEDDNDGQHTTSICDLVYFRCIILFSGFVRXQNMTGCGRGPNNEVTNADDAWWRRKVKEKPWAKKFRFGNPEYLDMLIEMYQGVAVDGSSAYIRGHEEEEEGDDATLEGLAIGAEGVRGAAVQEGGEDGFGNSPMSTSSRKRGSNTCDQSTASSPGKKSKSPVVKLMRGLLHTFSSDNEKANQLMSELVNAEKQKENVTEKQKEILKQELLHCQRMYRPVFERLHSVLVEKYELKSTRNMSSIEALGLFLWIVGAPQSIRQVEDRFTRSLATIVSKFDEVLDVLIQLATDIVRPKDPHFTTIHKKLLSPKYTPYLDNCIGAIDGTHIQVVVPNATAVQHRNSHKERSQNVLCICDFDMRFTFVLAGWPGSVDDMRVFSDAQNRFGHKFPWPPEEMFYFMDSGYPNRPGYLAPYKGITYHFQEYNEGIMPQNRKEYFNYCHSSCRNVIERSFGVLKNKWRILFHLPSYPQQKQSMIICACLALHNFIRDSKLADCEFDMCDQDESYVPLPEQSPQSNDPTSSLDSQVMNQFRDTVANGL

SEQ ID NO: 126896 - protein, 104 aa, Oryza sativa
  Clone ID: PAT_MRT4530_29399C.1.pep
KSIPQRAQTIIPFPPGPPPKKYPTFNPGPTPPIQLFTSAPPNPGAGGADPEKPPNPSPPAPGGYPHPPGVPPPPLEMEKTPGKTHRPRGSETPGLFIQITINNP

SEQ ID NO: 126897 - protein, 117 aa, Oryza sativa
  Clone ID: PAT_MRT4530_2939C.1.pep
MSSSSSSAQLKRLKPLYQHVVNNFLVVMAAPLAVAAIVNAARVGPDELLRMVRALRPVHVFLAAFGPAAAATLYLMLRPAPRVRFMTRLLERSGLGEETCLPPAHHFIPPYGGGVRA

SEQ ID NO: 126898 - protein, 469 aa, Oryza sativa
  Clone ID: PAT_MRT4530_293C.1.pep
MRECISIHIGQAGIQVGNACWELYCLEHGIQPDGQMPGDKTVGGGDDAFNTFFSETGAGKHVPRAVFVDLEPTVIDEVRTGDYRQLFHPEQLISGKEDAANNFARGHYTIGKEIVDLCLDRIRKLADNCTGLQGFLVFNAVGGGTGSGLGSLLLERLSVDYGKKSKLGFTVYPSPQVSTSVVEPYNSVLSTHSLLEHTDVAVLLDNEAIYDICRRSLDIERPTYTNLNRLVSQVISSLTASLRFDGALNVDVNEFQTNLVPYPRIHFMLSSYAPVISAEKAYHEQLSVAEITNSAFEPSSMMAKCDPRHGKYMACCLMYRGDVVPKDVNAAVATIKTKRTIQFVDWCPTGFKCGISINYQPPSVVPGGDLGGINYQPPSVVPGGDLAKVQRAVCMISNSTSVVEVFSRIDIKFDLMYSKRAFVHWYVGEGMEEGEFSEAREDLAALEKDYEEVGSEFDDGDEGDEGDEY

SEQ ID NO: 126899 - protein, 34 aa, Oryza sativa
  Clone ID: PAT_MRT4530_29400C.1.pep
GTHKIMWCSVVCYKFVKCCYMFIASMLVFGNSNH

SEQ ID NO: 126900 - protein, 54 aa, Oryza sativa
  Clone ID: PAT_MRT4530_29401C.1.pep
MDINMVEVLVQLLDVHYVLAVSATMAECHHQDQAVYTPSPLCKSGMGYPMYPVP

SEQ ID NO: 126901 - protein, 63 aa, Oryza sativa
  Clone ID: PAT_MRT4530_29402C.1.pep
MASAQNFGWVVDSRLAGAGGLGRGCGGSTTDGKSTPKRISPYATASCICSCDAWFCRKEMAST

SEQ ID NO: 126902 - protein, 324 aa, Oryza sativa
  Clone ID: PAT_MRT4530_29403C.1.pep
MAFWWWFCGFGVEAGVELDVAKPSVETVQHGGDGNGGGGRLNDAGKRRRLVARWGGFPVAIGENGAAAGVRQRAANAMAQAARRGDSGSGGSGRLEGRWWRGTDFTRFGREGTSGRAGIGGDVGGNRRHGGFGRLLAGMEEAKHGFKCISLLVDYLSMVFMDEEEETTSKALVPLADNVKTTLLDISKWLEGSLETLVVSCGSIRDRFLVIYDQLPDELADVITPAAYLEQHQLKLEKAKQRVADRRERKDLEATIQASRTSINEEKAKLDELEAGPRSTQANIDRLNTRKIELLAELEQCNAHIAIEEHKLADLPKATEDQRS

SEQ ID NO: 126903 - protein, 79 aa, Oryza sativa
  Clone ID: PAT_MRT4530_29404C.1.pep
MPCRGPSLRASGLMAIYAPKAWVPGRICEQESGLWSKGLGQWQPCDEFTKTTTVPPYNSKNSWCCGEAPCVCGSDECTK

SEQ ID NO: 126904 - protein, 207 aa, Oryza sativa
  Clone ID: PAT_MRT4530_29405C.1.pep
MEQQLSSPSASQRGGGRELQGPRPAPLKVRKESHKIRKQEPVQQLRQPVIIYTMSPKVVHANAADFMSVVQRLTGAPPTAPPQPQPHHPTLLAQMPPQPSFPFHLQQQDAWPQQQHSPAAIEQAAARSSGADLPPLPSILSPVPGTVLPAIPASFFSPPSLISPVPFLGATTTSSAAPSTSPSPMGGSAYYWDLFNMQQQQHYHHQN

SEQ ID NO: 126905 - protein, 455 aa, Oryza sativa
  Clone ID: PAT_MRT4530_29406C.1.pep
GLQEFGTRDSTRRDVKLQRLLLLRLCTTSTSTPPHGITTSAAVAAAAAAAAYAYAEPLGLTRAPFSSSASSPAETMASASPPPSTWVILGSIPRVCGADEKGAGGGIPAGADLSLALKAPPRVSLLTIPSRIFPSATTSDNFPSVMAADPSGLLLLHADQGRAKGPTVIDRPGRQEFMWRQFVPGYFVLDAATATAVALPDPELVMHMGHMGLLASPDGGGRYVVAELQPILHADHATLLCFSSDVGEWVEKEVAYPFPPRQLAPNGAVSHSGRLWFVDLSWCLITCDPFAPAPALRFVPLPPGKELRCREACGPPGRLRCVRVSAGKLRFVDMYKATAPHQRGPHKISVWTLADPDSEEWTLEHEASFAEIWADDSYKATGLPDKIPVLALIHPENPDVVYFFLEEHLFGVDVRARKVVGSEVYELVAPPSEVLATRFVRAWELPPALSSENDI

SEQ ID NO: 126906 - protein, 156 aa, Oryza sativa
  Clone ID: PAT_MRT4530_29407C.1.pep
MVGGFDKLKVEFIDQDESVQVVADTIRSSGEIPERYARPEMEADPVIIDTDGYNLPVIDMSRLINPEFSEEEIAKLGSACEDWGFFQVWDHGVDGELLQRIKDDITEFFRLPLQEKMSVAIPPNGLQGFGHHFVFFKEQKLDWVDLLFLTTRPVED

SEQ ID NO: 126907 - protein, 129 aa, Oryza sativa
  Clone ID: PAT_MRT4530_29408C.1.pep
LGPRGGTRGEGWLAPPIKLMGLSPGWWSGGGGRTGSRPHFLPPVVLCCGPCCGARPGCPLWPLWGPLIWGPVVYSSPPALGFVWWKRNSPVSRPPELSLNYCVGVGVLINRCIDSLPKKKKKKKKNPTP

SEQ ID NO: 126908 - protein, 88 aa, Oryza sativa
  unsure (1)..(88): unsure at all Xaa locations
  Clone ID: PAT_MRT4530_29409C.1.pep
MAGRRQGGNLAWGPRLAPCLETTVTWLVAVMKRLLDFNPCAPLESQQYTGQGPDGIEAXNXTRCYSQXGIKDLIGMKGFLKRILDNVT

SEQ ID NO: 126909 - protein, 844 aa, Oryza sativa
  unsure (1)..(844): unsure at all Xaa locations
  Clone ID: PAT_MRT4530_2940C.1.pep
YQQRLHRRLASIAADWCLRLHGWPIMPPLLGVYDFTTGLPPSRPTGVSAYTAGLLCRRCWASTTSQSACLRSRRLVISPIRLVGHTAVHGRPRLHRPTATSAADWCFRLHSWPIMPLLMGVYVITTGLPPSPPTGVPAYTVGWSHHRCXGFIIYTTGLVPLAPTGVFVTIDGLLYSHIGYFCYHHRLASTAADWCFRLHGWPIMPPLLGVYVFTDRLAFAAADWSTSFLASPSFRLHGWPIMPPLLGVYVFTDRLAFAAADWCFRLHGWPLXPPLLGVYVFTDRXPSPPPTGVSACTAGLYAAVVGRLRLHRPAASSAADWCFRLHGXLLCRRCWASTSSPTGRLDRRRLVFPPARLAFMPPLLGVYVFTDRLPRPPPTGVSACTAGLLCRRCWASTSSPTGXLRRRRLVFPPARLAFMPPLLGVYVFTDRLAFAAADWCFRLHGWPLXPPLLGVYVFTDRXPSPPPTGVSACTAGLYAAVXWASTSSPTGXPRPPPTGASACTAGLYAAVVGRLRLHRPAXLDRRRLVFPPARLAFMPLLLGVYVFTDRLPRPPPTGVSACTAGXLCRRCWASTSSPTGRLVRRRLVLPPTRLTYYAAVVGRLRLHRPAASTAADWCFRLHGWPLCRRCWASTSSPTGCLVRRRLVLPPARLTYYADVVGRLRLHRPAXLDRRRLVFPPARLAYYAAVVGRLRLRXDRPPRPPPTATTTDGHHRLPLPTXVMPPPTGAFIFTTARLRYQFASVAADSCXTSSRRCNFVIMVERLHLYYLRHWQTLLLLLRKFCYFTNHDVFVNLDISACDAVLFYYNKWLSNIQDFYLDIFNTYLQSSNDYSMTRSYSSRLYV

SEQ ID NO: 126910 - protein, 120 aa, Oryza sativa
  Clone ID: PAT_MRT4530_29410C.1.pep
MAQGRGSAAQGLALGLLLVCLLVGSDVAAAATYNVDWSFGADSWSKGKNFRAGDVLVFSYDPSVHNVVAVDAGGYSGCRESGTKYSSGNDRITLGRGTSYFICSFSGHCGAGMKMAVTAS

SEQ ID NO: 126911 - protein, 616 aa, Oryza sativa
  Clone ID: PAT_MRT4530_29411C.1.pep
MAPLPLPLPLPATRHPPKPHEASASASASLHAALASLSQQCGAGGGGGGALRDAFALVARAERDACPAAVVSVGPEAYASLLQCCVAAGCLRAGRQVHAAAVKRGPRYCRHAYIGTKLAVFYARCGALGDAERAFSALPAKNAFAWAAVIGMWSRAGLHGKALAGYAAMLEAGVPADNFVVPNVLKACAGLGLLGPGRAVHGYAWKAGVGNCVYVMSSLVDFYGKCGEVDDAREVFDVMPERTVVSWNSMLMGYIHNGRIDEAADLFYEMRVEGVLPTRVSVLSFLSASADLEVLDGGRQGHAVAVSSGLEMDLILGSSMINFYCKVGLVEAAEVIFEQMVERDIVTWNLMISGYLQDGQTDKALTTCHRMLESGLKFDCVTLASVIMACVKSYRMEVGGAAHAYAVRNNLESDKTVFCSLIELYSSSGRIEQMRRVFDSIRRRDIATWKAMICAYADHGMGSEALKLLYQMQLEGTSPTAACWDSVLSAFIRNGQLDDALSTFYEMLQTSTRPNLRTWSLLISGLSRNGMHPEVMNLCCKMQEVEPAPSPTIFSAALLAVKSAASVQYGKAMHACIVKKGLLLSKSVVQSLLNMYGSFNDRGTVESLLRFLAAAQ

SEQ ID NO: 126912 - protein, 68 aa, Oryza sativa
  Clone ID: PAT_MRT4530_29412C.1.pep
HCPSYHHSFNSQHACELSIQRSTVLIVDLMVILRWKVMLQSTSKVVAVFPANDCIITPNSVLQKSILN

SEQ ID NO: 126913 - protein, 40 aa, Oryza sativa
  Clone ID: PAT_MRT4530_29413C.1.pep
RPYLFFFFFLLFNMINHQIAFLHFAWSSQQAPRRYALDRG

SEQ ID NO: 126914 - protein, 158 aa, Oryza sativa
  unsure (1)..(158): unsure at all Xaa locations
  Clone ID: PAT_MRT4530_29414C.1.pep
WRRRRRRWRQRRRQRCHHHQPPRTTWTTAGGAPDRHRRRPPSRSLPLKLLKPLLLFVVLAASFLAATALLLGGAGASYGRGAVDAAIGASALAQHERXGAALGGVNGATGLAVWSEARQXTTEWHKVGTRSTPPPSLSWGITLIPRYQGLIPRYQLDT

SEQ ID NO: 126915 - protein, 50 aa, Oryza sativa
  Clone ID: PAT_MRT4530_29415C.1.pep
GCRNRHEAKPTDMVVSIALVLHGPVMQKAKLNYLILHQYFRFVSFFSEST

SEQ ID NO: 126916 - protein, 221 aa, Oryza sativa
  unsure (1)..(221): unsure at all Xaa locations
  Clone ID: PAT_MRT4530_29416C.1.pep
MEVGASSIMEDANGVVDLDVDIVGLESGAACSKFVKTEDPDATECSSSFGDTLSGSEDDARPSEISDIEVDSPFCRYPANGDAAALMDAAVSDNLDRLLKKTMKRRRRKRNEEKMNASSYISNHTVFSYYEKTEADAFSIDDDEDTDENTTVNNETDWLLGIKRGEATVEQILLSIQSAQDKVLSLRSSLKKAMAKKSKGAILXQHTHERCTELKLLTRKG

SEQ ID NO: 126917 - protein, 82 aa, Oryza sativa
  Clone ID: PAT_MRT4530_29417C.1.pep
TPTRGSAVPRFGDWDSNPASVDGYTHIFNKVREEKQTGQAAGKPAAGLGKGGAAAAGHGNAAKRYHDDDFASTKCSCFGWCK

SEQ ID NO: 126918 - protein, 82 aa, Oryza sativa
  unsure (1)..(82): unsure at all Xaa locations
  Clone ID: PAT_MRT4530_29418C.1.pep
CFPICWKGEIVLAXQLSADNSWNRAMIENGPPGAVLSHHHWAERCFLNPEGLEXKSCCYIPPADPSISSTPALAKLCTLAFI

SEQ ID NO: 126919 - protein, 81 aa, Oryza sativa
  Clone ID: PAT_MRT4530_29419C.1.pep
NNDRPILQFSSLQNTCKLSILHTSFFSKTKQTIGMAITSTRSFYSTGWPIICIRQFLFWIQSYIQISFKKCIKRIHASLIQ

SEQ ID NO: 126920 - protein, 334 aa, Oryza sativa
  unsure (1)..(334): unsure at all Xaa locations
  Clone ID: PAT_MRT4530_2941C.1.pep
VHFCLLLPTNIFTDRPPRPLPTGALACTAGLLCRHCWVSTTSPTGWPSPPPTSVLVYTVGWSHHRSRASTSSPTSWPSPPPTGVSACTAGLLCRRCWASTTSPPAGLRRRRLVSSPIWLVGHTTVHGRPRLHRLAGLRRRRLVFPSALLAYYAAVDGHLHFHQHHHRLAVVAADWCLRLYGWLVTTPLLGVYIFTXRFAFAAADWCHRLHSWPIMPLLLGVYIFTDRXASSAVDWCHRLHGRPIMPLLLGVYIFTDRXASSATDWCFRLHGWPIMPPLLGVYVFTDQPPCSPPTGVSACTAGLLCRRCWASTSSPTGXPRPPPTGVSACTSGLL

SEQ ID NO: 126921 - protein, 110 aa, Oryza sativa
  Clone ID: PAT_MRT4530_29420C.1.pep
KWGSVLTNPGELKEGGSGRRCLLKKNFLGPTKGGGGGAKGPPPPWWVKGPEGSRFGWPTPGRSKFRWRGGPLTFPPGAGGAKLNPKPPWARGSPGITRGPKASSLPLERF

SEQ ID NO: 126922 - protein, 62 aa, Oryza sativa
  Clone ID: PAT_MRT4530_29421C.1.pep
MVQWHADEPISPRKVPLSGRCIHVMNPGFRGAILDCFVAIGASETLPFFYFLSVGTVSTYNP

SEQ ID NO: 126923 - protein, 56 aa, Oryza sativa
  unsure (1)..(56): unsure at all Xaa locations
  Clone ID: PAT_MRT4530_29422C.1.pep
HSRHCEXPPNKTHGHHPWAPHXPWSHHPTCASWALXHPYIHKGGHHTTPTGHPHHL

SEQ ID NO: 126924 - protein, 38 aa, Oryza sativa
  Clone ID: PAT_MRT4530_29423C.1.pep
SSIFSIKSLRTPYKLPPHIDKLASSNCSSLQLTGLIGS

SEQ ID NO: 126925 - protein, 164 aa, Oryza sativa
  Clone ID: PAT_MRT4530_29424C.1.pep
MDYIISGAPPPPAIFCPPPLSPPPPPPPIFYSPPDVSYFSPPALPCYAGFPACTGGGGGGNDGSGGDGHSGGDERRKPPPPLPLYRPRPPPAGDGRPDVTVHHHHHHYGANGGGGHSANGGGGLDGSSSIGTNGGDIGGNDDLYGGGGNESFGAASDAEACSIM

SEQ ID NO: 126926 - protein, 214 aa, Oryza sativa
  Clone ID: PAT_MRT4530_29425C.1.pep
MNPMAPMLPAPAPMAAGPTEPVVVVGPQYCAPYVVPLTVTKKSISLTDGDFTVTDANDNVVLNVKGTLFSVRHRRVLHDAVGQPLLSMQEKILSMHNRWEVYRGDSAHSCDKLFTVKKSSMLQLMKTEMDIFLAGNTAEQVCDFKIKGSYCDRSSAFYLGKSNTIIAQMNRKHTAASVVLGRDVFSITVFPQVDYVFIAALVAILDDVHRDRKE

SEQ ID NO: 126927 - protein, 1038 aa, Oryza sativa
  Clone ID: PAT_MRT4530_29426C.1.pep
MLRAAAAAAAVFPSRFAAAPAVAAVEEVRSPLLRVLGALRGGRVSTLGRRARFCSNSAGSDSEAAAAEAKAEDAVAAEGEADGKASSAIVPTVLRPEDCLSVIALPLPHRPLFPGFYMPIYVKDQKLLQALVENRKRSIPYAGAFLVKDEEGTDPNIVTSSDSDKSIDDLKGKELLQRLNEVGTLAQITSIQGDQVVLLGHRRLKITEMVQEDPLTVKVDHLKEKPYDKDDDVIKATSFEVISTLREVLKASSLWKDHVQTYTQHMGDFNYPRLADFGAAISGANKFLCQEVLEELDVYKRLKLTLELVKKEMEISKLQQSIAKAIEEKISGDQRRYLLNEQLKAIKKELGLETDDKTALSAKFRERIEAKKEKCPAHVLQVIEEELTKLQLLEASSSEFNVTRNYLDWLTVLPWGNYSDENFDVHHAQQILDEDHYGLSDVKERILEFIAVGKLRGTSQGKIICLSGPPGVGKTSIGRSIARALNRKFYRFSVGGLADVAEIKGHRRTYVGAMPGKMVQCLKSVGTANPLVLIDEIDKLGRGHSGDPASALLELLDPEQNVNFLDHYLDVPIDLSKVLFVCTANVIEMIPNPLLDRMEIIAIAGYITDEKMHIARDYLEKNTREACGIKPEQAEVTDAALLALIESYCREAGVRNLQKQIEKIYRKIALQLVRQGVSNEPTQEAAIVTASEEPNGGDSANKLKDETMEDPATENAAMTNADTASKEASELDLLNRTVDHDVHPAETPKEAVLTDSALSTDKLCTPEMLNLNIMLTSNMQNPTSGISVLLAVDLLIRLLKLSPGNKDMEGAKEESADKAVEKVVIDSSNLGDYVGKPVFQAERIYEQTPVGVVMGLAWTAMGGSTLYIETTKVASGDGKGALVMTGQLGDVMKESAQIAHTVGRAILLDKEPENLFFANSKVHLHVPAGSTPKDGPSAGCTMITSMLSLAMGKPVKKDLAMTGEVTLTGRILPIGGVKEKTIAARRSAVKTIVFPAANKRDFDELAPNVKEGLEVHFVDTYNEIFDIAFQSETQTETS

SEQ ID NO: 126928 - protein, 100 aa, Oryza sativa
  Clone ID: PAT_MRT4530_29427C.1.pep
MTAAASDVFWNGGAACGKRLAVTCTGATNQGVPQPCTGRSVTVKIVDYCPAGCRGTIDLSQEAFAAIANPDAGKILVEYHEFIHDKLCSFAGSKIKIRMA

SEQ ID NO: 126929 - protein, 199 aa, Oryza sativa
  Clone ID: PAT_MRT4530_29428C.1.pep
LLLAPSPAPRPLAFQCRSSSGGCCRRRGRVRRGAAIVASNLASSSGDAGSSQSAAAVYVLARRGLLLGVSALPLLRAREAAAAAAVATPSSGDLASPLQEFVEFRSRFVFLLASWKNKMISRSSPPCAGIRFGDLIAKFHPSHPQMKKQGVASPIMGLWACNFVWDPGPSGAHVGCAPIWWSMTLGSSWSFSHPLQLYL

SEQ ID NO: 126930 - protein, 73 aa, Oryza sativa
  Clone ID: PAT_MRT4530_29429C.1.pep
MTKGTSSFGKRHNKTHTLCRRCGRRSLHIQKHECSSCGYPSAKIRKYNWSEKAKRRKTVGTGRTRYLKDVSPT

SEQ ID NO: 126931 - protein, 194 aa, Oryza sativa
  unsure (1)..(194): unsure at all Xaa locations
  Clone ID: PAT_MRT4530_2942C.1.pep
GRSRLHRXLAFVAADWCFRLHGWSIKPPLLGVYDFTTGLPPSPPTGVLAYTVGWIQIQICTKGIHGFKLISYAPGMDQSEHHHRXPSSSPTGVFAYTVVWXTPPLLGVYVFTDRPSRPPPTGVSAYTAGLLCRRCWASTSSPTGXPRPPPTGVSACTAGLLCRRCWASTSSPTGRLVRRRLVSLPARLACYDAN

SEQ ID NO: 126932 - protein, 76 aa, Oryza sativa
  Clone ID: PAT_MRT4530_29430C.1.pep
MGSAGALLSHSTTGIGGFPSGDHHYHRLCGLRCVPVLTSPTPDPLTCSHGPDLRWTVAYRGARRETERPSAAVPQK

SEQ ID NO: 126933 - protein, 161 aa, Oryza sativa
  unsure (1)..(161): unsure at all Xaa locations
  Clone ID: PAT_MRT4530_29431C.1.pep
MVALPRAPSPTRACTRGCAHGHRVAARRCLCAPPPSVAGVNDGRRRVEVFVEEEAPDIVVVVAXLMWTATTVCLTAAVVVAAVVVGDPGEVVARRWXSRHWLRPLSIGLGFVGXVGGGDKSRTLCRAGXPPLFYMAQCDGGPPAIGLDTPDQGAVINHQLI

SEQ ID NO: 126934 - protein, 127 aa, Oryza sativa
  Clone ID: PAT_MRT4530_29432C.1.pep
AFAPAEKAKHDGKKKNQRSHGLCADEVQTVEYCFSPRLCGNQVNELLKTTRGRGTSLEPRGFGQAGGTNQRVSDKALSLLDWLHTNLLGLSPYLIAVRDHVHFGPTFMHAVYFVLLKFLVPIKLEFE

SEQ ID NO: 126935 - protein, 246 aa, Oryza sativa
  unsure (1)..(246): unsure at all Xaa locations
  Clone ID: PAT_MRT4530_29433C.1.pep
SRSTQRPLNSHXQPLAGLGNTIGQVRDEAREVTVANVAIEGMKEEGITDSLLVLVGLVSPMSKLFPVIQKIISWEKPLVTISVLAMMVLTIYREWVGFALAASLILAAGFMVWARQRKIGALCSEVIIDTSSDKTTMESLVEAQQSLKRVHEYIKTANVVILRVSSIALARSPKHTETVIWMLTGLALALAVIPFKYVLIGVMAGGFMSNTRIARAMSNPQGSRRWREWWESIPAVPVRAVDGGGL

SEQ ID NO: 126936 - protein, 55 aa, Oryza sativa
  unsure (1)..(55): unsure at all Xaa locations
  Clone ID: PAT_MRT4530_29434C.1.pep
VLRYPIYGGMQDWNYXHGGCFELTLEISDVKWPKAAEVFFFFFASSYLPINFQIT

SEQ ID NO: 126937 - protein, 113 aa, Oryza sativa
  unsure (1)..(113): unsure at all Xaa locations
  Clone ID: PAT_MRT4530_29435C.1.pep
EQETVSAYTTRKIIHAYNYYKFKGGEXQTRTREKLLVHTYWPCHKQPRGTVLCGYYACEFLTVNGRYRVNAEDLPRIEFRTSFDDTGITNVQSDLCHFIHRGRFLFSQADLSS

SEQ ID NO: 126938 - protein, 46 aa, Oryza sativa
  Clone ID: PAT_MRT4530_29436C.1.pep
PSRRDQHGQRAATRARGPSSRSTCTDLTLTLKGSTEEAVDCAGQAN

SEQ ID NO: 126939 - protein, 93 aa, Oryza sativa
  Clone ID: PAT_MRT4530_29437C.1.pep
MASLSKRGGGGGEGEGILASFSRSSVAAHGREAATMAKKLLRSTGKAAWIAGTTFLVLVVPLIIEMDREQQLNDLELQQQALLGGPPPPAPLK

SEQ ID NO: 126940 - protein, 1248 aa, Oryza sativa
  unsure (1)..(1248): unsure at all Xaa locations
  Clone ID: PAT_MRT4530_29438C.1.pep
LAARILKGGAFSKVEFSKKASSWGGLQVGDPNPSLRVGIFDHCFSMKEMEEDHFEAHIRGVAAHLLDNFGDHSFMISNFGIRDEESPIYHILSEYGMTVLDYPGHYEGCPLLTMEMVHCILKSSESWLSLGQRNFLIMHCEQGCWPILAFMLAALLIYLGQYSDEQKTLDMLYKQSPVELLEMFSPLNPMPSQLRYLRYVSMRNVVPEWPPADRALTLDSVILRMVPDFHGQGGFRPIFRIYGPDPLMPTDQTPKVLFSTPKRSNVVRFYSQADELVKINLQCHVQGDVVLECINLYEDLDREDMVFRIMFNTGFIRSNILMLNRDQIDILWNTQDQFPKDFRAEVIFSDMDATTSHITTEPVSHQEKQGLGIEEFAKVLDIFNHLDWLDGKKDTSLHIPQRKASSTSQGNIDXLLLMGPRLSSILKKNLTLIVSLSSPVQPQGLIDSAVQIAPAQSASKSAENSGSQTPVNQEPSPLTVNNSASTASLIALCTPPPLPPPPPTVSLAPVSPILPINTSTSIISVSLRSIMPSPSPTAASPPLPPPLPPPLKPSTVMFPPPPPPPPPPPPPFPVSSFSPPQPPPQPPSAVPGLQASPVPPPPPPPPPPMIPGMKTPPTPPPPPPAAPGQQAPAVPPPPPPPPPPMVPGMQTRPIPPPPPPSQTNSLVSSFPSTSKRIPPPPPPPSQTSSLVSSLPSSRKGNDVAAPRPPPPPPLYSRSSHVTSAPSAPPAPPLPPPKLVGASKPSQEQMITWPPPPPPGPPPKNSSNSLPSKGNVVSSSPPPPPTFSFGAKDRSTARSRSPRSLRPNQSSKRTPLKPLHWVKVSRATQGSLWAETQKSDEASRTPEIDISELESLFSVAMPNMEEKRARQRPSVAAKQEKVLLIDLQRSKNCEIMLRNIKMPLPDLMNSVLALDDSIVDGDQVDYLIKFCPTKEEMELLKVFFLLLFQGFTGNKENLGKCEQFFLEMMKVPRVESKLRILSFKIKFLTQVADLKNSLNTINSVAEEVHCYIXDLKSSTFSRLTSLNMLLYNXFGQVRNSVKLKRVMQTILSLGNALNQGTARGSAVGFRLDSLLKLIDIRARNNRMTLMHYLCKVLSDKLPEVLDFNKDLTYLEPASKIQLKELAEEMQAITKGLEKVEQELTTSEKDGPGSEIFYKKLKEFLADAQAEGRSLAFLYSTAGKSADSLAHYFGEDPVRCPFEQVVSTLLSFVKTFERAHAENLRQMELEKKRAQMEAEKEKVKAAAHKE

SEQ ID NO: 126941 - protein, 61 aa, Oryza sativa
  Clone ID: PAT_MRT4530_29439C.1.pep
ICRSGRFHVMPAGRYSNPSMNQGFSSKTLAFMVIPRGRSWLPLTLALVNCLQQMRKPQLPS

SEQ ID NO: 126942 - protein, 927 aa, Oryza sativa
  Clone ID: PAT_MRT4530_2943C.1.pep
MDSRRLSFPVDRPRVHSAGLSSPPPLLITTTTSPPACLRRRRVDPPPTRLAYYAAAVGRLLLHRRPASVAAEWCLRLHGWPIMPPLLGVYDFTAGLPPLPPSGVSAYTAGLLCRRCWASTTSPPACLRCRRVVPPPTRLAYYAAAVGRLRLHRPACLRCRRVVPPPTRLAYYAAAVGRLRLHRRLASVAAEWILRLHGWPIMPPLLGVYVFTTGLPPSPPIGVLAHTVGWSHHRSWASTSSPPACLRRRRLVSPPTRLAYYAAAVGRLRLHRRPASVAADWCLRLHGWPIMPPLLGVYDFTAGLPPSPPIGASAYTAGLLCRRYWASTTSPPACLRRRRLVPPPTRLAYYAAAVGRLRLHRPAASSAADWCFRLHGWPLCRRCWAPTSSPTGLPSPPPTGVSACTAGLYAAVVGRLRLHRPACLRRRRLVFPPARLAFMPPLLGVYVFTDRPPRPPPTGASACTAGLYAAVVGRLRLHRPACLRRRRLVPPPTRLAYYAGAVGRLRLHRRLASVAADWCLRLHGWPIMPPLLSVYDFTAGLPPSPPTGVSAYTAGLLCRRCWASSLSPSTAFVAADWIQIQICIKGIHGFKLISYALGMDQSEHHHRPPRPPPTGVFACTHGWPIMPPLLGLYVFTDRPPRPPPTGVSACTAGLLCRRCWASTSSPTGLPSPPPTGVSASTAGLLCRRCWASTSSPTGRLVRRRLVFPPARLAYYAAVVGRLRLHRPAASSAADWCFRLHGWPIMPPLLGVYVFTDRLAFAASDWCFRLHGWPIMLPLVGVYVFTDRPPRPPPTGVFAMASAADWCHRLHGWPVITPTDAIFFTAGYIAVTTNRHQYLQHKLPTFAMAADWFLHFHGYMILPVLISLIFFTAATTTDGHHRFLPPTRVMPPSTGAFIFTTARLHYQFASVAADSCSLHHGDATLSSW

SEQ ID NO: 126943 - protein, 227 aa, Oryza sativa
  Clone ID: PAT_MRT4530_29440C.1.pep
MPSPSQPPESSASPLASCENLEKFPPEFSRASSVTALSSDSLLSIEKESSSTRTYVPEALPAMPLTSDTRTSLISISTAASPPLPPPLPPPLKPSTVMFPPPPPIQPTLISNSIYSSTSSVVSAPLKRGQSPAPPPPPPPPPPPPFPVSSFSPPQPPPQPPSAVPGLQASPVPPPPPPPPPPMIPGMKTPPTPPPPPPAAPGQQAPAVPPPPPPPPPPMVPGMQTRP

SEQ ID NO: 126944 - protein, 179 aa, Oryza sativa
  unsure (1)..(179): unsure at all Xaa locations
  Clone ID: PAT_MRT4530_29441C.1.pep
MPKLDKLTYFSQFFWFCLXLVSSSRGMGGQIPSISRYERIVSKLLAXFSQCFVTDRLNLILXFISLIFLGLIMXRRRREAXXSTLIGSFLVGFRFFLGKPKVCFGLEXPPSLGLWNGPFRSLXGQIIETLTPRXFFNGLWGTKPEPDSPREKRAQRETTPLASYXIPEVPRKQFWGCVK

SEQ ID NO: 126945 - protein, 214 aa, Oryza sativa
  Clone ID: PAT_MRT4530_29442C.1.pep
MGRRSVGRGGRGEGLAAATGEKGTPHTSCNSSRRKNRESCRFMALPTPMSPPPPDAPSSCELTGDRDCQRREVGAAGAKEACSSDEDDGDERERDGCSGDDNNDMLMDTALHVGLVAPRWRPGRKRRSASNSGQRARRVEGKSGAGDCISSHSGDPSLYDASRALCRWCTVPSPLATGYARRTNLLRPACRSPPWRGKERGREVERGGEEEADV

SEQ ID NO: 126946 - protein, 88 aa, Oryza sativa
  Clone ID: PAT_MRT4530_29443C.1.pep
MAVSPSPHPLVRWQLSLSLSLSLAGSLGPVHPAQQRHPPWHGGNCYPVIAVYPTVRLSLLDRGNHPGQVANLAWKEAGLLGIVETIET

SEQ ID NO: 126947 - protein, 86 aa, Oryza sativa
  Clone ID: PAT_MRT4530_29444C.1.pep
VSSFKKTFYSKKNHKFQMCIFILATKFFAYNYDSSVTIALEQKRKGSICLKPCCTTSSKVIGGDFDNSKVPSSPLLGLHCIISHIL

SEQ ID NO: 126948 - protein, 41 aa, Oryza sativa
  Clone ID: PAT_MRT4530_29445C.1.pep
MRAVASRVGSVGVYAGADLATIHFQFPLCSTLWTAVQKLEK

SEQ ID NO: 126949 - protein, 665 aa, Oryza sativa
  Clone ID: PAT_MRT4530_29446C.1.pep
MGTRRDVRFVSSGVKLPCADAAPAPAPAPTLLSAALPFARIGRAIDGVVRHVARSLPRLPVARAETGAGAAAAPIALPRRQKDGGGGGGGEERVLISEVAVRGKDGEPLERPELEAAAAAALRACRPNAALTVREVQEDVHRVVESGLFRSCMPVAVDTRDGIRLVFEVEPNQDFHGLVCEGANMLPSKFLEDAFHDRHGKIINIRHLDQVIKSVNGWYQERGLTGLVSYAEILSGGILRLQVSEAEVNNINIRFLDRRTGEPTVGKTQPETILRHLTTKKGQAYNRAQVKRDVETILTMGIMEDVTIIPQPVGDSNKVDLVMNLVERPSGGFSAGGGISSGITNGPLSGLIGSFAYSHRNVFGRNKKLNLSLERGQIDSIFRLNYTDPWIDGDNKRTSRTIMVQNSRTPGTLIHGGDHPDHGPITIGRVTAGIEYSRPFRPKWSGTLGLIFQHAGARDDKGNPIIRDFYNSQLTASGNAYDDTLLAKLESVYTDSGDRSSTMFVFNIEQGLPILPEWLSFNRVTARLRQGYEIGPARLLLSASGGHVEGNFSPHEAFAIGGTNSVRGYEEGAVGSGRSYAVGSGEVSCRMFGPLEGVVFGDYGSDLSSGPKVPGDPAGARGKPGSGYGYGVGVRVDSPLGPLRLEYAFNDKQARRFHFGVGYRN

SEQ ID NO: 126950 - protein, 188 aa, Oryza sativa
  Clone ID: PAT_MRT4530_29447C.1.pep
GSPGLQASIVHLYVFPAKPYELQANQSPGNVSVLGDYVSSDPVDPFEIKESNRPAKLKLPQLEPDERSTTNIKESVRDFVVGSGEYVIKDFKFTVNQAVRPVEKRFDKLMKKNKKSQDDNWVSAVSPDRPVRGIDDPLLGGSTSDSGFTKGKKHRRAVSTVAAADSWGGGDLASDGYEIRGRRWAVKN

SEQ ID NO: 126951 - protein, 232 aa, Oryza sativa
  Clone ID: PAT_MRT4530_29448C.1.pep
MKKIFGAKKNQEPPPSIQDATDRISKRGDSVDDKIKKLDAELARYKDQIKKTRPGPAQEAIKARAMRVLKQRRMYEGQRDMLYNQTYNLDQVAFASEGLKDAQQTMTAMKAANKELKGMMKTVKLEDIDSLQDEMMDLMDVSNEIQETLGRSYNVPDDIDEEELMGELDALEADMDFESNSVPSYLQPDKESDLDSELNLPAAPTGHTPAPPNRQQEDELGLPTVPQASIRS

SEQ ID NO: 126952 - protein, 274 aa, Oryza sativa
  Clone ID: PAT_MRT4530_29449C.1.pep
MKKIFGAKKNQEPPPSIQDATDRVSFCLSCFDSIFNSILFNSSTKQSNESNQTNPQISKRGDSVDDKIKKLDAELARYKDQIKKTRPGPAQEAIKARAMRVLKQRRMYEGQRDMLYNQTYNLDQVAFASEGLKDAQQTMTAMKAANKELKGMMKTVKLEDIDSLQDEMMDLMDVSNEIQETLGRSYNVPDDIDEEELMGELDALEADMDFESNSVPSYLQPDKESDLDSELNLPAAPTGHTPAPPNRQQNLVLHPFHNEDELGLPTVPQASIRS

SEQ ID NO: 126953 - protein, 143 aa, Oryza sativa
  unsure (1)..(143): unsure at all Xaa locations
  Clone ID: PAT_MRT4530_2944C.1.pep
LVWGFFFFFFFFFFFFFFFFFFFFFFLGRKKLYVWVIIQNKPVVQGGAVHGGGGGGSLWDTSPSXRGKTSETNTQEEKSLLAGPGRSTMDAWGLIETLTSSFFIPEYRYDTTRTGYKIRFHTSTQAEFTRGQPAPCCIYMIRL

SEQ ID NO: 126954 - protein, 715 aa, Oryza sativa
  Clone ID: PAT_MRT4530_29450C.1.pep
MAWRRVLSQVARNRSAYAICNEIIYANPSRILRGDTIAGGTLRNLHERYQSSYVGSFARRMRQMDSPSEASLLKEIYRSDPERVIQIFESQPSLHSNPSALAEYVKALVRVDRLEDSTLLKTLQRGIAASAREEENLGSVSENLGSVSAFRSAGQVTKDGILGTANAPIHMVTAETGQFKEQLWRTFRSIALTFLLISGIGALIEDRGISKGLGLNEEVQPSMESNTKFSDVKGVDEAKAELEEIVHYLRDPKRFTRLGGKLPKGVLLVGPPGTGKTMLARAIAGEAGVPFFSCSGSEFEEMFVGVGARRVRDLFAAAKKRSPCIIFMDEIDAIGGSRNPKDQQYMKMTLNQLLVELDGFKQNEGIIVIAATNFPESLDKALVRPGRFDRHIVVPNPDVEGRRQILESHMSKVLKSDDVDLMIIARGTPGFSGADLANLVNVAALKAAMDGAKAVTMNDLEYAKDRIMMGSERKSAVISDESRKLTAYHEGGHALVAIHTEGAHPVHKATIVPRGMALGMVSQLPEKDETSFSRKQMLARLDVSMAGRVAEELIFGDSEVTSGASSDFQQATAVARAMVTKYGMSKQLGFVSYNYEDDGKSMSTETRLLIEKEVKCFVENAYNNAKNILIKHNKELHALANALLEHETLTGAQIKNILAQVNNKQQQEHAIEAPQKTPAVPSSPAASAAAAAAAAAAAAQQAAAKAKGEIAGIGS

SEQ ID NO: 126955 - protein, 52 aa, Oryza sativa
  unsure (1)..(52): unsure at all Xaa locations
  Clone ID: PAT_MRT4530_29451C.1.pep
MSAQGAGRGVGDPDVFAXLWRGFPQTVSDVPQADERLFYFLQDHLEQVQEPT

SEQ ID NO: 126956 - protein, 323 aa, Oryza sativa
  Clone ID: PAT_MRT4530_29452C.1.pep
MVQELIYMLDIAQERGSNTIHTHEDKAEHLHAHLTSINLGARERRNCTINWEALALEKLQDEDTDDMDGPFSEEEIWAAMSEGKGGRARRPISLIHLVAKLISKTLAMSLPLDLFRRGANDRGQPARHHSLRTRDREDADGPCRIDGRWCRLGWASSARRQAVLNGTKAELNGVVHIHVGHTNAGHPHAATLVLLKPPQNAVSSSSGAATTTLAGAHDDSESLLGPMLGQLPLRGSCFGLAGIGTMPAASSCGAGCAAPSCWPAMPLRLGMTRRKSYSAAPTSCLAGLPATVGLPCHLHSHTSRERRATSAGLPASLHRAVLS

SEQ ID NO: 126957 - protein, 153 aa, Oryza sativa
  unsure (1)..(153): unsure at all Xaa locations
  Clone ID: PAT_MRT4530_29453C.1.pep
DSTARCSDAGRPAEVARRSRDVWLWRWHGSPTVAGNPAKQDVGAAEXLLRRVMPRRSGIAGQQLGAAHPAPQEDAAGMVPIPARPKQLPRSGSCPSIGPSKLSLSSTTSAALSQPRPLRTTAXRFPSRGAAPDCASPCCRSRLKKEERKREKI

SEQ ID NO: 126958 - protein, 80 aa, Oryza sativa
  Clone ID: PAT_MRT4530_29454C.1.pep
MERPRAAGEDRVPGKPVRGRMEAIVPSPRAAGVNGSAAGRGAAGGQVEIACVQADLPLLKCLARSRLDRQGSRRHGGIRR

SEQ ID NO: 126959 - protein, 33 aa, Oryza sativa
  Clone ID: PAT_MRT4530_29455C.1.pep
GFKLGSCVYFNPFLWYGYHVQTKFDNPRLFMVS

SEQ ID NO: 126960 - protein, 159 aa, Oryza sativa
  Clone ID: PAT_MRT4530_29456C.1.pep
MAPPPPPPYPSWSNHHHLPPGGPAPMVAARYYGPAPPGSVSHPINGSPVVPAAAALWRVPAAAIAVAAAAAPLARQERQPPLSLAGGREEEDAMVEVRRGNGVGGAAAAVVQLQPGSRLSRSSSSSSSASSSSQHHHERRRLGDLAEINRENVSLDLTL

SEQ ID NO: 126961 - protein, 118 aa, Oryza sativa
  Clone ID: PAT_MRT4530_29457C.1.pep
FFFFFFLSKLSVLFPFPGVGRGIHHGMDILFLWCTPNISMHASGNPRGEHRTQSETENIRSQISHIRWITTSHRWSTHKRSKFSAQCKCVVHHPRRGSLRGHQAQCIIQGSRPKTRTR

SEQ ID NO: 126962 - protein, 203 aa, Oryza sativa
  Clone ID: PAT_MRT4530_29458C.1.pep
MFSLAYGLWKYIFNKTEFHVLILGVDKAGKTTLLEKIKSIYLKGEGLTPDRIVPTVGLNIGRIEDANAKLVFWDLGGQVGLRTIWEKYYQEAHAIIYVIDAAAASSFEDAKSALEKVLRHEDLKGAPLLIFANKQDLPGVITDEELARYLQLKELDERPYKFQAVSAYDGRGIKSGIDWVVEQMERSKRTEVLRARAGFTGQI

SEQ ID NO: 126963 - protein, 123 aa, Oryza sativa
  unsure (1)..(123): unsure at all Xaa locations
  Clone ID: PAT_MRT4530_29459C.1.pep
EKKREATKRAELLPLAYLVIRRRRRRRAXTWPESRPTPWRSSAPPARAFPPFHAPSCFCRPVVELFNRCVSSNLSRLDPVPRQVRFFLVNIPFPTRLFSFYPPLVLFFLTKVFPPAPFFPFSF

SEQ ID NO: 126964 - protein, 860 aa, Oryza sativa
  unsure (1)..(860): unsure at all Xaa locations
  Clone ID: PAT_MRT4530_2945C.1.pep
GSVRTSPTGLPSPLPTGVSACTAGLYAAIVGRLRLHRPACLRRRRLVFPPARLAFMPPLLGVYVFTDRPPRPPPTGASACTAGLYAAVVGRLRLHRLACLRRCRLVFPPARLAFMPPLLGVYVFTXGLPSPPPTGVSACTAGXLCRRCWASTSSPTGRLVRRRLVLPPARLAXMPPLLGVYVFTDXAASSAAEWCFRLHGWPIMPPLLGVYVFTXTGLPSPLPTGVSACTAGXLCRHCWASTSSPXPACLRRRRLVFPPARLAXYAAVVGRLRLHRPAASSAADWCFRLHGWPIMPPLLGVYVFTDRPPRPPPTGASSCTAGLLCRRCWASTSSPXACLRRRRLVFPPARLAFMPPLLGVYVFTDRRAFVAAEWCLRLHGWPIMPPLLGVYDFTAGLPPSPPSGASAYTAGLLCRRCWASTTSPPACLRRRRVVPPPTRLAYYAAAVGRLRLHRRPASVAAEWCLRLHGWPIMPPLLGVYDFTAGLPPSPPSAPSPPSPSLSHAAGDLQPPVPPRPCAGRPRHRLLQRRRHLLHAGLPSVSRGDPRNYVPAVALLFPSRRPPPAAFLSSPERRPAAPSSPSASQLPPLSRLRLRFAGKSPETRPHRRLVGVATTPPSPAVPAASPERRPTSPSPPSASPHRPPPRLLLGFRRNAVAAPVSPSSSSPVSFRPPLPPPRLVGSLHLHHLRHRSGKVALGLASPPSKPLRGPSSSSPIVLVVDVPSVARLVVSRHRLRHRHRSGVSHVVLVSVQPLPAVLVASSPVPVVVVIVLSSFPVSLVVAFVPPSSRSHPSSASVKQVAAAPVLVFVLGSASSSLVPAASRLRSRIAAEAVPSPFVSVVPVCLRRARSSLSFPRLVAWW

SEQ ID NO: 126965 - protein, 78 aa, Oryza sativa
  Clone ID: PAT_MRT4530_29460C.1.pep
DGRRPATSSEGQRGTGRRRQRRSGDLWQRKTSGRASPWRCDAEEGDYDVQEPRSRWQGSAGGGVDRIHVDDGLPAGYG

SEQ ID NO: 126966 - protein, 105 aa, Oryza sativa
  unsure (1)..(105): unsure at all Xaa locations
  Clone ID: PAT_MRT4530_29461C.1.pep
WRRGDHTTCHTSSPLSLSGIKLAQRSACGRRWRASDGQSACGRWWSAGRTRQRRAASRRVLEDEGGRTXDVTVMATDVDDIYGRKCIMHLLTGDDVDVPFFTLLP

SEQ ID NO: 126967 - protein, 242 aa, Oryza sativa
  unsure (1)..(242): unsure at all Xaa locations
  Clone ID: PAT_MRT4530_29462C.1.pep
RLPHLHXWSVCNPFATSTHKRTPPQSGKIADHTHKLKPPKGYFPGPTQIXLEFVHNSPPQNAPASRHGTWTGPIAKRASSISDEIHRNLPSICTQETDGQNCSSSPTTAHQITYCRRPYSCIEFLQGNRVDLTQNGTTPQETAPRSPISDLLVCLKAKQDWGKKDLHIQKRRICQERQKKDAEDVKLVMASSDPPQSARTHLSLSLFLSSGRWAIGRRKRAVLGGERRGKRKVRGFGFAGRW

SEQ ID NO: 126968 - protein, 324 aa, Oryza sativa
  Clone ID: PAT_MRT4530_29463C.1.pep
MPRYDDRDRYDDRYGGNTRLYVGRLSSRTRTRDLEDLFGRYGRVRYVDMKHEFAFVEFSDARDADEARYNLDGRDFDGSRMIVEFAKGVPRGPGGSREYMGRGPPPGSGRCFNCGIDGHWARDCKAGDWKNRCYRCGDRGHIERDCRNSPKNLKRGRSYSRSPSPRRGRSRGRSYSRSRSRSYSRSQSPRRDSRNERRSRSPRDSRSPRGSPRDSRSPRGSPRDSRSPKGSPRDTQSPRGSPRDSRSPRRSASPPNGRNRSPTPNASRSPAPRDSRSPMRADSRSPADHERRDMSTAANGRSPSPRDYEDNGNHRASPRGSASP

SEQ ID NO: 126969 - protein, 79 aa, Oryza sativa
  Clone ID: PAT_MRT4530_29464C.1.pep
MAAVAGSAAVEPARGSSSSAAPVRTRLVVPVRESGVSVVVAASVVEPVAAFETFFLGNLLAVLDSPPGLPDAKALGSRL

SEQ ID NO: 126970 - protein, 175 aa, Oryza sativa
  Clone ID: PAT_MRT4530_29465C.1.pep
MPRYDDRDRYDDRYGGNTRLYVGRLSSRTRTRDLEDLFGRYGRVRYVDMKHEFAFVEFSDARDADEARYNLDGRDFDGSRMIVEFAKGVPRGPGGSREYMGRGPPPGSGRCFNCGIDGHWARDCKAGDWKNRCYRCGDRGHIERDCRETALKKSPKRWERSLLKNPPSPLRSRWG

SEQ ID NO: 126971 - protein, 105 aa, Oryza sativa
  Clone ID: PAT_MRT4530_29466C.1.pep
LAPQFFPLSNGHFVLPPFFLFAPFFWPPPFFPFIFGYNILSKFKRKTFYTQKTPPPPIIPKFKKTPQKGKMLPQKKKKKKKKKKKKAKKIKKKKKKKKKKKKPNP

SEQ ID NO: 126972 - protein, 305 aa, Oryza sativa
  Clone ID: PAT_MRT4530_29467C.1.pep
MPRYDDRDRYDDRYGGNTRLYVGRLSSRTRTRDLEDLFGRYGRVRYVDMKHEFAFVEFSDARDADEARYNLDGRDFDGSRMIVEFAKGVPRGPGGSREYMGRGPPPGSGRCFNCGIDGHWARDCKAGDWKNRCYRRGRSYSRSPSPRRGRSRGRSYSRSRSRSYSRSQSPRRDSRNERRSRSPRDSRSPRGSPRDSRSPRGSPRDSRSPKGSPRDTQSPRGSPRDSRSPRRSASPPNGRNRSPTPNASRSPAPRDSRSPMRADSRSPADHERRDMSTAANGRSPSPRDYEDNGNHRASPRGSASP

SEQ ID NO: 126973 - protein, 94 aa, Oryza sativa
  Clone ID: PAT_MRT4530_29469C.1.pep
MAPPRCTALLLLASLLLFFLCISATHEAARTASGQPIQEQEQEQHGKVEEETMAASFAAVEEQCGGEEGEEEECLMRRTLVAHTDYIYTQGNHN

SEQ ID NO: 126974 - protein, 71 aa, Oryza sativa
  Clone ID: PAT_MRT4530_2946C.1.pep
IISICSCFIYIPPRETAPWKLVLPSTGKENTHTQCQGKRYHQNTNQHPELKPTRGAMHIRKKILRGKTKSS

SEQ ID NO: 126975 - protein, 47 aa, Oryza sativa
  Clone ID: PAT_MRT4530_29470C.1.pep
VFFNNTQLQTTAHTNFQAYGLTVVGSSKITQEPGSQNSHICYQGYTA

SEQ ID NO: 126976 - protein, 131 aa, Oryza sativa
  Clone ID: PAT_MRT4530_29471C.1.pep
STCNQRLINNKHKKRVWKFAQGPCCTCMASASPVFIIICCCPSPSTNNLLHSSASIWSTGCPQLPLQAIHALPACHANICLLPGAAHLACDHEPWLVAATHAQRLHHVLGYTDPVVPMAQLVCLGNYCIVG

SEQ ID NO: 126977 - protein, 149 aa, Oryza sativa
  unsure (1)..(149): unsure at all Xaa locations
  Clone ID: PAT_MRT4530_29472C.1.pep
KNPPPPPPPPPPPPAHSPASSGXISGETHRRRKRVSRGAMSXSYQEPIAPVASPSPSPPAAPPPXAAPPPANSPRNPHPSDGRFTGWTTTSRRSRGAGSCATPAGCSSSGSRGXEAGGPAPPPPPRALAAAGPRRAARAGAGGRPPRVR

SEQ ID NO: 126978 - protein, 304 aa, Oryza sativa
  Clone ID: PAT_MRT4530_29473C.1.pep
MSGMNSLSMVEARLPPGFRFHPRDDELVLDYLERKLLDGGVGGAAAAAAAVTIYGCPVMVDVDLNKCEPWDLPEIACVGGKEWYFYSLRDRKYATGQRTNRATESGYWKATGKDRPISRKGLLVGMRKTLVFYKGRAPKGKKTEWVMHEFRKEGQGDPMKLPLKEDWVLCRVFYKSRTTIAKLPTEGSYNNIDSVATTSLPPLTDNYIAFDQPGSMQNLEGYEQVPCFSNNPSQQPSSSMNVPLTSAMVDQEQNNMGRAIKDVLSQFTKFEGNVKREALQSNFSQDGFDYLAESGFTQMWNSLS

SEQ ID NO: 126979 - protein, 262 aa, Oryza sativa
  Clone ID: PAT_MRT4530_29474C.1.pep
MDGVARSRLLVPLLPRISARSFSAASPASEPAAAAAAVAASDAAAATDYSSSAGDPSSAPPPPARKPLGLLKGGVLAVVAAAFGATGYVSYAYSLDEIDQRTREFRKNSKQPIRDDLSGFEKFQAMAYSAAMKVPVAAIEFYLDTRSQIEDQIRGFSEPSSDKLLPDLLPQEQHVFTLVLDLNETLVYSDWKRERGWRTFKRPGVDAFLEHLGKFYEIVVYSDQLSMYVDPVIERLDPKGCVQHRLSRVATKYENGKHYRVW

SEQ ID NO: 126980 - protein, 415 aa, Oryza sativa
  Clone ID: PAT_MRT4530_29475C.1.pep
MPDVQPLVSEFVLKLKRRKVEGSHAVARQTAELLRSVVSQHRMGSTNQAAALADAVRGVGEQLIAANPIELAVGNIVRRVLHIIKEEDISSTAVGIEGLSVTAESDDEYDSGNDDHPTLSAAVLAAHARNALRAPSLQTLLEDIPVSTALSRSASSAGDSDGKSAGDKSSKSRKLKHDVIAAIGDLIDEIDTCYDQISEQAVEHIHQNEVILTLGRSRTVKEFLYAAKEKKRSFRVFVAEGAPRYKGHVLAKELVEKGVQTTVITDSAVFAMISRVNMVIVGAHAIMANGGVIAPVGMNMVALAAQRHAVPFVVVAGSHKLCPLYPHNPEVLLNELKSPSDLLDFGEFSSCMNFSTQDGTPLLNVVNPTFDYVPPKLVSLFITDTGGHSPSYMYRLIAEYYSADDLVVRRKSTSS

SEQ ID NO: 126981 - protein, 53 aa, Oryza sativa
  unsure (1)..(53): unsure at all Xaa locations
  Clone ID: PAT_MRT4530_29476C.1.pep
GSLLRGPVLVPSVSPLCLSSDGTWHLARGCIGFRSPAKGXVLRSASPGESVGC

SEQ ID NO: 126982 - protein, 819 aa, Oryza sativa
  unsure (1)..(819): unsure at all Xaa locations
  Clone ID: PAT_MRT4530_29477C.1.pep
IHDLVHNLARXILFDAVLDSGKKINIGVSSCRYGMLRDCGTPLELVTPSLAKIKTLHFLGCGKIELHGFAFSSASCLRDLDLSGCSILMLPASIGQLKQXRYLNAPCMKNRMIPXCITKLSKLNFLSLCRSLAISALPESIGEIEGLVHLDLSGCSRLKALPKSFGKLRWLVHLNLSNCSRVKDVSEYICGLTNLEYLNLSVCRKIGFLPRTLGSLTELKYLNLSGCFGIKELPKSFQQLKNLVHLDLSCCNCVKDLSEALDGLAKLQYLNLSYCHHYGNQFRLRGLPEVIGNLTSLRHLHLSGFLDNIFGNQSGVMDKLLEIGYLNLSTFQGNIFQQLPPGQSHSFIECIGALSNLEHLNLSNNVSLYSVPESLGNLRKLHTLDLTGCIGLLWLPESISKIQSLKYVLMKDLLRLKSTLSCFNNGPILLPNFVVQAVDKKSSNLGQLLDANPAELDISSLENVKSTKEAKGIKLSGKRNIVKLKFDWTIGTKRYVEDMEVLRELVPPSTVKYFELRGYHSTSFPTWLMGIAHCLPNLVKIKIVDLSKCSILPLGQLPNLKQLVLGRMKSITKIDADFCGGARAFPQLKTFDIYSMERLQEWNTTYSCGEDGVTEFMFPNLQWLSISDCPNLVVKPLPPRVTWWKIEGGESVISSWGGSVHTGTSSSSCSVTNLVVKFCTLPLSQWSLLHHLPALQLHISHCQRLNSFPEGMQYLTSLLSLHLSYCESISALPEWLGNLTSLKTLQIWECRGIKSLPESIEQLTMLEHLEISGCPELKQCVFGSAGRLEGVFTNLKLALQIQEHLGAICAAMSLPASQK

SEQ ID NO: 126983 - protein, 136 aa, Oryza sativa
  unsure (1)..(136): unsure at all Xaa locations
  Clone ID: PAT_MRT4530_29478C.1.pep
IQLMSLQVIDMSSCQMLTSLGEWFGSLTSLQELHISHCQRLNSFXEGMQYLTSLXSLHLSYCESISALPEWLGNLTXPSRHSXIWECRGIKSLPESIEQLTMLEHLEISGCPELKQWCELEDSKTKLAHIKNKCFW

SEQ ID NO: 126984 - protein, 44 aa, Oryza sativa
  Clone ID: PAT_MRT4530_29479C.1.pep
KGKTGFPLAPASLGPKNLGVFPPKGLNFRFFSLVGSPPFKSLQR

SEQ ID NO: 126985 - protein, 63 aa, Oryza sativa
  Clone ID: PAT_MRT4530_2947C.1.pep
MAHQACFQEKAPSGSTDSTPEIFTSALRARVARTTAWVWVRCAEPSRRGWGSVVIGGKVVART

SEQ ID NO: 126986 - protein, 118 aa, Oryza sativa
  unsure (1)..(118): unsure at all Xaa locations
  Clone ID: PAT_MRT4530_29480C.1.pep
KEGEEKKEKKEKNELRGEKGEEGRSEKKKREEEQEKGRRRREXKRREEGRGEKRKRREREKEEMREKKKEEGREKERKREREKKEREDKEEEGENVEEGKKRRKKEKSEEKEEGKERK

SEQ ID NO: 126987 - protein, 137 aa, Oryza sativa
  Clone ID: PAT_MRT4530_29481C.1.pep
RSITSPPWMEHYGSMVDLLCKSGMLEEAFEFVLATPVRPDPVIWRVLTGACRDLGNAILARKVVDHVIEMEPEYGGNYVLASNLYAANEDWRRVVDVRMEMGVWKETSRYSTALSYVEVNVEENAESLHPPTNDAYR

SEQ ID NO: 126988 - protein, 86 aa, Oryza sativa
  Clone ID: PAT_MRT4530_29482C.1.pep
MELINMPAEISVLRVDRIEPAKKTKTPPPPPTAVNSVQTPRMGGGAPAPAATSTAGRSSIDAEAEGFINRVRRQWAAESSSAATRR

SEQ ID NO: 126989 - protein, 289 aa, Oryza sativa
  Clone ID: PAT_MRT4530_29483C.1.pep
LDTHGPAFEEVENMFGLSNFVPILVGSKHLCSELEQIHDALCGSSDISSDPCELRGLRQTAMLGFLIDIGWLIRKPSIDEFQNLLSLANIQRWICMMKFLIQNDFINVLEIIVNSLDNIIGSELLSNLEKGRLENHVTEFLGYVSEARNIVDNRPKYDKQRQVDTRWAGDYAPNQPKLGISVPLAESTGTSGEHDLHSTNAASGEEENMPLVTKALPHRQCCHPETSARWLNAASIGAFPGGAMRMRLATTVVIGAVVCFAACVVLFHPHRVGVLAAPVKRYLSRNYSS

SEQ ID NO: 126990 - protein, 870 aa, Oryza sativa
  unsure (1)..(870): unsure at all Xaa locations
  Clone ID: PAT_MRT4530_29484C.1.pep
MLIDFSGFCFGFSAGIVIGYFLFIYFQPTEVKDVKVCPLVEYDSNSLDGILHEIPLWVKNPDCDRIDWVSRFLEMMWPYLNKAICKTAQDIANPIIAENKEKYNRDSIEFETLCLGRXQSTFQGMNPXVTAEWELRMERSLKCAVKPNVTGGEKAYELXVAKEVGDLXVLASERISLKSLGANIPCFAKILVSLMEKPHVDFGLKLLGADVMAIPILYSFVQETIKKQVASMYLWPKTLEVPIMDPSKASKRPVDDKLPSKKTTVKRGNLNPEWNEDFKFVVTDPETQELEIKVFDWEQAWNSFVGKHDKMGMNKILLKELPPEETKVTTYNLLKTMDPNDIHNEKSRGQITLEMTYKPFKEDDIEKDVQGTDVVGKAPDGTPAGGGLLYVVVHEAQDLEGKHHTNPYARIIFKGNEKKTKVIKKNRDPRWEEEIEFVCEDPPANDKLHVEVLSKPPKKWLIHGKETLGYIDINLADVISNKRINETYHLIDSKTVGIVIGYFLFIYFQPTDVKNVKVRPLVEYDSDSLDDTLPEIPLWLKNPDYDRLDWLNRFLELMWPYLNKAICRIAQDVANPIIAKNKEKYKIDYIKFETFTLGSLPPTFQGNPNTTVVVKAYGLKATIQPHVDFGLKLLGADVMAIPVLYKFVQETIMDQVASMFLWPKTLEVPIMDPSKASKKPVGILLVKVLRAQNLREKGPLGKRDPYVKLKMSGSKLPSKKTAVKHRTEVITDNLIKTMEPNGIQNEKSAGEITLELTYKPFKEGNIQKEDPGGLLYVVVHEAKELEGKCNTNPYVKLTFKGVEKKTKVVKENRNPRWKEEFEFECEETPANDKLHVEVLDVIINKRIIEMYDLINSKRGQIQIEFQWKSS

SEQ ID NO: 126991 - protein, 442 aa, Oryza sativa
  Clone ID: PAT_MRT4530_29485C.1.pep
MGIVSTVLGFSGFGFGFSAGIVIGYYFFIYFQPTDVKDVKVRPLVEYDSISLDGILPEIPLWVKNPDYDRIDWLNRFLEMMWPYLNKAICRTAQDIANPIIAENKKTYKIDYIKFETFTLGSLPPTFQGVKVQVTNEQELVMEPSLKWAGNPNTTVVVKAYGLKATIQPHVDFGLKLLGADVMAIPVLYKFVQETIMDQVASMFLWPKTLEVPIMDPSKASKKPVGILLVKVLRAQNLREKGPLGKRDPFISFLYGQFGKDEKLGMCKISLKKLTPGTEVITDNLIKTMEPNGIQNEKSAGEITLELTYKPFKEGNIQKEDPGGLLYVVVHEAKELEGKCNTNPYVKLTFKGVEKKTKVVKENRNPRWKEEFEFECEETPANDKLHVEVLGTKKALIRNKESLGHIDISLADVIINKRIIEMYDLINSKRGQIQIEFQWKSS

SEQ ID NO: 126992 - protein, 84 aa, Oryza sativa
  Clone ID: PAT_MRT4530_29486C.1.pep
KKNRDPRWEEEIEFVCEDPPANDKLHVEVLSKPPKKWLIHGKETLGYIDINLADVISNKRINETYHLIDSKTGQIQIELQWRTS

SEQ ID NO: 126993 - protein, 56 aa, Oryza sativa
  unsure (1)..(56): unsure at all Xaa locations
  Clone ID: PAT_MRT4530_29487C.1.pep
LSLSGAEKSKNSHRXLVSTRRSKKTNRDDDGSEDKCYVHSDGAEYPSDTDSLDEDL

SEQ ID NO: 126994 - protein, 114 aa, Oryza sativa
  Clone ID: PAT_MRT4530_29488C.1.pep
MADRAIRYLLRGDQRRGLRRRAQLLAAAGRYHRRRRLLLLDSGRVLMLLAVVALLHLLTAACTGQVEFYVVLVAFLLWLLGAAFAVTSLVAGQFPVLAAAAAARTLRGWLLGGL

SEQ ID NO: 126995 - protein, 223 aa, Oryza sativa
  Clone ID: PAT_MRT4530_29489C.1.pep
MTADRFGAERRHGRQTRGRRGATTERALHKITYFNKKSHEQACSYEPCFCPDSGCGFSGSVATLWKHFTTQHKWPSTEFKYYTPFDLRVKPGAHFLRAGDGQLFVMNMVSVEPVGHGVSLVCIQPNTSESSFRCNVVFSSFTGHHQISTLESVRCSSLSDGLPKNYFCIVPKSPGGGAAVLLRITIDTKLVLEVEDEQEEEEDDDDYDEDEDEDDESDDEDGN

SEQ ID NO: 126996 - protein, 221 aa, Oryza sativa
  Clone ID: PAT_MRT4530_2948C.1.pep
TRIFTTADEEVLLDFWPSPFGMRVRIALAEKGIKYESKEEDLQNKSPLLLKMNPVHKKIPVLIHNGKPICESLVAVQYIEEVWNDRNPLLPSDPYQRAQARFWADFVDNKIFDLGRKIWTSKGEEKEAAKKEFIEALKLLEEQLGDKTYFGGDDLGFVDIALIPFDTWFKTFGSLNIESECPKFVACAKRCLQKDSVAKSLPDQHKVYEFIMDIRKKFDIE

SEQ ID NO: 126997 - protein, 150 aa, Oryza sativa
  Clone ID: PAT_MRT4530_29490C.1.pep
MGRIPSLKNFNAFPHAEDHLLKKTYSGAIVTIFGLIIMVTLFAHELKFYLTTYTVHQMSVDLKRGETLPIHINMSFPSLPCEVLSVDAIDMSGKHEVDLHTNIWKLRLDKYGHIIGTEYLNDLVEKEHGTHNHDHDHEHEYEQKKAEHTF

SEQ ID NO: 126998 - protein, 365 aa, Oryza sativa
  Clone ID: PAT_MRT4530_29491C.1.pep
MGRIPSLKNFNAFPHAEDHLLKKTYSGAIVTIFGLIIMVTLFAHELKFYLTTYTVHQMSVDLKRGETLPIHINMSFPSLPCEVLSVDAIDMSGKHEVDLHTNIWKTNSVVALIILIAYDALRLDKYGHIIGTEYSNDLVEKEHGTHNHDHDHEHEDEQKKQEHTFNEDAEKMVKSVKQAMENGEGCRVYGVLDVQRVAGNFHISVHGLNIFVAEKIFDGSSHVNVSHIIHDLSFGPKYPGIHNPLDETTRILHDTSGTFKYYIKIVPTEYRYLSKQVLPTNQFSVTEYFVPKRATDRSAWPAVYFLYDLSPITVTIKEERRNFLHFLTRLCAVLGGTFAMTGMLDRWMYRLIESVTKSKTRSVLR

SEQ ID NO: 126999 - protein, 73 aa, Oryza sativa
  Clone ID: PAT_MRT4530_29492C.1.pep
MAMGDMACLLGWWTPRQLWLTGVDALSVSVDVADSPWGQDCSRGTKGPALSTLAYGAPWLTAWRARQEAAAAL

SEQ ID NO: 127000 - protein, 307 aa, Oryza sativa
  Clone ID: PAT_MRT4530_29493C.1.pep
MANMHGSIPRIDFAGIIDLAALPPPAAPPPPGADHLRPRWAAVRAAVMDALRAHGCFEAVVDGLISPELRAAVLGPGGAAESVLSLPASAKARGNDPGEGKPYHGYVGGIPGLPYESVAISDPLSPTAVRAFAARVWPAAAAAFPEEAVVAYAGRLAAVEAAVRRMVLESVGATASSAGAVEAQAAATAFKLRLSEYAAPGGGEDARLGLPAHRDTSFLAVVTQNGVDGVEVECGRGDGGWARPTLSPSSFLVFSGDTLKQDDLLIEDHKTLMGGNFEDVIDKHLRTLKEMEALQDGVYREQSMGNT

SEQ ID NO: 127001 - protein, 52 aa, Oryza sativa
  Clone ID: PAT_MRT4530_29494C.1.pep
MQHRAARRRARYRWIGGTTYQCVTVYISSHLRLSWNSSCTCTGRQITPAGAP

SEQ ID NO: 127002 - protein, 108 aa, Oryza sativa
  Clone ID: PAT_MRT4530_29495C.1.pep
MADLNESTTDAAALKKLYTEGAIPPKQTMAWEAGEFLLLILNFYGLSLLHLNPNSFAFLTIFAHLCEAYIRVVPFLDSHLSPSATMHAYMSLLAVIVPSVLVGLVYMI

SEQ ID NO: 127003 - protein, 64 aa, Oryza sativa
  Clone ID: PAT_MRT4530_29496C.1.pep
MGAAIKFQTFLQIVVGCGVVAVGGGVVAPGVAVLGDGGARGRNVHEQDPISGDIPPQAAGGGVC

SEQ ID NO: 127004 - protein, 430 aa, Oryza sativa
  Clone ID: PAT_MRT4530_29497C.1.pep
MEKLSTCSARFLPACPPTRPLICPSSNDTCARFNPQKRARARNGGGGGGEHGGAAAPPAVGWCCAGGGAEEEEEEVVALSSSSSSSSAPGKKVGAAAGGLPRLVRFEELPDYLKDNEFIRGHYRCEWSVRDALRSAFAWHNETLNVWTHLGGFFLFLWLAVAGGTERPAAAAAGVNAAPGIMTFLVASSANNASWETNSTDFDRNSLEGKDSPALLGGGEHALARWPRTVFLVGAMTCLAVSATAHLLACHSRRFSRLFWQLDYAGIAVMIVASFFPPVYYAFLGRAVAQVAYLSAITALGALVVAALLAPARSSPRLRHIRAGLFVSMGLSGVVPALHALWLNWGHPECYLALSLELVMGLVYAAGAGFYVARVPERWRPGAFDCVGHSHQIFHVLVLAGALTHYAATAILIDWREAAIAAGGGAAAFL

SEQ ID NO: 127005 - protein, 228 aa, Oryza sativa
  Clone ID: PAT_MRT4530_29498C.1.pep
MPLRSCILEFLANQPEHHLYAGASQSAQTKPDSDQTLRNLLVPPLLGAVESSADVVFRKQNPSGLHRPANFKMSRRCKPQDGKRAPVAPPPPPASRRGPPPPSGRRQPYPAASLAGHRSLLVGSNCERMRNRKRRIEDKTVMEMLLLTAAATAVAVVAAQCDPEQLSACVSPIFYGTAPSESCCSNLRAQQKEGCLCQYAKDPTYASYVNNTNARKTIAACGIPIPSC

SEQ ID NO: 127006 - protein, 142 aa, Oryza sativa
  unsure (1)..(142): unsure at all Xaa locations
  Clone ID: PAT_MRT4530_29499C.1.pep
LPYIPLCLXLVLFFEVAMXTFXFGGRPLHSARGFMGDHHKDDHWRCEHLTALEAARQXRPEPVFTEYYIMEGXNELRCAVASEMRLLQDSTDSLHSMYANDYKLAYIEQCQGLLCMALPRCTRDDPQQIGLASATGGHSLRR

SEQ ID NO: 127007 - protein, 1008 aa, Oryza sativa
  Clone ID: PAT_MRT4530_2949C.1.pep
MAWLRAASGLARHALRRRVPVASRFFHSARPAWRSSAPVPRAVPLSRLTDSFLDGTSSVYLEELQRAWEADPSSVDESWDNFFRNFLGQAAPSSAGLSGQTIQESMQLLLLVRAYQVNGHMKAKLDPLRLDDRAVPDDLDLSLYGFTEADLDREFFLGVWRMAGFLSDNRPVLTLREILSKLEQAYCGPIGYEYMHIPDRDKCNWLRDKIETAKLKEYNKDRRLVMLDRLIWSTQFENFLATKWATAKRFGLEGGETLIPGMKEMFDRAADLGVENIVIGMPHRGRLNVLGNVVRKPLSQIFSEFTGGTRPVEGEDGLYTGTGDVKYHLGTSYDRPTRGGKRIHLSLVANPSHLEAVDPVVIGKTRAKQFYSNDLDRTKNMGILIHGDGSFAGQGVVYETLHLSALPSYTTGGTIHIVVNNQVAFTTDPRAGRSSQYCTDVAKALNAPIFHVNGDDLEAVVRVCELAAEWRQTFHSDVVVDLICYRRFGHNEIDEPSFTQPKMYQVIKNHPSSLKLYEQKLLGTGEVSKEDVQKIHEKVNRILNEEFAKSKDYVPNKRDWLSAYWTGFKSPEQISRVRNTGVNPGVLKRVGQAITTLPEDFKPHRAVKKIFEQRAAMIESGEGIDWAVAEALAFATLIVEGNHVRLSGQDVERGTFSHRHAVLHDQENGRKHCPLDHVVMNQNEELFTVSNSSLSEFAVLGFEMGYSMENPNSLVLWEAQFGDFSNGAQVMFDQFLSSGEAKWLRQTGLVVLLPHGYDGQGPEHSSARLERFLQMSDDNPFVIPEMEPTLRKQIQECNWQVVNVTTPANYFHVLRRQIHREFRKPLIVMAPKNLLRHKDCKSNLSEFDDVEGHPGFDKQGTRFKRLIKDRNDHKQVEEGIKRLVLCSGKVYYELDEERKKTERSDVAICRVEQLCPFPYDLIQRELKRYPNAEIVWCQEEPMNMGAYSYISPRLYASMKTLGRGSFDDIKYVGRAPSAATATGFLSVHAQEQTELVKKALQAEPIKFP

SEQ ID NO: 127008 - protein, 465 aa, Oryza sativa
  unsure (1)..(465): unsure at all Xaa locations
  Clone ID: PAT_MRT4530_294C.1.pep
MAAHDPKDDVDRLFACFKCGVSPPQSAFRERPRRAGKRSRVASTADGGGGGGGGSSSSSTPTPDAAEKHEAPSSAVIKFTGRKQMSPVVFYGSPQGVPVKKPLSLLRLLREIRIDLKKQTDLVPSAGVWATFPRQEEAIRFCKAHAYTNVFSYQDHLSGQRRFLVSTYDEFWKRYNNMDPQIRHHYEVIQDGSPCHIYFDLEFDPRLNKMRDADEMVDILVAATFSALHDKYSIEGQEEWIIELDSSTEEKFSRHLIIRIPKTAFKDNSHVGAFISEICSRIASQRAANPNFDKLYITKDSSCTGHADHLFMDIAVYSRNRCFRLAFSSKSGKKSFLVATERFKHKNMSDKELFMESLICRLDDDCHKLLTCKLDLDCKKTLHFDSEASMIRIQGRNSKDSIGTYRNDFPVSNTYGISPFPALDVFIESIASFGNVXSMSRSRYCEHIGREHKSNHESCILPKVL

SEQ ID NO: 127009 - protein, 223 aa, Oryza sativa
  Clone ID: PAT_MRT4530_29500C.1.pep
MSSARQFGMGQVPIGLYFTDKIQCRGEISSTLMMDRLLNIPGPPLGSIENIELARFKSRNFDRWWGEWKQHLFQQSASMYMTDLFPDVIPQVLADMFSFDIKDYLDQEAKDETTKTLASLDEDVKRTLEDISHRLEASLNNLWVIVEYPGNPFAAVASRQSAVATVEPSRAVLARPSPLPPVVASSRTMAGDDVNSSLRGARLRSGEKSVGVAGESMPLVIEG

SEQ ID NO: 127010 - protein, 95 aa, Oryza sativa
  Clone ID: PAT_MRT4530_29501C.1.pep
LACGGREPTDLVGLPSRTRHAKSPPQARAPRRILGGVGLAPHFCRFGGWACRDCLPPAEDPPDPQAEAPPWVDLLPFHYGAHPRREHFFFFFHLC

SEQ ID NO: 127011 - protein, 105 aa, Oryza sativa
  Clone ID: PAT_MRT4530_29502C.1.pep
TIHRNGYIIIKNRPCKAVEASTYKTGKHGDAKCHFVAHDIFTANKLENIVPSCNNCDEPHVNRTECQLIDICEDRTESPVTGNGNIQDDLTLPTDDNLLSQIHDG

SEQ ID NO: 127012 - protein, 473 aa, Oryza sativa
  unsure (1)..(473): unsure at all Xaa locations
  Clone ID: PAT_MRT4530_29503C.1.pep
MSSARQFGMGQVPIGLYFTDKIQCRGEISSTLMMDRLLNIPGPPLGSIENIELARFKSRNFDRWWGEWKQHLFQQSASMYMTDLFPDVIPQTTESCPPRKSNSGKDIEYAPGLIPNGGQLGESADVGKKRKTKASAIDSSTLAPKKKAKKKKSKQTNDLPAIDPSIEQALDEEEIEEDVDQAATELSDLGEKTPSALPKQTPPTPASPAHFSMKKKTTVKKKLTLAPSKQVPSLMSSDRSPSAIDSHNIEEEEEPAAPAILVLADMFSFDIKDYLDQEAKDETTSKTLAPLDEDVKRTLEDISHRLEASLNNFVVDCGSIRARLREIHALIPDDLSNTITPAAYLEQHQFKLEKTKQRLPEWRERKDIEATIQANRQLVHEEKSKLDKLSEGPIQSNIDRLEARKIDLMAQLEECNAKLALETQKLANLPKAIEEKKSXLKSAIKNVADLTKSVKVIPGTDAQDIQEVEEIRQ

SEQ ID NO: 127013 - protein, 61 aa, Oryza sativa
  unsure (1)..(61): unsure at all Xaa locations
  Clone ID: PAT_MRT4530_29504C.1.pep
YPNDLGQEECLSIKKFQNNRKVQSALEXIFIQTETLQIDKPSIFSETFCSLFPPRGKEVKQ

SEQ ID NO: 127014 - protein, 62 aa, Oryza sativa
  Clone ID: PAT_MRT4530_29505C.1.pep
FRGFCIILFNLFSHEFCQSKNQHPSQVILGLAKKNPKQGCMTPEKTAPSYRKKSKMERGGEL

SEQ ID NO: 127015 - protein, 89 aa, Oryza sativa
  Clone ID: PAT_MRT4530_29506C.1.pep
MAAARRRLRVSLQVAVLLVSLLLLPGCLAGRREHAGVNVDKSHGIVINWEKKHPVRRLFLGLATNRHRRILFYRNPGYFSASYKLYVPT

SEQ ID NO: 127016 - protein, 82 aa, Oryza sativa
  unsure (1)..(82): unsure at all Xaa locations
  Clone ID: PAT_MRT4530_29507C.1.pep
FVISLTLLTIVNDAXIGNNLISSWFGMVHSWFGDRPVQPGWLFRMDGPIXQGMLYSVGLILLNXYLTVLLNSQMFAKCCFCK

SEQ ID NO: 127017 - protein, 120 aa, Oryza sativa
  unsure (1)..(120): unsure at all Xaa locations
  Clone ID: PAT_MRT4530_29508C.1.pep
DVXXXAGRTXHLTXXASXSSFASXSTSPLLFLFFLLLGPSRLGGXWPATATSSSAFCSLPLSIWNMVCAXREIKXGRGKXXNRATMGQMDGGDGGXGGHPYHYQALLAAVHQQTVPFPNP

SEQ ID NO: 127018 - protein, 112 aa, Oryza sativa
  Clone ID: PAT_MRT4530_29509C.1.pep
RTVPSAFGAPSAHSICVACLRGRENGIAAAAGGRAPYLAVTCQPVTTAVPPFDPILSCHHQRPTSHIFRFENFWVELPGFIEVVKLFWDIPLFIHEWNFRNIVKNHILKLLH

SEQ ID NO: 127019 - protein, 106 aa, Oryza sativa
  unsure (1)..(106): unsure at all Xaa locations
  Clone ID: PAT_MRT4530_2950C.1.pep
IGRRRDLAAGARGRGARRRRPWRRRRGAHTAAARMRQRRKAATEGDRPAAGSXARGGAAATRLSGAHAATRYGEKEKGEXGSLTDNGRRRRPTEDDDDGGTSSGTS

SEQ ID NO: 127020 - protein, 43 aa, Oryza sativa
  unsure (1)..(43): unsure at all Xaa locations
  Clone ID: PAT_MRT4530_29510C.1.pep
MXXSRKVFSAMLLMAXLLAATGEXGXPVXXXXXXXCXSQSHRF

SEQ ID NO: 127021 - protein, 127 aa, Oryza sativa
  Clone ID: PAT_MRT4530_29511C.1.pep
IGGGDDEGGAGDADDGEDAVHGEHEQRHDAAHIPAPPTAAAAAASPQLLVRRRRRRGPPDPRRAPRHGRLGAVLIVMLMRRRLLQSSLSRSLSLTAACYAAHSSQTSPARPQIELPDRYIHRECARG

SEQ ID NO: 127022 - protein, 415 aa, Oryza sativa
  Clone ID: PAT_MRT4530_29512C.1.pep
MPLGPMASPSLLFLSLLLRFVPPADMVERGEVVVVVADEGIDLSGMRRNKLATMVWDRARPSKGHGAWLMAAMKKTSQQRLRAPARRCQLIPFDMKACMCIHEVGWPDIDDAEAAALQDDDGTTVFPLLQWIKRDGVKRKFVLQDELSMERKRDKDDRGLVMNMIIVFISAGDGIETKEAAHACSLDVVGSRVESEMGRRSWEKTIATAAAATQCAGEAMVFCPLLAALTRKGNFVSSSGGGEKNDFENAQNGKNGKVAIPSSIESLIFGGSDSTQHRIQHQLDEENQRAALFHSSAPSSSLGADGEEERETVPLLSCKMADDKSDTVQVSEDTAHQISIDPWYQVGFILTTGVNSAYVLGYSASIMVPLGWIGGTCGLILAAAISMYANALLAHLHEVGAKRHIRYRDLAGHIY

SEQ ID NO: 127023 - protein, 134 aa, Oryza sativa
  Clone ID: PAT_MRT4530_29513C.1.pep
ALQDDDGAAVFPLLQWIKRDGVKRKFVRQDELSMERKRDKDDRGLVMNMIIVFISAGDGIETKEAAHACSLDVVSSRLESEMGRPSWEKTIAAAAAATQYAGEAMAFCPLLTTLTRKGNFVSSSSRCPSRMGHR

SEQ ID NO: 127024 - protein, 835 aa, Oryza sativa
  Clone ID: PAT_MRT4530_29515C.1.pep
MPLGPMEGPSLLFLSLLLRFVPPVEMVERSEVVIVVADKGVDLSGMRWNKLATTVLDRARPSKGHGAWLMAAIKKTSQWRLRASARRRQLIPFDVKPCMCIHEVGPQGGADGAVACSRMDEEPDIDAAEAAALQSVLQHDDGTAVFPLLQWIKRDGVKRKFVRQDELSMERKRDKDDRGLVVNMIIVFISSGDGIETKEAAHACSLDVVSSRVESEMGRRSWEKTIAAATAATQYAGEAMAQYNNIFCATHMGDWYEKLSQSFRDTANEVLAKADIDPNVRCFTRRQMKHITNNYGTVLGKGGFSVVYKGKLDNGRSVAVKQYNWRTQEKEFTKEAIIQSQCSHRNIVRLLGCCVEADAPMLVTEFVPNGNLSELLHGKSGQLPVSLETRFQIALDVAEALVYMHCSQNHPILHGDIKPSNILLGDKHVAKLCDFGISRLLCMDNDEHTGFVIGSKGYMDPVYCETGRLSPKCDVYSFGVVLLELITRKKGIDDQSRNLAGMFARSSRDKRHELFDKEIAADENIDFIEEIANLALDCLKSEIEDRPQMKEVLKQLWSIKSDIDSIIGDPEQESTSETFSGKSDVAMGKVYMGRLKNTPLIVIKMSVEVDEDWKQTFFYEMIMQSRIKHWNVAKLFGCCLDHVDAPVLVYEYGEMGLHDALFGKAWQSIEHPFTSYVRLQIATDAAEGLAHLHSFDMVHGDVRTANVIVDVFSGSKLEMPRTSTFPAKIAGFGTTKLLSLDKAQYARFLTENIHYKDPHFLITGLMTKEHDVYGFGGVLVELFTGNKIQMHDINTVIKYFDSVFAICHHLEEIKELASWCVAPEVTERPTMAKST

SEQ ID NO: 127025 - protein, 100 aa, Oryza sativa
  Clone ID: PAT_MRT4530_29516C.1.pep
VKTYILGVLRSMQIKAHFLVMLLHILVLHLLQFCIQGKNTITITTDILEDQMVHQALATNQATITPAMEMDQEVAGHNTKLKDNILHDWLHRLYPFPIAF

SEQ ID NO: 127026 - protein, 188 aa, Oryza sativa
  Clone ID: PAT_MRT4530_29517C.1.pep
MAYAELQDSPVMFCNRTNKHNDGLEAALEEVLNSECKHVIKLVLTLAKETIAVHAAEERLTLEDTTGVVLLIQEEKEGELTVAVEAHVRHGCRGKVPWIAEPRAAAGGGEEEGVEGRVKYHCYIVDLVFLETLETGLLAKWPLVLGTLAEAVLHGQKSRVLVTVRCLRWSQTQGRAEVLLAWRHSAAR

SEQ ID NO: 127027 - protein, 837 aa, Oryza sativa
  Clone ID: PAT_MRT4530_29518C.1.pep
MSGQSNSPDMIFQVYTPRKRKFLNSVHYSESNRAVSHGSGLVTSAKDSHQGEESFLNGPAGLSSILSNSQGFAPQDILSGTTELSGIRYSTDQSQTAVAHKLLFSCEKGDQSIVAMVHPSQSSLEKIQQKQGISSYEAKHDVQGSTKADDSSSILSPHSLDDEIMSVVGLLSPSAYESLCDAEKKNHDITWPKIIEIKGRVKLDAFEKFVQELRRCQTRSLMVISLCWKFGTSKAGLLGMKEVAENFEASQKVGFADVCDGSNLYVCPRSDAVITILAKCGFFKGMSAADTNQDSLIGCIVWRRNPLSKIVDHSRSETIGKGSPCVPHVGARHPTSLPFSDGHQATSCSNNPGMDSRTNTGNIQNDIDQMQEIQSNSVKTHPVATGLLSQCGHAKSTGERDPTEKVVPHSLFKLASKLTPQPPFKAPSLIGCQLSQVSPFELASHEVPEIQQHVQSIIDSHSGSFGVWHPTSHSQGLSLKSLHVQQRTTHYDLAAQKNHMAEAFSGSITQEYASNAVESSKQQETNPFFLQPDTYGAHRANDIDDLPKVDFANLHRVELKFDVHPINRETTITSDVLICPRLSDKKSNSPFQQSSQPSFRVEGIKNHEKVEVKENVTDMISREITNQVSHRKAEIENFKSKDDIDAEDMPECHFQGLDNEKLHQSGSSKHTSPSLKNSTGSKAPSQVFPPITQKSYTPLEVEDISSGHDPNMPSGCLNIPRDQGSFPRILHLHKGINGQDLYPWRPPFHANQGPFPRHAPPHPCPPFTPGHVRPPSNFAPPGPWRPVLHPGQEHHHHHYGHPGRSNGPSGSGNKPGYHNPSYGNGPGGCRPPHQAQG

SEQ ID NO: 127028 - protein, 992 aa, Oryza sativa
  Clone ID: PAT_MRT4530_29519C.1.pep
MSGQSNSPDMIFQVYTPRKRKFLNSVHYSESNRAVSHGSGLVTSAKDSHQGEESFLNGPAGLSSILSNSQGFAPQDILSGTTELSGIRCTTSSCKPNETILHTISTNNGTSNCQDTTQSFSLLMECTNHTTPSKPMHPHITFQLMHTKIESSNSCAKYADSTDQSQTAVAHKLLFSCEKGDQSIVAMVHPSQSSLEKIQQKQGISSYEAKHDVQGSTKADDSSSILSPHSLDDEIMSVVGLLSPSAYESLCDGTIQLSSTVKVSVIAFFKSGEKNHDITWPKIIEIKGRVKLDVFEKFVQELRRCQTRSLMVISLCWKFGTSKAGLLGMKEVAENFEASQKVGFADVCDGSNLYVCPRSDAVITILAKCGFFKGMSAADTNQDSLIGCIVWRRNPLSKIVDHSRSETIGKGSPCVPHVGARHPTSLPFSDGHQATSCSNNPGMDSRTNTGNIQNDIDQMQEIQSNSVKTHPVATGLLSQCGHAKSTGERDPTEKVVPHSLFKLASKLTPQPPFKAPSLIGCQLSQVSPFELASHEVPEIQQHVQSIIDSHSGSFGVWHPTSHSQGLSLKSLHVQQRTTHYDLAAQKNHMAEAFSGSITQEYASNAVESSKQQETNPFLLQPDTYGAHRANDIDDLPKVDFANLHRVELKFDVHPINRETTITSDVLICPRLSDKKSNSPFQQSSQPSFQVEGIKNHEKVEVKENVTDMISREITNQVSHRKAEIENFKSKDDIDAEDMPECHFQGLDNEKLHQSGSSKHTSPSLKNSTGSKAPSQVFPPITQKSYTPLEVEDISSGHDPNMPSGCLNIPRDQVSFPRHPPPAQGDQRLAARHPPVLADQGYVPRLPPPVLEDQGLAPRCPPPALAGQGFVPRHPPPVLPNQGFFPRRCPPFAGQDLYPWRPPFHANQGPFPRHAPPHPCPPFTPGHVRPPSNFAPPGPWRPVLHPGQEHHHHHYGHPGRSNGPSGSGNKPGYHNPSYGNGPGGCRPQHQAQG

SEQ ID NO: 127029 - protein, 164 aa, Oryza sativa
  unsure (1)..(164): unsure at all Xaa locations
  Clone ID: PAT_MRT4530_2951C.1.pep
RQRGGAARRRQAGPTGQRPGERGRGWRRAGPPVSGTGERRGGGATWRPNRRPRSTQXVDRMAAWDLAAGARGRGARRRRPWRRRRGAHTAAARMRQRRKAATEGDRPAAGSXARGGAAATRLSGAHAATRXGKRRKRRXSLTDNGRRRRPTEDDDDGGTSSGTS

SEQ ID NO: 127030 - protein, 82 aa, Oryza sativa
  Clone ID: PAT_MRT4530_29520C.1.pep
MAFGLTWEKQEPSDLIDGVARCDNRDTTVVARRGAGAGCTATRIWKRPDEDVGGVVRHGAVAGCGTATVMQWSRLTVRRRRR

SEQ ID NO: 127031 - protein, 79 aa, Oryza sativa
  Clone ID: PAT_MRT4530_29521C.1.pep
IKKNHFKQKQKQSTACKIKKLLRNLEHTKQGGKHYLIKNKQLNKVIYYHNRLIATKISQTWGLLGHKIYKLHLPYFFKT

SEQ ID NO: 127032 - protein, 245 aa, Oryza sativa
  unsure (1)..(245): unsure at all Xaa locations
  Clone ID: PAT_MRT4530_29522C.1.pep
VPLSTLLPKLQHLFAGWKMKKALGHIELVNADNTRAMLVLHIGKINAQDQHMLLNFAKAEQLSLYLMCDENHIEHLCGEAPYYQINGLTLHFCIRDFIQVNQPLNQKMVNKALEWLAITAEDRILDLFCGIGNFSLPIAQQAGFVVGVEGVEEMVKQAKINQQTSGLNNIAFYQTNLAESFVDQHWATQPFNKVLLDPARQGALFCLDHLMALTPERIIYIXCNPPTLMPDAEKLIRHGYKIAKS

SEQ ID NO: 127033 - protein, 55 aa, Oryza sativa
  Clone ID: PAT_MRT4530_29523C.1.pep
NKQTVSSLILQVYIAWGGCDASHAFLSNAASSLYMPHCSPRRSLSKTNPVFICLE

SEQ ID NO: 127034 - protein, 47 aa, Oryza sativa
  Clone ID: PAT_MRT4530_29524C.1.pep
KNRIRPTIIYSFHQMEHASFPNTILSHIYPFHTSYRAQFFLFTLNNS

SEQ ID NO: 127035 - protein, 340 aa, Oryza sativa
  Clone ID: PAT_MRT4530_29525C.1.pep
MHHALSFSSALPTAPTEIPGSGGGFVDDKGSMFSLPNVAGSAPPPSYYSSLPSFYIHRSTSSHSLLHHRLSDLLNSNAAFSYSSAPACQLQPLPPVSSSTSSSSGDLLEFSSGTLRRVFSTGDLQAMNVPPSPPPPPPFSGDICIQEVGGPFSQKVGRYSAEERKERIERYRVKRQQRNFHKKITVLAYKTAFPFPLQAIDHGSYCSSSSSSSPGRFQYACRKTLADSRPRVQGRFARNAETEADAEADAVAGLDTEVYGNGYGYCAYSGLTNSISSNCYDNQSQSQWWGTPAGAANWQHQQQKQQLGFDVAVDGDDEDYELCCGPASLTCAQGPDPELI

SEQ ID NO: 127036 - protein, 69 aa, Oryza sativa
  unsure (1)..(69): unsure at all Xaa locations
  Clone ID: PAT_MRT4530_29526C.1.pep
RPLRTSPPXLRADPMAPTSKLXQGIKKALRSHTYHRRGLWAIKAKHGGAFPKAEKPAXAAXXAAPKFYP

SEQ ID NO: 127037 - protein, 126 aa, Oryza sativa
  unsure (1)..(126): unsure at all Xaa locations
  Clone ID: PAT_MRT4530_29527C.1.pep
PSHTLSGTYRSQQEGSSAISDLAEYGFKEEDYHVINYELSSCCQVDNGXMSYPKYCICVIQMNKEQHRHQLTGCRVITCKIRDPNLYKKPCLHLFYLDLAYILVPMIPIPSXKYSSRDYQTSTVAR

SEQ ID NO: 127038 - protein, 93 aa, Oryza sativa
  unsure (1)..(93): unsure at all Xaa locations
  Clone ID: PAT_MRT4530_29528C.1.pep
TXRGGDXXGSHLXXXXGXXXXGAAVGXEASSSKFVLGXEXYXXXIXLVRLXSPQIXXNFLFSFFXILVXXNNVVVWXPVEPVGXXXHIXICRX

SEQ ID NO: 127039 - protein, 145 aa, Oryza sativa
  unsure (1)..(145): unsure at all Xaa locations
  Clone ID: PAT_MRT4530_29529C.1.pep
MRYLGFPIDKEILLNKDWKKPEEXLKKKVGCWQGNLQSIGGRXCLLGLERTDLYRRFLWQDDQGIRKYHLVNWNTVCSPRETGRLGILDLEIMNIALLGKWLWNLENSEGLWQQMXRQKYLSKNILAAAKTKSGASHFWQGVMEV

SEQ ID NO: 127040 - protein, 1508 aa, Oryza sativa
  Clone ID: PAT_MRT4530_2952C.1.pep
MMPRCKPEYLFGVEGFVKELRTMSFAIGFGTAPLYAQIPRDRDEEKCRVKVTLNSNSEDILSVMFEAGGGNYIHACQEVARIAIGELRDRYSDQLADTEYRYHPRQPQGSDRGSYLETEGIENDATTRHLVEMLWAMDKTRAEIVLAAQDREDRNRGKICKLEDKVDRLEKELAALKGEAPPQKARVRLTARKRALFVPRYQLAPKVRVVEKEATPTLADPPIVNNKLAEFLRARPPTFSSTTNPVEAGDWLHAIEKKLDLLQCTDQEKKTHIPSGVVSLKKKEFRSLTQGSRTVTEYLHEFNRLARYAPEDVRTDEERQERFLEGLNDELSYPLMTGDYHDFQKLVDKAIRQEDKYNRMEQKKCRIAHFKAQQGNSQRPRLTLGPQSMPRGGSSSVVRPQRQFFNNNAGNNIRNQAPHPVAAPTQQQPAKREQGIKPGVCFNCGEPGHYSDKCPKPRRVKVVPAQSNSTAPASKARVNHVAAAEAQGAPDVILGTFLVNSVPATVLFDSGATHSFLSMSFAGNHGMEVEDLRRPLMVSTPSNQALSLQRSPSVRIEIQGVPFLANLILLESKDLDVILGMDWLARYKGVIDCANRKVTLTNNDGRVVTVHALSSESLRSSLNQIALEEIRIVQEYPDVFPDDLPGMPPKRDIEFRIDLVPGTTPIHKRPYRMAVNELAEVKRQVDDLLQKGYIRPSSSLWGAPVIFVEKKDHTQRMCVDYRALNDVTIKNKYPLPRIDDLFDQLKGATVFSKIDLRSGYHQLRIKEEDIPKTAFTTRYGLFECTVMSFGLTNAPTFFMNLMNKVFMEYLDKFVVVFIDDILIYSRTKEEHEEHLRLALEKLREHQLYVKFSKCEFWLSEVKFLGHVISAGGVTVDPSNVESVTNWKQPKTVSEIHSFLGLAGYYRRFIENFSKIAKPITRLLQKDVKYKWSEECEQSFQELKNRLISAPILILPDPKKGFQVYCDASKLGLGCVLMQDGKVIAYASRQLRPHEKNYPTHDLELAAVVHALKIWRHYLFGTRTEDYDMGIHYHLGKVNVVADALSRKGYCNATEGRQLPLELCKEFERLNLGIVSRDFVAALQAKPTLIDQIREAQINDPDIQEIKKNMRRGKAIGFLEDEQGTRVKAEHQKPTGLLQPLRIPEWKWEEIGMDFITGLPRTASGHDSIWVIVDRLTKVAHFILVKTTYSGSRLAELYMARIVCLHGVPKKIVSDRGSQFTSKFWKKLQEEMGSKLNFSTAYHPQTDGQTERVNQILEDMLRACALDFGGSWDKNLPYAEFSYNNSYQASLQMAPYEALYGRKCRTPLLWDQMGERQVFGTDILREAEEKVKIIQERLRVAQSRHKSYADNRRRDISFEEGDHVYLRVTPLRGVHRFHTKGKLAPRFVGPYKIVSRRGEVACQLELPQSLAGVHNVFYVSQLKKCLRVPTEEANLEQIEVQEDLTYVEKPIRILEIDERRTRNRVIRFCKVQWSNHSEEESTWEREDELKSAHPHLFASSSESRGRDSV

SEQ ID NO: 127041 - protein, 74 aa, Oryza sativa
  Clone ID: PAT_MRT4530_29530C.1.pep
QASSSPITYSTASRIRRSKPAASSAGAGGRSGGSVLVRRRGDVIGGLFPCGDGGAIPSGGFPSSSESGFVDPPG

SEQ ID NO: 127042 - protein, 95 aa, Oryza sativa
  Clone ID: PAT_MRT4530_29531C.1.pep
ISVIGSLLSALPCRGGKGHSGHLPWDGHHKTACSPTLARGHRWYARRAEVPIGSASLRRVLSCGRQHIQTSSVTRPVTRGGRSCGTSVSHLSISN

SEQ ID NO: 127043 - protein, 183 aa, Oryza sativa
  unsure (1)..(183): unsure at all Xaa locations
  Clone ID: PAT_MRT4530_29532C.1.pep
MVYGRSERRCLMMMKTSSREVATKRMRRKSASAPFNCSLPYYLIGPEIDPSTTIHNEQLEGRRNERIYESGCRVVATSVLFTSKPQNTFSDLGSKMKNHKEERLXGRRGLPSTSLGGTTRRGLGRIADPRANHGSVRSLLKRLPDRIMTGPAVPYKYSTAWSQSDRHPPLRLVRTIVMNEDII

SEQ ID NO: 127044 - protein, 789 aa, Oryza sativa
  Clone ID: PAT_MRT4530_29533C.1.pep
EDEDDDVEHEDIMMAWRSLSLVAFMAAVAAAAAAAGDDRRPYVVRMDVSAMPAPFATHDGWYRSVLSSASARDAAAAPAAEHLYTYSHAMNGFSAVLTARQVEEIRRADGHVAVFPETYARLHTTRTPAFLGLSAGAGAWPASRYGADVVVGIVDTGVWPESASFSDAGVAAPVPARWKGACEAGASFRPSMCNRKLVGARSFSKGLRQRGLNISDDDYDSPRDYYGHGSHTSSTAAGAAVPGASYFGYANGTATGVAPMARVAMYKAVFSADTLESASTDVLAAMDQAIADGVDVMSLSLGFPESPYDTNVVAIGAFAAVRRGILVTCSAGNDGSDSYTVLNGAPWITTVGASTIDRAFTATVTLGAGAGGARSIVGRSVYPGRVPAGAAALYYGRGNRTKERCESGSLSRKDVRGKYVFCNAGEGGIHEQMYQVQSNGGRGVIAASNMKEIMDPSDYVTPVVLVTPSDGAAIQRYATAAAAPRASVRFAGTELGVKPAPAVAYFSSRGPSPVSPAILKPDVVAPGVDILAAWVPNKEVMELDGGETKLYTNYMLVSGTSMASPHVAGVAALLRSAHPDWSPAAVRSAMMTTAYVKDNADDADLVSMPGGSPGTPLDYGSGHVSPNQATDPGLVYDITADDYVAFLCGELRYTSRQVAAIAGHRAGCPAGAGAASHRDLNYPSFMVILNKTNSATRTFTRTLTNVAGSPAKYAVSVTAPAGMAVKVTPATLSFAGKGSTQGFSVTVQVSQVKRSRDGDNYIGNYGFLSWNEVGGQHVVRSPIVSAFAQ

SEQ ID NO: 127045 - protein, 139 aa, Oryza sativa
  unsure (1)..(139): unsure at all Xaa locations
  Clone ID: PAT_MRT4530_29534C.1.pep
EGEEGAGRRRRVRLTYLTRDYHRRAREPPPPILDAICGGRSLELSPSPSSMPSVRXGSGAAAAVLDPRREVSGAAASAATVLFAVAPDGGKDGEMKLTYGMGTETAXERRRKKGGEWHSSNFRNFQWHIANMTNNIGIF

SEQ ID NO: 127046 - protein, 96 aa, Oryza sativa
  Clone ID: PAT_MRT4530_29535C.1.pep
RTDAGAADTGTGAGGEDDGAMDGRDGVARNEGNLCSDGAPAPRPDPLPLCALLIGRVAACQCNAQLLPRVSSPRVCAPVGAPQPRWGRGWGKDCPR

SEQ ID NO: 127047 - protein, 46 aa, Oryza sativa
  Clone ID: PAT_MRT4530_29536C.1.pep
DALKFLHKIQKQLLAFIFEMEYQCHSSKDQRVASMKNTSTSEPKAG

SEQ ID NO: 127048 - protein, 39 aa, Oryza sativa
  Clone ID: PAT_MRT4530_29537C.1.pep
MGPESSELPYGSMKFWAAHRITNNEKFTRSAPLVQQLFA

SEQ ID NO: 127049 - protein, 140 aa, Oryza sativa
  Clone ID: PAT_MRT4530_29538C.1.pep
RWSPAGRGRATQLGVECDQLLSSSPSWRASPTASSPPRRGPGGRAAPRREGPRSASPPPPPHTPRAAPPPPHRSAAARNCGRWPWFGRGNPRPPPPSSRPRPHAPPPPRWRRTAGPRGRRTPPRHQRTQGPPGAPPRLPW

SEQ ID NO: 127050 - protein, 200 aa, Oryza sativa
  Clone ID: PAT_MRT4530_29539C.1.pep
MEMGIFSQRLVTLDSIDIFTTHEWFPSKPTVYFLCNGEDKVYLPDVKDANNIYTFKGEESWQPLTELPEKKCKRCGLYEEDTFKHDLYDEWELCSSDFKKGKYTHFKEGQFNATFLCPNCTASAGDSANHDSSSEVETKKSSVTVIIIVSVLSSVLVIIALFGGYKYWLKKKRERDQLRFLKLFEEGDDIEDELGLGNEL

SEQ ID NO: 127051 - protein, 186 aa, Oryza sativa
  unsure (1)..(186): unsure at all Xaa locations
  Clone ID: PAT_MRT4530_2953C.1.pep
VNPEATEAVAGPAPLHHAHPCRPRRRRRRARERVAGDGNRRRRRRRKRRREGGCAKRRRGWPARRKTMANNDGKPREDDVGGRTSFGVPRVRGNEGSGDEPRRRRGGRGGSRPREPDGGDGXRAGVVDVARRRRRRGRGGGCGRGGASESGGRWGKDPTGGPHLSATSERRAAGXGLAGPRPFSCA

SEQ ID NO: 127052 - protein, 126 aa, Oryza sativa
  Clone ID: PAT_MRT4530_29540C.1.pep
LRTLPDGTFVAKGTRVTYHAYAMGRMESLWGPDCAVFRPERWLSGGRFVPESPYRYPVFQGGVRVCIGKDLAIMEMKAVIVAVVLSFDVEAVDRSSRRPKFAPGLTATFAGGVPVRVRRRAHCAPS

SEQ ID NO: 127053 - protein, 43 aa, Oryza sativa
  Clone ID: PAT_MRT4530_29541C.1.pep
VIDRYSYVLYSQARDVAHHSFLSPVVQINVLNLINSSQEHYII

SEQ ID NO: 127054 - protein, 144 aa, Oryza sativa
  Clone ID: PAT_MRT4530_29542C.1.pep
MVGCEHMVLKVVFMTIKDRFASYRCETLTIEKWREVCGGRWGVHASGYIYRGGDYDPGMVHCEIPTHPHHQICRRAFPPSCLTTARSVAAAREECSRRRIRVGDGQQMMAAIRSAPSHASSTLPRCPAAIATVAVGVGRSGGVG

SEQ ID NO: 127055 - protein, 49 aa, Oryza sativa
  Clone ID: PAT_MRT4530_29543C.1.pep
VYSWKLPTMATRSQQISTVNFTTSNICAALKPSAINWVPPVDMAPALHQ

SEQ ID NO: 127056 - protein, 58 aa, Oryza sativa
  Clone ID: PAT_MRT4530_29544C.1.pep
PACRATPARAPPHRNLSSRRLRHCRRRRPSSRSSWLTRSTTISCPALNSLANAQKTMT

SEQ ID NO: 127057 - protein, 116 aa, Oryza sativa
  unsure (1)..(116): unsure at all Xaa locations
  Clone ID: PAT_MRT4530_29545C.1.pep
RLARAXXGALXAAAXRALAQRRAAHATCRHFRSIFAFGKLVKKTSLFSIILIGEKNVFLARGTPLWFAWLRRVPTVFVWPGGLIDSPPCLTAFTMIAGKENYLDDFAWTRGKECRH

SEQ ID NO: 127058 - protein, 48 aa, Oryza sativa
  Clone ID: PAT_MRT4530_29546C.1.pep
MAWVDGNGDAIHGNTLDTEGDDELSTRIELVPGIEDACGLWRKLCFWS

SEQ ID NO: 127059 - protein, 39 aa, Oryza sativa
  Clone ID: PAT_MRT4530_29547C.1.pep
GGIGRITTPPYLATRVSGPSSLIVFLCTLHGGAMSPSSV

SEQ ID NO: 127060 - protein, 46 aa, Oryza sativa
  Clone ID: PAT_MRT4530_29548C.1.pep
RMRIYMDCCTISYSMSTTEVIPHHMNRQGLRHRLLKCMYLQVIRSH

SEQ ID NO: 127061 - protein, 1141 aa, Oryza sativa
  Clone ID: PAT_MRT4530_29549C.1.pep
MDEPSPRGGGCAGEPPRIRRLEESVVNRIAAGEVIQRPSSAVKELIENSLDAGASSVSVAVKDGGLKLIQVSDDGHGIRFEDLAILCERHTTSKLSAYEDLQTIKSMGFRGEALASMTYVGHVTVTTITEGQLHGYRVSYRDGVMENEPKPCAAVKGTQVMVENLFYNMVARKKTLQNSNDDYPKIVDFISRFAVHHINVTFSCRKHGANRADVHSASTSSRLDAIRSVYGASVVRDLIEIKVSYEDAADSIFKMDGYISNANYVAKKITMILFINDRLVDCTALKRAIEFVYSATLPQASKPFIYMSIHLPSEHVDVNIHPTKKEVSLLNQERIIETIRNAIEEKLMNSNTTRIFQTQINFIFIIKNIYKCIFHDDANFVPINAAPCTLQALNLSGIAQANPQKDKVSEASMGSGTKSQKIPVSQMVRTDPRNPSGRLHTYWHGQSSNLEKKFDLVSVRNVVRSRRNQKDAGDLSSRHELLVEIDSSFHPGLLDIVKNCTYVGLADEAFALIQHNTRLYLVNVVNISKELMYQQALCRFGNFNAIQLSEPAPLQELLVMALKDDELMSDEKDDEKLEIAEVNTEILKENAEMINEYFSIHIDQDGKLTRLPVVLDQYTPDMDRLPEFVLALGNDVTWDDEKECFRTVASAVGNFYALHPPILPNPSGNGIHLYKKNRDSMADEHAENDLISDENDVDQELLAEAEAAWAQREWTIQHVLFPSMRLFLKPPKSMATDGTFVQVASLEKLYKIFERSLQKSKRKANTPTNFLESLQTTPDQNPSPQTRPSVASAAGDDGEAAPRPLRLALLLGILLSLAVPLRLLGLRLLPVALPLPLLLVVVVPFTEPLPTRCQGQSCECTLPLSVWGCFRFGFLFCAIDGAVKKASPAPESVVLHIDHLSRNVNEAHLKEIFGNFGEVVNVELSMDRMVNLPRGYGYIEFKKRTDAEKALLYMDGGQIDGNVVKLRFTLAPRQRASSPMKAPPPPPKRDVPHNEKGAPSAEKDVQQRRELLHLGGFVEAHHHADAPLGPLDGGHHHHPQGGQEALLEEGYHLHVVIAVLPRLVVPLIHVPDQFLLERIVEEEASLATAGAAAHLPRGAGRTPDIAFLAEDYRTRKRLCSEGEVGNSPPAHAKLSGTFSND

SEQ ID NO: 127062 - protein, 40 aa, Oryza sativa
  Clone ID: PAT_MRT4530_2954C.1.pep
HIFYVYARLVLVVHQSDDKYGLIRGENGLCPPPSRSADMA

SEQ ID NO: 127063 - protein, 113 aa, Oryza sativa
  Clone ID: PAT_MRT4530_29550C.1.pep
CFRTVASAVGNFYALHPPILPNPSGNGIHLYKKNRDSMADEHAENDLISDENDVDQELLAEAEAAWAQREWTIQHVLFPSMRLFLKPPKSMATDGTFVQVASLEKLYKIFERC

SEQ ID NO: 127064 - protein, 93 aa, Oryza sativa
  unsure (1)..(93): unsure at all Xaa locations
  Clone ID: PAT_MRT4530_29551C.1.pep
SPPLGFFKKPGPGGCPSFSFKAHANPLGGPLAGKNPIFRPPPVGVVANASPLSGGQARTLXNNRGEGPGALPPRYHPQPPLGFSNGAGNGAPE

SEQ ID NO: 127065 - protein, 132 aa, Oryza sativa
  Clone ID: PAT_MRT4530_29552C.1.pep
MATAGASRWEDEIMESDIELEGEAVEPDNDPPQKMGDGAVEVSYEKRDQAQLCKNKGVDAFSEGKLDEAIEHLTEAIVLNPTSAIAYATRAVIFVKSKKPNAAIRDADAALKINPDSAKGYKSRGMAKAMLG

SEQ ID NO: 127066 - protein, 499 aa, Oryza sativa
  unsure (1)..(499): unsure at all Xaa locations
  Clone ID: PAT_MRT4530_29553C.1.pep
MHVSKYSKRDRVKIFAKELNMPFVNFAQNSTSPTFSKQVPAHRSPPPPETMAKPRRGRSASRSSSGSSSRSPSRSASSGSGSSRSRSRSRSFSSSSSPSRSRSPPAAKASSPGARRGRSPSSPAKRGSPSKKGRSPSPPPPKKASPPRKASPAPESVVLHIDHLSRNVNEAHLKEIFGNFGEVVNVELSMDRMVNLPRGYGYIEFKKRTDAEKALLYMDGGQIDGNVVKLRFTLAPRQRASSPMKAPPPPPKRDVPHNEKGAPSAEKDVQQRREPSPRRKPASPPRKRTPSNRRIESPRRQPDPSPRRRPDSPPIRRRADASPVRRGDTPPRRRPGSPVRRRSPSPPPRRRRSPMRPSPRRLRGSPSPRRRSPGPIRRRXTPPPPPRRPRSPPGRRLPPPRRHSRSPPPRRPPHSRSRSISPRTRRGPPLRRGRSDSSYSRSPSPPRKGPRRVSRSRTXQGIVEEEASLATAGAAAHLPRGAGRTPDIAFLAGKTSFVS

SEQ ID NO: 127067 - protein, 86 aa, Oryza sativa
  unsure (1)..(86): unsure at all Xaa locations
  Clone ID: PAT_MRT4530_29554C.1.pep
RDHTRSSTTQIAFSDNSSVLKQSNYTFSDIALLAIAACTTTAQVDVFIFFTQQXMVQPLLLLQQQVLSPYNEFVMQQYIIEPITFL

SEQ ID NO: 127068 - protein, 122 aa, Oryza sativa
  Clone ID: PAT_MRT4530_29555C.1.pep
MATAGASSFEDEIMESDIELEGEAVEPDNDPPQKMGDPSVEVSDEKRDQAQLCKNKGVDAFSEDAALKINPDSAKGYKSRGMAKAMLGKWEEAAQDLRMAAKLDYDEEIGAELKRGEPMYSK

SEQ ID NO: 127069 - protein, 80 aa, Oryza sativa
  Clone ID: PAT_MRT4530_29556C.1.pep
DTRLQNALDYACGSCADCSAIQRGAQCFDPDTKVAHATYAFNDYYQTTGRASGSCDFNGAATIVTQQPKIGNCVLSPNNS

SEQ ID NO: 127070 - protein, 981 aa, Oryza sativa
  Clone ID: PAT_MRT4530_29557C.1.pep
MIVANNLTKHICAKTNASMHMERDFLGAIGKDEEQRRHAEERKESDYFGAGGGAAAAAMDWSFASRAALMSFRSSSSAAAAAAREETRELAFPHFSALDGAKMQQASHVLARQKSFGAESHGIPQYAAAAAVHGAHRGQPPHVLNGARVIPASSPFNPNNPMFRVQSSPNLPNAVGAGGGAFKQPPFAMGNAVAGSTVGVYGTRDMPKAKAAQLTIFYAGSVNVFNNVSPEKAQELMFLASRGSLPSAPTTVARMPEAHVFPPAKVTVPEVSPTKPMMLQKPQLVSSPVPAISKPISVVSQATSLPRSASSSNVDSNVTKSSGPLVVPPTSLPPPAQPETLATTTAAAIMPRAVPQARKASLARFLEKRKERVTTVAPYPLAKSPLESSDTMGSANDNNDWVLLTRVAFTALTAGVRLQDKAGAVAREVGGATVARAAAREAGEAAAESPRESRSSEEVVATAAGAAAGGQSGGGEPPGVEVVGGGRGRAEQRRPWGLVRGRRSGGGLGEQRVGAGVEAALGTGAGAEADLGRGHRRGDLGGRRVGAGVAASLLSGNAPCCLAPKPDDASISQSDMIIGFASRNKTELLCFSLHEDDGLVELLWCNGHVIMQSQAPWKPPRPERTATTAAKAVDMATAGASSFEDEIMESDIELEGEAVEPDNDPPQKMGDPSVEVSDEKRDQAQLCKNKGVDAFSEGKVYLPVLIEISHYNKMNCVILCNKHFSISGKLDEAIEHLTEAIVLNPTSAIAYATRAVIFVKSKKPNAAIRDADAALKINPDSAKGYKSRGMAKAMLGKWEEAAQDLRMAAKLDYDEEIGAELKKVEPNVLKIEEHRKKYERLRKERDIKKAEMEKQRKHAEEVSAASAALKDGDVIAIHSSSELDTKLKAASSLSRLVVLYFTAAWCGPCRFIGPVCKSLAEKHRNVVFLKVDIDELNSVAYRWNVSSVPSFFFVRNGKEIDKVVGADKNGLERKVAQHGSS

SEQ ID NO: 127071 - protein, 584 aa, Oryza sativa
  Clone ID: PAT_MRT4530_29558C.1.pep
MALALAHLILAAALPLLFLSRADGGEVGVCYGRDGNNLIDPPSVVSLLKAKGITMVRIYDADPTVLNALANQNIKVMVAMSNRDLVAGSAKDFNSALSWVKNYVLPYYRSSQINGVAVGNEVFQQAPDLTSQLVSAMRNVQAALARLGLADAIKVSTPISFDSVKVSFPPSAGVFQDNIAQSVMSPMIDFLQQTNSYLMVNFYPYIAWANSNGQISRDYAVFGPNASPVVDQASGITYHSLFDAQLDAVYFAIDHVSGGSVRVSMAQARRGRPSPRIPVKCSECGHPSGGRLPQLSTLDDVQVDVATKANAQAFNNGLISRALFGATGMPDVSVYIFALFNENLKGGASVEQNFGLFYPDGTEVYQVDFHNGGGGNVCPTKASWCVANSAVGSTRLQAALDWACSNGADCGAIQPGKTCFAPNTLVAHASYAFNDYYQRKSQASGTCDFSGAAFIVYKPSPSICDPNPSWCIAKPEVGDTRLQNALDYACGSCADCSAIQRGAQCFDPDTKVAHATYAFNDYYQTTGRASGSCDFNGAATIVTQQPINGFHRCSFNHILQRLETAYSHQTTLECTEDSAVRGWD

SEQ ID NO: 127072 - protein, 454 aa, Oryza sativa
  Clone ID: PAT_MRT4530_29559C.1.pep
MALPTPRLVVPIDVSKKPWEQKVPLHNRWHPDIPPVADVTEGELFRVEMVDWTGGRVSDDNSADDIKFLDLTITHYLSGPLRIVDAEGVPAAPGDLLAVEICNLGPLPGDEWGYTAIFERENGGGFLTDHFPSARKAIWYFEGIYAYSPQIPGVRFPGLTHPGIVGTAPSAELLNIWNEREKILAETNHESIKICEVLHQRPLANLPTPENCLLGKIQEGTADWQKIANEAARTIPGRENGGNCDIKNLSRGSKVYLPVFVDGANLSTGDMHFSQGDGEVSFCGAIEMSGFLELKCEIIRGGMKEYLTPIGPTPLHVNPIFDIGPVEPRFSDWLVFEGISVDESGKQHFLDASVAYKRAVLNAIEYLSRFGYSKEQVYLLLSCCPCEGRISGIVDSPNAVATLAIPTAIFDQDVKPKRLSGKQGPKLRRLPDVLRCSSDGHLPVTQDPSGTKAP

SEQ ID NO: 127073 - protein, 901 aa, Oryza sativa
  unsure (1)..(901): unsure at all Xaa locations
  Clone ID: PAT_MRT4530_2955C.1.pep
MSTSTSPSTAPSAEYAEHISNLVAIPSLSHERHYFLGLIGNLDPTDFIIGETNRIPFKLANPNLGHWKSTFKSWPSLEKTSPEKSXITWYKRVLASKQTHWDEIGIGEALALTTANSAKDEHLMAAATYFXSNTINAFLFNQGPMTPTLIDITMITGLDVSSSANPMNLNTKNQYDFRTKSIGGWSSYVAAYMGQGSITPREHVAFLLMXLEKFLFCGSSCGPATNWQFAAEALESKREFPLGKILLGYLYQMLNNASAKIDVGSAVGAGGPWXLLKSWLNLMVMKVVNRLSMTEAVFPRLEPIVEDDEEERTHRRCMSYGEYASTPADAGAKLLAELLKDWFCSFYEDFQNDARVWFPYEDSMHLDLPSDFRFEDINHEKFQKSREVFSAAISPCILPIGIHQGRNIQVSYEFYHPMSSARQLGMGQLPIGLFFADKIQCREEISSTLMMDQLLNLQGPPLGSIENIELARFRSRNFDRXWGEWKLHLFHQPASMYMTDLFLDVIPETTESSPPHQSNSGKDIKYAPSLIPNGGGPSPPVIGYHAPKTSTLLQGLIRELADAGKKRKTRASFVDTSTLAPKKKTKSKKTKSTDDLSALDPSIEQALDEREIKEDVDEAAAEVSDTERTPSASPKQIPLTPSAPAHFSRKKRIAVKKKSATTTLKPAPPPPAPPSSPVQQSPSNQTPSATGSHYVEEEEQPAAPAIQVLADLFSFDIKDYFDEVEEETTSKALAPLDDXIKKTLEDDLANTITLAVFLEQHQFELEKAKQHIDDRRERMNIEVTIQSNRQLMHEEKAKLDQLSVGPIQLNIDWLEARKINLIAQLEECNAELDHEKQKLANLPSAVEEQKSRLRSAIKNVADTTKSLKIIPGTNAQDIQAIEEIDQIRQRALSAIQRYLSQ

SEQ ID NO: 127074 - protein, 48 aa, Oryza sativa
  unsure (1)..(48): unsure at all Xaa locations
  Clone ID: PAT_MRT4530_29560C.1.pep
RYXCVLTSRQMFGPXFEYIFKFFICCRSSXGEGCHTLIXSYLLHINAD

SEQ ID NO: 127075 - protein, 100 aa, Oryza sativa
  Clone ID: PAT_MRT4530_29561C.1.pep
MDAATRIVPTEEIMHPTSGHGIADGKPSSNDRFYAPPHLRRLLRQQQQMQGQPPSSPSPATHKEAEDGRVEAGVSPSKPSVSAPPAEVVTAPVMSAHREI

SEQ ID NO: 127076 - protein, 86 aa, Oryza sativa
  unsure (1)..(86): unsure at all Xaa locations
  Clone ID: PAT_MRT4530_29562C.1.pep
TIWLFFLVLTSIGFRRQKKKRGVRENKFQGLPWLCHKXSSGGVEGGCITQGNTRVSPPHQAGEKPSGXSHKVEWWISQILITQXGS

SEQ ID NO: 127077 - protein, 54 aa, Oryza sativa
  Clone ID: PAT_MRT4530_29563C.1.pep
ARAPRARGFFLDFYFFRDFSFSHAKIMIFADLLAHRSRPTACEMAIRVLCKMVF

SEQ ID NO: 127078 - protein, 52 aa, Oryza sativa
  Clone ID: PAT_MRT4530_29564C.1.pep
VNASHRIYSGWFTFILYIKVDVSPYEYFNIDRGADSLCIITPVQENSITTLS

SEQ ID NO: 127079 - protein, 142 aa, Oryza sativa
  Clone ID: PAT_MRT4530_29565C.1.pep
AACPVAVAPFSSQRAPPLRSVGRNHPMSSPAAGRPWPPDELLSRVRPAAASRRAPPPRLARRALPTSSSPTPAAAARADGRREAPPPARSAAAAPAAQDPPAFSPSAHLPPTPPPLAVTPPPRRQRHRRRRLLLWQCGGLLL

SEQ ID NO: 127080 - protein, 81 aa, Oryza sativa
  Clone ID: PAT_MRT4530_29566C.1.pep
MAGTGGRTGEPEATGVEAASAPERSESSRCMPFEDCVAGIKWSLKKFLIRANGSYGSRIGITDCCEEIRYKDEITELLIHE

SEQ ID NO: 127081 - protein, 389 aa, Oryza sativa
  unsure (1)..(389): unsure at all Xaa locations
  Clone ID: PAT_MRT4530_29567C.1.pep
MGTCGQPNKLVLHTATGVGVDGGGVGGGEEESLPGVAASVAGGRKEKRRGDPGQQGRRRRYAPAAGVRVGNREGAPPSWGKXXXXAPRXRGGAAARAGAGPGPAARAXPAPAPXAGRPRPRPAAXGAXPRRAPRRPGRAPRRARARGPAAAPAGPAAPARGRPARPRPARPPPRPXPPRRGARAPARPGAAXGXAGXPXAAXXXPRAPARGAAXRRAPPPSSRLPHIAAPAPIAAPPLPSPEKERVDSMKNPAHGGEGARGRRTAARGRESARTPRRRCGADASRLPSARAAAAGVGEELVGRARRARRGGGARRDAAAGRTRERSSSGGHGRPAAGELIGWLRPTERRGGARWDEKGATATGHAAQEPRLPPRVRLRERDRRDMGRRR

SEQ ID NO: 127082 - protein, 77 aa, Oryza sativa
  Clone ID: PAT_MRT4530_29568C.1.pep
MSDKYVNIGISLTSTSSFMEAMPTFTNARRQREAEAEELRNGDATAVAEGGGGGGGGAMVTGMTMAMALGGGGGVRG

SEQ ID NO: 127083 - protein, 682 aa, Oryza sativa
  Clone ID: PAT_MRT4530_29569C.1.pep
MAGGDRERDVEEETRNQMMQNLFGDQSEDEEDDDEAVEVVDEDDHPHPQQQQLLRHQVVDDDDDEDDVRSEGHARSGYHSEEVEGEADNGGEGEAEGEGESEGQVGMEEESEAEAHQADLDQGESDGEKVQSSPEREFSDRVMQNDAAGMDSEDGGYQQWPVASGRRGVVASESEGSEDDYYAGRGHEDEEPHQTRKTPSSPVEEERDHEVVRDVFGESDEDGPAPYRDQHEIDEDSHSYHMMLNYVTNLLMQRSPMEDEGHYEKDLQPEDVVADEDMRYESDENRELKPKEKPVGPPLNLVVPLKQPPAQPDRMNVIKVSNIMGIDPKPFDPKTYVEEDVFVTDESGTKKRIRLEDNIVRWRTVKNANGTTSCESNARIVKWKDGTMQLLIGNEVLDISVHEAHHDQSHLFLRNGKGVLQSQGRLLRKMRFMPSSLSSKSHRLLTALVDSQNKKTVKMQKWIESKDPEKVKQEKERALGQNIRAHSILQRKKEKVSRKYTQPARQRRQLSPGFLEDALDEDEEPDHQYGSRRMPARSRFEDELEAEALAERRIVSAKKSSMGRNIPRKPSFPARPPRRQANEYSESEREESEYETEGEDIEHSPTQGREDELDEEDEYEEDVEEEAAMSDEEIEEPKRRRESGGGSASQRRKEIDSDDDSPPRKQQAVHRRKAVVFDSDDE

SEQ ID NO: 127084 - protein, 213 aa, Oryza sativa
  Clone ID: PAT_MRT4530_2956C.1.pep
RTEQHRSVRLHQCSTIQKFHRNLPKHSKIHRNLHQQFTVKNFHSPKHSSNTEINKNLKSSSRRCPRRRRRRRGIRSLQSSRRWIRPPPLLGRSDPAGPEPAAVVATTAGGGGGGSGRRRARCWTRRPRRRRHRDTPPSPPDPSPRPSSSPSPLDASPTTGSNPTLSPAARDSPRRWIHRRDTSFAAAEPCRMRRPPPDPTPPRRPRPKTPCAA

SEQ ID NO: 127085 - protein, 730 aa, Oryza sativa
  Clone ID: PAT_MRT4530_29570C.1.pep
DRPRRRSSPRAGPVRSVAVRCSELAQPAAMAGGDRERDVEEETRNQMMQNLFGDQSEEEEEDDDEAVDFVDEDDHPHPHQQQQQLRHQVVDDDDDDDAHARSGYHSEEVEGEADNGGEGEAEGEGESEGQVGMEEESEAEAHRADLDQGESDGEKVQSSPGELSDRVMQNDAAGMDSEDEAYQQRPVASRRRGVVASESEGSEDDYYAGRAHEDEEPRQTRKASSSPVEEERDQEVVRDVFGESDEDEPAPYRDQQEIDEDSHSYHLMLNYVTNLLMQRSPMEDEGHYEKDLQPDDVVADEDMRYESDENRELKPKEKPVGPPLNLVVPLKQPPAQPERMNVIKVSNIMGIDPKPFDPKTYVEEDVFVTDESGTKKRIRLEDNIVRWRTVKNANGTTSCESNARIVKWKDGTMQLLIGNEVLDISVHEAHHDQSHLFLRNGKGVLQSQGRLLRKMRFMPSSLSSKSHRLLTALVDSQNKKTVKMQKWIESKDPERVKQEKERALGQNIRAHSILQRKREKVSRKYTQPARQRRQLSPGFLEDALDEMHMFNSCFCSCKMCCNDLQLVLLDEEPDHQYGSRRMPARSRFGDELEAEALAERRIVSAKKSSMGRNIPRKPSFPARPPRRQENEYSESEREESEYETEGEDIEHSPTQGREDELDEEDEYEEDVEEEAAMSDEEIEEPKRRRESGGASASQRRKEIDSDDDSPPRKQQAVHRRKAVVFDSDDE

SEQ ID NO: 127086 - protein, 44 aa, Oryza sativa
  Clone ID: PAT_MRT4530_29571C.1.pep
LQEFGTRQKSLKGDQCGISGSEYLTTTRPAATGQCYSEEPSICH

SEQ ID NO: 127087 - protein, 100 aa, Oryza sativa
  unsure (1)..(100): unsure at all Xaa locations
  Clone ID: PAT_MRT4530_29572C.1.pep
HRTCPSLPRLCPPRRSPLPNPPLPPRPPSPSPPXPPDPSPPRRLPPTTSGPPDPPPVAQVAVAPLAAVPRALSLLPLRSTATSFARAPPCRRIRLPSALP

SEQ ID NO: 127088 - protein, 41 aa, Oryza sativa
  Clone ID: PAT_MRT4530_29573C.1.pep
KKKKKNKKKKKKKKKKKKNKKKNKKKKKKKKLKKKKRGGQF

SEQ ID NO: 127089 - protein, 602 aa, Oryza sativa
  Clone ID: PAT_MRT4530_29574C.1.pep
MVGTASSAMEAAAARVESTAAAVTEETAAAMAMRVAPSFFHGADSSLCRKHFILKVENLKVVNSQQIQISVEDCTDVKMSRLSITAPETAPNTDGIHITRSRDVQVTDCTIKTGDDCMSIEDGTKNLHVKNMVCGPGHGISIGSLGDHNSEAHVNNVTVDNVRLYGTTNGARIKTWQGGKGSAKNIVFQNMVMDNVWNPIIIDQNYCDSSTPCKQQKSAVEVSNLLFKNIRGTSASEEAIVLHCSNSVPCHGITLENVNLTVKGGSSNAKSTCQNAEWKKSVIKLSNRSTEKFSDALQLGGTKVGADKFVHAKVNMNASSLTNGDDSLRGKSSLESKKAVFDALSKAWAAACSSLQPSIVLVPKGKRYLTKHITLSGPCKSSITFMIEGTLVAPPKRSDWSKETIRHWIMFNGVIGLTVAGGCTIKTGDDCMSIEDGTENLHVKNMVCGPGHGISIGSLGDHNSEAHVNNVTIGTVRLYGTTNGARIKTWQGGRGYAKYIVFQNMIMENVWNPVIIDQNYCDSATPCKKQTSAVQISNVVFKNIRGTSASKEAIKLDCSRNVPCQGITLNDVKLTVKGGGDWLDPRKMTETASDLMQQLQYR

SEQ ID NO: 127090 - protein, 393 aa, Oryza sativa
  Clone ID: PAT_MRT4530_29575C.1.pep
MASTVLIVSASLLALFFFLHSADADVGSNVFSIQSYGAHGDGRHDDTKALGDTWAAACSSAKPAVLLIPKGKKYLIKHTTLSGPCKSSISLMVKGSLVASPERSDWSKETIRHWILISGVTGLTVTGGGTIDGNGKIWWQNSCKTNSKLPCTEAPTALTFYSCKNLKVEYLKVVNSQQIQISVEDCTDVMVSRLSITAPETAPNTDGIHITRSRDVEVTDCMIKTGDDCMSIEDGTENLHVKNMVCGPGHGISIGSLGDHNSEAHVNNVTVDNVRLYGTANGARIKTWQGGKGSAKNIVFQNMVMDNVWNPIIIDQNYCDSSTPCKQQKSAVEVSNVLFKNIRGTSASEEAIMLHCSSSVPCHGITLENVNLTVKGGIDLKHEHPWTLEDVEK

SEQ ID NO: 127091 - protein, 452 aa, Oryza sativa
  Clone ID: PAT_MRT4530_29576C.1.pep
MACNVLIFSAYVVVMSFFLCSVHAKVNMNASFHLTSGDDSLRGRSLESKKVVFDVRKHGAYGDGQHDDTKALAKAWAAACSSSQPSIVLIPKGKRYLTKHITLSGPCKSSITFMIEGTLVAPPKRSDWSKETIRHWIMFNGVSGLTVAGGGTVDENGKIWWQNSCKTNAKLPCTEAPTALTFYSCSNLKVENLKLLNSQQIHMSVEDCTDVRISSLTITAPGTSPNTDGIHITRSKNVQVTGCIIKTGDDCMSIEDGTENLHVKNMVCGPGHGISIGSLGDHNSEAHVNNVTVDTVRLYGTTNGARIKTWQGGWGYAKNIVFQNMIMENVWNPIIIDQNYCDSATPCKEQTSAVQVSNVVFKNIRGTSASKEAIKLDCSRNVPCQGITLKDVKLTIKGGAQHGAGQRAGTSADPTRPSMPSWEKTPAAAMVQRRPAKESTVHQRQVQLLHQD

SEQ ID NO: 127092 - protein, 125 aa, Oryza sativa
  unsure (1)..(125): unsure at all Xaa locations
  Clone ID: PAT_MRT4530_29577C.1.pep
IQTATARIRRGDDGGHMPAREGGGNDDWREMVXDVETVGWHGAVVWVGSSXSSWVFCSDDVRVRSGVGDGNVLDVATFLEARFRRTIPKPISSSDFCLSCSGASDLSVDSLSSTFHRPPPPPLSA

SEQ ID NO: 127093 - protein, 69 aa, Oryza sativa
  Clone ID: PAT_MRT4530_29578C.1.pep
ETFTVTVSLAGQKNLQEVPTKFRWPIGNPDANFLPSVHLYNCFEIQLGLIRLQKDSIRAGNDKYSINLL

SEQ ID NO: 127094 - protein, 56 aa, Oryza sativa
  Clone ID: PAT_MRT4530_29579C.1.pep
MPPGYLPGGVYPVMVSGHDNLVSKALTIASDAEQVLHEKLVNEEERRTREAGLPFR

SEQ ID NO: 127095 - protein, 133 aa, Oryza sativa
  unsure (1)..(133): unsure at all Xaa locations
  Clone ID: PAT_MRT4530_2957C.1.pep
MARIGPNRSSGQGRRGWGTARHKASWPNDGARRRGHPRRRPATARGGEEGCSPRAATARLQRGSRRRAPRGGNGGPVAYHGREAADGDRDDRGAERAISVVPGGEXAVAGVRLGVADPREETAQSGVDRGGEA

SEQ ID NO: 127096 - protein, 623 aa, Oryza sativa
  Clone ID: PAT_MRT4530_29580C.1.pep
MDNHELASTSSPKRKPGRRPGRKPKPPPAPSPAAAPAPAAENGTHDPASGQKRKRGRKPKPPAAAAAAASSDGHHHPSSPLAAAVSASDSPDPASSPAPRGRGRKSRRGRPEPPSDAGAAPHAPPSPPRRGAKKGAAANAKKAAAEVPVVEPLRWEQVAKVMPSMDAVVKVFCVHTEPNFSLPWQRKRQYSSSSSGFIIGGHRVLTNAHSVEHYTQVKLKKRGSDTKYLATVLAIGTECDIAMLTVEDDEFWKGVSPLEFGSLPALQDAVTVVGYPIGGDTISVTSGVVSRIEILSYVHGSTELLGLQIDAAINSGNSGGPAFNDKGKCVGIAFQSLKHEDVENIGYVIPTPVINHFIQDYEKSGEYTGFPILGIEWQKMENPDLRKAMGMKSDQKGVRVRRVEPTAPESGCLQPSDIILSFDGIDIANDGTVPFRHGERIGFSYLISQKYTGEKAHVKILRNSKVLEFNIKLATHKRLIPAHIKGRPPSYYIVAGFVFMVVSVPYLRSEYGKDYEYDAPVKLLDKHLHAMAQSPDEQLVVVSQVLVADINIGYEEIVNIQVLSFNGKPVKNLKHLATMVEDCNEEYLKFDMDYDQVVCAIHIPFVPVALIQIVLVLTGAISV

SEQ ID NO: 127097 - protein, 151 aa, Oryza sativa
  Clone ID: PAT_MRT4530_29581C.1.pep
MSSSGGDGGGYDYSEDWVVNSRGMRLFTCAWIPKESSRGVVCLCHGYAVECSVTMRGTAERLARAGYAVHGIDYEGHGHSDGLQGYVPDLDALVRDCDSFFSTATASFPRRRFLLGESMGGAVALLLHRLRPDFWTGAILVAPMCKIAEEM

SEQ ID NO: 127098 - protein, 506 aa, Oryza sativa
  Clone ID: PAT_MRT4530_29582C.1.pep
MGKGTVVGTAVVVCAAAAAAVGVAVVVSRRRRSKREAEEERRRRAAAVIEEVEQRFSTPTALLRGIADAMVEEMERGLRADPHAPLKMLISYVDNLPTGDEHGLFYALDLGGTNFRVIRVQLGGREKRVVSQQYEEVAIPPHLMVGTSMELFDFIAAELESFVKTEGEDFHLPEGRQRELGFTFSFPVHQTSISSGTLIKWTKGFSINGTVGEDVVAELSRAMERQGLDMKVTALVNDTVGTLAGGRYVDNDVAAAVILGTGTNAAYVEHANAIPKWTGLLPRSGNMVINMEWGNFKSERLPRSDYDNALDFESLNPGEQIYEKMISGMYLGEIVRRILLKLAHDASLFGDVVPTKLEQRFILRTPDMSAMHHDTSHDLKHLGAKLKDILGVADTSLEARYITLHVCDLVAERGARLAAAGIYGILKKLGRDRVPSDGSQKQRTVIALDGGLYEHYKKFRTCLEATLADLLGEEAASSVVVKLANDGSGIGAALLAASHSQYASVE

SEQ ID NO: 127099 - protein, 66 aa, Oryza sativa
  Clone ID: PAT_MRT4530_29583C.1.pep
PSSFTADAPRLPAATAGEGGPPRPSPPRRILWRWGRTLRALRLLSLQVSQVLLLHLIKFFNFHAFS

SEQ ID NO: 127100 - protein, 292 aa, Oryza sativa
  Clone ID: PAT_MRT4530_29584C.1.pep
MAQEDVGHLSDAGLALGLSLGGGGGGTTDAAAAHRGGCRRPSPSSQCPPLEPSLTLSLPDDAAAGAAATATATASGGGGPAHSVSSLSVGAAAAAAVKRERAEEADGERVSSTAAGRDDDDDGSTRKKLRLTKEQSALLEDRFREHSTLNPKQKVALAKQLNLRPRQVEVWFQNRRARTKLKQTEVDCEFLKRCCETLTEENRRLQRELQELRALKFAPPPPSSAAHQPSPAPPAPFYMQLPAATLTICPSCERVGGPASAAKVVAADGTKAGPGRTTTHHFFNPFTHSAAC

SEQ ID NO: 127101 - protein, 495 aa, Oryza sativa
  Clone ID: PAT_MRT4530_29585C.1.pep
MAEVALFRGPTNLASPASRSSSSSSSSSLRYLATSDGDVLPRRSSSGSGSSLGSTGSLGIQERREEEGGESEEEEEEWSFLALLLALLRKSLLGCSAEDGGGGEGMEIGWPTDVQHVAHVTFDRFHGFLGLPVEFEPEVPRRAPSASASVFGVSTESMQCSYDSRGNSVPTILLMMQRRLYEQGGLRAEGIFRINAENSQEELVRDQLNGGIVPEGIDVHCLAGLIKAWFRELPSGVLDSIPPEQVMQCQSEEDCARVAKCLPPTEAALLDWAVNLMADVVQEEQINKMNARNIAMVFAPNMTQMADPLTALMYAVQVMNFLKMLIQKTLKDREESDLDDLSLPQKDPSDENGHQTTGLSLDSHPDEGSRRPSFVSEEPLLNSPVHSTEEKPNKTNLAEGKFADSSCPENVALTSMETEGSTSCSQPALAAAAAAPRATAMNLLQGKGSRSLNSRRTRKGKVQFGTRAAPASEKSKGASIVSRINSKVERIEAWR

SEQ ID NO: 127102 - protein, 59 aa, Oryza sativa
  Clone ID: PAT_MRT4530_29586C.1.pep
YSLAVGHRIVVVRRRQGQCFSHGQGRPDAAARLDVLCLWRRWLVVLEPARVRDARWCIL

SEQ ID NO: 127103 - protein, 48 aa, Oryza sativa
  Clone ID: PAT_MRT4530_29587C.1.pep
FDCVISSENSEYLFDITSIFYGNADTKGGSFCRNSRNRVGGSPKRRDG

SEQ ID NO: 127104 - protein, 42 aa, Oryza sativa
  Clone ID: PAT_MRT4530_29588C.1.pep
LLHPYLSVAHLPRYSNPPMASPPPLFRHKYSPIFLPSSLYST

SEQ ID NO: 127105 - protein, 163 aa, Oryza sativa
  Clone ID: PAT_MRT4530_29589C.1.pep
MNSGGGVRLRRVTRAGSGWWWLQQHPQGGALGTVLVSVGVGVRRQRASGIRRRFPIDGTGTAAERERDTERRGSREGDREGEAERVRSRPVAAPSSCRRAAYSPGAATSLPIALPLLPPVLSPVPSPPASSPGAAGQPPCPAAGWPPSPTALWRRRPPRGRRK

SEQ ID NO: 127106 - protein, 181 aa, Oryza sativa
  Clone ID: PAT_MRT4530_2958C.1.pep
YIAAAPMDGDPLGGEDGESAMRRGWRPPGRPLAPAGSPGRPSPAAREASPSRHGRAAPAAREASARAAPMAGGEDGESAGRRGWRPPGQPLAPAGSPGRPAPAAQEAIPRPDRCRCCCSAHALPMPPPVPPAPVPTVACGPCRHATRPPLPPLVSLGDGGSSTAAAASAAAEEAATGLAGR

SEQ ID NO: 127107 - protein, 1190 aa, Oryza sativa
  unsure (1)..(1190): unsure at all Xaa locations
  Clone ID: PAT_MRT4530_29590C.1.pep
QNNWSTLSRNPVFVENLPAEFIQTTDSRLRSRFPMCXHLFWFRDLRAAVVLVSWSNLDGGKKGLKPRLKLIVQNDEREWKSVFVSKAHPSNDQASKMAKRVYARLESDFNTKKRERCCKFDLHGPDAEFWDDFDSKMVDCIRNTLDRRVQFYEEEIRRLSEQRFTPIWNFCNFFILKESLAFMFEMTNLHEDSLREYDELELCYSESVNSPGKHREFGGLDTGDDQAALLNPGFKALTQIVQDDVFREFEFSQYIFACQAKLLFKLHRPIEVAARGYAFVVSFSKTLALQENGLPFCFREVWVITACMDLIKATTSHYDGTAVAIDSEREFCRIQGDLYSLCRIKFLRLAYLIGYGVEIEKSPVNSASLSMLPWPKPATWPSIPPDSSAETMAKEKASSFQHYFLTFNLLVMLHMILQAKSREKIFNIHRKPLPLEPSLLLREANRRRAFLSVGNISELYDSGDGSGLDANSKPSPNKSASNYMARTMSGPATSETSLPVDRPMRLSEIHVAAEHALKQTVSDPNFMTSLSSLEEFEKRYMELTKGAADNYHHSWWKRHGVVLDGEIAALFFKHENYDLAAKSYEKVCALYSAEGWEELLADVLPDLAECQKILNDEAGYLTSCVKLLSLESGLFSSKERQAFQSEVVRLAHSEMKHPVPLDVSSLITFAGNPAPPLELCDGDPGTLSVAVWSAFPDDITLESLSLRLSASSSADEGLKAIKSSDARVLVPGRNIITFDIPPQKPGSYVLGALTGQIGKLSFRSHGFSQDGPVDTDEFMSFEKPTRPVLKVRKPRALVDITPAVSSALLMNELQWIGLIVKPIDYSLKDGILHIDAGAGLKIEESQMIEIETYGSDVEHVGGTDASKTSSSSTDTRKVEKVPIEDGKIKIPDWASDVTTLVWFPVRAIDDTIARGASPASPQKQSIVDGMRMIALKLEFGVFLNQVFERTIAVHFTNPFHVSTRVVDKCYDGTLLLQVILHSEVKATLHVKDIWLDLQSGFEHTGKGDGRPTSNLFPLVIAPSSRAGILFVIRLSALGVRVKPDDSEELVFKIAVKMKRPVLDPCVAVGFLPFSSDCLRVGQLVNMRWRVERLKNPEHASLLADKILYQVDATPQTWMVGGRKCGHVSLSNKQGSRIEITVTCVPLVSGYVHPPQLGLPHVGEANMXNPAGPHLVCVLPPTLSTSYCIPA

SEQ ID NO: 127108 - protein, 60 aa, Oryza sativa
  Clone ID: PAT_MRT4530_29591C.1.pep
MAPWARSGATASTIVFCGNGARGQRLAAASVQRLMRCGHASQFDLATDKTCEHHINKPIG

SEQ ID NO: 127109 - protein, 121 aa, Oryza sativa
  Clone ID: PAT_MRT4530_29592C.1.pep
FLRLAYLIGYGVEIEKSPVNSASLSMLPWPKPATWPSIPPDSSAETMAKEKASSFQHYFLTFNLLVMLHMILQAKSREKIFNIHRKPLPLEPSLLLREVRTGCKFKTFAQQICFELHGQAN

SEQ ID NO: 127110 - protein, 599 aa, Oryza sativa
  Clone ID: PAT_MRT4530_29593C.1.pep
MDSTSNKMKKMEPTSGGRHGTPGQVVGLCAALVTAMAASLLCSTSMALTPDGQALLELKLSFNGSSQRLTTWKPTDPNPCGWEGISCSFPDLRVQSINLPYMQLGGIISPSIGKLDKLQRIALHQNSLHGPIPSEIKNCTELRAIYLRANYLQGGIPSEIGELIHLTILDLSSNLLRGTIPASIGSLTHLRFLNLSTNFFSGEIPNVGVLGTFKSSSFVGNLELCGLPIQKACRGTLGFPAVLPHSDPLSSAGKRFTNQQQQNIALPEWHCDWLNVNHGSCIDRGAKLVTYQWNLPYSSGEIIRRLELLDEEDVVGCGGFGTVYKMVMDDGTAFAVKRIDLNREGRDRTFEKELEILGSIRHINLVNLRGYCRLPTAKLLIYDFLELGSLDCYLHGDAQDDQPLNWNARMKIALGSARGLAYLHHDCSPVIVHRDIKASNILLDRSLEPRVSDFGLARLLVDNDAHVTTVVAGTFGYLAPEYLQNGHATEKSDVYSFGVLLLELVTGKRPTDACFLKKGLNIVGWLNTLTGEHRLEEIIDENCGDVEVEAVEAILDIAAMCTDADPGQRPSMSAVLKMLEEEILSPCMSELYYEQHLEL

SEQ ID NO: 127111 - protein, 130 aa, Oryza sativa
  Clone ID: PAT_MRT4530_29594C.1.pep
WTPCVAVGFLPFSSDCLRVGQLVNMRWRVERLKNPEDASLLADEILYQVDANPQNWMVAGRKCGHVSLSNKQGSRIEITVTCVPLVSGYVHPPQLGLPHVGEANISCNPAGPHLVCVLPPTLSTSYCIPA

SEQ ID NO: 127112 - protein, 133 aa, Oryza sativa
  Clone ID: PAT_MRT4530_29595C.1.pep
MIPAIYQLDELHNFIYMKAMTSSDPATGDFTIMLIHNPYMQLDHQTSNGIRSPSTTTSASPTASSMTASFYTITYHRVVHLIDINPDSSYVTGVIVQETLPMMFVDYDLGDNDVFIGRNYTACLSTKDYPGYS

SEQ ID NO: 127113 - protein, 211 aa, Oryza sativa
  Clone ID: PAT_MRT4530_29597C.1.pep
MTSSDPATGDFTIMLIHNPYMQLDHQTSNGIRSPSTTTSASPTASSMTASFYTITYHRVVHLIDINPDSSYVTGVIVQETLPMMYLIVYLARSPNHGDFIQIFRFTSSLETDQTDRFVDYDLGDNDVFIGRNYTACLSTKDYPGLMPNHIYFTDDDECSLQAFKGTPRDIGVYNYEDDTLSEVVSPQPWLKWPPPFWITPSFKDFPNTYRQ

SEQ ID NO: 127114 - protein, 940 aa, Oryza sativa
  Clone ID: PAT_MRT4530_29598C.1.pep
MAALREWSINVFGSVTQELKEIKAKVEELSIADPLLHNAEIRMLYARMDELLYREEIMWLQRSRVAWLKEGDRNTKFFHRQAAWRSKKNKITRLKAEDSRFVENKEEMEHMAREFFQTLYLKDNSVDPRELIDALTPRVDDGMNAGLCKPFSYDEIADALFQIGPLKAPGPDGFPARFFQRNWAVLKKEVTTAVRNFFLQGVMLAGVNDTSIVLIPKVSKPEQLKEFRPISLCNVIYKVVSKCMVNRLRPILKDIISVTQSAFIPERLITDNALIAFECIHHIQKETSAGKQFCAYKLDLAKAYDRVDWDFLRGALTKVGFCSTWVEWVMACVTTVKYSVSFNGNLLEPFSPSRGLRQGDPLSPYLFLFVADGLSTILSQDVQAGRLEELKVCRRAPGVSHLLFADDSLLFFRACPQQASVVRQALALYQRCTGQLLSSSKCSLLASAHCPTDVLEDIKIVLQVETSTFESKYLGLPTPEGRMSAERFKAIKERLVKRLNSWVEKFMSLGAKDTLIKSVAQAIPTYVLGLFRLPVSTCEAYTKLIRDFWWGDEENKRKIHWTAWDIITRPKGLGGLGFRDLKLFNQALLGKQAWRLIQFPGSLCARILKAKYFPNCELVDAVFPGDTSPTWKGIEYGLELLKKGLVWRICDGNKVKIWRDQWVQRESSFNLIGKKNRCRLRWVSQLIRQEDKSWNEDLIRHVCHPIDAAEILKIKLPQFPAEDFLAWHFGKSGVYTVRSGYRLAMKAQLGNDASSSSNSLNGERCIWRDFWKIPAPPKVKIFAWRLATNGLATQENRRKSKLVIDDTCRISGSEQENAFHAVVSCPKSVALRQEIGQTWNTPDDTLLRYDGPDWLLLLLLDKLSGEDRVKFLLVLWRSWHLRNDSLFGQGKASVRSSVLFLQSFWETLSQIKVGGAVDVKGKSPVGVHNKLICSIERYGF

SEQ ID NO: 127115 - protein, 311 aa, Oryza sativa
  Clone ID: PAT_MRT4530_29599C.1.pep
MARKMSSTLQVLVVSCCSLLLLCAPAASAGDYPPTAKGLSYGFYQRSCPKAETIGCDASVLLARTATEASELDAPPNETIRPSALMAVAQLRALLDDACSGAVVSCADILTLAARDSVRLVGGPEYRVPLGRRDGATIAARERVVAAFPPPSSNVTALLAAVAKIGLDAADLVALSGAHTLGVSRCISFDDRLFPQVDATMDARFAAHLRLSCPAKNTTNTTAIDVRTPNAFDNKYYVDLLSRQGLLTSDQVLFSDGRTRGLVGRFAVDQPEFFRRFAFSMVKMSQIQVMTGVQGEIRTNCSVRNAAGGGT

SEQ ID NO: 127116 - protein, 561 aa, Oryza sativa
  Clone ID: PAT_MRT4530_2959C.1.pep
KVRCNGLCCARGIVTTPFRAPGLEWYIPGLEIELCSRMPRYKPEYLFVQELRTMSFAIGFGTAPFYAQIPHDRHEEKCRVKVTLNSNSEDIPSVMFEAGGRNYIHACQEVARIAIGELRDRYSDQLADTEYRYHPRQPQGSDRGSYLETEGIENDATTRHMVEMLWAMDETRAETVLAAQDREDQNRGKICKLEGKVDRLEKELAALKGEAPPLKARVRLTARKRALFVPRYQLAPKVRVVEKEVTPAVADPPVIIMVLTRSNGNGPNNNNNNNNNGENPTLAQVLAQQAQLMNMMMQQLQNQQNQGNNQAPPQNKLVEFLRVRPPTFSSTTNPVEAGDWLHAIEKKLDLLQCTDQEKVSFASHQLHGPTSEWWDHFRLNRTTAEPITWLEFTAAFRKTHIPSGVVSLKKKEFRSLTQGSRSVTEYLHEFNRLARYAPEDVRNDEERQEKFLEGLNDELSCPLMTGDYPDFQKLVDKAIRQEDKYNRMEQKKRQIAQFKAQQGNSQRPRLTLGPQSMPQGGSSSVGRPQRQFFNNNAGNNIRNQASRPVAASTQQQPAKRE

SEQ ID NO: 127117 - protein, 452 aa, Oryza sativa
  unsure (1)..(452): unsure at all Xaa locations
  Clone ID: PAT_MRT4530_295C.1.pep
MRECISIHIGQAGIQVGNACWELYCLEHGIQADGQMPSDRTVGGGDDAFNTFFSETGAGKHVPRAVFVDLEPTVIDEVRTGCYRQLFHPEQLINGKEDAANNFARGHYTIGKEIVDLCLDRIRKLADNCTGLQGFLVFNAVGGGTGSGLGSLLLERLSVDYGKKSKLGFTVYPSPQVSTSVVEPYNSVLSTHSLLEHTDVAVLXDNEAIYDICRRSLDIERPTYTNLNRLVSQVISSLTASLRFDGALNVDVNEFQTNLVPYPRIHFMLSSYAPVISAEKAYHEQLSVAEITNSAFEPSSMMAKCDPRHGKYMACCLMYRGDVVPKDVNAAVATIKTKRTIQFVDWCPTGFKCGINYQPPSVVPSGDLAKVQRAVCMISNSTSVVEVFSRIDHKFDLMYSKRAFVHWYVGEGMEEGEFSEAREDLAXALEKDYEEVGAESDENEDGDDGDEY

SEQ ID NO: 127118 - protein, 473 aa, Oryza sativa
  Clone ID: PAT_MRT4530_29600C.1.pep
MMQFTHTAPPPPPLHPNGHGLGLGLYLDVGATRGGGGARPWSSSSSTTTLGGSGYFPSSAAASKISLGNLNSTGCMEQLLVHCANAIEANDATLTQQILWVLNNIAPADGDSNQRLTAAFLCALVSRASRTGACKAVTAAVADAVESAALHVHRFTAVELASFIDLTPWHRFGYTAANAAIVEAVEGFPVVHIVDLSTTHCMQIPTLIDMLAGRAEGPPILRLTVADVAPSAPPPALDMPYEELGAKLVNFARSRNMSMDFRVVPTSPADALTSLVDQLRVQQLVSDGGEALVVNCHMLLHTVPDETAGSVSLTTAQPPVSLRTMLLKSLRALDPTLVVVVDEDADFTAGDVVGRLRAAFNFLWIPYDAVDTFLPKGSEQRRWYEAEVGWKVENVLAQEGVERVERQEDRTRWGQRMRAAGFRAAAFGEEAAGEVKAMLNDHAAGWGMKREDDDLVLTWKGHNVVFASAWAPS

SEQ ID NO: 127119 - protein, 258 aa, Oryza sativa
  Clone ID: PAT_MRT4530_29601C.1.pep
MADSFVLIYGTSKLLSHKLEHLLSRHLLSGDTGGAPFAVAHRPPSSTSSPPEQLPAKPYGHKDSGGGASLRLTAQGQGDCPALGGGNRPNPRRPARPGGEGRSGGCVWRGWRRSLEALAAEDKAARFALDLARTSASTLPTALVVGWRRRRRRHGGRIWRWWSGMTTGGGGSILWMRWLRAPVTEGVAGGGRRNSAEALETEAEAATAAEGQEQEAKPMETEPGKVAAREDWLAGGAGAMCPHAGGSLVGGGAVVHVW

SEQ ID NO: 127120 - protein, 76 aa, Oryza sativa
  Clone ID: PAT_MRT4530_29602C.1.pep
PLTTTYGHGNFTTKLLQIRQKIPRLKLGGRMQLHDTPHPQFFFLRQWIKSGLCFNTQAKAPYYIVLGSKPSIEVCS

SEQ ID NO: 127121 - protein, 65 aa, Oryza sativa
  Clone ID: PAT_MRT4530_29603C.1.pep
QPWGALLSCIWKLREFLCLSARLSLTNFCKNVLISQNFEGAANRTNLQIEQSLYSPYQLGPDSFA

SEQ ID NO: 127122 - protein, 822 aa, Oryza sativa
  Clone ID: PAT_MRT4530_29604C.1.pep
MSIHRKKYRYGILDADAADRPPVHAKWSSGMVKVKYECDDDDDGDGGGDAWRRKALLYGDEVGSGPSSAAAAPLVHRSHGRASSRPRSGGKHLRAGHLSSSQWSVWGPASSTNAVIKGDTSSSAVVGSTGRVLLAGEDVIGRRSTKPKPKPSGGVPAAAAAAAAAYVTKAKPVAPPKETALRTYGRDMTGSAAAADPVIGRDDEVDRVVCILCRRTKNSAVLVGAPGVGKTAIAEGLARRVAAGDVPAALAGARVVELDVGSLVAGTQYRGMFEERVKKVIQEAEGAAGKVILFIDEMHMLLGAGACKGGSMDGANLLKPALARGRIRCVGATTFDEYRKHIERDAAFERRFQKVIVEEPTTQATIAILQGLKQRYEEHHGLKIQDAAIVAAAQLADRYITGRQFPDKAIDLIDEACSTVRLKIDSQKGVNTTGMQNNNGNTSVNGVNEAIVGPDHVAQVVSRWTGIPVTTLDQEEKEKLIHLADRLHERVVGQDEAVKLVAQAVLRSRAGLEQPGQPIGSFLFLGSTGVGKTELAKALAEQLFDSEKMLIRFDMSEFVGSGSVLRLIGAPPSYHGHQDGGQLTEKVRTRPYSVILFDEVEKADPSVFNVFLQLLDDGMLTDGKGRTVDFKNTIIIMTSNLGAEHLTEGVTGERTMEAARDLVMKQVQKYFRPELLNRLSEIVIFEPLSHDNLKEVVKIQMKSVVTSVAHKGVSLLASDDALDVILSESYNPMYGARPVRRWVQKNVMTKLSEMLITGDAGQGSTISIDATDDKKGLNFQVLKEEVVVPRGKRPVEELQSDSDSDDDVFEIAPIPKRKKGDY

SEQ ID NO: 127123 - protein, 97 aa, Oryza sativa
  unsure (1)..(97): unsure at all Xaa locations
  Clone ID: PAT_MRT4530_29605C.1.pep
MAAMATTASSLLKTSFAGARLPAAVRNPTVSVAPRTGGAICNSISSSSSTLPYDLNAIRFSPIKEDIVSREMTPGHMTXMITYADTYFVGARADSSG

SEQ ID NO: 127124 - protein, 764 aa, Oryza sativa
  Clone ID: PAT_MRT4530_29606C.1.pep
MEGGVAGGGAGFGAGAGRRRRRRRRSKAAAEQAVDVRVQPYATVDADGRKIISKGGTGHWVIDSESFSFDFLMESLRVEFKWGSNQSPLVWYFNKNLGEDVRLIGDTDLPDIFEMYATEASFHLLVAVLEESMDVASVCCVHEPIAIIPPENPSHNDGSGQAATNVGGSAQPTTVEADVREPDMFDNEEEYVGPPDTSGQSSQPAAIGVGGQSSQTAATGVEAPEVEVTDEDPQVVRVLHDPENPNIVKNALFPDMISFRKAVRHYAIKKGFEFADLKTAKTRFIATCRAEGCPWRIRASLIHDKKTIKITVLPFEHKCASTKLREGKMATQGWVADRLGDWLKNNPKKGAKDARGKLQEQYEIKLKYSKAWSGCRPYVGVDSTKLTGKYTGQLASATSVDGHNWLFYVSYAIFDLATDDNWLWFMKQLNRAIGCPEGLVISTDACKGLEKAVSAAFSDPVEHRECIRHLYVNFLKKYHGSVITEHLYPAARSYTEEGFKCGFGESSKCDYLTNNVSESFNAQIRNLKGLLPHELVDSIRELIMEKMATRRDVGKKMDDGIIPGVMKQLNDATSLLKVVKIARSDDGFAEVTLVDTDNKTRRHIVDLDNQKCSCRAWQITGKPCRHALAWICSSGGRIQDFVSPYYSVQMFRIAYAGRVPPMTDRTQWPVVDLGFKVHVPKQKRGAGRPRVQRIRGFLEPGRKRVKCKRCKRFGHFEKTCKLAEPADADDMSSHCTPQKRYIAVIVLLFLISLCASGLYSLTPT

SEQ ID NO: 127125 - protein, 638 aa, Oryza sativa
  Clone ID: PAT_MRT4530_29607C.1.pep
MEGGVAGGGAGFGAGAGRRRRRRRRSKAAAEQAVDVRVQPYATVDADGRKIISKGGTGHWVIDSESFSFDFLMESLRVEFKWGSNQSPLVWYFNKNLGEDVRLIGDTDLPDIFEMYATEASFHLLVAVLEESMDVASVCCVHEPIAIIPPENPSHNDGSGQAATNVGGSAQPTTVEADVREPDMFDNEEEYVGPPDTSGQSSQPAAIGVGGQSSQTAATGVEAPEVEVTDEDPQVVRVLHDPENPNIVKNALFPDMISFRKAVRHYAIKKGFEFADLKTAKTRFIATCRAEGCPWRIRASLIHDKKTIKITVLPFEHKCASTKLREGKMATQGWVADRLGDWLKNNPKKGAKDARGKLQEQYEIKLKYSKAWSGCRPYVGVDSTKLTGKYTGQLASATSVDGHNWLFYVSYAIFDLATQDNWLWFMKQLNRAIGCPEGCYETANDATSLLKVVKIARSDDGFAEVTLVDTDNKTRRHIVDLDNQKCSCRAWQITGKPCRHALAWICSSGGRIQDFVSPYYSVQMFRIAYAGRVPPMTDRTQWPVVDLGFKVHVPKQKRGAGRPRVQRIRGFLEPGRKRVKCKRCKRFGHFEKTCKLAEPADADDMSSHCTPQKRYIAVIVLLFLISLCASGLYSLTPT

SEQ ID NO: 127126 - protein, 876 aa, Oryza sativa
  unsure (1)..(876): unsure at all Xaa locations
  Clone ID: PAT_MRT4530_29608C.1.pep
LLGGGAGDGAGAIDGGGAGFGAGXGGGAGEGGGGAXGSGAGRRRRLRRPKGRTSTDGRMTFVGRHWFSVDVRVQPYATVDADGRKIISKGGTGHWVIDSESFSFDFLMESLRVEFKWGSNQSPSVWYFNKNLGEDVRLIGDTDLPDIFEMYATEASFHLLVAVLEESMDVASVCCVHEPIAIIPPENPSHNDGSRQAATNDGSAQPTTVEADVREPDMFDNXEEYVGVNDEQLYLPPKPTQPPDTSSQSSQPAATGFVSRPEXPNGPAATGVEAPEVEVTDEAQVVRVLHDPENPNIVKNALFPDMISFRKAVRHYAIKKGFEFADLKTDKTRFIATCRAEGCPWRIRASLIHDKKTIKITVLPFEHKYASTKLREGKMATQGWVADRLGDWLKNNPKKGAKDARGKLQEQYEIKLKYSKAWSGMKLALEQVHGKYEESFQLLFNWKAEIERKCPGSIVEIELEKLGNKMCFKRLFVALKPCIDGFLQGCRPYVGVDSTKLTRKYTGQLASATSVDGHNWLFYVSYAIFDLETNNNWLWFMKQLNRAIGCPEGLVISTDACKGLEKAVSAAFSDHVEHRECIRHLYANFLKKYHGSVITEHLYPAARSYTEEGFKYHMQQIYAVKPDAIEFLEQHHSRIWYRCGFGESSKCDYLTNNVSECFNAQIRNLKGLLPHELVDSIRELIMEKMATRRDVGKKMDDGIIPGVMKQLNDATSLLKVVKITRSDDGFAEVTLVDTDNKTRRHIVDLDNQKCFKVHVPKQKRGAGRPRVQRIRGFLEPGRKRVKCKRCKRFGHFEKTCKLAEPVDADDMSSHCTPQKRYMSTSEASCSAPKKKKTPRKKKTPKNKKTPQKRKDLASSSAPPTRVVRSLSTYLRL

SEQ ID NO: 127127 - protein, 476 aa, Oryza sativa
  Clone ID: PAT_MRT4530_29609C.1.pep
MASSSSSASSRFSPALQASDLNDFIAPSQDCIISLNKGPSARRLPIKQKEIAVSTNPPEEAVKISLKDCLACSGCITSAETVMLEKQSLGDFITRINSDKAVIVSVSPQSRASLAAFFGLSQSQVFRKLTALFKSMGVKAVYDTSSSRDLSLIEACSEFVTRYHQNQLSSGKEAGKNLPMLSSACPGWICYAEKTLGSFILPYISAVKSPQQAIGAAIKHHMVGKLGLKPHDVYHVTVMPCYDKKLEAVRDDFVFSVEDKDVTEVDSVLTTGEVLDLIQSRSVDFKTLEESPMDRLLTNVDDDGQLYGVSGGSGGYAETVFRHAAHVLFDRKIEGSVDFRILRNSDFREVTLEVEGKPVLKFALCYGFRNLQNIIRKIKMGKCEYHFIEVMACPSGCLNGGGQIKPAKGQSAKDLIQLLEDVYIQDVSVSNPFENPIAKRLYDEWLGQPGSENAKKYLHTKYHPVVKSVASQLQNW

SEQ ID NO: 127128 - protein, 303 aa, Oryza sativa
  unsure (1)..(303): unsure at all Xaa locations
  Clone ID: PAT_MRT4530_2960C.1.pep
RAGPPATLADGWGPPVISLLAPRPPPARALAPPPPPNPPHPALPARNKEGEITPRDSLSRFPRFPLSLSLGFVRIAPAILAGVINGGRDLRGRFLSSPATLSPSRPYIIVPRAPLFRFRRSPLALSVGFVLAPCSSLSAVAADLRFAAAVAPGFLLTRRHLHRLRRVVADPVRPSASPAERRSTVVLAVPNRAAAFLRFGRRFRRRCSPGVSRGPPFRFPLLSALSGAAPPRRWSPAVTIGARARXPVGRAGEAAFGRAPRLPAACSRSTVDREADAWXPTPVDPVRASSLPADAINEFLIKI

SEQ ID NO: 127129 - protein, 312 aa, Oryza sativa
  Clone ID: PAT_MRT4530_29610C.1.pep
MAPAQSMAAEGGGAGRRRRLRRRRAASQTAAQASAAEQGGGAGEGDGGAGRRRRLRRPKAVAPELLATAQATGGEYDLARRQGDDGITSFLARRQGDDGITFFHPHAEVCLRCLRHCADFEHTKESSTLVATMRQFDLLNEYAEEMVAYCHAGEYDHMQETIDILRQYLDDEKNEKAKICEVLDAKENELKSTIETLNQCRLECLAMKKQLEEVKFSRARLLYLTLVITVLFACLMFSGSTYAYNSIDIHEQHYWFIAALLAKYLRDGAGYIVTANRLLQVHRHTCITSSSQPLAISKILREEAAGITVEDR

SEQ ID NO: 127130 - protein, 87 aa, Oryza sativa
  Clone ID: PAT_MRT4530_29611C.1.pep
MGSFRLCRDFHNIPVDNTIQERRLIKRSRQQNILIYRNQRPRHCKGGSQMIWIRTGCLDSKKSTSSSVFHDGGRQDFVVKHKPSISG

SEQ ID NO: 127131 - protein, 67 aa, Oryza sativa
  Clone ID: PAT_MRT4530_29612C.1.pep
STQLIIPCNFPNIIRKIKMGKCEYHFIEVMACPSGCLNGGGQIKPAKGQSAKDLIQLLEDVYIQDVS

SEQ ID NO: 127132 - protein, 432 aa, Oryza sativa
  Clone ID: PAT_MRT4530_29613C.1.pep
MKPPLERNPTKKRHSWWWDSHISPKNSKWLAENLEEMDKQVKEMLQLIEEDGDSFAKKAQMYYQRRPMLITHVENFYRMYRALAERYDNVTGELRKNIPTRLQYQGSLAGSDSELQRSPSPSPEPQKSWTREQSPRAAGFDVFLSNKSNGSPSPASRKEPEDLASQSESDAKSEDGEDDGIAYTLHQRVLELEDELNTVNQKLHDANEKLEVLEEKSLRCHCDSKENGNGADQSAINEKLQSSQEEINNIKNSLEVLSEEHSRLLGQNKKLEAEIVNLKEEIASDRQQYEEKLSRSDAEIDKCRQELADASEKLLQEKLSNSSVTAELQETIESIRIKLEEVSEEKLLVENKFKQLEEANSEAEKYNQELSHATEKLSEEKFRHEAEILALNQAIENLKSKLESIAKEKSLLKSWFADLEQVVERGRRIFPE

SEQ ID NO: 127133 - protein, 376 aa, Oryza sativa
  Clone ID: PAT_MRT4530_29614C.1.pep
MPTTTHTIRYSTPRKGHANAHQLLAKFEDLYGFMVEGNVDDVNVLNDVRERMREQGRVWWALEASKGANWYLQPRISSNGGSEGVISVTSLKLSVLTNTITLRRLIRKGVPPVLRPKVWLSVSGAAKKRSTVPETYYDELIRATEGKTTPATLQIDHDLPRTFPCHSWLNSEEGQASLRRVLVGYSFRDSEVGYCQTEEDAFWMLAVLLENVLVNDCYTDNLSGCHVEQRVFKDLLAKKCPRIAAHLEAMGFDVSLVATEWFLCLFSKTLPSETTLRVWDVLFNEGAKVLFHVALAIFKMREDDLLRIQHIGDVIDILQTTAHHLYDPDELLTFAFDKIGSMTTNTITKERKKQETVVMAELDQRIRRLSSLKMDG

SEQ ID NO: 127134 - protein, 135 aa, Oryza sativa
  Clone ID: PAT_MRT4530_29615C.1.pep
MSPQCLTRGGNPVSPVQTCGAAFRRTSGAHANARPHPDADDDGSHGDSDEHTTSLFTVAVCKVVLIRHAELAGAYVTIHPSRRRWRRKGKSAMDESSRFELLTLEPVNGAFNEKSFFFSRKSAWVRFARQRDVHY

SEQ ID NO: 127135 - protein, 65 aa, Oryza sativa
  Clone ID: PAT_MRT4530_29616C.1.pep
ELYNICLYFGYQKLRFLTSFLTCCVCYFFQCSNCIQLYISILAYIQVHFLIHAANSSTFSPNYYF

SEQ ID NO: 127136 - protein, 61 aa, Oryza sativa
  Clone ID: PAT_MRT4530_29617C.1.pep
RHGLPQIILGPKGLKNKSIFYGKQNPNFQNCPTFYAISLGQPMVKQWANQDPKRGGKTGTS

SEQ ID NO: 127137 - protein, 127 aa, Oryza sativa
  Clone ID: PAT_MRT4530_29618C.1.pep
MPTTRQGSYGKPASSSRRRRRHHQRGRGGFRLGLLLRLRVRLSGLLGLLARSVEELRCCPGVSRISCSTVAAAARSARSRAPSSSSSAAAALCGGPHGRRAAPAVRDQSSFYAEAIADCLEFIKSRS

SEQ ID NO: 127138 - protein, 95 aa, Oryza sativa
  unsure (1)..(95): unsure at all Xaa locations
  Clone ID: PAT_MRT4530_29619C.1.pep
GWSDRSRVAGQTGHGSVRPPSARSDRLRLWRLWIGHPEAPNWHPAGQSDRXYLAGQIGAMPAVRPAGEARAGAWRAASAERSRNSSCRCPSCPAS

SEQ ID NO: 127139 - protein, 113 aa, Oryza sativa
  unsure (1)..(113): unsure at all Xaa locations
  Clone ID: PAT_MRT4530_2961C.1.pep
EATTKAHGGRRRDGKLELEERKTDPIRTRIHRFPNRFSRCFQRRKGRGDPEDHFPSINSAGEGNGRWGPPVSGREREESGGSDWAGWAEEREKXVLGQLSAQSQKRTFKTFFN

SEQ ID NO: 127140 - protein, 379 aa, Oryza sativa
  Clone ID: PAT_MRT4530_29620C.1.pep
MASEHKLDMILRRMEEFERRRVEAEQTRRADFQSLKNSTEDSHFLVGNKQYKMTPTMCSTKCFSPDVEPNLTVDVVVTCATTAMTFVDLVAAEDAIGATYIYNPIQPMVTPAKCLTNCSNPNDIPDLIVVAVVTCTSTSLASMDLEVGEDVACTTEIDGPDCHKETHTKCSMLGLDVKGGADHVGDVFLTMTGVAKAVPISIESIDIFSARRIWSTKAKMKMLNGWDSKQYLSIMRPIPGLFVKLIQDISPKSHHQAYVEAQVVKNSWKTLVKISHAAYCETTSHVAKKWATDLKGQTKLEDAKFDWNTLGTLVQEEQYANCEPIGTHASYVSAISVGSRCVEMGQIGSYALQPENCQLTTCMRAHCIKPSDYEIITAY

SEQ ID NO: 127141 - protein, 154 aa, Oryza sativa
  Clone ID: PAT_MRT4530_29621C.1.pep
MASEHKLDMILRRMEEFERRRVEAEQTRRADFQSLKYKMTPTMCSTKCFSPDVEPNLTVDVVVTCATTAMTFVDLVAAEDAIGATYIYNPIQPMVTPAKCLTNCSNPNDIPDLIVGGADHVGDVFLTMTGVAKAVPISIESIDIFSARLVSDLK

SEQ ID NO: 127142 - protein, 808 aa, Oryza sativa
  Clone ID: PAT_MRT4530_29622C.1.pep
MASEHKLDMILRRMEEFERRRVEAEQTRRADFQSLKAALASWIPHVQNNTEDSHFLVGNKQYKMTPTMCSTECFSPNVEPNLAVDVVVTCATTSMTSVDLVSAEDAIGATYIYNPVQPMVTPAKCLTNCSNPNNIPDLTVAAVVTCTSTSLASMDLEVGKDVACTTEIDGPDCHKETHTKCSMLGLDVKGGADHVGGVFLTMSGVAKSVPISIESIDIFSARLVSDLKQDIPTPTGCLLRIPRYDSKTQFNKKLRLEGIELKPWPPPTYSGVISGLEFRPMPWPAFIYCWLEEHLLDPWPPPTEWAELELWPPPHENDILPLLINGFTHILVDRKAISKFWKAIWSELGEEWSLFVPKLYELHLSGLLQHSVSMISQQLMSRRIWSTKAKMKMLNGWDSKQYLSIMRPIPGLFVKLIQDISPKSHHQAYIEAQVAKKFLENFGEDKVHFLAQSIAVPDTHLGQGCIGCCWLYGPNAISTFHLLIAILHIVRPLYMENIFTRTSHVAKKWAKDLKGVVFDWNTLGIVVQEVNYIELICDRDSYGCSVQKCYPQSILFMHNGWSFGGLLDWNSKQYKNSMLIVNPLELMQVLLVPLVWDPDAEMGQIGSYALQPENCQLTTCMRAHCIKPSDYEIITAKENHAADAPRLLIVVMEDEGNTVWTLEFSVSGVVQKKRDLWLCAFAVNKDMKVVMFLQQYGYANLVIVNLLSVPWDPGGSHLALAIKQGTRLSLWAITSIGWLCFLWSYWLHYKRNSNRGDQVGEACTASSHRLGDKPNFKGRRMLGAMWAAIWAGSATFQEVQASPRGNHI

SEQ ID NO: 127143 - protein, 33 aa, Oryza sativa
  Clone ID: PAT_MRT4530_29623C.1.pep
DCESGTLFGWVLTINFRRVYSNLIAPILRHRSY

SEQ ID NO: 127144 - protein, 273 aa, Oryza sativa
  Clone ID: PAT_MRT4530_29624C.1.pep
MLSRDAAEHELVVWDPMTGRRWRLDFPGYLEDFNWSASVLCAADGCDHRHCHGAPFLVAVVSTGRYCNTSAAIYSSETGAWGDAIALEREHPDPDDAVKVGKPGVQVGNAIYFPCVRSAQILECDMSGHTLAMFDSPAAGRGWPDNGLLMTAESGGGGGLGFAFVRRSMLHLWSREPTGDGAMAWSPLRGINLEPLLTVLIRRPPEHHSVTPNLVGFADGVGVIFAEIDGDVFTIEVSSRRGKKVYRREDIHTIFPYTSFYTPRGGINFDPLP

SEQ ID NO: 127145 - protein, 185 aa, Oryza sativa
  Clone ID: PAT_MRT4530_29625C.1.pep
MSTSADLSSAPTAEYAEHLSHQVAVPSITDEYQFYLGPISNLDPTKFINAETNRIPFRFANSNLGLWKNTFKSWPSAEKSWPAWYMRVSARKRTHWDEIGIAQALALTAADMAKDEPMMSAATYFWSTALNAFIFTQGPMTPTLLDVTMIIGLDVTSSANPVSLNMKPNFEFKTRSIGGWSGFVA

SEQ ID NO: 127146 - protein, 128 aa, Oryza sativa
  Clone ID: PAT_MRT4530_29626C.1.pep
GGFFPSGGGPGVLTGGGFGDGSFPPGKKNFPGGKIFWGPRFPSLGEGLGGEKIFFRRKKKTRVKIPKFQLGKGFKISKGGNPFQLGRVCHQTPEERQLFRDKEGGIFPNRKFPDPNMANMGPDSVAYG

SEQ ID NO: 127147 - protein, 115 aa, Oryza sativa
  Clone ID: PAT_MRT4530_29627C.1.pep
CALCPRASSAFSAPHRRASSPCCHVDSLLSPFLAVAKPASAHNMPSVLSAAKPFAFADAPPLLGPVILSRTAPRKDCMLSCTVASMSPPRRAPDSDESVASCSKLAMDFEVIVNE

SEQ ID NO: 127148 - protein, 216 aa, Oryza sativa
  Clone ID: PAT_MRT4530_29628C.1.pep
MPREIYNGCNTNTGTPHGGSWQRLATATRLLAVRVGGSWFYVDFVTWHQQSLTTTPIDQIIEELELLVIKRQAVEGSTSTSTIDLLAGTRCRNFLYNMGPFLHHHHRRVRLFVLSSAALLLSGSNLQSTARLAGEKKIRRVIYTVKLVETDGGELGAILCGRNQPTEQGQIGESLRASAHGDRRRRAAGLASSNATALPSWPLLQTCQAATRTRRQ

SEQ ID NO: 127149 - protein, 190 aa, Oryza sativa
  Clone ID: PAT_MRT4530_29629C.1.pep
MAGDGGEGKVACVAWIQRWEEKATRVFAAYGQAGSRGRVAAAHAVGAPRIGDAACDVMSFQDLLRDMEADVLQSAPPPAQEVVQAFSAPHRRASSPCCHVDSLLSPFLAVAKPASAHNMPSVLSAAKPFAFADAPPLLGPVILSRTAPRKDCMLSCTVASMSPPRRAPDSDESVASCSKLAMDFEVIVNE

SEQ ID NO: 127150 - protein, 368 aa, Oryza sativa
  unsure (1)..(368): unsure at all Xaa locations
  Clone ID: PAT_MRT4530_2962C.1.pep
GFVYSRVNKPRGAGGRTGSTGVGPTRQPHGPRWTGRTRLTPAGAVGPMRQPHPRARAADGRAPHGSRGARPKAATPAQPTGGGAPAPLWSPPATTGAAERRPKEGREGGSESAVHGSPRVDGDDGNGDRSGGRRRRGTGRRGRRRSGGRRTKRRGGRGRRGCGEPEEGDAEAGEGPERRRRRTGARRRWRRERATARARFRQRERAARVGNGGGRHGECLYRVGRGRERPDEGETAVEDPAAIDAPARFXGKRSRMNPMEREREKWGERGREXLIARGADGSGGICGGGGARARARRRERREVGDDGWAPPVSEGGGRARLSAARARGXEAGWAAGERREREGGGPSRPKRGXGGKRLFRVFLFIKPF

SEQ ID NO: 127151 - protein, 102 aa, Oryza sativa
  unsure (1)..(102): unsure at all Xaa locations
  Clone ID: PAT_MRT4530_29630C.1.pep
HFKTAKKVTYEKXDCRMARLLREARDISTSMLESTLHLLSKQIEMPKQSLVSKAFNKKKVVICEEEQLQVLECSIRDLESGAGHLFRKLVQSRVSLLNILSS

SEQ ID NO: 127152 - protein, 497 aa, Oryza sativa
  Clone ID: PAT_MRT4530_29631C.1.pep
MEGVGGGGGGEEWLRPMDAEQLRECGHRMSRWHTGSKLDGKSKRRYKVKQKDCFFDARRKKKEIDRGFAGNLVADIQQKIIPGVTHWQSPNYFAYYPSNSSTAGFLGEMLSAAFNIVGFSWITSPAATELEVIVLDWFAKMLQLPSQFLSTALGGGVIQGTASEAVLVALLAARDRALKKHGKHSLEKLVVYASDQTHSALQKACQIAGIFSENVRVVIADCNKNYAVAPEAVSEALSIDLSSGLIPFFICATVGTTSSSAVDPLPELGQIAKSNDMWFHIDAAYAGSACICPEYRHHLNGVEEADSFNMNAHKWFLTNFDCSLLWVKDRSFLIQSLSTNPEFLKNKASQANSVVDFKDWQIPLGRRFRSLKLWMVLRLYGVDNLQSYIRKHIHLAEHFEQLLLSDSRFEVVTPRTFSLVCFRLVPPTSDHENGRKLNYDMMDGVNSSGKIFLSHTVLSGKFVLRFAVGAPLTEERHVDAAWKLLRDEATKVLGKMV

SEQ ID NO: 127153 - protein, 108 aa, Oryza sativa
  unsure (1)..(108): unsure at all Xaa locations
  Clone ID: PAT_MRT4530_29632C.1.pep
FAWREISTFGGWGNTGGARTNRLSQQLRILNGHWDAPCSGALSGAGVGVPPRVTVTFVGALAPLLLVFLPWFLARLIGFALKALNWGFLLGFXFRVLRFLDPKKLVWG

SEQ ID NO: 127154 - protein, 354 aa, Oryza sativa
  Clone ID: PAT_MRT4530_29633C.1.pep
PPPPKLPSLPSAISPLLLATATSLPVIHTVYHYAKFAKYYSEEEAVTTAMPSSSSPDVLYLWHLPDPKVCGDSHGKSQTVVVLLGWLGSRQKHLKRYADWYTSRGYHAVTFTLPMSDIVSYNVGGKAEKNVEMLSEHLADWVSEEDGKKIVFHTFSNTGWLCYGVILENLQRQDPSAMDKIKGCVVDSAPVAVPDSQVWASGFSAAIMKKHSVAAKGVKPNDARPDVLVVESNKDHPKPAVSEAILLSALEKLFDVVLNYPAINRKLSGVMELLSSKQPKCPQLYIYSSADRVIPAKSVESFVESQRRAGHEVRACDFVSSPHVDHYRSNPELYTSQLTEFMEDCVLARCQAKE

SEQ ID NO: 127155 - protein, 423 aa, Oryza sativa
  Clone ID: PAT_MRT4530_29634C.1.pep
MMASLHRPLSAMAVAAFAAVSSLELPDRLSHHKLPDTTVDAEAVVSIPASRPDVSAAPSASAMSRLHFLPRNLQTSHPAKAPPASLPVIHTVYHYAKFAKYYSEEEAVTTAMPSSSSPDVLYLWHLPDPKVCGDSHGKSQTVVVLLGWLGSRQKHLKRYADWYTSRGYHAVTFTLPMSDIVSYNVGGKAEKNVEMLSEHLADWVSEEDGKKIVFHTFSNTGWLCYGVILENLQRQDPSAMDKIKGCVVDSAPVAVPDSQVWASGFSAAIMKKHSVAAKGVKPNDARPDVLVVESNKDHPKPAVSEAILLSALEKLFDVVLNYPAINRKLSGVMELLSSKQPKCPQLYIYSSADRVIPAKSVESFVESQRRAGHEVRACDFVSSPHVDHYRSNPELYTSQLTEFMEDCVLARCQAKEEEEEVTN

SEQ ID NO: 127156 - protein, 206 aa, Oryza sativa
  Clone ID: PAT_MRT4530_29635C.1.pep
MAAVDGDRARAAAVMEGAEPERPAGDGSKIRAAAANGGTAAVDGDGARVAAATVDGGGGESKRCRMEGRSRAYSRLTDRSRCTRQGSDKRYSFAPKYKAMLSKCGLPHFCGLQIISHTCDKVRQRIKPMTYEGEGSATETDAVSSISGDKQIRIPQSSKRIISHEYHTFREKPLLALSRSITVSEKASELLLLSLPLRGKILKAAA

SEQ ID NO: 127157 - protein, 215 aa, Oryza sativa
  Clone ID: PAT_MRT4530_29636C.1.pep
MGMADSHLDGVPAMRKTTVSSSSSLNIAFLLSMVATNLLSLYHLSTRASTAPPLLLPAAHQAQAQDEQLLRQLTAIRATVSQLNHLRSSTPPPPPPPPELLLYSRLAPLASACSAHPDLLHRFMSYTPFSPCPDDALSLAEPLLLRGCHPLPRRRCFSSSSISSSHNLNNLPTDPFSPLPDSAVRWPPGAKCTSFSCLPPSLGFDLARTEAGRFL

SEQ ID NO: 127158 - protein, 116 aa, Oryza sativa
  unsure (1)..(116): unsure at all Xaa locations
  Clone ID: PAT_MRT4530_29637C.1.pep
MRELLLEVCVEVKRVSSLYKGSYDGCGRGIVRSTLQPSLGCNPGRPXAKTWIQRRQDWFGQTTRFSRTRGWPNPAQFRLVASSIAPLRRLVNFGPIHRVNSVFLAHSYISLILDIV

SEQ ID NO: 127159 - protein, 336 aa, Oryza sativa
  Clone ID: PAT_MRT4530_29638C.1.pep
MKGLSGPKLLVVHPSSNKPLGGAASPAMAVLGSRRRMWVVLFLAGFACVSLGTMLCAARDHPPPPVAARRLAAAEAQAATLAVSARGGGAGGGGGGLPGYVFDALVQYASAGGNSTASMPGGDVRAIAAVVKRRAPCNFLVFGLGGETPLWRALNHGGRTVFLDENQYYVSHLEGRHPGLEAYDVVYTTTVREFPDLLDAARAARSAECRPVQNLLYSDCRLAINDLPNQLYDVAWDIILVDGPRGYTAASPGRMSAIFTAGVMARSRAEKGAETDVLVHDYEREVERACSREFLCEENRVEETSTRSLAHFVVPGGRDLRRETFCAGGGGSGAST

SEQ ID NO: 127160 - protein, 81 aa, Oryza sativa
  Clone ID: PAT_MRT4530_29639C.1.pep
SPWLRKRKMPRLMACTSGTAKGSCRWGDGAYRGWALDAFTATRCDVCNSWRSYTCVRTPPLLASSTGPPPYEPYFKDIFDY

SEQ ID NO: 127161 - protein, 380 aa, Oryza sativa
  unsure (1)..(380): unsure at all Xaa locations
  Clone ID: PAT_MRT4530_2963C.1.pep
MSRVSTSWGFVXSRVDKPGERXARTGSTGVGPTRQPLGPRWTGCTRXGAVGPTRQPHPRARAADGRAPPGSRGARPKAASPARPTGGGAPAPRWSLPATTGAAERRPRERREEGSEAAVFGSPRVDGGDGNGDRSGGRRRRGSGRRGRRCSXGRRAKRRSGRGRXGRGEAKGGDAETRGGPGRRQRRTGARRRRRRERTTARARFRRGEXAASRGNGGGRHGERLNSVGRGRERPGEGETAAKDAAAIDADEVXGERFRANPREREREKWGKRERESRGMIPPTLLRAGTAGCGGIRGGGGGARARAXRRERREDRDDRRAPPVSEGGGRARPSAARARGEAEWAAGRXREGEGHGPSRPKRGXGGKRRLFRIFLFIKSF

SEQ ID NO: 127162 - protein, 49 aa, Oryza sativa
  Clone ID: PAT_MRT4530_29640C.1.pep
RWSHQQHVFQPASSGHKQQGASALNSLDPHCTSPCAICDNYDLSVFAAS

SEQ ID NO: 127163 - protein, 663 aa, Oryza sativa
  Clone ID: PAT_MRT4530_29641C.1.pep
MVAHDVLPAKEIIGWRPAFGEAFPTPDTHEVVVFSHFFYGGFSLPTSRFFRGILEFYGIRLHHLNPNSIVHIANFIHACEAFLALPEYSCLPPVYQDTWNSLPIGEEAAQALALMDRMLNLKEQGLQGEQITRHFIKSQLAPIKERSRTAFEFDGKHDPNREDPESLEFKVMKERMYKIFSNAIVVSYSHLLPVVPYNAFNPPPPEFALMKSDPPIAQRRSSRQPTGQASGGPKIRSDVQPNPTRSTTQLDSRKRKSVLTDDEGHDTKKPGNKKEGAERQPKQANLRKKTSSRPMPKIRKSSRKPYDIDPSRKDSTPTGTKTNPSVGTGPTARDRPSKDQPASVNTQASNETPTGNQSAEANVNAEQELPTRNQLGTTQDEDIPEAEAQAGSPPKKDANADPGSMSPVKVQGPSRPHPEIITGPIIGDEEEVLQIQSAEDSRPPILVKWWDDDMQPQWIVINKQKEDEELYMLKKALGQATRLVNISELERRVKALEKDKAELTKQRDSALKDVEDHKIKSQAQFDVLVNKIKSLEGARDEVANAATPLVQAMFFNNNGPSSFDADEIFDKLRIAPDTYFKNIKEARNMGAGLALAMTKSLYPKIDIEAVDGFADGTSEEAALDLISEAKNAANKIAADVVERFQETDLRPTGSANSDDEKTD

SEQ ID NO: 127164 - protein, 104 aa, Oryza sativa
  Clone ID: PAT_MRT4530_29642C.1.pep
ANPSIEPTQPHATRPTPHPFPLPSPPLPAIAGDVMACPLPSPPSSTSPKMTQAPTTAPTSTPPPSPRFPPGAFRIRRNSGLPTLRIWARGRASRRTLPSCPNPY

SEQ ID NO: 127165 - protein, 479 aa, Oryza sativa
  Clone ID: PAT_MRT4530_29643C.1.pep
MATMRNRFATRMLNLHRLVKSNLVAGLLRRRGHRPLDAPPPRIRVLIDGNEATVVDVDRLLLKPSSPSSATALFPPFFLLAVEAGGFVRGLVLLALYPALRLLTAEGARLKAMAMVCFLGLRRGEAARAGRAVLPRYFFREAADVEALMEAAASARKEVITVVAAASRLFPTVMVETFLKEYVGFDAVVGRERFRDVVNKTPRNGAGPRPLIFHDGRLAFTPTPAAALAMYVYLPLAVALSVLRIAIFTLLPRGVSGAAAALAGVRLRVAGAPRPPAAGDAAGGRLYACNHRTLLDAVAVSGALGRPVSSVTYSLGRLSELLSPIPLLPLAREREEDRRRMASLLSRGDVVVCPEGTTCREPYLLRFSPLFAELADEVNPVAVRAAAGMFYGTSTSPSAKCFDSVFFLMNPSPEYGVHFLEPVATAGAGAGSSIEVANRVQRVIAGALGYEATTLTRKAKYLLLAGNEGGVATNRSNNK

SEQ ID NO: 127166 - protein, 73 aa, Oryza sativa
  Clone ID: PAT_MRT4530_29644C.1.pep
YRGWSCPLRALLHIQLGVETKGNPKHAFPSKEISKPDETQSDSDLSVGPATHRRSDRPSTGGLTAQHTAVRPA

SEQ ID NO: 127167 - protein, 102 aa, Oryza sativa
  unsure (1)..(102): unsure at all Xaa locations
  Clone ID: PAT_MRT4530_29645C.1.pep
YPRKIVAWTLRLWHVKAVKKTXENKWPQVRQEKQRXXWDPDFPXLFFSLXPLYMFCFVFLFLTAIMIPEFFFLLPNCCSEVLQCISRHIICSSSILYQKKKK

SEQ ID NO: 127168 - protein, 188 aa, Oryza sativa
  unsure (1)..(188): unsure at all Xaa locations
  Clone ID: PAT_MRT4530_29646C.1.pep
MVDEADPDERGNGGVRTTPAVAVAPGTAMKPXAASAWKRPGNGMAVAARAGVSAAAIMDADSWPATTLTPTPMPPKASPKVAPLPPPAEAVIPPISLGNSGAPDANPDHEAPVRNPPARRALVMPVGDGLDKRAPGSEPSPVYTPNARSNGGARRAPRGTDQXQNGRYGSHPHSRGSGYWGGGNRRGN

SEQ ID NO: 127169 - protein, 494 aa, Oryza sativa
  Clone ID: PAT_MRT4530_29647C.1.pep
MGVTKAEAVAGDGGKVVDDIEALADLRKEPAWKRFLSHIGPGFMLLWVILIGLIFALIIQSLSANLGVVTGRHLAELCKTEYPVWVKTCLWLLAELAVIASDIPEVIGTGFAFNLLFHIPVWTGVLIAGSSTLLLLGLQRYGVRKLEVVVALLVFVMAGCFFVEMSIVKPPVNEVLQGLFIPRLSGPGATGDSIALLGALVMPHNLFLHSALVLSRNTPASAKGMKDVCRFFLFESGIALFVALLVNIAIISVSGTVCNATNLSPEDAVKCSDLTLDSSSFLLRNVLGKSSATVYGVALLASGQSSTITGTYAGQYVMQGFLDIKMKQWLRNLMTRSIAIVPSLIVSIIGGSSGAGRLIVIASMILSFELPFALIPLLKFSSSSNKMGENKNSIYIVGFSWVLGFVIIGINIYFLSTKLVGWILHNALPTFANVLIGIVLFPLMLLYVVAVIYLTFRKDTVKFVSRRELQAGDDTEKAQVATCVADEHSKEPPV

SEQ ID NO: 127170 - protein, 517 aa, Oryza sativa
  Clone ID: PAT_MRT4530_29648C.1.pep
MGVTKAEAVAATGKVVDDIEALADLRKEPAWKKFLSHIGPGFMVCLAYLDPGNMETDLQAGANHKYELLWVILIGLIFALIIQSLSANLGVVTGRHLAELCKTEYPVWVKTCLWLLAELAVIASDIPEVIGTGFAFNLLFHIPVWTGVLIAGSSTLLLLGLQRYGVRKLEVVVALLVFVMAGCFFVEMSIVKPPVNEVLQGLFIPRLSGPGATGDSIALLGALVMPHNLFLHSALVLSRNTPASAKGMKDACRFFLFESGIALFVALLVNIAIISVSGTVCNATNLSPEDAVKCSDLTLDSSSFLLRNVLGKSSATVYGVALLASGQSSTITGTYAGQYVMQGFLDIKMKQWLRNLMTRSIAIVPSLIVSIIGGSSGAGRLIVIASMILSFELPFALIPLLKFSSSSNKMGENKNSIYIVGFSWVLGFVIIGINIYFLSTKLVGWILHNALPTFANVLIGIVLFPLMLLYVVAVIYLTFRKDTVKFVSRRELQAGDDTEKAQVATCVADEDSKEPPV

SEQ ID NO: 127171 - protein, 83 aa, Oryza sativa
  Clone ID: PAT_MRT4530_29649C.1.pep
LLIFEPCYISKKLFCFHTLFHILFSQGPFIFFATLFTLHFERGLTILLTCIFTFFQTHASHSHRGKNITFRLNCHIVTLYTPP

SEQ ID NO: 127172 - protein, 77 aa, Oryza sativa
  Clone ID: PAT_MRT4530_2964C.1.pep
GGVTEFFFGFKARKTPREKKDPFNRGGQTPRLKKQQPKNLLKPPFYGFPPPHRGLKKPKNPIWETNPPLLTKPFLQI

SEQ ID NO: 127173 - protein, 512 aa, Oryza sativa
  Clone ID: PAT_MRT4530_29650C.1.pep
MGIQVAAVASSPCAVTNVRRRRRCRLRRLPPRRRRGNAVLGGVRLSRGQSSLASWSVGMTRRRTGGHQMARRALSASIDSIGSDGGDDEEFLRRIQELAVGLHPGAAGCGWPASVERSASSVGLPLSLRMLKRKKQQQQQQGRWDERLIDCAGESARGAVGRAFSSMVLIIRELQSFTLQMRQALFYEDLQRVLARVHAEMHASFVWLFQHIFSGTPALMVSVMLLLANFTVYSMGDSVAAAATLPPPQPPAATVAMVDTQHAEQSHSHQRFDHASLKTLSIGRTASVGGNSGGGGKVRPVAGATGDGRSDEWSNRQSGAVLPQDASQGTPGAGAEEAVPVSEAMAVEETEDELVIWKRIADEATRMQASVRAEALMDPDTLGQLVAPVEAKLDTEDTAEFAATEERYERAVSEEPDNSLLLSNFAQFLYTVQRDHDRAEHYFKRPVRAEPADAEAMGRYATFLWKARNDLAAAEETYQEAIAAEPSNSHHAAAYAHFLWNTGGDDTCYPLD

SEQ ID NO: 127174 - protein, 114 aa, Oryza sativa
  Clone ID: PAT_MRT4530_29651C.1.pep
MGLEEDTPVTKTVKAAATGLAAGTIWGTVVATWHDVPRVERHVALPGLIRTLKMCGSYGATFAAVGGLYIGVEQLVLSQRKKNDYVNGAVGAFVAGATIFGYKGRSIPSALIAG

SEQ ID NO: 127175 - protein, 502 aa, Oryza sativa
  Clone ID: PAT_MRT4530_29652C.1.pep
MGRGRGRGKKLAIVRSHEDKGSGAEEAMPARKRRGRPQKMGCMMLLGVDASYMEDNVIDGEEVEGDDVKLKASRLDKNTTASAAGFTVESAQRKAERDSSEAPIRLVALTRPRVVSGRDAGAERAAGKPSGWGLFGKAAPLFTARDWKRGRTPRTPPRRVDGWENHGEITMPRPRDVRGAARDVAASGGSRNGEYGVCVWVMLSRGRGRDIMMDRWRLRLPGAATATSRVCVSTGRRPKAQARANVAAERASGRAASAAEAEPSETTPPRPPSHPLSPLLSNHAAIPPFLPHYLRPRKSQQFFEPPPPASAAQGPPQIQQIFRSFAAGKRRGGFPPGSGEERSGRVGVGKGGMGLEEDTPVTKTVKAAATGLAAGTIWGTVVATWHDVPRVERHVALPGLIRTLKMCGSYGATFAAVGGLYIGVEQLVLSQRKKNDYVNGAVGAFVAGATIFGYKGRSIPSALIAGSCLAFTSAALDVGGNTTRVDNGKEYYPYTVENKPAH

SEQ ID NO: 127176 - protein, 91 aa, Oryza sativa
  Clone ID: PAT_MRT4530_29653C.1.pep
IYHFNRNYSLCLITYSQYLDCILSCSCSVFSFTLQGSSTARHGWYDIVCGVAIARRPGLVLFGSYVANVALDQSESYPLTRRSGHERERHQ

SEQ ID NO: 127177 - protein, 789 aa, Oryza sativa
  Clone ID: PAT_MRT4530_29654C.1.pep
MGSGGDYDTCIDMIFANYVQNLTSSYANKSNETSIVATLSIMFILASLFFILSLFSRLSDVSAVLNPTVRLILSSSLSLFLPVMSYLFSEAKNGDATAGSSGQQTELSLRARTILTWMLLVELLRNKVETALVSDTGAKGYLSTIQQATRVAWQGYLVFFNLKSSGQRVVFGFLWVIAASQLFQRITINEVLKSSYAYGKNAQRLHSYMAHILLHRRRQDSDEGGGGAQLLKLCDYAVMGEEELEMEAGPPEDSELNIQKIISARNTTDHVITVGKIWSLADVRDSPLQKDHRLKRLCLSFALHKLLRRRFENLRFTDAEVHNCRDLIFRGLCRDGTDKEAIAVALFQVLRDEILFVNEYYNSVLPVVLSSPFFLLANYFMSPILVLAFFLLTFIACNNGDWSYALQSITSDNLLLHIGIIKTVKCLFHYISTPPALYTTVDLAITFLLVLANIYEEIWEFIVCILSNWFMVSLIHLYARNPQRSRLSPTFKAIIRRIIWVRNLMSQPRLQFNQLSMLGGGFLPCRHPFLLQPKIVPKEVKKSIMEYLMNHIDGHAPLSNGWSTMQANYPEYHSKLSWMCHNDNVTEVMLTWHIATTILEAKFPKQTGATASSQAHRTVATTLSKYCAYLVAFKPELLPSNLDGTQKMYGALKKELKATLGCWRYCFPKEIVGRRVAVEKLMQEESQGKLEGKMPLMCKGARAGRILFEKATLVDNEEPVWEVLAHIWTELIVFIAPSGDDEVQVKAHRDALGQDAGEFISVLWALTTHTGVTRPCVKPWALIPVENLA

SEQ ID NO: 127178 - protein, 185 aa, Oryza sativa
  Clone ID: PAT_MRT4530_29655C.1.pep
MALQLAAQALSAILLSGAQPSSRRATPPGNGQRSRRPPATGRRRLAASLLASQLLLLPAAATSVAGAFEFDLRITVPEQSGEEAEAVVKLHARNLVRVKGLIDARSWRELQAALRSSAANLKQDLYAIIQASPASRRPELRRLYSDLFNSVTSLDYAARDKDELRVQEYYSNMITSLDEIFSKIM

SEQ ID NO: 127179 - protein, 57 aa, Oryza sativa
  Clone ID: PAT_MRT4530_29656C.1.pep
AFFFPHPNKYQPLLSKSIACPFIYLSTFNLFQTHLLQTLGPYFPSSPYVLFTHLYFR

SEQ ID NO: 127180 - protein, 728 aa, Oryza sativa
  Clone ID: PAT_MRT4530_29657C.1.pep
MPLLHHVLLGFLLILLYLRTPTSSTATDTVSPGHALVGSDRLVSNNGKFALGFFKPGNESYTNHNSYLGIWFNKVPKLTPLWTANGNNPVVDPTSPELAISGDGNLAILDHATKSIIWSTHANITAKDTIAILLNNGNLVLRSSSNSSIIFWQSFDYPTDTLFPSAKIGWDKVTGLNRRLVSRKNSIDQAPGIYSLELGPNGDGHLLWNSTIAYWSSGQWNGRYFGLTPEMTGALMPNFTFFHNDQEAYFIYTWDNETAIMHAGIDVFGRGLVATWLEESQDWLIYYRQPEVHCDVYAICGPFTICDDNKDPFCDCMKGFSVRSPKDWELDNRTGGCIRNTPLSCGSRTDRTGLTDKFYPVQRASGATLKTSGVRTGAAVQRSPAWFHLLSHDTAGGGGSRDDGYRRAWSRLLRRLVQESMSFCSLSISRHGHRSGYPVFKGYLSNSTIAVKRLDGARQGEKQFRAEVNSIGIIQRINLVKLVGFCCEGDNRLLVYEYMPNSSLDVCLFKANDIVLDWTTRYQIAIGVARGLAYLHTSCRDCIIHCDIKPENILLDASYVPKIADFGMAKILGREFSRAMTTMRGTFGYLAPEWISGTVVTSKVDVYSYGMVFFEIISGRRNSSHENFRDGDYSFFFPMQAARKLLNGDVGSLVDASLEGGVNLVEVERACKIACWCIQDNEFDRPTMGEVVQSLEGLLELDMPPLPRLLNAITGGSHPVTPQYFYSL

SEQ ID NO: 127181 - protein, 827 aa, Oryza sativa
  Clone ID: PAT_MRT4530_29658C.1.pep
MPLLHHVLLGFLLILLYLRTPTSSTATDTVSPGHALVGSDRLVSNNGKFALGFFKPGNESYTNHNSYLGIWFNKVPKLTPLWTANGNNPVVDPTSPELAISGDGNLAILDHATKSIIWSTHANITAKDTIAILLNNGNLVLRSSSNSSIIFWQSFDYPTDTLFPSAKIGWDKVTGLNRRLVSRKNSIDQAPGIYSLELGPNGDGHLLWNSTIAYWSSGQWNGRYFGLTPEMTGALMPNFTFFHNDQEAYFIYTWDNETAIMHAGIDVFGRGLVATWLEESQDWLIYYRQPEVHCDVYAICGPFTICDDNKDPFCDCMKGFSVRSPKDWELDNRTGGCIRNTPLSCGSRTDRTGLTDKFYPVQSIRLPHSAENVKVATSADECSQACLSNCSCTAYSYGKSGCSVWHDELYNVKQLSDSSSDGNGEVLYIRLAAKELQSLERKKSGKITGVTIGASTGGALLLIILLLIVWRRKGKWFTLTLEKPEVGVGIIAFRYIDLQRATKNFSKKLGGGSFGSVFRAMLRLFSTTIRGHRSGYPVFKGYLSNSTIAVKRLDGARQGEKQFRAEVNSIGIIQRINLVKLVGFCCEGDNRLLVYEYMPNSSLDVCLFKANDIVLDWTTRYQIAIGVARGLAYLHTSCRDCIIHCDIKPENILLDASYVPKIADFGMAKILGREFSRAMTTMRGTFGYLAPEWISGTVVTSKVDVYSYGMVFFEIISGRRNSSHENFRDGDYSFFFPMQAARKLLNGDVGSLVDASLEGGVNLVEVERACKIACWCIQDNKFDRPTMGEVVQSLEGLLELDMPPLPRLLNAITGGSHPVTPQYFDSL

SEQ ID NO: 127182 - protein, 808 aa, Oryza sativa
  Clone ID: PAT_MRT4530_29659C.1.pep
MPLLRHVLLGIVLLFLHTLASSAATDTVSPSQALAGSNRLVSNNSKFALGFLKPGNESYNNHNSYLGIWFNKVPKLTLLWTANGDNPVVDPTSPELTISGDGNLAILDHATKSIIWSTRANITTNDTIAVLLNNGNLVLRSSSNSSKIFWQSFDYPTDTLFAGAKIGWDKVTGLNRRIVSRKNSIDQAPGMYSLEVGLNGDGHLLWNSTVPYKSSGDWNGRYFGLAPEMIGVALPNFTFVYNDQEAYFTYTLRDDTAIVHTGIDVFGRGFAGTWLEGSQDWLIHYRQPIVHCDVFAICGPFTICDDKKDPNNNPFCDCMKGFSVKSPKDWELDDRTGGCMRNTPLSCGSSKDRSDLTDKFYPMQSIRLPNNAENVQAATSGDQCSQVCLSNCSCTAYSYGEDGCSIWHDELYNVKQLLDAASDGNGVVLYVRLAAKELQISERKKSGTLIGVAIGASTGTLFLITLLLILWRIKGKWIIAHPLEKSEDSIGIIAFRHIDLRRATKNFSEKLGGGSFGSVFKGNLSDSTIAVKRLDGARQGEKQFRAEVNSIGIIQHINLVKLVGFCCEGDNRLLVYEYMPNCSLDVCLFKANDIVLDWTTRYQIAIGVARGLAYLHTSCRDCIIHCDIKPENILLDASYVPKIADFGMAKILGREFSRAMTTMRGTIGYLAPEWISGTVVTSKVDVYSYGMVLFEIISGRRNSSHENFRDGDYSFFFPMQAARKLFDGDVGSLVDASLEGSVNLVEVEKACKIACWCIQDTKFDRPTMGEVVQSLEGLLELDMPPLPRLLNAITGGSHPVTPQYFDSL

SEQ ID NO: 127183 - protein, 287 aa, Oryza sativa
  unsure (1)..(287): unsure at all Xaa locations
  Clone ID: PAT_MRT4530_2965C.1.pep
MAKAVANMRARPPLSLTGGAHLSSPSSRRARRRVRALAPPPPRIVPHPAVPARIKERGITPRDSLSRFPRFPLSLSLGFVRIVPAFVAGAINGGRNPRGRFPSSSAALSPSRCYKIVPRAPLFRFHRSPLALAVGFVLAPCSALSAIAAELRSAAAAAPDFLLTRRHLRPLRRVAVNLVRASVSLVDRRSAAVIVIPSRAAVFLRSVRRFRRLRCLGVSRGPXPLRFPLPSSLSGAAPPRRWSPAATIGARXARPPPVGRAGEAAFGRALAAAKWARPSAARARGCG

SEQ ID NO: 127184 - protein, 67 aa, Oryza sativa
  Clone ID: PAT_MRT4530_29660C.1.pep
LHHLLSWFSIRKKKIITGNKSSYLAFQVLRVLNTACHSSCFVPTQNFTSCSLPQMVHSFTPCHQPFC

SEQ ID NO: 127185 - protein, 52 aa, Oryza sativa
  unsure (1)..(52): unsure at all Xaa locations
  Clone ID: PAT_MRT4530_29661C.1.pep
CPLVDNIWPRTQIARGPHFGTCVPSATLLWLMIQITLXIYESQETWCFVSQR

SEQ ID NO: 127186 - protein, 445 aa, Oryza sativa
  Clone ID: PAT_MRT4530_29662C.1.pep
MRATRVASCAPPPPLSPGRRRPPTCSGSTATRTSSACSSPASTSTRASSTPAATPGVSSSTPMAATTKHTGATSASSSSSPPPPATLATATAACVPGQGSAWLTAPATSRRRRHHLTTLDFTASAMATAGAFRASSAGKNWSDRNISEMIVLQSNATSMSQPFGSAMITRPHCQPCRWQRRRVASCAPPPPSSPGRRRPPTCSGSTATRTSSACSSPASTSTRASSTPAATPGVSSSTPMAATTKHTGATSASSSSSPPPAATLATATAACVPGHGSAWLMSPASQRRRGTPEFMASTMVITGDSRTSSPGRNWSDRSIFEMIVLQSNATSMSQPFGSAMITRPHCQPCHWRRRAVSCAPPPPSSPGRRRPPTCSGSTATRTSSACSGTASTSTRASSTPAATRGVPSCTPTARTRSTGTTSASSSSSPPPAATLATATATVQPG

SEQ ID NO: 127187 - protein, 221 aa, Oryza sativa
  Clone ID: PAT_MRT4530_29663C.1.pep
SWPKAAVEVELTGARGDANSGDESRRGRGGRGGVRPREPDGDGGAARRRPGAGGGRLGEDPTGGPHLSATPGEEGGGAAWLGLGHCLGSVEYMNIKLSYVISGSATLGIRKLDSSMRTSKCSSPTRNGPLTIGFDTQEPRHLNCGPSWWWFDQLGDESLVDVQQHFHLHWFPIFVPVWNTWQSRELVQVHVKASLILLGALAWTWIDVSKDVGLDQDCWQA

SEQ ID NO: 127188 - protein, 177 aa, Oryza sativa
  Clone ID: PAT_MRT4530_29664C.1.pep
IGKTPKPRPPFCPFSFLGPISLTGPPPRGGFSLQAGSPLNPQGSPPKSPLFLLNFSKGPPQKKKTICKAPPPPFFFQTAPAKGPKPKKMGKPQPLFIFFFLGYPRPGYLCFPGGFTPSNKLLTPYLAGFACMGGAGKFFLGQKKKKKKKKKKKKKKKKKKKKKKKKKKKKRGRGEEG

SEQ ID NO: 127189 - protein, 188 aa, Oryza sativa
  Clone ID: PAT_MRT4530_29665C.1.pep
MATPSHCLIFLFLCLPAVLVKANILGDIYPCPCKCSQENETSLHMYLHQFPALPGVPNRNEYGVINSTEPIGFGQMYVHDWLLTTGTSANENVVGRLQGFHLQAGQTTTSWYMAHTMVFSDGSFAGSTIEVFGLLGVKPNGQWSITGGTGTFASAHGTIKFTNSQSSTATDDIRELDIHVFHTPEAVI

SEQ ID NO: 127190 - protein, 180 aa, Oryza sativa
  unsure (1)..(180): unsure at all Xaa locations
  Clone ID: PAT_MRT4530_29666C.1.pep
PPIGSPPRRAAVAVGFTRPNSILSAPSPSGFIAGIRIPSRSGEFNLRPLVAVVLPWLAVAVRRRLPPRRPPSGRRPLVVALAPPPVGAAFAPPVAVAGNACARAVAVAVAAWPVLSRXPGRHHPSNRPRGRSGPSVPWTGGGPPAWSRSTVNRPPEPLTGGPRMWAPRSPPPPPRADVSP

SEQ ID NO: 127191 - protein, 117 aa, Oryza sativa
  unsure (1)..(117): unsure at all Xaa locations
  Clone ID: PAT_MRT4530_29667C.1.pep
GWRPPPRELTGTNHVKNKLKRTKYVACGIFQSSTEKLLSSKTXSCKRNLEVLISPNPAKRGRIGCNFFCRCPFIYYLPDSEXRGGASMAGALLLPRQFACATVAGGRRMTNPKTIYI

SEQ ID NO: 127192 - protein, 126 aa, Oryza sativa
  Clone ID: PAT_MRT4530_29668C.1.pep
ELTGTNHIKNKLKRMKYVTCGIFQSSTEKLLSSKTQSCKRNLEVLISPNPAKPGRIGCNFFCRCPCIYYLPDSESRNMNGGGGASHAGALLPGAAPAWLAPSSCHRGAREPMWQEEGASHAGAAPA

SEQ ID NO: 127193 - protein, 115 aa, Oryza sativa
  unsure (1)..(115): unsure at all Xaa locations
  Clone ID: PAT_MRT4530_29669C.1.pep
ELTETNHVKNKLKRTKYVACGIFQSSTEKLLSSKTQSCKRNLEVLISPNPAKLGRIGCNFFCRCPCIYYLPDSESXEKSLGPAPAMAGALLLPRRFACATVAGGRRQRGWRRPVG

SEQ ID NO: 127194 - protein, 98 aa, Oryza sativa
  Clone ID: PAT_MRT4530_2966C.1.pep
CSRARSRLCTCIMRLSLLLLPLPLFLVVSGACFVPDTVALPELPRRCLLESLAVLLLQLRLPLTGVAPPSLVEPTSVDRKPPVNAIVYAQLLAPSLTS

SEQ ID NO: 127195 - protein, 1084 aa, Oryza sativa
  Clone ID: PAT_MRT4530_29670C.1.pep
MVAAKVSTPAGGAVRDGLRRLTQLSLVSKVCSELEAHLGVGDRVLAEFIVDLGRASPSVADFDAKLKAHGADLPDYLARTLHTVIHAIPTHADDAPAPAPQNPASRGTGARVCGKDKAEERVRDGDPGLYQVCRGKVTGLADAGCFVRLDDARGREGLVHVSEMPGRRIAVKRGQEVFVKIVSVQGRNLGLSMRDVDQDTGKDLLPLQRARGEDDVPRPMANPWTDRAAATRRRTGVSGIVIPEDNQTGTASSRRPIRRMSSPERWEMKQLIASGVLNAKDYPAFDDEDSEGMNYQEEGVEEELEIELNEDEPAFLRGQGRSTIDVSPVRISTNPDGSLSRAAVLQSALIKEWRDIRNEDQRALVDSIPKDLNRPWEDPVPEVGGRYLAQELRGVGLSAESMPEWKKEAYGKTVTFGQTSRLSILEQRQSLPIFRLKNELIEAVRDNQVLVVIGETGSGKTTQVTQYLAEAGYITRGKIACTQPRRVAAESVAKRVSEEFGCRLGEEVGYSIRFDDHTGPDTVIKYMTDGMLLREILLDTDLSSYSVVMLDEAHERTIYTDILFALLKKLIRRRTDLKLIVTSATLDAEKFSGYFFDCNIFTIPGRTYPVEILYSKQPESDYMHAALLTVSQIHLTEPEGDILLFLTGQEEIDHACQCLYERMKSLGRNVPELLIYAVYSAQPAEMQSKMFEPTPPGKRKVVVATNIAEASITIDGIYYVIDPGFAKLNVYNPKQGLDSLIITPISQASAKQRAGRAGRTGPGKCYRLYTESAYRNEMPPTTTPEIQRINLGETVLNMKAMGINDLLSFDFMDPPAPQSLITAMEQLYNLGALDEEGLLTRVGRRMAEFPQEPPLSKMLLASVDLGCSDEILTIIAMIQTGNIFYRPREKQAQADRKRGNFFQPEGDHLTLLTVYQAWKAKQFSGPWCYENFVQLTSLRRAQDVRKQLLEIMDKYKLNVVSAGNDLTKVRKAITAGFFFHAARKDPQGGYRTIADHQQVYIHPASALFQQQPEWVIYHEVVMTTKEYMREVTAIDPRWLVELAPRFYRSADPTKISKRKRQERIEPLYDRYNEPNSWRLSKRRG

SEQ ID NO: 127196 - protein, 184 aa, Oryza sativa
  Clone ID: PAT_MRT4530_29671C.1.pep
MAAGGRWGHSDNPFEEVEIDQVNPFSHPRPTPLPHEPVAFYNDPGASVDPLDSKKGLKKKERELLAKEAELNKREQELKRREEALARAGVFIEPKNWPPFFPVIHVDISNDIPVHLQRVQYVAFASLLGLVICLFWNIICVSAIAIMWGDPRAWFLAAIYFITGCPGAYFSWYRPLYRAMRYYI

SEQ ID NO: 127197 - protein, 34 aa, Oryza sativa
  Clone ID: PAT_MRT4530_29672C.1.pep
WTRGPMVEAKEPVVLMNQILASFDGAVLIVETKG

SEQ ID NO: 127198 - protein, 98 aa, Oryza sativa
  Clone ID: PAT_MRT4530_29673C.1.pep
MRGSRATSAMRREEWVVPAGAASPLYRTGSAGGSRALCPRLKDGIGAVGLNREGGSGRWEMRPRRWIGRGDREGVGFQKVPVGGEKRWTAAGFGPTKR

SEQ ID NO: 127199 - protein, 114 aa, Oryza sativa
  Clone ID: PAT_MRT4530_29674C.1.pep
GGSPIVGEAAVHDGKDPAPGAELVHDHHGVTTHRELEGDIHLLAVEVSRPVLHRSPWLGLKVAAEGDALAQRRGLTAPKRPAPVRVVHHYACHVATRVVVVATPRALMLPVEHT

SEQ ID NO: 127200 - protein, 76 aa, Oryza sativa
  Clone ID: PAT_MRT4530_29675C.1.pep
RHCFGLNLVTNKLQLLHISHSHVDSAMKAGSRWLGRCCCEHKGNVAVRTYCMTDVYSKTQKGSSDSAFCLLLLIAP

SEQ ID NO: 127201 - protein, 88 aa, Oryza sativa
  Clone ID: PAT_MRT4530_29676C.1.pep
MTERGAPHRETAQAPLCRFGRGLRVKFQALSVCGKIATYQKSMRHKRCIQPGIYLTGANAPSLRGNTLAPVRDECLEALVLTGWGETG

SEQ ID NO: 127202 - protein, 85 aa, Oryza sativa
  Clone ID: PAT_MRT4530_29677C.1.pep
TYCMLKHQIPPGMTGENIIPYTGDNTLSTPHFDGIPYFEISGSIACIKIVCLAHEALYVQPFPGLRILDGGTSFMPSSLARDWSA

SEQ ID NO: 127203 - protein, 75 aa, Oryza sativa
  Clone ID: PAT_MRT4530_29678C.1.pep
SRLTSTQARETSIVKRQVANHISLPPARHSFILLPSQKTAVLHWLCSTFTICLICKNFYDKYFIGYYMINMIYFM

SEQ ID NO: 127204 - protein, 1004 aa, Oryza sativa
  Clone ID: PAT_MRT4530_29679C.1.pep
MVITTGKIILIFLACTAHVVTCSSLYGNETDRVALLEFKQAVCLDPKQTLMSWNDSIHFCNWEGILCSLRIPYRVTSLNLTNRGLVGQISPSLGNLTFLSILSLTENSFSGQIPASLGHLNHLQTLWLSNNTLQGVIPDFTNCSSMKALRLNGNNLVGKFPQLPHRLQSLQLSYNHLSGTIPASLANITRLNVLTCTYNNIQGDIPHEIGKLSSLQFLYVGANKLVGRFPQAILNLSTLIGLSLGFNNLTGEAPSNLGNCLPNLQLLELEDNCFQGQIPSSLINASKLYRLELASNNFTGVVPRSIGKLTKLSWLNLQSNKLQARNKQDWEFLDSLANCTELKAFSIASNHLEGHVPTSLGNLSVQLVQLFLSGNQLSGGFPSGIANLPNLIYIGLDNNQFTGAVPKWLGTLSNLQQILLHENMFTGFIPTSLSNLSVLGSLWLDYNKIGGPLPASLGNLQTLETLSISNNKLHGSVPMEIFRIPTIRLIDLSFNNFDGQLSARVGNAKQLMYLYLSSNNLSGDIPSSLGNCESLEGIKLGSNILSGSIPTSLGNIRSLKVLNLSHNNLSGSIHANLGKLWLLEQVDLSFNNLSGEIPTEGIFLNATAVHINGNEGLCGGALNLHLPTCYVMPLNSSRSERSILLYLVILFASLVSVIFIYLLLLWRGKQKKKCTSLTPFDSKFPKVSYNDLAKATEGFSASNIIGRGIYSHVYKGELFQGRDVVAVKVFSLETEGAEHSFITECNALRKVRHRNLVPILTVCSSLDTKGNDFRALVYKLIPQGDLYSLLHSTRDSENGFTSNIITFSQRLSIVVDIADALEYLHHNNQETVVHCDIKPSNILLDNDMKAYVGDFGLARLKADAAVPSVGDSNSTSMIAIKGTIGYVAPEYASGGQVSTAADVYSFGIVLLEVFLRKGPTDDMFKDGLDIAKFVSMNFPDKILDIVDPVLLQDAMAVKEKGLHYLHSVLNIGLCCTKMTPSERISMQEAAAKLHGIRDAYLRGN

SEQ ID NO: 127205 - protein, 333 aa, Oryza sativa
  Clone ID: PAT_MRT4530_2967C.1.pep
MTSSMSKSDKKKVLDFAAWSFNITTSVGIIMVNKALMATHGFSFATTLTGLHFVTTTLMTIVFRWLGLSQPSHLPIPDLIKFVIFSNLSIVGMNVSLMWNSVGFYQIAKLCMIPASCLLEVVFDRVHYSRDTKLSIMVVLIGVAVCTVTDVSVNAKGLAAAVIAVWSTALQQYYVHFLQRKYSLNSFNLLGHTAPAQAGSLLLVGPFVDFLLTGKRVDHFGFTSIALFFLTLSCVIAIGVNLSQFICIGRFSAVSFQVLGHMKTVLVLSLGFLFFGKEGLNFQVVLGMILAVVGMIWYGNASAKPGGKERRSVLPVRSEKPNGALDEKDGSEK

SEQ ID NO: 127206 - protein, 87 aa, Oryza sativa
  unsure (1)..(87): unsure at all Xaa locations
  Clone ID: PAT_MRT4530_29680C.1.pep
IVGCEHMVLMVVLMTIKNRFTSFGCETLTVPTTSQHGQRLYLLYSMVHCGAPDXEVAEISPRGSLSSPCLVXYKGVIIIQERCAVVV

SEQ ID NO: 127207 - protein, 118 aa, Oryza sativa
  Clone ID: PAT_MRT4530_29681C.1.pep
MSCNGCRVLRKGCSEGCVLRPCLQWIDGAEAQGHATVFVAKFFGRAGLMSFLTAVPEPQRAGKGGDPYYDGWFTGECARVFLADGMAWLVAAAFQSLLYEAAGRTINPVGGAVRLPLR

SEQ ID NO: 127208 - protein, 111 aa, Oryza sativa
  unsure (1)..(111): unsure at all Xaa locations
  Clone ID: PAT_MRT4530_29682C.1.pep
AVITVVIVELHNIFSYEPEEGPXITGWRVQGWXSKIEPVRIHPVXGSPANFGGQPPTHTVGITRVNKIMTSYEDLKNPTXYVAMTTTSDERNTCECXGDRVDRLSFDPNDL

SEQ ID NO: 127209 - protein, 64 aa, Oryza sativa
  Clone ID: PAT_MRT4530_29683C.1.pep
WPVTGSGYPRTTSLAAVRTYVPVLRLRLSPLAPFPSYRRRRPPLSPYVRRRRGVNPSSSSTLAA

SEQ ID NO: 127210 - protein, 93 aa, Oryza sativa
  Clone ID: PAT_MRT4530_29684C.1.pep
CQMYGIAKVPFMALLCLFILLMSKCILFQTPSVDLLLTSLSFLPPPSNGYLQRKYSVQSGLNCCFKGPGTGITKSILYAKLILTWKGPSDQLI

SEQ ID NO: 127211 - protein, 238 aa, Oryza sativa
  Clone ID: PAT_MRT4530_29685C.1.pep
MTKRKIEIKRIKNEEARQVCFSKRRPSVFKKASELYTVCGAEVAMLVKSPAGKFFSFGAPSVGFVLSRFHATTTSRKHSSMGVTIQHDNSATIKLHELNQQHIELQNQLQAQNEKMKALQEVAKKESGGKVMGWLNSKVEDICQEDLEEFKMVLESLKYLTRGIINQLFQNYAMFSNMMRVQHCVTALPNQQFLPSSEDVKPMIHHVPSSSYGWNTSIDSKPNSSDAHVVGARRYFPK

SEQ ID NO: 127212 - protein, 182 aa, Oryza sativa
  unsure (1)..(182): unsure at all Xaa locations
  Clone ID: PAT_MRT4530_29686C.1.pep
MNSLSNGLLKGLRRVLEQQRKPIDFYRKSQAWSSTVSFSDIDEKSEMGGDDDYTDSRRELEPQSVDPKKGWGFRGVHRAIICGKVGQVPVQKILRNGRTVTVFTVGTGGMFDQRVVGDADLPKPAQWHRIAIHNDQLGAFAVQKLVKNSAVYVEGDIXTRVYNDSINDPSENIPEICLRRDG

SEQ ID NO: 127213 - protein, 77 aa, Oryza sativa
  Clone ID: PAT_MRT4530_29687C.1.pep
EATECHNDSSLFSVNLRKRKFQLGGIKNIKNKFLEGMTAPPIHRDKYFQAHPHYHVCHFFPHYHVCHFLKGSTNFNN

SEQ ID NO: 127214 - protein, 98 aa, Oryza sativa
  unsure (1)..(98): unsure at all Xaa locations
  Clone ID: PAT_MRT4530_29688C.1.pep
PQLNGAAEXANGKILEALKKRLEVAAKGKWPDEMLSILXALRTTPTRPTKFSPFMLLCGDEAMMPAELGANSPRVMFSGGEDGREVSLELLEGVRVEA

SEQ ID NO: 127215 - protein, 66 aa, Oryza sativa
  Clone ID: PAT_MRT4530_29689C.1.pep
SVGRRCCPLPRHGDVAINLGHSPVSPGSRRTSLPRRLLHPRRRRLLRPPVPPRLCTGQRCHHHLRH

SEQ ID NO: 127216 - protein, 51 aa, Oryza sativa
  unsure (1)..(51): unsure at all Xaa locations
  Clone ID: PAT_MRT4530_2968C.1.pep
MVYPVIASFRNSFPVGPMCVSPPKGSPGFXPPPLGQKTGGPPPELWGAVLQ

SEQ ID NO: 127217 - protein, 762 aa, Oryza sativa
  unsure (1)..(762): unsure at all Xaa locations
  Clone ID: PAT_MRT4530_29690C.1.pep
FNAGATFARLVYRVLGSQLGPNVEAYVDDIVIKSRKAFDHASDLQETFDNLRATSMKLNPEKCVFGVRAGKXLGFLVSERGIKANLEKIDAIQQMKPPSSVRQVQKLEGRIAALSRFLSKAAERGLPFFKTLRGAGKFSWMPKCQAAFDELKRYLQSPQALVSPLAGIELWLYLAASPVAVSIALVQETKAGQKLVYFVSEALQGAKVRYIEMEKLAYALVMASTKLKHYFQAHRIMVPSQYPLDEVLRGKEITGCLSKWAAELSPFDLHFVALTAIKSLVLTDFVAEWTRFDTTNNAAEYEAVLMGLRKAKALGVRRFLVRTDPKLVASQVDKSFKAKLEGTRKYLEAVXYMGKCFAGITVEHLPXGQNEEADALAKSAACGGPHSPIIFFKVLYTPSVPADSQDIMAIDQVXLGEDPNDWRTPFVKHLKEGWLLDEESMAKQLQLRAMNYKLISRQLYRTGILQPMLRCVSFSEGEEMVKEIHXGICEAHQAARTVASKVFCXGIYWPTVLKVRVEHVKKCESCQRHGRSQTAPQYELQLIAPIXPVARWGLDINGPFLVARNNYKFAIEAIEYFSRWVEAEPLGTITAAAVQKFVWKNIVCRFGVPKEFITDNGKQFDSGKFKEMCEGLNLQIRFASVAHPQLNGAAEXANGKILEALKKRLEVAAKGKWPDEMLSILXALRTTPTRPTKFSPFMLLCGDEAMMPAELGANSPRVMFSGGEDGREVSLELLEGVRVEALEHMRKYVAGTSVTYNKMVRP

SEQ ID NO: 127218 - protein, 57 aa, Oryza sativa
  Clone ID: PAT_MRT4530_29691C.1.pep
FFFFLNKHAFVPIVCQNLEYMSIDNITRHFRYLRNVPLHQFPSTSFSKHQPSSPATQ

SEQ ID NO: 127219 - protein, 80 aa, Oryza sativa
  Clone ID: PAT_MRT4530_29692C.1.pep
GVNNDNIVLQFLPVLILMHAINSIDRDNLEFAISRNSILWENLMLTILRKHDHIGMLTAFFSHFRNCILYTSTALVMYQV

SEQ ID NO: 127220 - protein, 123 aa, Oryza sativa
  Clone ID: PAT_MRT4530_29693C.1.pep
MLSNNFVFTLYCLLQIFCEFNWEMDDYEDFADEKVKEEGLPEDEREKMKEFLKGEGRERKRELKQAKEARKKAIDDMDPKIKEGFENIQFYKFYPVKTLDTPDVSNVKARYINRYYRNAHHLM

SEQ ID NO: 127221 - protein, 36 aa, Oryza sativa
  Clone ID: PAT_MRT4530_29694C.1.pep
TSCQVLVEANHLTFLSGHKCLILTLAVHQADLCVGS

SEQ ID NO: 127222 - protein, 138 aa, Oryza sativa
  unsure (1)..(138): unsure at all Xaa locations
  Clone ID: PAT_MRT4530_29695C.1.pep
VREKKTRDEEEPSPATARRARSHADATRQQGAPAEASAPTDEAAAAGRGPGHGARHKSKQGRETHEKPPEPEPKPKPKXXPKPTPKXEPKPEPEPKPEPEPEPKPEPKPEPKPEPKXEPKPNPEPKPEPKPEPKTEPE

SEQ ID NO: 127223 - protein, 131 aa, Oryza sativa
  Clone ID: PAT_MRT4530_29696C.1.pep
MACKDRFTGNPVRVGVMELGRAPVLRFDWLMDIPRHKRGLPTPVLRVGAKLAKGLCEGSYYSPCPRWRSVEVGEVAVRNGSMACLGGGGRGESRRAKGARCWWYIFCTSQPPTLPPTKTNFHWRALRRPAL

SEQ ID NO: 127224 - protein, 83 aa, Oryza sativa
  Clone ID: PAT_MRT4530_29697C.1.pep
MAPAATIPTGDDGSGLPHRAAATKLLGDVLAHQIPTIASVIGSESSPPSSQPPLQRGGEKQHVMASSCGGERKIPAFGCDFGN

SEQ ID NO: 127225 - protein, 172 aa, Oryza sativa
  Clone ID: PAT_MRT4530_29698C.1.pep
MSSPKLPEFLSQELPGSRDNLKTEKKNRNFRTALRKNFALKWRPEVPARTSGLDLGCSGSDEVAADQVCGDKLSLPAPDRPRWGRLWEVATYRVRRLRIELAGYGPTSAVTDAASSSSGFGLADDDHRHLTQGVGASHGAMPSPNVLLELCHTPQVLNQAQRKWSILTLLLG

SEQ ID NO: 127226 - protein, 110 aa, Oryza sativa
  unsure (1)..(110): unsure at all Xaa locations
  Clone ID: PAT_MRT4530_29699C.1.pep
WSINLLSEATRAAADPKPSSPTKRAGAXRPPANARGRRRRPSPSPAAXAPPPRRRRHLGQIWRGNWIWRRHRWSRAEPHRRASNAAESPTTTPLPRPHRTAAATSPSSRH

SEQ ID NO: 127227 - protein, 168 aa, Oryza sativa
  Clone ID: PAT_MRT4530_2969C.1.pep
MEMYGLKWSDPWRLQQLQTDDIARVERITKEQSEALLLLSSLQDLEFYSCRKLQSLPTGLHRLVGLKILEIDWCPAICSLPKGGLPSSLQELDVCRCENEELKRQCRKLRGTMPCFPGSGCSLQVPNEGVKEAAGYKGHFRPPGPHGYLTWPGLFCRLLQDLINHRLN

SEQ ID NO: 127228 - protein, 71 aa, Oryza sativa
  Clone ID: PAT_MRT4530_296C.1.pep
MANPGLGLVRMGMASPTRGSSTCLFPPQPQSTTYSPRDDDMVVRTEVAGVQATASNDATRAKEGGKTVVSA

SEQ ID NO: 127229 - protein, 104 aa, Oryza sativa
  Clone ID: PAT_MRT4530_29700C.1.pep
MAPLGGTLRLCGSSWEEATSAGAAEQAAGLTGGGGRSSIALVGEGSAMERDEEWSECYGVNVVVEDFDNVGYGGVPGQQNSGAGFSSTKRMTSHMSAIVVVKST

SEQ ID NO: 127230 - protein, 524 aa, Oryza sativa
  Clone ID: PAT_MRT4530_29701C.1.pep
MAFNDDEKPATTPIPNGGSKQGLVTMNIPTYSKKDVALTADSVTAVVEIKATSSTAVREGLDLVAVVDVSGSMRGHKIESVKKALQFVIMKLTPVDRLSIVTFESSAKRLTKLRAMTQDFRGELDGIVKSLIANGGTDIKAGLDLGLAVLADRVFTESRTANIFLMSDGKLEGKTSGDPTQVNPGEVSVYTFGFGHGTDHQLLTDIAKNSPGGTYSTVPDGTNLSAPFATLLGGLVTVVAQDVRLTLTPKTADGDLDKMEVADGTDYTQTTDAKGEITIKFGTLFSGETRKVAVNFTLNESPDTEEYNATLAVARHSYAAQEAPQPAQNIVRLRKPEPTTPGSDDGIEERSVQAEVVRRRHADLIGKASELANGQKLGDARETIMDAQNALGDILLDDGDRMVNALQAELLRLLEYMETQALYDKLGHPYALATIISHRRQRAAGRGDEEVISLYVTPRMIAYLAQAKKFEENPEAPVPSADEDVKQEMAANPLAAISAPLGFYLENAIQALQAIQKIIAANTI

SEQ ID NO: 127231 - protein, 63 aa, Oryza sativa
  Clone ID: PAT_MRT4530_29702C.1.pep
FKGGLAVFFFWWRRLEFPFPLVLGEPFFCCGCISSIFPPPQWWPRRFPPPPRSFSFSHLGLQV

SEQ ID NO: 127232 - protein, 225 aa, Oryza sativa
  Clone ID: PAT_MRT4530_29703C.1.pep
MEAAAATATTFSHLRVPYRRPALTRRSEMDKLNRVFKHVRGLPPCQSTVTVGFDVLSGLLACQPNRPLTTVDVLWCARFTEADMPPTRTPIPNPLATLLAGPPTAASHAAAIAGHGCYSSSSSSHHLHPPFPSPARHHHPPPVWLTTGVLPRSGHRSRGGGASKVFRNAVDEEVCRRCLATWLVAVGGEGRQQSLSGVGWPRGAPAALRAKVGRQFRWRRTLRLA

SEQ ID NO: 127233 - protein, 387 aa, Oryza sativa
  Clone ID: PAT_MRT4530_29704C.1.pep
MAPKKVLLLCGDYMEDYEAMVPFQALQAYGVSVDAACPGKKAGDSCRTAVHQGIGHQTYAESRGHNFALNASFDEVNINEYDGLVIPGGRAPEYLAMDEKVLDLVRKFSDAKKPIASVCHGQLILAAAGVVQNRKCTAYPAVKPVLVAAGAKWEEADTMDKCTVDGNLVTAVAYDAHPEFISLFVKALGGSVTGSNKRILFLCGDYMEDYEVMVPFQSLQALGCHVDAVCPDKGAGEKCPTAIHDFEGDQTYSEKPGHDFALTASFDNVDASSYDALVIPGGRAPEYLALNDKVISLVKGFMDKAKPVASICHGQQILSAAGVLQGRKCTAYPAVKLNVVLGGATWLEPNPIDRCFTDGNLVTGAAWPGHPEFISQLMALLGIKVSF

SEQ ID NO: 127234 - protein, 423 aa, Oryza sativa
  Clone ID: PAT_MRT4530_29705C.1.pep
MAPKKVLLLCGDYMEDYEAMVPFQALQAYGVSVDAACPGKKAGDSCRTAVHQGIGHQKGERKGEYTESHNGTGKTYVQLGLFLRAHNEMTDFLTYAESRGHNFALNASFDEVNINEYDGLVIPGGRAPEYLAMDEKVLDLVRKFSDAKKPIASVCHGQLILAAAGVVQNRKCTAYPAVKPVLVAAGAKWEEADTMDKCTVDGNLVTAVAYDAHPEFISLFVKALGGSVTGSNKRILFLCGDYMEDYEVMVPFQSLQALGCHVDAVCPDKGAGEKCPTAIHDFEGDQTYSEKPGHDFALTASFDNVDASSYDALVIPGGRAPEYLALNDKVISLVKGFMDKAKPVASICHGQQILSAAGVLQGRKCTAYPAVKLNVVLGGATWLEPNPIDRCFTDGNLVTGAAWPGHPEFISQLMALLGIKVSF

SEQ ID NO: 127235 - protein, 169 aa, Oryza sativa
  Clone ID: PAT_MRT4530_29706C.1.pep
MVATTAAATARRWEEAVVATRRGEEATATAQLGGYDGGSTRGGGGGGDLAWRAGDSGSPTRGDGSGGQDAERRRRWQRPRGGDLMLKASVQFDRRSTAYKKPKRPRDQKTSSPPRGRGRYPGTVAVSLATGITRGLAEIVADSREGDGAVAYDSSSRKPATHYAKGKEL

SEQ ID NO: 127236 - protein, 804 aa, Oryza sativa
  Clone ID: PAT_MRT4530_29707C.1.pep
MAEVLLSSFAVSIIGKIILFVSEHGLMGIKSDRSVHQELGKLQNSLQAISGVLLDAERKQSTSSALKEWLRKLKDVMYDIDDILDDASTETLKRRVSKDVVTQTNCVHISRLKLRRKLLKRKKKWSSRIREVHEKLNEIAASKKDFGLTDWTVGGQCSEEPERESYSFVYQPDIIGRDDARDEIVSKILRAAEHHDIFVLPLLGLGGIGKTELANMVYHDQQIRERFSKMMWACVSNKFNLKNILQDIIESASGESCKHLNLEHLQNKLRGILQNGNYFLVLDDLWTRDVNEWRELRNLLSSGARGSVIIVTTRENVVASMVGTSDPYKVGALPFHECMQIFTRVAFRQGEENKYPWLLKIGESIVKKCAGVPLAIKSLGSLLFTMRDETQWLRVKEDHLCKIVQGDRDIMPVLKLSYNALPAALKPCLSYLSIFPKDFEYYRRCIIMFWMAHGLLNSNKLSEEIDVGNQYIIELIGSSLFQDSLITFDGSMPHCKLHDIVHDLGRYVLDTDLAVVNCEGQQVSETVRHLVWDLKDFTHEQEFPRHLIKARKARTFISSCNHGSLSKKFLEVLLSKLLLLRVLIISGVRIDELPDSIGNLKHLRYLDLTWNKTIKYLPNSLCKLINLQTLDLYRSDQLIELPRDVNKLISLRYLSLTSKQKQLPEAGLRGWASLTSLQLHSCSELTSLSEGIGSLTALQMLWISDCPKLPSLPASMTHLSSLRELFIDNCPELDLMHPEEAMDGLWSLRSLQIIGLPKLERLPDTLCSASGSLRYLLIEQCPNLRELPSFMQDLTNHQRQGGIH

SEQ ID NO: 127237 - protein, 90 aa, Oryza sativa
  unsure (1)..(90): unsure at all Xaa locations
  Clone ID: PAT_MRT4530_29708C.1.pep
FAECYNIALNIKHTRAHQGLARVHYLKNRKKAAYGEMSELIKVAKDSASAYEKRSEYGERDEARCDLNMASLLDPTRSYPYRXYRAAVLM

SEQ ID NO: 127238 - protein, 140 aa, Oryza sativa
  unsure (1)..(140): unsure at all Xaa locations
  Clone ID: PAT_MRT4530_29709C.1.pep
TRRCRSLVPASACEVRDKGGVVPVWGRASACEVRPSVGRHRRPSVGRRRHRPPXSLPPRARGRRTHRLPFSRVGHHRPPSPXASAATGHPPSLPPRARGRRSHRLAFSRVGHRRPAALPFSRLVPVGRPQFCSSESQSPT

SEQ ID NO: 127239 - protein, 66 aa, Oryza sativa
  Clone ID: PAT_MRT4530_2970C.1.pep
MEQAVMVQVTAARLRLRVRGKATETRRIRTLFLQVSLRERESAGDGVGRCSASAGAALRGHAGGGA

SEQ ID NO: 127240 - protein, 76 aa, Oryza sativa
  Clone ID: PAT_MRT4530_29710C.1.pep
KCINVALKKKITCKTAFRCGQLDTLQISLSCKSPLIPVQCIIPQIWDNVQATPLTLNNHILWRRKTSQEYSKPVYE

SEQ ID NO: 127241 - protein, 311 aa, Oryza sativa
  Clone ID: PAT_MRT4530_29711C.1.pep
MGAAACDAAVEELTRLLDQVEEPLKQTFQNVHQGYPTDTLVRFLKAREWHVSKACDMLVDSLNWRIQNEIDSILEKPIIPVDLYRSIRETQLVGLSGYSKEVHYYVQSHIQINEYRDRIVLPMASKKFGRPISTCIKVLDMTGLKLSALNQMKILTAISTVDDLNYPEKAETYYIVNAPYIFSACWKVVKPLLQERTRKKVHVLHGCGRDELLKIMDHSSLPHFCQREGSGSSKNSSNDVNNCFSLDHPFHQELYHYIDEQALNQELIKQGSLHVNIPDQDPEDAKIVEVIEAEFHKLGEQNGSVNGEHKE

SEQ ID NO: 127242 - protein, 342 aa, Oryza sativa
  Clone ID: PAT_MRT4530_29712C.1.pep
MGAAACDAAVEELTRLLDQVEEPLKQTFQNVHQGYPTDTLVRFLKAREWHVSKACDMLVDSLNWRIQNEIDSILEKPIIPVDLYRSIRETQLVGLSGYSKEEDVYGSKVLPTVGGIPVFAIGVGQSTYDKASVHYYVQSHIQINEYRDRIVLPMASKKFGRPISTCIKVLDMTGLKLSALNQMKILTAISTVDDLNYPEKAETYYIVNAPYIFSACWKVVKPLLQERTRKKVHVLHGCGRDELLKIMDHSSLPHFCQREGSGSSKNSSNDVNNCFSLDHPFHQELYHYIDEQALNQELIKQGSLHVNIPDQDPEDAKIVEVIEAEFHKLGEQNGSVNGEHKE

SEQ ID NO: 127243 - protein, 87 aa, Oryza sativa
  Clone ID: PAT_MRT4530_29713C.1.pep
MERLNLVEYEMLKFWPSMLDFVSPEYVGRIARYLPVPFLSLARYHFAMCGGRVARSFHIILDRSLGCGNTGTDAASAPGDSGGCCRG

SEQ ID NO: 127244 - protein, 115 aa, Oryza sativa
  unsure (1)..(115): unsure at all Xaa locations
  Clone ID: PAT_MRT4530_29714C.1.pep
MWTGQMFQYHYRLACINTIDHNAAGELLNKRSAEAIYGRLTHDFLSMSREGDFSKLDSAILRPINRQFEGGIYHGRIQMSLYYAVKTPXLMLLTPGVRCEIQKKIXLSIYNYHAE

SEQ ID NO: 127245 - protein, 70 aa, Oryza sativa
  unsure (1)..(70): unsure at all Xaa locations
  Clone ID: PAT_MRT4530_29715C.1.pep
ISGHSLPNFLGKKHKNNATSXVNYHGKSSNIIRFKVIVXELNXGMQTVHNRWKVLAYYIFPYQQDITRGK

SEQ ID NO: 127246 - protein, 105 aa, Oryza sativa
  Clone ID: PAT_MRT4530_29716C.1.pep
SQTVSSVFRIQAVPAACPLLPSQLTLREKVWRAELFLLRLCVCWISMLKIASWQFHRQLDAVSHVLVQTVAGCFAHHIHATQYKHRVCAQMPNTIWEFCRWIITF

SEQ ID NO: 127247 - protein, 124 aa, Oryza sativa
  Clone ID: PAT_MRT4530_29717C.1.pep
MVRRVANSSSTTASGTRRLDLECRAATALPPPVGIAGSSPALDLLLLTAVCLLPTSNDEGEGWNGKLDSAATGELVGSTSRENRLSIRAADLVAISRSYAADLVTVSRSASPTPSPPPCSALLR

SEQ ID NO: 127248 - protein, 89 aa, Oryza sativa
  Clone ID: PAT_MRT4530_29718C.1.pep
GSLELLHLKTLVALPGRSLRVIVAELARQAAPTPPQQPTLQLDQRPPHTQEPSPARSGGATRSGDALNGAAQSPTAALPSPRGAPPPRH

SEQ ID NO: 127249 - protein, 50 aa, Oryza sativa
  unsure (1)..(50): unsure at all Xaa locations
  Clone ID: PAT_MRT4530_29719C.1.pep
XETXLFHLFXSYDXTSMFXGVRRXXGIKGRGKHSXTXQGSVXNRLHHYSI

SEQ ID NO: 127250 - protein, 86 aa, Oryza sativa
  unsure (1)..(86): unsure at all Xaa locations
  Clone ID: PAT_MRT4530_2971C.1.pep
PLDPDRSHDDAGPPLTPILVVPAGSEGCMRGRSDGIRIDDLVSLSFSPXNSDSTYDCGDXCGGALPFLHGSGTRICLQVSGTLETS

SEQ ID NO: 127251 - protein, 82 aa, Oryza sativa
  unsure (1)..(82): unsure at all Xaa locations
  Clone ID: PAT_MRT4530_29720C.1.pep
LSXFLSKFPXNXQIHPLXXYFXXQTFSXXXXXWYIXXLXXXSXMAKXXVSXGYXXXQTNVTXXAVQCVAXXXXXXMCCHVSX

SEQ ID NO: 127252 - protein, 63 aa, Oryza sativa
  Clone ID: PAT_MRT4530_29721C.1.pep
PLAIQAAPLQGKPNGRCPTGHYPRWHQAACVTSRLSSYALRALLSGDLCSTTSCHLHIVVSIV

SEQ ID NO: 127253 - protein, 83 aa, Oryza sativa
  Clone ID: PAT_MRT4530_29722C.1.pep
CDSLPCLHSRKLASKSFFPQYTFLFFSFMKFHAVFLASLDSMFSPQHPPSGHSVNTGFASFYYQRANNVPVSVVIINVGIGLP

SEQ ID NO: 127254 - protein, 569 aa, Oryza sativa
  unsure (1)..(569): unsure at all Xaa locations
  Clone ID: PAT_MRT4530_29723C.1.pep
IHIPSSQDPTNFFLGPMGNPDPIEFINAETNRIPYRQTNPDLVKWKSTFRSWPSPLKGYKTWCKRVSAAKQNHWEEMGIAQCLSXSLADIKKNEPMLSVAAYFWSNTLNYLFRQGPITPTLPDVKMLICLDITTSIYPFQLDIKCDHTLKTKQIHGGWKGYIAKHKGTGSVSEREHVAFLAKWLERDVFCGSTCGPTVNYQHFAQFLVQKKHIPLGKYLLAXVYQMLHSAACNIVKDEVINYGGPWWFLQLWINMHTILALDSPSLALSALPTDYADNEHISTRRSMSFGEAAIVYSRENQSVDGFKDXFYRFYGGFALAARVWLPIXRLNDLKDPIDPRSRENVIAAITPCILPTDISQGKTAKPSFEFYHPISSFEFGLGQLPISLYFIRMVQARDTVPSALIMQKWLTLEGPVLGTCNEIHLHLFRHPSFDQWWVEWKKHLFXMSSNFCLTIVDEKIRINVTEXACPHXSVSNHPIVYIPALSLSGTKLLPPLIGLNAPKVTSLLDSSSTEPIIEIPRREILASAXKTNQKPSAKKKKTSQDDELADIDPEVDAFLDNEVMGEEVD

SEQ ID NO: 127255 - protein, 115 aa, Oryza sativa
  Clone ID: PAT_MRT4530_29724C.1.pep
MARTLHDPNSRSGGEKRRPLQLLLPWSRRSPTSRTDQWSSRRSGSSVGWRERPPRRSRRRTAERGPFEHEDGGAEAADELEDDLAVVLPDVGPQLGEEVADLREGEQRGGALEDG

SEQ ID NO: 127256 - protein, 213 aa, Oryza sativa
  Clone ID: PAT_MRT4530_29725C.1.pep
MTHQDVHGDMTSDNSIIVAASRTHQWSSRRSGSSVGWRERPPRCSRRRTAERGPFEHEDGGAEAADELEDDLAVLLPDVGPQLGEEVAGLREGEQRGGALEDGGDYGGSGSIAFHLLKQRQLLKQQREQQLAAATAATWGTHRAGVGPPLGLNSSGWPPLQKSHQQASSAAGMRAVFLSPPGGKPERTGTGVFIPRQGGAPTEPKKKLSAHLL

SEQ ID NO: 127257 - protein, 257 aa, Oryza sativa
  Clone ID: PAT_MRT4530_29726C.1.pep
MEAVAVHASFSSYSPPVVAGGRDDAGSSRSMSRLPARVAGAVARGIVTFVFATVGTILGAITGGLIGLATESGMVRGTGIGAISGAVVAMEVVDSSVAMWCSHDSGIWSVLYVLDVIWSLLTGRLVREKVDPAVQNAVDSQMNAADAPFRESAPTLAEMFDTGIPGVAAAATGMPADAIAALPVTTFAAAAGGDDRAGCSVCLQDLEDGERARRLPECGHTFHLRCIDSWLLRHASCPLCRRTVVAAAVAVDDVVVG

SEQ ID NO: 127258 - protein, 137 aa, Oryza sativa
  unsure (1)..(137): unsure at all Xaa locations
  Clone ID: PAT_MRT4530_29727C.1.pep
SKLRVKVHHRSLNLYRGIIPVPKLVNRLFSSSNLFDCGIPVPKLADHSFRSFNLFSYVTPVSKLGFEYYLGQIGRDWGDTTEQVGRSKXVIYKYSPTPSTTTSAGTTSAAGGRGQGTGGAGGAPARVSTEAMTVDAA

SEQ ID NO: 127259 - protein, 142 aa, Oryza sativa
  Clone ID: PAT_MRT4530_29728C.1.pep
SPPSSKAPPRCSPSRRSATSSPSCGPTFWKDDGEVILKLVGGLGAAIFVLEWAALRRPPPRAPRRPLPPSNAAPAPPRGPLRRWVGARPVAADCNVEEESATYWANGATTGGVVGVGAAFRLLTWSWGRGGFWPWGAETAAS

SEQ ID NO: 127260 - protein, 53 aa, Oryza sativa
  Clone ID: PAT_MRT4530_29729C.1.pep
CKRLGCQFSGCSMMQAHVFELVIDGRLLLYLQRFKQTSSFFCKLNKDFYQQTT

SEQ ID NO: 127261 - protein, 209 aa, Oryza sativa
  unsure (1)..(209): unsure at all Xaa locations
  Clone ID: PAT_MRT4530_2972C.1.pep
PRRRRSSPAAKPAASREGGGEVLPPXATPPGVTWTGRRRRRRPSTAAGGGDGGAVWGGSRSGASKAGSDHPTPGSGTTAARGGWGGGGSXAQGRRGWPGAAAWARWRWLDGWDGGCLEAAAAGSGGGSSARGRQASAAGQPGXRRGALLSRVGYAARPDGVRRPGDGGXXGCXRSRSSRSVSGVGASPDGSVKGAGGGGSSSPLPVGTL

SEQ ID NO: 127262 - protein, 163 aa, Oryza sativa
  Clone ID: PAT_MRT4530_29730C.1.pep
MPKRTTHTYSSEDALPEGPESDLFVYYCKHCASHVLITDTEMPKRKTDRAHVLDKKKHLSRLNVKEAGKVLLKRGEGKLEKQFRMSCLGCGLFVCYRSEEELELAPFIYVVDGALSSVAAETNPHDAPVPPCITQLEGGLVQVAIEVEDRAQRSAITRVNADD

SEQ ID NO: 127263 - protein, 55 aa, Oryza sativa
  Clone ID: PAT_MRT4530_29731C.1.pep
ILVVDFINAFRDSPTSNMRDQEQTNPKLKASQVTYQGITFVRGTHAHVTQGEQDD

SEQ ID NO: 127264 - protein, 73 aa, Oryza sativa
  Clone ID: PAT_MRT4530_29732C.1.pep
MEDGVRSGAHRGVRRGERGSGSRSVSVSARGSATDGGERIEIEVRRRPSCLVGVGVESSGGGEGGAAPDRGGE

SEQ ID NO: 127265 - protein, 94 aa, Oryza sativa
  Clone ID: PAT_MRT4530_29733C.1.pep
MQLTASDVMAMADGEISWAVMCGVMQGSWQFLVVEMGPLELSDLSPTYGATRENVNAWCSLKSLWKVASAYARAHILLKGILKVHSQAFEWEMD

SEQ ID NO: 127266 - protein, 106 aa, Oryza sativa
  Clone ID: PAT_MRT4530_29734C.1.pep
MHGNLFSLLKPQYVLRLPHGFRGNCAVTAGVRKPRQKVSQIGCARPYAQPRRVGSGSAVPYRFCTLTTRGGGGNERQGVATGTRMQVVVILKLPASRLPRWLNVHR

SEQ ID NO: 127267 - protein, 194 aa, Oryza sativa
  Clone ID: PAT_MRT4530_29735C.1.pep
MEVEGIVKLRPLRGREWAPALRWTKGGDVGGHTCSRERRTWGGRWLAERVREMAGTASRRAYLRRQREVAVVVAMGWGRRGKQEKWNHLVEANSMARWFGLRSSGEGDRVVAAMAGHGRERERDGALIGREAVVKGGCGGDREVHGRRWREDSNYGGRLRFLSGEGRGVGGGVSRAQEEGAARLGCGLVWAGSA

SEQ ID NO: 127268 - protein, 53 aa, Oryza sativa
  Clone ID: PAT_MRT4530_29736C.1.pep
ESGTGQAAAEAAAKRSTSKRRWLALGDPDMERKRRVASYKAYSGKEGKGSSKS

SEQ ID NO: 127269 - protein, 48 aa, Oryza sativa
  Clone ID: PAT_MRT4530_29737C.1.pep
MGGDGDGSAMAWAFDDVVLETGGSGLASGGAPMRQNLRLAEVVQLLEH

SEQ ID NO: 127270 - protein, 189 aa, Oryza sativa
  Clone ID: PAT_MRT4530_29738C.1.pep
MPARKGKAKAALSSPLPARQHAASPGQGGPLTLERYHRFFVDPWGTRLTIDHLNHIISMHGFVKLHRSNKGDIMRRLVGQVDLQPPRRSTLHRAAEGPPSDAVIAADVVSADVDAIGWTECPIGSVAVLAASPGDAPEPVEPDPRPADFVLAGRRARSKRSRSSAYGHRPPEPDDGGSSMEVAEKEDGE

SEQ ID NO: 127271 - protein, 268 aa, Oryza sativa
  Clone ID: PAT_MRT4530_29739C.1.pep
APTWTPSGGRSAPSAPWPSWPRRPGTRRSRWSPIPAPRTSCSPGAARGPSGAAARPTVEEKEDGEWLPPPPSTPPRWTRSPTPPPPPPSPPHATPPPPPPPPPREMVAPPPPPPPPYYGQPTLAPPPPPPPPYCGHPTLAPLPPRPLHFGASPAVVPWLSWGLPLPAAVPLAPPPFPGAPAFAQHPPAGQRPFWSPPTVPPCYPAPFWGAPFWGAQPPPPRPSPLPHWGHIRSPPAPALHQPPPPTLQLQQQQSPPPPPGVFWGRPAY

SEQ ID NO: 127272 - protein, 416 aa, Oryza sativa
  unsure (1)..(416): unsure at all Xaa locations
  Clone ID: PAT_MRT4530_2973C.1.pep
MDQSEHHHRLAFVAADWCFRLHGWPIMXAVVGRLRLHRPACLRRRRLVFPPARLAYYAAVVGRLRLHRPACLRRRRLVFPPARLAFMPLLLGVHVFTDRLAFAAADWCFRLHGWPIMPLLLGVYVFTDWLAFAAADWCFRLHGWXLCCRCWASMSSPTGRFDRRRLVFPPARLAYYAAVVGRLRLHRPAAASAADWCHRLHGWPVITPTDAIFFTAGYIAVTTNRHQYLQHKLPTFAMAADWFLHFHGCMILPVLIGLTIFIAGRLVCCXLVPSPLHLVYTATTTDGHHRLPPPTXCYAAADWCFYLHNCASSLPVXTSSRQHNFVIMVERLHLYYLRYQQTLLLLLHKFCYITNHDVVVNLDISACDAMLFYYNKRLSNIQDFYLDIFNTYLQSSNNYSTTRGYSSRLYVQLFPN

SEQ ID NO: 127273 - protein, 111 aa, Oryza sativa
  Clone ID: PAT_MRT4530_29740C.1.pep
WLSWGLPLPAAVPLAPPPFPGAPAFAQHPPAGQRPFWSPPTVPPCYPAPFWGAPFWGAQPPPPRPSPLPHWGHIRSPPAPALHQPPPPTLQLQQQQSPPPPPGVFWGRPAY

SEQ ID NO: 127274 - protein, 209 aa, Oryza sativa
  Clone ID: PAT_MRT4530_29741C.1.pep
MAAAAAADSTSAVPPAVVSAAEDTLAAAESVGDHLAEMVAAAGEDPDAIAELPPLRRARAFLAMAKAAASLFAGRQLSRCSGVDPDEHPIKKEFERLSLWEEKLNRFEDWDKAPLRPTTTVNTQAAARFIGHSLPHLTTDQKRSMQAISRGEGGSYSGNKRKPQPPRPNKKSVRAATEEFLAKAALELSGHNDSKVKGPIRLLSDEDED

SEQ ID NO: 127275 - protein, 178 aa, Oryza sativa
  Clone ID: PAT_MRT4530_29742C.1.pep
AAGVCQILSKLEMMKCVVVYWIGVSSDVVEAVDKACGGISCLKTRLKVIEVSAKVLEAIAFGNIVLPTEKRCDAVNVWIGFARRTKPLVGHPEHDDDDGDAEAPKINLDSEVWQSLESAIVSIVLTLPSNSQADILSDWLQSKHAKCPDLTEAFEVWCYRSKAAKRRLSFLSHANRVS

SEQ ID NO: 127276 - protein, 1042 aa, Oryza sativa
  Clone ID: PAT_MRT4530_29743C.1.pep
MVEKLYAESAQEQGKLLCIESLLQDLHTLFRMVHRKISGINDSALLMISANNEQYHQLLQRLWSLTLDIDDMLNKVSCYLTKTRVLSIQVHSSFILRRLPFRRRIVHKIKQSIVELQECYAQTYRIRFPAKHRDISTPMVCQGAHSIRPEGILGREKEVDDVLTMMQADHGKAGLSVLPITGMAGIGKTTLAQLVFSHPWAVKTFGDDRIWVVVSSSFDDMIILSRLAEFLNTRQCNTVDSESLQCLVKQRLCGRKFLIVLDDVWGQNLQKWKLLIEVLESAKSGSKMIVTSRVPDVVTMTNSLRPYTLKRLLPIDSSNLLTQWMQNSAELPPRLIPIRKMIADTCCGVPSLLLSASNKLKSIRKTEVAWQHVLSRFDLVFYADPLLLDATYVSYQQLPSNIQQCFLYCSLFPVHSFTPEQLTGMFVADDLIKLSSSKSDMHMYFSKIMTEHYYDVMQKPRHKAYAIYKMHPGMQLLAQMISRGFHLAIDARKELVWPVENAKKSARCLSLLVDSKTTELPTELFEMGNLRTLILLRDEKMLLSDKKCSITDIPEEFCKCLIDMRVLHMQSCRIKRVPKLIGMLKKLAYLNLSHNDIEIIPDSICNLQFLKNFNLSRTEIAELPESVGKMQALQVLDLSHCEKLLHLHESVSNLVNLQILNLEGCHYLAILPRSMKNLKSLAYLNVLECPLLTQMPCQMNQLRNLEILPRYIAAENHEHTISELRPLVSLKELSICNMENASFDDARNVILQKKNRLVSLALSWTGSCTDPMISSKAQQILELLKPNRGLKVLCIFSCPAKKLPSWITSMPAYLKSLTEIKLVNLACECLPPLGQLPLLKIVELSGINAVTRVGDEFYGDDGTFASLEKLSFFHMRNLEIWLPSQREAIFPNLQELTITQCPKFRAVHVKLPVVKSLIMLLNNDKLIGSRGALEGFSQNLKSLSVSLCDGLLECSECEGLRELRGIEELHISRCTELISLPHGMQHLSFLRTLTITECTNLETFPEWLKNFTSLRSLHISSCPKLHIPKSLNNLSNLEISLE

SEQ ID NO: 127277 - protein, 90 aa, Oryza sativa
  unsure (1)..(90): unsure at all Xaa locations
  Clone ID: PAT_MRT4530_29744C.1.pep
MLGXAFMVNNCSRXVXWESRKWAQRLEXIXTQQAXVTVDKDVPINQDFXSXXXSXPXHGAXEVCXEXXPXXXISXPXNXDXXRPEFRXXS

SEQ ID NO: 127278 - protein, 126 aa, Oryza sativa
  unsure (1)..(126): unsure at all Xaa locations
  Clone ID: PAT_MRT4530_29745C.1.pep
LDKLEIDTTVLFNTEVCKKLPSLRHLVFFMAKNVRSFTEEEEKALXTLTSLPXLDFCYCPNPLSLPKMLHCLSSLKQLPIKACPGIKSLPENGLPXPLHELYVSSCSAELKEQCKKTINARCVYVE

SEQ ID NO: 127279 - protein, 274 aa, Oryza sativa
  Clone ID: PAT_MRT4530_29746C.1.pep
MPPKVVAVAAGEAHTLALTGDGEVYSWGRGMFGRLGTGREADEHVPTVVAAGGRPRPRFVAVASGAYHSLALDDEGSLWSWGYNIYGQLGYGEENSLFPCLVERFQDLGSPETLQSEAQNSSTQSSLKLSSVKAGGMMSFAIDTLGAMWMWGNCPQQTDAGEFCIAPSCVPLPVWDFHGHTVVKVACGNEHVVAAVSAGETYTGGDLVCYAWGNNNHGQLGLGDKESRSRPVLISAFSEGSSWEVYEIACGAWHTAVLTNKKSFDVDLESRCWT

SEQ ID NO: 127280 - protein, 98 aa, Oryza sativa
  Clone ID: PAT_MRT4530_29747C.1.pep
YPHPRYANIYKLIQFQLTVNVRRTRINAGAAASKKKKKKKKKKKKKKWGVPLNAVELLWANLSMETPGSSGCTTEPPPDNFVKRQRLVRMDRWLLIIM

SEQ ID NO: 127281 - protein, 68 aa, Oryza sativa
  Clone ID: PAT_MRT4530_29748C.1.pep
EREMCKWPQQQQHHGKQTNKPGKHFVWTRTKMELGKSFASLTFRDRFPPSHLKKKREISSYTSPLHTL

SEQ ID NO: 127282 - protein, 66 aa, Oryza sativa
  Clone ID: PAT_MRT4530_29749C.1.pep
SADESLDCKTLTLTELGRNLHKERLAVYRWHASFICSGNTMPIVLVDWFIVTTRHIKSTQRRQRSH

SEQ ID NO: 127283 - protein, 59 aa, Oryza sativa
  Clone ID: PAT_MRT4530_2974C.1.pep
AEVFFFFFFFFNVITLLFKIFDCFSMSECHLHRIDVTVSTFYLQTNWHSIQTYNLKKEM

SEQ ID NO: 127284 - protein, 101 aa, Oryza sativa
  Clone ID: PAT_MRT4530_29750C.1.pep
FPRRPPTGGEKTPISKARWAYKPLIGGGPPPGNQHLGAGGTDHNWARGGKGPSRPKGKPEGEGGPPPRALKEGKGTPGGGKSTREKAQGGASLDRGPATPA

SEQ ID NO: 127285 - protein, 143 aa, Oryza sativa
  Clone ID: PAT_MRT4530_29751C.1.pep
MWGPHVKWRLLWRVCLSREGSRGPHLSMRWGPRGGAVPASSCALFEGARWRSEYFVANDSLVAWDFVVLDAISYQKSTEQPIRSLVTLAFADLLQHHGQSARKFTTRVWQQSEAENHLYELANICVATGNSDFYWLAFCSCLS

SEQ ID NO: 127286 - protein, 589 aa, Oryza sativa
  Clone ID: PAT_MRT4530_29752C.1.pep
MDMDEPGGAAAAAADANNGAGSKDCPLPPPPPKTAKACAAAKKPRSVSSDFGEELDLEQLGAKQQQQQQERKLSRQDRVELSRSFQHAVSSHDWDGAEALVRRADAQGLNDVLCVAVDAIWFLSDKEELAAVVALIRRIVSEGANDFTRAALRTSFLASCVSACRGRTTSLADAVSFMGQKLNERLQESHGDEVLKAEASAKVHKFTEWALKCIGLHSRVRENKGRGNHGTIIEVQLQLSAFKTFLDLADNDLTGKDFTEAFDAACFPLTLFSNTFDQGWASGISAAAIQGLLELLVEGGADNVNQCFLEAARYGSTELVRILLQIARRNSLDIDVDLALGFAAHYGKLDTMGCLVEEGNAVAFLGPLMRAAERGCLQVVEWFVNLGCRDMELCLALTAATSSSQVAVAAYLLPLVPKHVLAPLSVEILKAAGERSTGSLHGVDFLLRSNFLNDPAATYAVADNIAKSADEAVDAKLRSFMLEHWSEAAFSEGFASAQEHFVNFMRIMEKGESPICLRDLPLELVIAMAYLPLYRECVESGGRLLPQKLRGQLVEAAGRLEGRQLDRASQGTELLAILEHHLPCFMIQT

SEQ ID NO: 127287 - protein, 106 aa, Oryza sativa
  unsure (1)..(106): unsure at all Xaa locations
  Clone ID: PAT_MRT4530_29753C.1.pep
XXIXXXXXAYRVXSXSCXLXTXXTPGSSXXXXXSXFXXRXXAIXRLLSPPLSPRTXAXVWFCYSPLTASRXARXRRRWXWRRRRARDGGGRAGDGVGGEEERVFAE

SEQ ID NO: 127288 - protein, 45 aa, Oryza sativa
  Clone ID: PAT_MRT4530_29754C.1.pep
SNFFILKDWAGVFLEDRCKIGCIDPYDLKISPPSHFLYRSWVHIV

SEQ ID NO: 127289 - protein, 159 aa, Oryza sativa
  unsure (1)..(159): unsure at all Xaa locations
  Clone ID: PAT_MRT4530_29755C.1.pep
AAGIRHEELGKEQQEEARKIKHELVKEQQEKAGNIKQELVKEQQEKAGNIKQESGEEQEKAGQXKHDAGQRAXLQKAMGINLEAGKEQEKVEKNQEKEMKIQEKLGEIFDKAMKSEEKTGQNPGIEKKIQDTAEKKQEHDARVVQDKVEKIQDEAKKIQ

SEQ ID NO: 127290 - protein, 593 aa, Oryza sativa
  Clone ID: PAT_MRT4530_29756C.1.pep
MADRDEEQILLDMIVVGSSQYWVDEEGNDDPNQYLNGEGNKEGNQEGTEEGTDNQPSAGQKRPHGKRGPAKKLEGRHIVTEIVPDGEPVAPVGIGQKFVNHCGWVMRDNVPISIVYWRRTRSCGDEDSFLLDTEKDMLWTTMLETFTILEADRPRCEEWTLKKMDIHTYWSGMRSKRNIEAKIVDLEYMVSTYEARMQEEVTRQVDQRLAEQRGMETQAPVMVSPSGNRSSYASTGHVGSEGIEAVAAHEATHFPVEEITQRTPCDMHTPFRNFSIKVASGMAIPTDPSGTYHCRPIPPGYAKDHFIKMAEPSKPVVVSDYDRTLRKALKAKPAAVKCGKEVPQLGQQPQQEVEPFVDPDQLEIHKFLKETRLKMEQLLENAPIETAPVKYMFELGEPLVTPDKIRELPTQTYRFHQWYMDKSGMDDVLWTRHKEVFDLYHRDALDASILSAWTLFHWVLILFDLEKSKLHVYDSMDKPKKAFAQIFEVIDRAWIRFHTLVCGIWNEKLTRRFNFLCAKQEQGTNLCGYYVCHYMHCLLFQIRTGQDLEMIYMIDNLTNDDFIRVVQEQMMGFINEQILDPTGEFYYDGKPIH

SEQ ID NO: 127291 - protein, 89 aa, Oryza sativa
  Clone ID: PAT_MRT4530_29757C.1.pep
MTKRTDAHRRARMRRKQQDARALLLKDGDRRTRQAGDGGGLASADGSRRNRVRRRRSSKRAKGFGPVELAWEEARGGNATTIQLGQIHP

SEQ ID NO: 127292 - protein, 127 aa, Oryza sativa
  Clone ID: PAT_MRT4530_29758C.1.pep
MAGSAWLGAENVLQRWRLGSQRAFPPRWRNWLGALLSTSTSQVVLIGILVHRIQHCRGLRLGNPLSTLLFILAFDPLQRILGKATELGVLTKLRGRMARLRTSMYVDDAIIFVNPPREDVIALKEIL

SEQ ID NO: 127293 - protein, 384 aa, Oryza sativa
  Clone ID: PAT_MRT4530_29759C.1.pep
MAHVVHGLTQANLLPTGPEASVLGGFARRLACVDLHRRRRLLLPPHPRSLVTSLGEVEAKTCSKMFYAGYGYHGSNFEQTYRCYPASFFDKPHLEGGDKVIMPPSALDRLASLHIEYPMLFELHNDATQRISHCGVLEFVAEEGMIIMPYWMMQNMLLQEGDTVRVKNTTLPKGTYVKLQPHTTDFLDISNPKAILEKTLRNFSCLTTGDSIMVAYNNKQYYIDIVETKPASAVSIIETDCEVDFAPPLDYKEPENPQQPSVPASEATAEDENAKVEDELKFKPFTGSGKRLDGKASKLQATEVPSASRSSPSDSNKRVNQETLAPASSGASNSTRQKSGKLVFGSSANNNKEPQKASVKDDESPKKDEPKFQAFSGKSYSLKR

SEQ ID NO: 127294 - protein, 78 aa, Oryza sativa
  Clone ID: PAT_MRT4530_2975C.1.pep
TEQAADSPGTRKSVQGTRGSRQWKDTEEVALPPIEHVETDGDIVDVDLAPNPVHPPRGTRDLQITSLRSGGRERRPRA

SEQ ID NO: 127295 - protein, 43 aa, Oryza sativa
  Clone ID: PAT_MRT4530_29760C.1.pep
KKKKSRGTVYIYSTNGGYLNLYIMKRLYLGTNSKIYAYKGDPC

SEQ ID NO: 127296 - protein, 1566 aa, Oryza sativa
  unsure (1)..(1566): unsure at all Xaa locations
  Clone ID: PAT_MRT4530_29761C.1.pep
MASRLVHSSSSSSAEPSAALPNHHTNHLVDDHLPVENGPDPRRDVPDEEPPPPPPPQVALLPQVVVLCEQRHEGFDEAAAAAAGPSTSGPVSKWRPKDRMKTGCVALVLCLNISVDPPDVIKISPCARKECWIDPFSMAPPKALETIGKTLHSQYERWQPKARYKLQLDPTLEEVKKLCNTCRKFARTERVLFHYNGHGVPKPTANGEIWVFNKSYTQYIPLPITDLDSWLKTPSIYVFDCSAAGMIVKAFLERLDWSSSSSASSSKDCILLAACEAHQTLPQSAEFPADVFTACLTTPIKMALHWDAWDMAAEICLSKLPQLIADPNAEFQVLLSQSHRFRALVLLGRFLDMGPWAVDLALSVGIFPYVLKLLQTSAMELRQILELEWTKXHGLDKIDEPELLEHCFLGISISLIGSLDANLQQRALAAFVXAVIMDGHRVGQEAXASAVLINVCMRNLQPETLNDVLLQSQLLFPILKRFGDVCVXLIRAVWIAWACNGLEGPMENASASHPEMLGVNVFSYVRIVLGYLLNEKQNSFKSGHNKHTKNIPAEXCKHPTNSLCKSVEVLANINSSNEYSDVGLARHVGSVLRVFTGNSDTARDGRISSSSPFATNSMMHGAPHSVDFSQHSDPGKLLRENASNGGLNYSRSRPIDNGIYSQFIATMCNVAKDPYPRIASIGKRALSLIGVEQVSMRNSRLSNGGAHPGETSVPPSSNFGMARSSSWFDMNSGNFSMAFRTPPVSPPQHDYLTGLRRVCSMEFRPHVLNSPDGLADPLLSSSAAPSNMGLDILPQSLIYRWSCGHFSRPLLTGSDDNEEANARREERERIAMDCIAKCQRSCDGNVRIWRNYTQKGGQKLVTAFSSVQGYRSAGRSIVFDWQQQSGYLYASGDMSSILVWDLDKEQLVNTIQSTADSGISALSASQVRCGQFAAGFLDASVRIFDVRTPDRLVYTARPHAPRSEKVVGIGFQPGFDPYKIVSASQAGDIQFLDVRRASEPYLTIEAHRGSLMALAVHRHAPVIASGSAKQMIKVFSLEGEQLTIIRYQPSFMGQRIGSVNCLSFHRYKSLLAAGAGDNALVSIYAEDNYQLPTLMQCVQRCFEVALGFIWRHTTVEESGVENCYVFKSRLQEYAQKAGLQTPEYHTFKEGPSHEPVFKSTVVINNTSYDSLPGFFNRKAAEQSAAEVALMEIVKSIPANANIPAVAHNSTQQETGLCNTGSQQLNLREMHREADHHHRLLATLARHCRLAAAATFFSSTLRTARALNSLLAAICSSPAFLRFAPKVLLLAAPSVSPDATTFHILISTLCQAHRPAAAADLLCCMPSLLLDPDLASCRAVLSSLCQYASAQDAVAFLDKMCHWGISPSRSDYHAVFDALLQEGKVAEAYEVMKNKMGSNRVAPALAYFKLTMQAFSECLEFDSVEEVFDEMLLRGLVPDVDVYSVYISALCRKGDLAGARQMMTCMEHAGCPPDVRTFGVVVAGCMSAGDMGTVRELVQEAIRRGLQWDPPALSELIGLLQAGDGATQSQELLLEPLFVHDAPVLGQLIGALCKQGLLGPAAVVDDY

SEQ ID NO: 127297 - protein, 84 aa, Oryza sativa
  Clone ID: PAT_MRT4530_29762C.1.pep
YHLHLLPSPPIAFAAAHSVLASPPLREIKAAAAFFPLRFLDCSKIDPPPPSPRVPILVVDCSSCAIALGGTLAPRGKERAPLGG

SEQ ID NO: 127298 - protein, 61 aa, Oryza sativa
  Clone ID: PAT_MRT4530_29763C.1.pep
ATRFVRSFNLGKDAVNILLPITARLPGYSSELIPVRPRKERKCHPAMYVLIFKNKFAPFFS

SEQ ID NO: 127299 - protein, 253 aa, Oryza sativa
  Clone ID: PAT_MRT4530_29764C.1.pep
CERIAMDCIAKCQRSSCKMTSQIASWDTRFELGTKASLLLPFSPIVVAADENEQIRVWNYDDALPVNTFENHKLSDRGLSKLLLINELDDSLLLVGSSDGNVRIWRNYTQKGGQKLVTAFSSVQGYRSAGRSIVFDWQQQSGYLYASGDMSSILVWDLDKEQVNTIQSTADSGISALSASQVRCGQFAAGFLDASVRIFDVRTPDRLVYTGRPHAPGSEKVVGIGFEPGFDPYKIVSASQAGNISVLVVRRGI

SEQ ID NO: 127300 - protein, 191 aa, Oryza sativa
  Clone ID: PAT_MRT4530_29765C.1.pep
WIFTAITDTIAWNVLPHDLFQRLFRQDLLVASLFRNFLLAERIMRSANCSPISYPLLPPTHQHHMWDAWDMAAEICLSKLPQLIADPNAEFQPSPFFTEQLTAFEVWLDHGSEDKKPPEQLPIVLQVLLSQSHRFRALVLLGRFLDMGPWAVDLALSVGIFPYVLKLLQTSAMELRQILVFIWTKILSLDK

SEQ ID NO: 127301 - protein, 35 aa, Oryza sativa
  Clone ID: PAT_MRT4530_29766C.1.pep
CGFFFFFFFFFFFFFFFFGFFFFFFNPTWGQIIPQ

SEQ ID NO: 127302 - protein, 66 aa, Oryza sativa
  Clone ID: PAT_MRT4530_29767C.1.pep
ILKKKINTKKKKKKKKKKQRLRKKRKTGKRGLSKATGSTKPQRTKIQRTQSNHTQRSRTRKNSQPE

SEQ ID NO: 127303 - protein, 104 aa, Oryza sativa
  Clone ID: PAT_MRT4530_29768C.1.pep
ATRKQVMIPLQDIFPTCPKGGTLGCASILRRDFHGWRQVCIALSDWNSSGSNWKRPTWTGEKNLFQTFRGSMAWARGSLCAGSGTQRLTGKPSHKEIGYPRGLD

SEQ ID NO: 127304 - protein, 43 aa, Oryza sativa
  Clone ID: PAT_MRT4530_29769C.1.pep
VLGTDYLASECAIGINLECTSPLEETIYTLRASHSSLIRVHPV

SEQ ID NO: 127305 - protein, 45 aa, Oryza sativa
  Clone ID: PAT_MRT4530_2976C.1.pep
KKKQVPPMKPPPYVKAPKICYWGPGLQVNKVAPNWKLLAPPQSFE

SEQ ID NO: 127306 - protein, 116 aa, Oryza sativa
  Clone ID: PAT_MRT4530_29770C.1.pep
MIHNICLKCLCYYEKKKKKKKKKKKKKKKKKKKKKKKKKKKKKKKKKKKKKKKKKGKGSKKKKKRKDGEKQRGMVKHLEGPNIKPLVRQSNFRQGDGKTKWPNTNWPSKKALKAER

SEQ ID NO: 127307 - protein, 33 aa, Oryza sativa
  Clone ID: PAT_MRT4530_29771C.1.pep
CMTLFISPVPTYTAIIQVPDDTVGGNAIGSSSC

SEQ ID NO: 127308 - protein, 61 aa, Oryza sativa
  Clone ID: PAT_MRT4530_29772C.1.pep
GQEKQEEAARSRGGFGWGRRGDQFIGRRGNVDRPIGDPRAPTTRVMLTLDALRFAFRCSSP

SEQ ID NO: 127309 - protein, 507 aa, Oryza sativa
  Clone ID: PAT_MRT4530_29773C.1.pep
MANMLPDDALIEILLHLPKHPTCLLRASLVCKHWRYLIRDNKFIKRFRAFHQTPPVLGIFTNSTSIPRFLPIGNPPECVTVGAFSLPDPYWHVLGCRHSRVLLISSSWNSLQVWNPMTGNRYAVPVTPDVNPRINYGRVPESHAAVLCAAGHNDHGDCSSCPFFIVWVFTNIGYAYISRYSSEKDTWDMMASSPAPSEVDSRPSILVGNVIYWPLKSKHILAFELATSRLYHIECPPETHSVYRRNVHIMKAEDGGLGLATMTGFNLQLWALEINSGGVTGWVLRKTIELGAVLPLEVPSVPLTDSHLVRRPPVRILGLVEEDDLFFIWTAVGVFAVQLKSLQFKKEETCTQIRLDEGLNLGGLGVHPRPRPTYVSMEGPPSKTISNIGGLHHMLGLPDHILIAAADEVPAWVTEKRNKVSVERTLRWLDACIALDEDSGANTLGVVVGGSSIELRKLCATEVSKRNVSVLKNVAVYSMLQWVACLRRNLELSLGLVFQVLVMSLVH

SEQ ID NO: 127310 - protein, 163 aa, Oryza sativa
  unsure (1)..(163): unsure at all Xaa locations
  Clone ID: PAT_MRT4530_29774C.1.pep
GSAGAPLRRRRAGRGXRGRRPTRTTSSSSGTSTQTAAAAAPPRRRRRRRPTSSTSPTSASSSGTDPXHRRRRRWRRRCCFEQERDGRAPAAIFGRGDQRRRPPTAVRRPRXRRWPIRRRRDRASRATTTTTWRPPAPSTTARRSATTALPLPARRGQRAAAGK

SEQ ID NO: 127311 - protein, 247 aa, Oryza sativa
  Clone ID: PAT_MRT4530_29775C.1.pep
MAKSRPPKRILESYTIKGSDKVIKHYGSSVSGDCVLMRASDTSKPPYVARVEAIEAAGSRGTNVRVRVRWYYRPEESMGGRRPFHGAKEVFLSDHYDVQSADTIEGKCNVHSFRSYTKLDSVNAEDFFCRFEYKSATGSFVPDRIAVFCKCEMPYNPDDLMIQCEECSDWFHPSCIGMTIKDAKKLEHFFCQSCTAENGKMAENSHEATAQSEEKVTFVLFVMSQGSSWETVPIYSYGSKSGVILQL

SEQ ID NO: 127312 - protein, 58 aa, Oryza sativa
  Clone ID: PAT_MRT4530_29776C.1.pep
QELKFNSTIKFKIITLPCDVLCFLMSHFTSFYPVYPLTNYSSQSYFYYFGLLTHILAL

SEQ ID NO: 127313 - protein, 236 aa, Oryza sativa
  Clone ID: PAT_MRT4530_29777C.1.pep
MAKSRPPKRILESYTIKGSDKVIKREAPPPTSPTDYGSSVSGDCVLMRASDTSKPPYVARVEAIEAAGSRGTNVRVRVRWYYRPEESMGGRRPFHGAKEVFLSDHYDVQSADTIEGKCNVHSFRSYTKLDSVNAEDFFCRFEYKSATGSFVPDRIAVFCKCEMPYNPDDLMIQCEECSDWFHPSCIGMTIKDAKKLEHFFCQSCTAENGKMAENSHEATAQSEEKVSFDVMEKLKV

SEQ ID NO: 127314 - protein, 92 aa, Oryza sativa
  Clone ID: PAT_MRT4530_29778C.1.pep
TNGYYGLDKFGVFTNRVTQGLFVLPVTNRQSCGSNKWHPGLILSFPLANWNKLGSRNFPPGQGWLVIGIGIGLIQVFGQLSYKAWELAGHSF

SEQ ID NO: 127315 - protein, 234 aa, Oryza sativa
  Clone ID: PAT_MRT4530_29779C.1.pep
MSRRSTLLQMLLDEESLSDGEEEFIFSAVDIVHGEFDDDEVPKRSESVLGHAVINRERLAGHRRLYNDYFSEEPTYLDVQFRRRFRMRRPLFLRIMNAIEAHDEYFVQKRNAAGILGLSCLQKVTTVSRMLCYGIAADAVDEYVRIGGSTVIRSFKRSPLFAKLAKGQAPKVNFSINGHDYTMGYYLADGIYPSWATLVKSIKLPQGNKRKYFTKAQEANRKDVECNASLFVWR

SEQ ID NO: 127316 - protein, 1061 aa, Oryza sativa
  Clone ID: PAT_MRT4530_2977C.1.pep
MDLETIKILLRYPRGSVEYLAGSYDQWDFHGESSEEQIRNQQPQPHNEDMRANMHELINDALRTVYDDMPMSDSADSPCTHTDGPNLEAQAFYKLVKDSEKPLWDGSELSHLSLLVLLFNMKSMNKWSDKSFGDLLDILHMAIPNGKELPKNFYEAKKVVSKFGLDYQQIHACPNNCQLFWKEKVNDDFCSTCKASRWKDKKPETKLTKKERKKATPSKVLRYFPIKERLKRLFMCRETASLPRWHDEERLVEDGVLRHPADSPAWKNFDKRFKQFASDSRNIRFGLATDGFNPYGMLSSTYSCWPVVLVIYNLPPWLCMKEPNLLMPLIIPGPKSPGDNIHVFLQPLLEDLRDIFVNGISTYDASRNETFNLRAAVLWTINDLPALGMLASHMVHGEFACPPCGPNVWSKRLAHGKKSCFMGHRRFLPPNHEFRFDRNSFDGTTEISTEPMTYYGRPVLDEINAIGDFKKSKTYKAVSSLFTLPYWDGNLLRHNLDVMHIEKNVCDNIYGTLLNLEGKSKDNLQARLDLKEMNIRGELHPQQRTSSKFYLPPASFTMSKSEKQLFCKVLRDIKVPDGYSSNISRCVNSAEGKIHGLKTHDCHVLMQQLMPIALRGILPDEITSVLFDLSAYFRGICSKVLHVDELDRLEEAIKITLCRMEMIFPPGFFTVMVHLVVHLATECKIAGPVCYRWMYFIERYLGKLKSYVRNKARPEGSIAESYLADECMAFCSRYLEGFPTKHNIPSRNNDKPDQFETPMSRQESTLFPPVGKPLGKPSAYSLTDREKLQAHRYVLYNCDAVVPYLKIQIQICIKGIHGFKLISYAPGMDQSEHHHRLASAAADWCFRLHGWPIMPPLLGAYVFTDRLAFAAADWCFRLHGWPIMLPLLGVYVFTDRLAFVAADWCPRLHGWPLCRRCWASTSLPTGLPSPLPTGVSACTAGLYAAVVGRLRLHRPAASSAADWCFRLHGWPIMLPLLGVYVFTDRPPRPPPTGASACTAGLYAAVVGRLRLHRPAASTAADWCFRLHGWPIMLPLLGVYVFTDRPPHPPLTGVTACTAGLL

SEQ ID NO: 127317 - protein, 583 aa, Oryza sativa
  Clone ID: PAT_MRT4530_29780C.1.pep
MAASSGWSSFSPFLLVDGRRVEDGAWTWCGRAAASGRGGAASQWPYTGTPGPCGAGAPRPAGAGVASRQPCAGKPGPGGAASRRPGADALGPAGAGVESRRPCAGARRADDLAARVPSGRRAAGLPTRSGVGADVGTREGTQKGEGLEWLGGRRPRTSPPHTISEPSPCSRRLHRRRSAPSLADYPYDTVPNKVEHLFFAQLYRDQKQRETRMSMSRAERAHELYVDYLKPIITDVSRLWELLEWIPTPEIERLCDGVRLVKRGERKEERNAVDEYVRIGGSTVIESFNRFVVAIDEVFGEEYLRTPNENDIARLLAQGEERGFPGMLGSLDCMHWQWKNCPTAWQGQYKGKEGVPTIVLEAVASRDRWFWHAFFGSPGSHNDINVLQRSPLFAKLAEGQAPKVNYSINGHDYTMGYYLADGIYPSWATLVKSIKLPQGNKRKYFSKAQEAARKDVEQAFGVLQARFAIVRGPARFWKALTLNQIMRACIIMNNMIVEDERDGDFDLVYDEMGEQAIQSISEVEDEGLTGAITEGFTCQSSSNIATSSDSYFNGLKLISTLVKLMPEWLCNNRVISALVDNMD

SEQ ID NO: 127318 - protein, 119 aa, Oryza sativa
  Clone ID: PAT_MRT4530_29781C.1.pep
MAEVDGGGVDEVALGRANPKTTTARLGGGASGGERWPEAERGRRVVAGRGPYCAGEVGKVEEEREWGWGFQIPRHLWACGLAGGVGKVGSDVGVGAWGRVEEVGRRRCGRLELRLQRPK

SEQ ID NO: 127319 - protein, 101 aa, Oryza sativa
  Clone ID: PAT_MRT4530_29782C.1.pep
MIIMFDFKISMTIKKGGRFTCYIFEQPLLHNKFRAFSFVKVLAWAKEAKEKRPSVINAWMIKEIDWGPNQDLLQVYFYLTMSLLVHRRQEIKFHTYWIQIS

SEQ ID NO: 127320 - protein, 65 aa, Oryza sativa
  Clone ID: PAT_MRT4530_29783C.1.pep
ALLPILFIFNSEFLLFLMYFYVDSKLIFQYSLIFNFEFQLLLNCIPILTLDSCSHVFLISNFSYL

SEQ ID NO: 127321 - protein, 122 aa, Oryza sativa
  Clone ID: PAT_MRT4530_29784C.1.pep
MEAAADEEQEGISAQSPAQAPPSSASSLPKEQSQVELELRVLQALEFYPPSKLKGIHRHFVIYGLMEYLRKSLDRQFSADEVLQLLDRFFNLEMLKPEDDEKDNFTQGEEFSLPESFFNKDE

SEQ ID NO: 127322 - protein, 72 aa, Oryza sativa
  Clone ID: PAT_MRT4530_29785C.1.pep
WPGHYPHSGSRAGPCAMALAAARFCAMPQDFILFFFFFCFFFFFLNRRTSEFITYSSYMLPDKRKHKLSDAW

SEQ ID NO: 127323 - protein, 59 aa, Oryza sativa
  Clone ID: PAT_MRT4530_29786C.1.pep
QTWYMPLALLFFCGSLADAFSELSWTDGQTLVRDQTRRGKSRRRRPPVKKAVKTVKARA

SEQ ID NO: 127324 - protein, 108 aa, Oryza sativa
  unsure (1)..(108): unsure at all Xaa locations
  Clone ID: PAT_MRT4530_29787C.1.pep
AFGQRVXLYXRGGRLGYKXSKSNQYENTSLLQIEGVNTKEEVGWYAGKRIAYVYKAKTKSNGXGVRCIWGKVTRPHGNSGVVRAKFRSNLPPTSMGKKVRVFMYPSSI

SEQ ID NO: 127325 - protein, 88 aa, Oryza sativa
  Clone ID: PAT_MRT4530_29788C.1.pep
MGSKKDAPTWADQWGSSGGDGSFKKGGGGGGSSGNSEKKTVAGNVKAAASEGLVKAKAAALVGAHKVKSGTSSGIKWVKGQYQKRAGK

SEQ ID NO: 127326 - protein, 406 aa, Oryza sativa
  unsure (1)..(406): unsure at all Xaa locations
  Clone ID: PAT_MRT4530_29789C.1.pep
MGISSESPNGSQQIVQKETRDETTPLLPVKVEEEGFHEFNGASFSGAVFNLSTTIVGAGIMALPASIKMLGIIPGILMIIVVALLTEASIDMLVRCSHQGKITSYGWLMGEAYGQWGRIALQASVVINXIGVMIVXKRLDSLRYTSALSVAFGIFFLIFRXVFLCPECIYGTVAMPKLFPELDGLSSIWKLFTAVPVLVTAYICHYNVHSIDNELEDRTQIKPIVRTSLFLCSSVYIATSFFAYLLFGEGTLDDVLANFDANLGIPFSSVFDDIVRVSYAAHVMLVFPIVFFALRLNLDGLLFPTSRHISRDNKRFAIITISLLTVIYLAAIFIPSIWDAFQFTGATAAVLIGFIFPAMVILRDPYGIASKRDKILAVTMIVLAVLSNSVALYSDAMNIFRKEEEA

SEQ ID NO: 127327 - protein, 502 aa, Oryza sativa
  unsure (1)..(502): unsure at all Xaa locations
  Clone ID: PAT_MRT4530_2978C.1.pep
MPPLLGVYDFTAGLPPSPPSGASAYTAGLICRRCWASTTSPPACLRRRRVVPPPTRLAYYAAAVGRLRLHRRPASVAAEWCPRLYGWLVTPPFMGVYDFTAGLPPSPPSGASAYTAGLLCHRCWASTTSPPACLRRRRLVSSPIRLVGHTTVHGRLRLHRRPASVAADWCPRLYGWLVTPPFMGVYDFTAGLPPSPPTGVSAYTAGLLCHRCWASTTSPPACLRRRRLVSSPIRLVGHTTVHGRLRLHRRPAFAAADWCFRLHGWPIMPSLLGVYDFTAGLPPSPPSGASAYTADLLCRRCWMSTSSPLAHLRCRRLVFPLTRLTYYAAISGHLRFHRRPPSSPPTGVFIVIDGRLCSHIGHFCHHQGEYYKAKIQIQICIKGIHGFKLISYALGMDQSEHHHRXGSSAADWCFRLHGWPIMPXPLLGVYVFTDRLAFAAADWCFRLHGWSFMPPLLGVYVVTDRXPSPPPTGVSACTAGLXYAAVVGRLRLHRPAAASATD

SEQ ID NO: 127328 - protein, 408 aa, Oryza sativa
  unsure (1)..(408): unsure at all Xaa locations
  Clone ID: PAT_MRT4530_29790C.1.pep
MTRKPEESLDCAAKNRQGRRSGLQLNDLPIDVLGLIISRLPIGDAIRTGLISRQWKDLWRDHTMLTFSRATFPSCRMLNQQNFIRRVDSILQQHSGVGVERMEIKFLLRNARRDIDRWVKFAVASKTKELILDLSDLTRFFMLPVMCLQLTSMYLKPAADFTGFLNLKRLNLIGVNITDEGVQNLLCNPNVLEFLEISFCRMLTKIHAPHFLNRLKHLQVDCCPVLEKIEMNCDLATLDFTGSSMTPLIFATTSSLTNXFISNLPVVRMLEFHVVEYKXKTDILDYAYLLEIAPFMEKLELHMWIDAPHKPYSEEDGDLRSLPLHHHNNLKQVQITGIFGQKDQVELALHILCSSTVLKNMVINPEIAIVPHDAYRPPKRGAHNFVDGRDAAMEFVCKADHRNVVEVV

SEQ ID NO: 127329 - protein, 68 aa, Oryza sativa
  Clone ID: PAT_MRT4530_29791C.1.pep
LGRCSSYLYMAVTDDAVQAVGPATAPFSSSNMSHCQRRHIFLDYTSLFSGNLVHDALPCVHNHSTAPH

SEQ ID NO: 127330 - protein, 124 aa, Oryza sativa
  Clone ID: PAT_MRT4530_29792C.1.pep
MSSRDGFSDNKLLDDFGCTGIRLERSAFSDGLEPSSPQVDFTTRDTSMTSAIGGYDPNEVIKKCLLLVTDQSITAISNHLKVAFSDLSTHNTATDAVVITTTKTDRIAVVTRTTTSKCRIKEAD

SEQ ID NO: 127331 - protein, 118 aa, Oryza sativa
  Clone ID: PAT_MRT4530_29793C.1.pep
LPKRAEQEIMPQIVYIIFIREKFINESKGFQANMLGDLNKDLVLLLKEKGSLGDESENLKMKINAIESSSRDYFADILEELNMENSVLESELQYKISEYMDVMKDISNLKALFSSINS

SEQ ID NO: 127332 - protein, 37 aa, Oryza sativa
  unsure (1)..(37): unsure at all Xaa locations
  Clone ID: PAT_MRT4530_29794C.1.pep
MATIAFSRLSIYFCVLLLCHGCMGQLFXPKRDPWHSR

SEQ ID NO: 127333 - protein, 31 aa, Oryza sativa
  Clone ID: PAT_MRT4530_29795C.1.pep
GRRSSHLKHAIFESGLVSNCPTYASAGLTIT

SEQ ID NO: 127334 - protein, 73 aa, Oryza sativa
  unsure (1)..(73): unsure at all Xaa locations
  Clone ID: PAT_MRT4530_29797C.1.pep
LDFSSTHNFISNTTAXRANVPLHPYLGLSVAMVNGDHVTSPGRCPPQRVKINSCPRHIGEHRHSATTRPLRGH

SEQ ID NO: 127335 - protein, 159 aa, Oryza sativa
  Clone ID: PAT_MRT4530_29798C.1.pep
YMTTIDVWSAGCVLAELLLGQPVFPGDSGVDQLVEIIKVLGTPTREEIKHMNPNYTEFKFPQIKAHPWHKIFHKRMPSEAVDLVSRLLQYSPHLRCSALEVLIHPFFDELRDPNARLPNGRTLPPLFNFKPRELKGASMEFLVKLVPQHAKKQCAFLGL

SEQ ID NO: 127336 - protein, 91 aa, Oryza sativa
  unsure (1)..(91): unsure at all Xaa locations
  Clone ID: PAT_MRT4530_29799C.1.pep
EGKWGFFRAPAGVFLFWVXAFKFKKMFSPLNIKAGSPKSRFFFPKGLGSFFFFFFPRGLGMVLGKEKISRVFFLGVNPGFWGSLGVWGGSQ

SEQ ID NO: 127337 - protein, 270 aa, Oryza sativa
  unsure (1)..(270): unsure at all Xaa locations
  Clone ID: PAT_MRT4530_2979C.1.pep
MAAVSTAFIFGPAINAGHGVEESQLSGRSAASPLCRLVFATAIADNNNDFTAGLPPSPPSGASAYTAGLLCRRCSASTTSPPACLRRRRVVPPPTRLAFYAAAVGRLRLHRRPASVAADWCFRLHGWPIMPPLLGVYDFTAGPPPSPPSGASAYTAGLLCRRCWASTTSPPARLRRRRVVPXPTRLAYYAAAVRRLRLHRRPASVAAEWCXRLHGWPIMPPLLGVYDFTTGMPPSPPSGASPTQMAYYARRWEATTTSPPACLRRRRVVP

SEQ ID NO: 127338 - protein, 348 aa, Oryza sativa
  Clone ID: PAT_MRT4530_297C.1.pep
MASELRAMAWTVLLVPACAWYARSACRRLRPGLPRLAALAPTFPVFVYLPCLFNSLHFRLFSTFFHTWLAINKLVLLALGIGPLHPSLPLVPFVLCASLPIKLRLSQQPPAAKRSPSSPPPPPLADFLRPCARSFFFLSCLFVAYPHTGWLPVYAVHFLYCVQVFLTLDLVLSSVALASATVLDAGLERQFSTPLAVASLNDFWGRQWNLMAVDLLRASAYEPVRARWGRDAGVLAAFLMSGLLHELLYLYLTLRRPRGEMVLFFMLHGVSQIAERWARAAGLWRPPKVAAYLLVSAFMVVTISELFFGPFMRAGADVRLMEEAAAMLQLIMGVSRRLLRPFGVVSSL

SEQ ID NO: 127339 - protein, 438 aa, Oryza sativa
  Clone ID: PAT_MRT4530_29800C.1.pep
MGVNQKVQNFLAIMTSVGLVDSSSGFPETSTSGATDRLTDDISEMSIRDKEVEAVVVSGNSMDIGHTIVTTVGGRNGQPKQTISYIAERAVGRGSFGVVFQAKCLETGERVAVKKVLQDARYKNRELQTMQVLDHPNVACLKHYFCSTTAKEELYLNLVLEYVPETVHRVIRHYNKMSQRMPLIYVKLYMYQICRALAYIHNCVGVCHRDIKPQNILVNPHNHQLKLCDFGSAKVLVKGEPNISYICSRYYRAPELIFGATEYTTAIDVWSAGCVLAELLLGQPVFPGDSGVDQLVEIIKFPPFLLAHAGDLLYFIQVLGTPTREEIKHMNPNYTEFKFPQIKAHPWHKIFHKRMPSEAVDLVSRLLQYSPHLRCSALEVLIHPFFDELRDPNARLPNGRTLPPLFNFKPRELKGASMEFLVKLVPQHAKKQCAFLGL

SEQ ID NO: 127340 - protein, 67 aa, Oryza sativa
  Clone ID: PAT_MRT4530_29801C.1.pep
MEDLHRYRKVAVGGNSEAMEAVGRAAQSTAAAARSFMDNAAAARSNAAQSSKANAAFTWRLHHPLRH

SEQ ID NO: 127341 - protein, 221 aa, Oryza sativa
  Clone ID: PAT_MRT4530_29802C.1.pep
MLYAGIRLPPADRAAPAPRPPRIIISTDLTIGSPGKPDDAACSPSSGGEKIDDTKPRGFLLFGQAILTEEQIKNGNSDGRPASPNWDAEKAPNTSEGSDSGVTQGSPTKNTTPSWSLPYFGGNNISRASEYELNPGQCKVFVESETVGRSLDLSALSSFEELYACLSDMFSIGSDELRSHLVYRSPAGEVKHAGDEPFCAFVKSARKLRILTDAGSDNLGD

SEQ ID NO: 127342 - protein, 80 aa, Oryza sativa
  Clone ID: PAT_MRT4530_29803C.1.pep
MNQGPNPVAQCQFSVQRGTARTRASRHGAGQARRTVEAGSKDSAGSHPAAKAQTQLASSASTPATGEAPRHKEGMFCQEL

SEQ ID NO: 127343 - protein, 56 aa, Oryza sativa
  unsure (1)..(56): unsure at all Xaa locations
  Clone ID: PAT_MRT4530_29804C.1.pep
RVQKEFGNSGKRSLVPGXXQNRSXRCXSSNLHQVHKGGPHKAVLFLQVHMSQRNRP

SEQ ID NO: 127344 - protein, 96 aa, Oryza sativa
  unsure (1)..(96): unsure at all Xaa locations
  Clone ID: PAT_MRT4530_29805C.1.pep
VVDKNDRSGTGRVIDRQPRSRVISALGGGGDPQKHRSRVLRFAAARTCIHRRVSCVLRAGDLSTYREXRESLGLHPKPLVEPAKGGLRSLPVRGHE

SEQ ID NO: 127345 - protein, 622 aa, Oryza sativa
  Clone ID: PAT_MRT4530_29806C.1.pep
MLSVVRVHLPSEIPIVGCEITPYVLLRLPTGVVSTDDVPEAAPADGYFMRYRWYRIQSDRKVAICSVHPMEQATIQCLGCVKSKIPVAKSYHCSAKCFSDAWQHHRVLHERASSALNENGAEEEELFGRFGSTGSGVLSTTGSGSMSNLGQSPGLNNGPVPLYPSGTDKNSGETWYEVGRTRTYTPTADDIGHVLRFECVSVDAEKKVPVGPPTSIMTSRVIPAPTPTPRRLIQVNGDVLSHLDLDSQTSFGTFSVLSYNILADAYATSDAYSYCPTWALSWTYRRQNLMREIIGYHADIICLQEVQLNHFEDFFSPELDKHGYQALYKKRTTEVYTGAPHAIDGCATFFRRDKFSHVKKYEVEFNKAAQSLTDAIIPSTQRRVALSRLIKDNVALIAVLEAKFGNHGTDNPGKRQLLCVANTHVNVHQDLKDVKLWEVQTLLKGLEKIAVSADIPMLVCGDFNSVPGSSPHGLLAMGKVDQLHPDLAIDPLGILRPASKLTHQLPLVSAYSSFARMVGVGYDLEHQRRRMDPATNEPLFTNCTRDFTGTVDYIFYTVVAGLTNGEMNGWCFAGHLLSSPVGQVYWDPLAARGVVGPPLVAQVDAGLGVTGANFCAAGPATA

SEQ ID NO: 127346 - protein, 90 aa, Oryza sativa
  Clone ID: PAT_MRT4530_29807C.1.pep
MVRGSGEWEEERVARVKGGSRDRDKWESCVTATSWESKISNHERGLGTWGFNATAACGPAREGTGAYAYGSFPPARVASRWRCPVRAVAA

SEQ ID NO: 127347 - protein, 90 aa, Oryza sativa
  Clone ID: PAT_MRT4530_29808C.1.pep
MVGSGGSSVTAAYGSSAVNDYGGQWGRVDPTPVTTVGGGGRRSDGDDDGQKQAHHGCTTRGSRKVLGFISETSSSASCTRSGPGKGNKYV

SEQ ID NO: 127348 - protein, 150 aa, Oryza sativa
  Clone ID: PAT_MRT4530_29809C.1.pep
MADEQIRDLNLSETHTLLLINLYLSHVQGPSYVPHGVESAYIHINRDIEEDDDTYSDDGFCAVPASSDAIAALPVPETTVSETETREEEACAVCLEGFKEGDRVKKMPCSHDFHANCISEWLRVSRLCPHCRFALPAERDSEQKNPEGEA

SEQ ID NO: 127349 - protein, 153 aa, Oryza sativa
  Clone ID: PAT_MRT4530_2980C.1.pep
MRELAGSPGTWSGLSLRVGQLVFAAASVCATASALGFAAYTAFCYLIASMGLQALWSLALASLDSFALKFKIDRLCAVLLSPLVVGVRVTAILSFAASCSAAGVVVLFDRDIYACRNPQLPCGRFELAIACAFLSWAFSATSALVMFWLLASL

SEQ ID NO: 127350 - protein, 50 aa, Oryza sativa
  Clone ID: PAT_MRT4530_29810C.1.pep
ASCCTSFLGLHLNTQSLLNNNIFYARSCTWGFGLKRLNPIHFLGYFPINF

SEQ ID NO: 127351 - protein, 127 aa, Oryza sativa
  Clone ID: PAT_MRT4530_29811C.1.pep
PNKKVDISKCIFRNCTQDTLELVHNQNPNSGTHGEASFPTRAIFAHGPHVHTMTPQLIKGNEQKWEHPVQAERTTDGCLATSRRPLLCMHVCTNDGSAVPGHPSMNPVIRSTELRRWLRSRRARPVP

SEQ ID NO: 127352 - protein, 257 aa, Oryza sativa
  Clone ID: PAT_MRT4530_29812C.1.pep
MARPIPIAAVRAAGSPDPHRRRRAAGSPSPASPRRIDIFGLHTRIFHVLQLAIIHLQACVEEKGKRGKFVGEEIDRLQWAPVVLVTLLIQATTNSVELNLALSIQIQRVGVGGCRTGVRIANERRKTASKSLVPILYMAVMIVDIDQDLFRAPSWISRHARTSIQIDATSPISSVPPPTIRHHTQIIVEDSLPVVDDFIAAISDFFALDLRHWAPSTGIQIAVCSLRSVPRDVIRTRGKHDSLKHAPKVNKFVDFFY

SEQ ID NO: 127353 - protein, 91 aa, Oryza sativa
  Clone ID: PAT_MRT4530_29813C.1.pep
RKGKDSVLHLFCARVGSRLFFYNYLCCCACVLALFYKIRIMLASGCSGLVSHDGAFLVLFQITLPTTLYYYCYYHFNKVCHNHNVSSWHHL

SEQ ID NO: 127354 - protein, 38 aa, Oryza sativa
  Clone ID: PAT_MRT4530_29814C.1.pep
MAPSFPACVESPGTTDVSVDLGGQTGRVPPVRPQVLRR

SEQ ID NO: 127355 - protein, 174 aa, Oryza sativa
  Clone ID: PAT_MRT4530_29815C.1.pep
FTGAIPMEIGELKALVSLNLSFNNLNREIPQSISNLKNLMVLDLSYNHLTGAIPPALVNLHFLSEFNVSHNDLEGPVPIGGQFSTFPSSSFAGNPELCSPMLLHRCNAAEEDLSSPNSTKEYVNKVVFVIAFCVFFGVGVLYDQIVLPRDLRQQRARKGQTTGEPAARGSPPAG

SEQ ID NO: 127356 - protein, 94 aa, Oryza sativa
  Clone ID: PAT_MRT4530_29816C.1.pep
HPTAFCFSQLWQIVTRSSPSVRGSAPPRAPPKNGSKGSSPPPSVVPLSKTTTLRWEAFRFPFVSRHRPRIELRFGLKYGIRDELPYLVGGLQPK

SEQ ID NO: 127357 - protein, 151 aa, Oryza sativa
  unsure (1)..(151): unsure at all Xaa locations
  Clone ID: PAT_MRT4530_29817C.1.pep
PHPLSEPIYQRLIVLLMFKAPMXAVTLILPGISPDNTTYSKTIEERDDARVIYICLALCVACGAGPGAVEGRTHGPTLMPSTLLMTCCPPDRPLNGRCIQRCKQGWMQNAILKAITVVLTAIRXATGRNANGNLSDMHTYLFITVIYTVAH

SEQ ID NO: 127358 - protein, 72 aa, Oryza sativa
  unsure (1)..(72): unsure at all Xaa locations
  Clone ID: PAT_MRT4530_29818C.1.pep
MVDDEGVTIACYSKDQFNYXMTNAKEVGQGVIIVYSALWGGLCRLIIPVFSEYAKQVTGADFLQDDVDELKE

SEQ ID NO: 127359 - protein, 34 aa, Oryza sativa
  Clone ID: PAT_MRT4530_29819C.1.pep
NRTIKDELNIWFRGNSRPSLVRVDLDGFGFAGGR

SEQ ID NO: 127360 - protein, 95 aa, Oryza sativa
  Clone ID: PAT_MRT4530_2981C.1.pep
IQTRERKKPPPPQEERERTRRLPGGGSQRRSRQETTRPWWACLGSRDALCLLPLRDEGSIQEASSARRRDDDDGGGRHGRRWRRSGGGRVLRGGE

SEQ ID NO: 127361 - protein, 206 aa, Oryza sativa
  Clone ID: PAT_MRT4530_29820C.1.pep
MAQLDYGSVTTIGGQPLISDATLQVRSSHDSTPPPPCTATISTPPPAQPRPPRCGAEGRAGGGENNGARLEPTPKRHHRRRGRQPLSPSAARRGFGRRGQPLSRGLRRLRLHLPGAASAAREGGEEAGFALHAIAVVEAGGGGGGGSRMRRSRMALAFGGNSGGGLDGAGGVSLRCGGGSGAPRPASALRRGKKERGADVWVPWLK

SEQ ID NO: 127362 - protein, 446 aa, Oryza sativa
  Clone ID: PAT_MRT4530_29821C.1.pep
AQDQRTTTMARGLAVASLLLVALAVVARPPLALAVKDYPADASAVAKKSPASKADTPTTGKESVAGKTDVVTVAKKSPAGKADTSATYKEYAAAKADAVTVTKKSPAAKADTPTTSKESAAGKANAATVAKKSPAGKADTSATATGKEYAAAKADAITVTKKSPAAKADMPATGKESIAKVDAATVAKESTAGKTGKKAAAKEFTMSGKTNTEADAATVAKKSLAGKAGTPATGKEYAVTKADAATVAKKSPADKTGKESVVAKADTATVTKKSTAGKTGKKVAAKESPASHKTSMEAATKKSTANKTGTETAAKESTVSGKTDTETAAKESTAPGKTDTTAAVKESTAGKGDAPAMAEKSAAGPKVDKMRTCQTGERRDVVTHHEEIDGMFEKLVGEAAKLARYNKKPTITSREIQTSVRLVLLGELAKHAVSEGAKAVTKFTSS

SEQ ID NO: 127363 - protein, 176 aa, Oryza sativa
  Clone ID: PAT_MRT4530_29822C.1.pep
MACRAKPASSPPSRAALAAPGRCRRRRRRPRDRGCPLLPNPRRAALNPRHAGGNGGRAYPDPNDGNGNLGDDSGGWRRLATVQTTATAAGDLDDDGGALAWVQDARRCSLRRRPALLRRIEEVVAAPAVALRSWLCTAAAASSRGWTAGETKEMGGGGESVWGPRLASDLWLAKFG

SEQ ID NO: 127364 - protein, 43 aa, Oryza sativa
  unsure (1)..(43): unsure at all Xaa locations
  Clone ID: PAT_MRT4530_29823C.1.pep
MPTLDARXRLPLAGLSPATTSFPGSTPKPGRLSLALRPPCGYL

SEQ ID NO: 127365 - protein, 64 aa, Oryza sativa
  Clone ID: PAT_MRT4530_29824C.1.pep
QAGREHQRDEHPSLLLRILLQIAAVGSPSPTSYNAEKASLASRGRWSPRRKWWATSCTTPAPTT

SEQ ID NO: 127366 - protein, 81 aa, Oryza sativa
  unsure (1)..(81): unsure at all Xaa locations
  Clone ID: PAT_MRT4530_29825C.1.pep
TRGVEGXPHAVCSYTPFSPMTNKYKQIMPYCKPTIKYSRAVHSRPPPERANLRLQGRAGDVEHAQLGEGGGAASSSESFVV

SEQ ID NO: 127367 - protein, 129 aa, Oryza sativa
  Clone ID: PAT_MRT4530_29826C.1.pep
MDGFGFKERKKAWAAADAERRLRLYRRGPPLPSWPCRARVVTLSALASRPAASENPSLSGTRICGWVRYRAPVRVILVGDGIIRDYVVFCTPRAEQWTGSRGQLGQLGAALADSGFVGAAAGAGARLNR

SEQ ID NO: 127368 - protein, 320 aa, Oryza sativa
  Clone ID: PAT_MRT4530_29827C.1.pep
MDADRDPIFPVQQMPSLLFPPPPPRPLALDSTSSASSSFVPHHPSITSFPILVLTVLGILTTSVLLLTYYIFVIRCCLNWNSSSSSDTRTAGLISRRRRGAASSSLPAVAEPRGLEEAAIQSLPAFRYRKAIKDTTADSSECAVCISEFQEEERVRLLPSCLHVFHVDCIDTWLQGNANCPLCRAAIATNDSQLPLDQFVRPEVVVIQVITGAEEEGAQAPQQEANTAASDPAVDATSTNQQVSSKKTKNQNAWHVSISKGDECIAVRRDRNVLPLRRSFSMDSLGGAGEVHLQIQNILQRSTHFHRDISDSSSSSTGTL

SEQ ID NO: 127369 - protein, 239 aa, Oryza sativa
  Clone ID: PAT_MRT4530_29828C.1.pep
KSASQRDIQKAFDELSLKYHPDKNKSKGAQEKFAEINNAYDILSDEEMRHEDDLYGDEKGNPGFDGGNFGNREGYTYFTGGGAKTSHFSSGDGWQTMGGQGNTKTFSFSFGGGNPGAGGGNPFNFDFGDVFSNIFSGGSMGGSQHTGSAGKARRGTKSSGHDSSSVNIQEVTMQIFNKETADQGITWLLLFYTPNTKGQFVLESVVEDVARSLDGALRAGKVNCDHEKALCKKAGVSIG

SEQ ID NO: 127370 - protein, 196 aa, Oryza sativa
  Clone ID: PAT_MRT4530_29829C.1.pep
MFSGTQQKCKVCTKTVYPMDQLSTDGVVFHRSCFKCQHCKSTLSLGNYSSIEGVPYCKPHFEQLFKETGSYNKSFQSPAKPASEKLTPELTRSPSKAARMFSGTQEKCATCSKTAYPLEKVTVEGQAYHKSCFKCSHGGCAISPSNYAALEGILYCKHHFSQLFKEKGSYNHLIKCASVKRAEAQPAPPPAAADSS

SEQ ID NO: 127371 - protein, 684 aa, Oryza sativa
  unsure (1)..(684): unsure at all Xaa locations
  Clone ID: PAT_MRT4530_2982C.1.pep
MPPLLGVYDFTXRPASVAAEWCHRLHGWPXLCRRCWASTTSPPACLRCRRVVPPPTRLVYYAAAVGRPRLHRRPASVAAEWCLRLHGWPIMPPLLGVHDFTAGLPPLPPSGASAYTAGLLCRRCWASTTSPXGLPPSPPIGVLAYTVGXHTTVHGRPRLRRPASLRRRRLVFPPARLAFMPPLLGVYVFTDRXPSPLPTGVSACTAGLHAAVVGRLRLHRPAASSAADWCFRLHGWPXMLPLLGVYVFTDRLAFAAADWCFRLHGWPXMPPLLGVYVFTDRLAFAAADWCFRLHGWPLCRRCWASTSSPTGRLVCRRLVLPPARPTYYAAVVGRLRLHRPAASTAADWCFRLHGWPXMLPLLGVYVFTDRPPHPPLTGVTACTXLACYNAKHQYLQHKLPTFAMAADWFLHFHGCMILPALIGLIFFTAAPLRLVYTATTTDGHHRLLLPTGYAAADXCFYLHNCASSLPVCFCCRRLVFTSSRRCNFVIMVERLHLYYLRHWQTLLLLLRKFYYFTNHDVFVNLDISACNAMIFYYNKISTWTPSTHIFNQAMTTRRQEAIILDSMFSCFPTNQRTFYFNNFKYFGLDELGNNINSPPIICLHGWPTTQLPIEDLIVIIGCYIAIDWITDIVIFINILSSLINIAYSAAVDGKLRHHSRLSLLPLIIITVGCVCRRRLFSSSS

SEQ ID NO: 127372 - protein, 110 aa, Oryza sativa
  unsure (1)..(110): unsure at all Xaa locations
  Clone ID: PAT_MRT4530_29830C.1.pep
VRLKENPRRNGEFKRHGEGEPPCSSGCLPRPTGCGAFNGFADDEVRIEYDAAAXEGERPAALVRGVIDDGGHLLLLLLLLLIVRIPRSEFWHLVDAVHPRSCERGTPGRL

SEQ ID NO: 127373 - protein, 47 aa, Oryza sativa
  Clone ID: PAT_MRT4530_29831C.1.pep
MGPCQNKKQLSVFDQKRAPQADGGRMWNRVGISASGDMQQKPAVAKG

SEQ ID NO: 127374 - protein, 49 aa, Oryza sativa
  Clone ID: PAT_MRT4530_29832C.1.pep
SPIHSDSVEIGGPQNQSGGRQNMYDDIIMILFSPYSIMEYLLFDSRLAC

SEQ ID NO: 127375 - protein, 96 aa, Oryza sativa
  unsure (1)..(96): unsure at all Xaa locations
  Clone ID: PAT_MRT4530_29833C.1.pep
ISLRRIAXHIXGYPRXXPKXGLKFALEXVWDGXSSXXDLEKXXTDXRASIWXXIXXAXXXYXXSNTLSYYDXVLXTAAMXXAXPERXSXXXGEIGV

SEQ ID NO: 127376 - protein, 105 aa, Oryza sativa
  Clone ID: PAT_MRT4530_29834C.1.pep
KGQRFNLNGRAKKQGAFTNGGLNPAWGKNQPKEKIIPEWKSQPTHGWGWPFRPKKKASVGRRHGPVLDPERKGHAVLQGNGRKHLGFASGGGGVPFLGGHLAAQP

SEQ ID NO: 127377 - protein, 74 aa, Oryza sativa
  Clone ID: PAT_MRT4530_29835C.1.pep
DKPLQHSDKPRVHTNCLVVPEIEIWHTYFASAVMLLYSILQTNPNSTSKQNMTAYFHKFHNRHKTVGISENWKI

SEQ ID NO: 127378 - protein, 117 aa, Oryza sativa
  Clone ID: PAT_MRT4530_29836C.1.pep
MEVDHIYSGGESEKVDAKNGSSAESRSIEFWRSWSCARGGDTGRRFLACSQVEQPCDFKYWIDEQFEGRAKRVIQDLVSMRHSMSELFDERVTPHVSQYSTLVYPVCDQSQTGQIMG

SEQ ID NO: 127379 - protein, 174 aa, Oryza sativa
  Clone ID: PAT_MRT4530_29837C.1.pep
MEHGSREGRVRRSMPRMGVAPNPGASSSGAHGAARAVELETLLEEHSEGMLVRTGLTCRHGFFPILCCCWSGPDTGRRFLACSQVEQPCDFKYWIDEQFEGRAKRVIQDLVSMRHSMSELYEHSSRQWDDMYADRQRVKQQIHELKCTIKEQRECIVILICFSIVIACGIWLIV

SEQ ID NO: 127380 - protein, 105 aa, Oryza sativa
  unsure (1)..(105): unsure at all Xaa locations
  Clone ID: PAT_MRT4530_29838C.1.pep
ESFNIVRHPTRSWKRKSVERIMKACIILHNMIVENERGXVKIPIDLNVDPGASVALPPEVTTGHNPCFDQVLCRKTAIHARAPHSQLKKDLVEHIWQKFSNTRRT

SEQ ID NO: 127381 - protein, 102 aa, Oryza sativa
  unsure (1)..(102): unsure at all Xaa locations
  Clone ID: PAT_MRT4530_29839C.1.pep
KRREREKEKGRKERKKERRSRGRGRRKEKEEREEEREEREEEEKKKERRGRGRREKEGRRDREEERXRREKEERKEEDKNKEKEVERMRDNEEKRGDKRMRK

SEQ ID NO: 127382 - protein, 78 aa, Oryza sativa
  Clone ID: PAT_MRT4530_2983C.1.pep
MEPGVGSKGELDNHELNLEDLEDAKMQQSRRPKISRPFAPSARPQPKAITGLGLTFTIRDAVLRLNCPWTERGDIENV

SEQ ID NO: 127383 - protein, 77 aa, Oryza sativa
  Clone ID: PAT_MRT4530_29840C.1.pep
MGEMNWVSRKIHLYNVTMGLYMLDWWERCLFNIMVLILLWFICFNGSRFASDVFESHLKARIMPGGNYGMGVGMPST

SEQ ID NO: 127384 - protein, 38 aa, Oryza sativa
  Clone ID: PAT_MRT4530_29841C.1.pep
DVSDSRCKHVVLSRQWLSTLGTSMRQDFWRDWEQEGWW

SEQ ID NO: 127385 - protein, 71 aa, Oryza sativa
  Clone ID: PAT_MRT4530_29842C.1.pep
ERHGFRENVLGMDFVKVCLVLFKVLPGMRGLRNFKRRSCPHRRSNRLVSCGKTKGQDSLCLILGNWVYSIL

SEQ ID NO: 127386 - protein, 61 aa, Oryza sativa
  unsure (1)..(61): unsure at all Xaa locations
  Clone ID: PAT_MRT4530_29843C.1.pep
PPPRFARRRGRGREGRLGDPLAADYEAECXKLISQFNSXSSSLAGXXTIPRFVEAYXXDCP

SEQ ID NO: 127387 - protein, 156 aa, Oryza sativa
  unsure (1)..(156): unsure at all Xaa locations
  Clone ID: PAT_MRT4530_29844C.1.pep
NXGTFXXXRGXEIWGXPRXPPPXXGRGLRGGGXLMERNCFPRRPFWRGMFLFPIQPQPPVFQLAPFGQPRGRSQWRFGEFPPPFPVGRTQRSLGKPTEAEFAKGRPPRPRLNXXXPXPTPANPRAQGRKEXSPRXRTXVFSPFSGPRNFPXPTPXG

SEQ ID NO: 127388 - protein, 100 aa, Oryza sativa
  unsure (1)..(100): unsure at all Xaa locations
  Clone ID: PAT_MRT4530_29845C.1.pep
SLACFLIANKGFIGVSTDFMISDLQPMCALTFGLMLVYHIIICXLVYTGLYCYVVTSSSADCLYIIIYIGHIADXLNPIAIGWHRLLAGISIGWNLYIGL

SEQ ID NO: 127389 - protein, 69 aa, Oryza sativa
  Clone ID: PAT_MRT4530_29846C.1.pep
WHRGCFGMRGGNSWISLSWPLSCTSRRFAPTPYVILPPPHSSSSPVTADMSDFCSSCRFALPMLCSPLP

SEQ ID NO: 127390 - protein, 326 aa, Oryza sativa
  Clone ID: PAT_MRT4530_29847C.1.pep
MEGFLQKLKGLDAYPKVNEDFYKRTLSGGVVTVVASVVMLLLFVSETRSYFYSATETKLVVDTSRGERLRVNFDVTFPSVPCTLLSVDTMDISGEQHHDIRHDIEKRRLDAHGNVIEARKEGIGGAKIESPLQKHGGRLSKGEEYCGTCYGAEESDEQCCNSCEEVREAYKKKGWALTNPDLIDQCTREDFVERVKTQQGEGCNVHGFLDVSKVAGNLHFAPGKGFYESNINVPELSALEHGFNFSVTEHFRDGNIRPKPQPGVFFFYDFSPIKVIFTEENSSLLHYLTNLCAIVGGVFTVSGIIDSFIYHGQKALKKKMELGKYR

SEQ ID NO: 127391 - protein, 120 aa, Oryza sativa
  unsure (1)..(120): unsure at all Xaa locations
  Clone ID: PAT_MRT4530_29848C.1.pep
LLTHLLVVVFSLNWCIVAGFQTRTGSQGYKAHGYAIKQVDNCTVKCQKQNGKFLCSYQGPSIQGXGWKSLDGPFVSVWISNVPWAAESIMMAPEAKVLFRIKSNSCMFHVALIWQLLSSR

SEQ ID NO: 127392 - protein, 167 aa, Oryza sativa
  Clone ID: PAT_MRT4530_29849C.1.pep
FHFAPGKGFYESNINVPELSALEHGFNITHKINKLSFGTEFPGVVNPLDGAQWTQPASDGTYQYFIKVVPTIYTDLRGRKIHSNQFSVTEHFRDGNIRPKPQPGVFFFYDFSPIKVIFTEENSSLLHYLTNLCAIVGGVFTVSGIIDSFIYHGQKALKKKMELGKYR

SEQ ID NO: 127393 - protein, 1143 aa, Oryza sativa
  unsure (1)..(1143): unsure at all Xaa locations
  Clone ID: PAT_MRT4530_2984C.1.pep
MAGWPKHSLLISYASGMDQSEHHHRLAAVTADWCPRLYGWVVTPPLLGVIVFTDRPPRPPPTGVLAYTVGWSHHRCWALLSSPTGRLVRRRLVSSPVRLVGYTAVVGRIRLHRPATSRAAHWCFRLHGWPIMPPLLGVYVFTDRPPRPPPTGVSACTAGLLCRRCWASMSSPTGRLVRRRQVFPPARLAYYAAVVGRLRLHRPAASSAADWSCRLHGXPIMPPLLGIYVFTDQPPRPPLTGVFACTASLLCRRCWASTSSPPACLHRRRLVSPLARLAYYAAVVGRLRLHRPAASSAADXCLRLHGWPIMPPLLGVYIFTDQPPRLPPTDVSACTAGLLCRRCWASTSSPTGRLVYRRLVSSPARMAYYAAVFGRLRLHRRPASVTADWCPRLYGWLVTSPLLGVYVFTDRLPXSPPTDVTACTAGLLCCRCWETTSSPTGYXRRRRLVSPPTRMAYYATVGGHLRFHRQPPTSPPTGVFIVIAGXLCSHIGHLCHYQGEYYKAKIQIQICIKGIHGFKLISYASGMDQPEHYHRLAAVAADWCPRLYGWVVTPPLLGIIVFTDRXASSAADWCPCLYGWVVTPPLLGVIVFTDRPPRPPPASVFAYTVGXYTADVGHLRLHRPAALSAADWCFRLDGWPIXRRCWASTSSPTGRLVRPRLVFPPARQAXMPPILGVYVCTDRPPRPSPTGVSACTAGLLCRRCWVSTSSPTGRLVRRRLVFPPARQAYXPPMLGVYVFTDRPPRPSPTXCFRLHGRPIMPPIVGVYVFTDRPPRPSPTGVSACTAGLLCRRCWASTSSPTGLPSPPSTGVSACAAGLXYVTVVGRLRLHRPACLRRRRLVSLPARLAYYAXPLLGVYVFTVRXPSLPPTSVFACTAGLLCHRXWASTLSPSGCLRRRRLVSPPARLVYYAAIVGRLRLVRPATSYDANWYYHLHGRPLCRRCWASTSSPTGXLRRRRLVSLPARLAYYVTVVGRLRLHRPACLRRRRLVSLPARLAYYAAVCWASTSSPSGLPSLPPTSPIMPPLXPTGVSIFTTTRLRHRFTSSRLCNFATMVERLHLRHLXTLLPLLCKLCYFIDHDVYKSLDISACVNKYNAVLFYYNKWCSNIQYFYSDIFYAYLHSSNDYSTTRSYSSXLYVQLFPN

SEQ ID NO: 127394 - protein, 67 aa, Oryza sativa
  unsure (1)..(67): unsure at all Xaa locations
  Clone ID: PAT_MRT4530_29850C.1.pep
VIKVSTAAGSTSLLDTPQSVTCSVQQTVNERXXRSHVYRDSTRRASELRXHIMTVXVYSTSRPTSMH

SEQ ID NO: 127395 - protein, 41 aa, Oryza sativa
  Clone ID: PAT_MRT4530_29851C.1.pep
MPNHTHEIKDFLLTARRKDARSVKIKKSKDVVKFKVRCSKY

SEQ ID NO: 127396 - protein, 106 aa, Oryza sativa
  Clone ID: PAT_MRT4530_29852C.1.pep
GGVGGNAGRPREARPRPRGGAPPPKGGPGGGGGTRGQRGAPGKNGGRPNHNQKDGGQGERGKTRTPKKGGNPNEKGGADKPVAQRKKRKAPTREERRKANGEAGWV

SEQ ID NO: 127397 - protein, 952 aa, Oryza sativa
  Clone ID: PAT_MRT4530_29853C.1.pep
MHEKGKKIGSDDFSPPLGEFEQQMQPELENCTDNFAPPLGEFEQEMQQPESTRGTPQPEGTRAIEEKRSNYRARYANLTPNQRHKRRERQNELKALKRMNTDENSTAIQARRESDRMKYKNMDPKEKQAKIDKVNANYALRRNTPSEYSIAVENPGYVASNMSPSAPIRTERKHVTHGERQALVARRNESFRNRINTRSVSLEDPFESAQLESGVESPNEPRIINNGDGEIIFEDDSDDDSDMYDDQAWEINEDVEIQDVVDDIPESFGIPETPDTSEIVYSNIPQRTHMLKPVENCEFCDPKHLQLYFYDDDPSLEHRYRRCHPELYEQDKDVIGILANVLRSNPYSEQFRSLGQAEDLKNYRVMLNLDQKLDQRTYNASITSEVAAVWVEGKERRKTFDKGVILHGNNNEIQGIRSYHACYDPLSYPLFFPRAELIWHTDIPKNGVNTEDVIRARANRNNNDDPGNRLCVFVRDYYCYKFQIRPGLFNPILYGGRLFQQFAVDTYIKIESSRLDYIFKNQKEIRADLYQGLLDSIHAGENRGNAVGKRMEEITRELEKGQTPQDRPDLIVRVFKAKLEEMKTQLVEKSILGIVKAYTYVVEFQKRGLPHAHFLLIMNEKYKITCPEQYDRIISAELPDPLKYKELHTMIVKHMMHGPCGNLNRNFPCTKNRPSCKNDNRWVVPYNPYLLRMFNCHINVEVCSSIKAVKYLFKYIYKGHDRASVSVNGVDNEGDIDEIRQYRDARWVTPHEALWRIYSFELSKIRPGATSFEYLRTVDGKILPTFREAAEKRVQQMVLINIRDMLQSMGKDIRSFPLPEIDELHDTTNGLPREIIEESTIKVDPQDVPLSDSLNTEQRVAYDEILAAIDRKEGGLFFVDGLGGTGKTFLYKALLATVRKQGKIAVATATSGVAASIMPGGRTAHSRFKIPLRIDDGAICSFTKQSGTTKLL

SEQ ID NO: 127398 - protein, 277 aa, Oryza sativa
  Clone ID: PAT_MRT4530_29854C.1.pep
MSELAYSPTQEVKVNSLFCNGITERSSRFSPSIWLAPDITEGYRKCQRQVFWYSFLKLHVTLEVFQQEGWKDSLPVDFPKPSDNENSVEVAHPNIKPFSVHPLPLTKNSDVLLESSNGSDSLKEEKNHYYPGKEIKRRKRHRRKQYVDQEPCIMRGVYFKNMKWQAAIKVDKKQIHLGTVGTQEEAARLYDRAAFMCGREPNFELSEEEKKELQNYTWKDFLDMTRDTITSKKQRKVGLIRRNKTDSLVGQSDGDTEMINGGGSSHSEDGDAETSAS

SEQ ID NO: 127399 - protein, 91 aa, Oryza sativa
  Clone ID: PAT_MRT4530_29855C.1.pep
NSSWWLVISDDFTLVSRRRISGVFCCFKWDLVCDWILVWYKEVVKCTLCTRNYYNVCFISSNFVYMGLERLFSLVKCLGKNVYIWHHIHWK

SEQ ID NO: 127400 - protein, 1617 aa, Oryza sativa
  Clone ID: PAT_MRT4530_29856C.1.pep
MRRLSLGNREASNCSDQAVSGATLPRCSTRSSCSQQPNHSPNLDEEILEEEETSEEIWFRGPTRVPPQPTREEDKPVLTPVGDRQWRANDYGGNIRVPNSILTLLLKQWFPGIVTLKGKEEPAWSWKHYRIAPDTPRSNQIRLPSCLHRVEEDFWLYFRWAEGKEQEARKVVHNCVKGLVDRLFYETRILAVLNYQRKILKVNTSREIACRTYLTESEYLKVEPWWFLNSENAWRELIRLRWCNPKWQAVSRAHRIRREKMKGPSHRQGSANLSRYQKNLEKKKKRPVAPLEAYTEGRRENREDGQFSCDPRVAEKLEAYAAAYVQLHGPENDWRTSPIDPVAVHMAGGGKKHGRFMIGDGLIDSSAVFGDNSRDDQRPRRRLRTDHDNTNQVEDLLRQLQEEREAREREREEREREKERERQEKEQEKECEREERAREKEQERKEREEERKERELEKIASQQKSAFFEAALRVIQSKLNIDLSASGTPPLPVMLTHLVYLNFRPHGTLVDVRCVCCLRLAACCLLVIYVAMLACAGTCELEVRFFWSYMLACTGTCELEVPYFGHLYLHALELVNCTMLVDRNWMYKGHRNRGEVTAEWILKTTEFLDMAFSRDTRCADVLCPCNYCNNTRPQTRDVMMKHLCKYGFRPEYTVWVYHGETHPTCEEVVCESTEDEDRVVDINRMDDMVDDIRDAYVSVEEEDPEPTAQSFFEMLSAATKPLHEHTQVSQLDATTRLLAVKSQYAISIAGFDALLNVVCALLPQGHKLPPNLYEAKKFLSALNMPYEKIDACPKNCMLFRKENEHKTHCDKCGESRYVEVENSKGQKRQLTVARKVLRYLPIIPRLQRLYMSESQAKQMTWHKTGHRYHPDKIVHPADGEAWKKFDRDFPAFAMEMRNVRVAIATDGFCPFGMGASSYTCWPMFVIPLNLPPGICMRQHNMFLSLIIPGPNYPGKDISVFMEPLVDELIHAWQQGVLTYDRATKTNFIMRVSFLYSIHDLPAYGIFRGWCVHGKMSCPICMEVLQGKRLKYGGKYSFFDCHRQFLPSDHSFRTDSNSFMANTTVSTEPPRRLSGGEIKAQLDSLVLAPNGNGFVDYGKSHNWTHRSSLWRLPYFHMLVLPHNIDVMHNEKNVAEAIFNTCFDIPDKTKDNVKARLDQAALCNHPELNLVQKQPSGQWVKPRADFCLNRTQKKEILEWFRTLKFPDGWNYPVERGQKYLKSKVRNRARVEASIAEAYILDEISNFTSIYFADQVRTIHNPVPRYNVAQSTDCSLSLFSIKGDSTSRGVPRHLTAEEWDATMLYVLTNLTEVDDYIRKFIDEEWTSRGVPTRQQQENILQNGAGRDHPNFVSWFCKKRMMDETMSDDLKQIARGCHTRVLLYNIYDVNGYRFRTHKYEQERPNATTINSGLVTIGQGENGEMTEYYGYIKEIIEISFDGTKPLTLVLFNCHWFDPSQVRYSPRYGLVEVAHASILPKFEPFVIAHQATQVYYMPYPCKSVQDLTNWWVVYKVQPIGRLEVPTDQDYDFVPNTDVVHYFQEDGLLGSFVIDLGLNFDNNSEEAASSRDTEDICNGKDLELLNGSSIQDVNYDDDESYYADSSNEDDEYSTNRDILYDEYF

SEQ ID NO: 127401 - protein, 603 aa, Oryza sativa
  Clone ID: PAT_MRT4530_29857C.1.pep
MARGSLKALVGFMTSYFRYLPTMEAMHFLRAAKGDLLAAVHLVEAERCTSAFDIGSCTTKTALRCAAGASGHPDPDRLATAMLSLSSKAHKIAHLLSRKGRLTCSDVDHLSYLLLEEGTNDQICTQQLMALVPPRLPPELADAAATFSPLAPQGVTVKDERTLERCTKSLQCVLVDKIHGFYLEALALLPQHLLRGRYHRSVVMAGHCYGPLDPVSNIILNTIWYDAAFPVPKEQHLDLDMIGRWALVRAERYSVAGLVAGLIAFAGDYNLSELQAIRCLLYANGDFATAMSVLQQALLNQERTMLSDSELCRFMDVMAKRLQLYSVMAIAAQHPSADGLQEFLISERTRAMLPMEYRRFSREDVHSVIESLLHEPPPSLGMPPELVRLSLAAERTIDQFPDATKRFWADMSSFHSKAKAALESYVLENGGPQYVIHVICGANESVADRNGPELSRINWPRSHNKFHYSHINFLASPTGPSAVGVLPTLFFAECVNHNEESDRARKNNCYPVVVPPTNAEKVRCFYCEYKGINIIHPADGNYHGCDTDFEKMARRKHVLTNSIESVFNNGLLVSNFRGAVQEDFFYFDHARDHAKGPSSCSDG

SEQ ID NO: 127402 - protein, 73 aa, Oryza sativa
  Clone ID: PAT_MRT4530_29858C.1.pep
RTNWDEFTRNYFLGRENLVSVFLLVDASIPAKKIDLDYASWLGQNKVPMTLVFTKCDKRRRRKRGKDEEMKNF

SEQ ID NO: 127403 - protein, 529 aa, Oryza sativa
  Clone ID: PAT_MRT4530_29859C.1.pep
MDAYDGDSNNGGGYGDSHNGGGYGDGSTVGGYGTDNTGGVYGGGGTRPLYWAEHRFGAGIPTRDFLAQPLHPSREGGHTSFTFGGFGKGSSSSQNPSQLEFRTLDLNSAYEWSAMHGYQDLRGGGWEGSQCPLGLHVRLGARTARSGFVGAPVVKEQADMGRSDGGTRSRRPAFDWCWVRTANATFIWRCRPRRRLRASHPSSGSGRIVGARPRQGLWCTASAHRVKLRTYTGLGRWPDGTVVASDKWWDDNTKNHAELKKPKNGMPKYLDELDRMFMGVHNELQKDKVAAMDNYLGRREKKKDDEMARVREVAERIMGLSRECGVTDETPKLWVASYVCLAISGAICVRYVLPQKHSFCDFDMIFTFVFAGWPGSVHDMRVFNDAMTRYKNVFPHPPPGKFYLVDSWYPNRIGYLAPYKGTKYHLQEFQNAVEPEGKEEVFNYAHSSLRNVMERSFGVLKQKWRILKYVPSYPPETQTHIIVACIALHNYIRLSGLTDRHFGRCDRDENYVPPEAYEDQPPEDEAPSY

SEQ ID NO: 127404 - protein, 786 aa, Oryza sativa
  unsure (1)..(786): unsure at all Xaa locations
  Clone ID: PAT_MRT4530_2985C.1.pep
WASMSSPTGLPSPPPTGVSAYTAGLFMPPLLGVYDFTAGLPPSPPTGVLAYTVGWSHHRSWASMPPPTRLAYYAAAVGRLRLHHRPASVAADWCPRLYGRLVTPPLMGIVIFTAGLPPSPLTGASAYTAGLLRRRCWASTTSPPACLRRRRLVSPPIRSILLILYVCSAXIQIQICIKGIHGFKLISYAPGMDQSEHHHRLASTAADWCFRLHGWPIMPPLLGVYVVTDRLAFAAADWCFRLHGWPLCRRCWASTSSPTGLPSPLLTGVSACTAGLYAAVVGRLRLHRPAASSAADWCFRLHGWPIMPPLLGVYVFTDRLAFAAADWCFCLHGWPLCRRCWASTSSPTGLPSPLLTGVSACTAGLYAAVVGRLRLHRPACLRRCRLVFPPARLAFMPPLLGVYVVTDRLAFAAADWCFRLHGWPIMPPLLGVYVFTDRLAFAAADWCFRLHGWPLCRRCWASTSSPTGRRIRHCRLVFPPARLAFMPPLLGVYVFTDRLAFAAADWCFRLHGWPLCRRCWASTSSPTGRLVRRRLVLPPARLAYYAAVVGRLRLHRPACLRRCRLVFPPARLAFMPPLLGVYVFTDRLAFAAADWCFRLHGWPLCRRCWASTSSPTGRLVRRRLVLPPTRLAYCAAVVGRLRLHRPAASSAADWCFRLHGWPLCRRCWASTSSPTGRLDRRRLVFPPARLAYYAAVVGRLRLHRPAAVSAADWCHRLHGWPVITPTDAIFFTAGYIAVTTNRHQYLQHKLPTFVMAADWFLHFHGCMILPVLIGLTIFIAGRLVCC

SEQ ID NO: 127405 - protein, 65 aa, Oryza sativa
  Clone ID: PAT_MRT4530_29860C.1.pep
DRSSSLHTGQAAILSNKKMISVSIFVQVFLVLLHCRSAIFRPLLFECHPLIMYDVMNSHSTIYSS

SEQ ID NO: 127406 - protein, 124 aa, Oryza sativa
  Clone ID: PAT_MRT4530_29861C.1.pep
MRGTASRVRDGAACTHGRRVLVEAWRRHRFLSRTSSGVVEVVGEQGQGGMVERGKASTVERRWQIREGTRRSRYGESSQAAAAASMRTLVGIPRSWWNAMEKTNGWMEADNGSSGSYRHATVKQ

SEQ ID NO: 127407 - protein, 191 aa, Oryza sativa
  unsure (1)..(191): unsure at all Xaa locations
  Clone ID: PAT_MRT4530_29862C.1.pep
MTPRVHEGXSSWSGYCQCEVIEKLCRDASHVLGRGSCVGQSRSAGKVYIHCSLLAYLALIGEGAAGCRLPPPSHPSTAMLPATLRAATPPAAARRQPPAATSHQRRPPRRPPPSRPASAAWACSGIGGGGDGEGEERGRGEGRIGSEEEAERELFNEREEREEGGGIRSILARARLGVVLFLVPVVYTNRD

SEQ ID NO: 127408 - protein, 717 aa, Oryza sativa
  Clone ID: PAT_MRT4530_29863C.1.pep
MADAAAAAAGGGGSHRSVHHAHLAALLNPSPRSPPHPHPLQLHRRHLPLSLPAARRLAAAFPPLPLLLSLLAALRLLPSPPPPRPFDALIRSYASLPRPSLAAAALAFAASAGYAPSVPAYNAVLLALSDASLPSARRFLSSMLRHGVAPNVYTYNILVRALCARGRLEEAVGVVGDMRGAGCAPNAVTYNTLVAAFCRAGELDGAERVVSLMREEGNAKPNLVTFNSMVNGLCKAGRMEGARKVFDEMVREGLAPDVVSYNTLLSGYCKVGCLHESLAVFSEMTQRGLVPDVVTFTSLIHATCKAGNLEQAVALVAQMRERGLRMNEVTFTALIDGFCKKGFLDDALLAVEEMRKCGIQPSVVCYNALINGYCKLGRMDLARELIREMEAKRVKPDVVTYSTIISGYCKVGNLDSAFQLNQKMLKKGVLPDAITYSSLIRGLCEEKRLNDACELFENMLQLGVQPDEFTYTTLIDGHCKEGNVEKALSLHDEMIRKGVLPDVVTYSVLINGLSKSARTKEAHRLLFKLYHEDPVPDNIKYDALMLCCSKAEFKSVVALLKGFCMKGLMKEADKVYQSMLDRNWKLDGSVYSILIHGHCRGGNVRKALSFHKQMLRSGFSPNSTSTISLVRGLFEEGMVVEADNAIQDLLTCCPLADAEASKALIDLNRKEGMDYFQAQGEIWYSESSPSVEYWNYMMTICHFGVWSTYFSMLRLTK

SEQ ID NO: 127409 - protein, 87 aa, Oryza sativa
  Clone ID: PAT_MRT4530_29864C.1.pep
MAIKDRLEILVREFLGVTRESPVSFLEICLDNDGFHGGSDRGRAATRRRAAFVAICPQHRSHDDDHHHHGFLEGGDSCLRSPIEIVN

SEQ ID NO: 127410 - protein, 79 aa, Oryza sativa
  Clone ID: PAT_MRT4530_29865C.1.pep
GGPLQAGSFEGTCDFLLQHRSLYCLTNKCSHLWTWMSHLTYLNGNIFKDAASWAKHTYPLMVTDVLYNTCSSVRSTTDL

SEQ ID NO: 127411 - protein, 186 aa, Oryza sativa
  unsure (1)..(186): unsure at all Xaa locations
  Clone ID: PAT_MRT4530_29866C.1.pep
MSKQLVSRLLGMFRSRAQVGADKFGNRYFTRVEEVDGVMKEKRWVEFKGSDQDPTTVPVVSHLXVEWICWLNGQRKKAPTPEELAELEARRERVKQNIELLKKKEEEEKKTGVRPVKTVGKFESPNLKSFIQQFPDTSLDQRKGHDEVSRSKDGTDTEDATIDTDRSSEPTGTGATFKPGTWQPPT

SEQ ID NO: 127412 - protein, 86 aa, Oryza sativa
  unsure (1)..(86): unsure at all Xaa locations
  Clone ID: PAT_MRT4530_29867C.1.pep
HVNISCQLRYILQRNNYLLLLLLKLRKVLTKKCATVLLLXQTMIFQRMRTLQTSSLEERLNQARSXKLLILGTIVRMSLAKKTRDI

SEQ ID NO: 127413 - protein, 110 aa, Oryza sativa
  Clone ID: PAT_MRT4530_29868C.1.pep
MTTTTTGRTTTTTVTGDDDHGDHNDGLGHGRRMRRLRLHRQVQPPADAFPPPPPGAASNAGRCLRLYRRAPPRAGAPPPPPPGAASSRRPLRLHGSIAGCRIQPADLLLV

SEQ ID NO: 127414 - protein, 61 aa, Oryza sativa
  Clone ID: PAT_MRT4530_29869C.1.pep
KRGGFKAGEFLIAKRLALRTFLWPLIFPGLFERFGPPLRFFFSSATGPVSLPMDGFFAFCY

SEQ ID NO: 127415 - protein, 489 aa, Oryza sativa
  unsure (1)..(489): unsure at all Xaa locations
  Clone ID: PAT_MRT4530_2986C.1.pep
CCGANWSLPHGWPATPLLMATXIFTDRHAFAAADWCLRLHGWPIMPPLLGVYDFTXRPASVTADWCPHLYGXVYDFTDLLAFAAADWCFRLHGWPIMPLLLRVYDFNDRXPLPPPTGVSASTVGLLCRRCGASTTSPXGLPSSPPIGVFAYTVGWIQIQICIKGIHSFXAYLLCSRXWISQNITTGLPSSPPTVVFAYMASTSSPPACLRRSRVVSPPARLXYYAAVVGRLRLHRRLAFIAADWCLRLHGWPIMPPLLGVYVFTASLHLLPPTGVSACTADLLCCRCWASTLPPTGRLVCHRLVFSPIRLVGHTTVVRRLRLHHRPXVTADWCFHLHGWMVTPLLLGVYXSPTGSLIASDWCFRLHGRLRFRHHSTSSITDWCFYLHNYASSLPVCFCCCRLIFTSSWLCNFITIMGRLHLHYLRHRQILLPLLRKXYFTNHDISKGLDISACTTRFDTVLFYYNKWFCNFQEFYSDIFNTYLHSSNGY

SEQ ID NO: 127416 - protein, 488 aa, Oryza sativa
  unsure (1)..(488): unsure at all Xaa locations
  Clone ID: PAT_MRT4530_29870C.1.pep
MESTTTTREAKLLRRNPSDHHDSGGGGGNDLISHLSDDILAHILASLPSMTDVMRACAVSRRWRHLGARVPVLRFFCLDHDFSEQEKLDRFIAFVNNILARRADDGTSTTVVEELEISFKRVVPSVDVAQVDAWIQYGMQHVSKSFTLQLNYMLPLNLHNSNSSNGCMQVLGSNKLMITCGGGATRLESMVLSLNKACLRRLPTNVTLDSLVHLTLEDVDDLNQLLSTARCPSLRKLCLHKQTVSPATTTDQSLHLESNELLKVSLDWIWSRALVLELRTPRLRVFHTRNASIGRLVISAPRLEELTFFYTRVASIVQVEDMPCVRIFETEMSSLRRPEYKLTMILXFVQKDGHDSAEVELIKDIPQLPHATSLSLQVFAQVYDIASVLCLLTRCKFLKHLELNIKYXYCKRPTGIGTQNQRDHHIISLEHLQDIKITSAYKRQYEARLLKFLHASAPALKKMIVAFISAFMLSQSLQIFAASSTSLP

SEQ ID NO: 127417 - protein, 86 aa, Oryza sativa
  Clone ID: PAT_MRT4530_29871C.1.pep
MGDGEKERRAAGYGLWERKRAAARSQGVLAEVRSVGLGEVKHGGERARRRGKEKEQDDDEGEEGTDAARIEVELAAKVFGRAPGWG

SEQ ID NO: 127418 - protein, 69 aa, Oryza sativa
  Clone ID: PAT_MRT4530_29872C.1.pep
MLKDSIPLTMLEHFHRTSEHAYIYLKRTRGKPENAMADTHLHYSQASPMSTPVVAGRATAEINDDDGDD

SEQ ID NO: 127419 - protein, 157 aa, Oryza sativa
  unsure (1)..(157): unsure at all Xaa locations
  Clone ID: PAT_MRT4530_29873C.1.pep
PRVRPRVRPRVRGRVGASLLHDFLGRGIFNADGEAWRSQRKAASYEFNTRSLRAFVARCVHGELHGRLLPLLRRAAAEGRAIDLQDALERFAFDNICRVAFDHDPGQLPDASGGGALAEADDGSTASGRFADAFRDAANLSAXRFRYAVPWFWRVKK

SEQ ID NO: 127420 - protein, 71 aa, Oryza sativa
  unsure (1)..(71): unsure at all Xaa locations
  Clone ID: PAT_MRT4530_29874C.1.pep
ALRGXYRPLXSAPPXDLGXXGRRPSSPPLPRRXRPPLWPLQTSTGPTRXXRAAPALAVVSVRERERRGXKA

SEQ ID NO: 127421 - protein, 134 aa, Oryza sativa
  Clone ID: PAT_MRT4530_29875C.1.pep
MEQEHEEKTIVRGWRRRRRVALPEWLRRPRPPESITVTLPTTTKQTESMVTNLLVWSYHCTPWDVRERSRRELEQETQAEEAWRRGTSHRPTRRWLNTTHARAKHGELQPQRRPAKATGKASARARSCANAASS

SEQ ID NO: 127422 - protein, 125 aa, Oryza sativa
  unsure (1)..(125): unsure at all Xaa locations
  Clone ID: PAT_MRT4530_29876C.1.pep
FXQNFGAPTAIPVRRLILTGMVXSPERHNLFRFIPFPQVVRPRWMRKAPEAAAASARTWSSSRSAPVTRGLRCGSSVPVLDHGRTLTTVLVLFIGHCGESTFCDPREDPEWVLQYTVEKQHFDHW

SEQ ID NO: 127423 - protein, 64 aa, Oryza sativa
  Clone ID: PAT_MRT4530_29877C.1.pep
MAGYDALVADVEASLARAFRMLLEAVDRKIDGEVGATHGELAALLEESWSLRASSSGSTPGPMS

SEQ ID NO: 127424 - protein, 33 aa, Oryza sativa
  Clone ID: PAT_MRT4530_29878C.1.pep
LGARSVIFRVGHGRVHRIIENDLDKCRVVAPNG

SEQ ID NO: 127425 - protein, 114 aa, Oryza sativa
  Clone ID: PAT_MRT4530_29879C.1.pep
ARGAACLFDPIKQVKLVPYNPGYQDESVLWTESRDVGHGFRCIRMVNNIYLNFDALHGDKDHGGVRDGTTGALWKWCEGDNQRWKIVPWCKLPHPNIARCNLFTSTIINFLDEE

SEQ ID NO: 127426 - protein, 158 aa, Oryza sativa
  Clone ID: PAT_MRT4530_2987C.1.pep
MTSATTTAAGGGGEVGRGGSGTVVKPIPPPSLSSSLPHPHSPSPAAAAAATHCLRRLALSPPSCRHHHHHRCHVLPPPPPPLPPPPSCRRLRAIPPLPPRRAVAVAKRGLQGGRGESGEVSAPLLFPSRLPYAYEDRGGNELDLGRLGNNVDLGISTD

SEQ ID NO: 127427 - protein, 432 aa, Oryza sativa
  Clone ID: PAT_MRT4530_29880C.1.pep
MEGNNLPSGSLMRSNSGQMHAPNPGKQGFDHTQMPGNLSMHVNQSTDSDHLSEFQFGELGKVDHHHHHHHRQHAKNGMSDDEEHGVNEDATDSQSGKGKKGAAWQRMKWTDSMVKLLITAVSYTGEDPGADSGAGKRNSAIMQKKGKWKAISKVMGERGCSVSPQQCEDKFNDLNKRYKRLTDILGRGTACKIVENHALLDCMSNLSDKMKDDARKILSSKHLFYEEMCSYHNNNRVSLPEDPALQRSLQLALRCKDEHDLRRGTSGDADEDDQSVDSDSEEENDEENYTLQGDKSALPMHKRLRLMTDQEDVGFGNSSSSHGCSRRSDSHGISLDINKAFPDGTNLALAQKDLATQSADLEEQRLQIEVQAVYLAKQRLKWERFSKNKDRELEQMRLENEKMRLENKRLELEVRHKELELELKQKGSGNHA

SEQ ID NO: 127428 - protein, 78 aa, Oryza sativa
  Clone ID: PAT_MRT4530_29881C.1.pep
RPRRVWCPSRRRCRCHRSRICRSGTARRLAREGRVGSRSRSPSPRTAAASAAAAAPSASPSGGQISLSSSSRLRAVQR

SEQ ID NO: 127429 - protein, 297 aa, Oryza sativa
  Clone ID: PAT_MRT4530_29882C.1.pep
MAVSAGGGGGAAGQFGDTTLTKVFVGGLAWETQKEGMRGYFEQFGDILEAVVITDKNTGRSKGYGFVTFREPEAAMKACFDPYPVIDGRRANCNLAYLGVQRSKAAAASLQPYGGGGASLSMADHGIQQGIPTYNVYGYSPYFSDYGYPLSYYQAYGGLGAQYQMFAGGAAAGAAGLTMANPTGGGLYSPYFQYGPAVAANAAAAGYAGMQYPQMYQYAAAAAAVGAPTAATTASQLTAVAGLQQYAGTVALAPNSTGQAAGMTMSLTAPTLPAPSPQYQYRLISSHVAAAPEKPLA

SEQ ID NO: 127430 - protein, 221 aa, Oryza sativa
  Clone ID: PAT_MRT4530_29883C.1.pep
MHLLGEQVITLHNHGPFWTFILLYPEIFLAIICFFWGRTRGRTRGRQKSNLPVNWPVFGMLPFLVQNLHYIHDKVADVLREAGCTFMVSGPWFLNMNFLITCDPATVNHCFNANFKNYPKGSEFAEMFDILGDGLLVADSESWEYQRRMAMYIFAARTFRSFAMSTIARKTGSVLLPYLDHMAKFGSEVELEGVFMRFSLDVTYSTVFAADLDCLSVSSPI

SEQ ID NO: 127431 - protein, 65 aa, Oryza sativa
  Clone ID: PAT_MRT4530_29884C.1.pep
LAHGEQGGRHGDGEFSQQFLCRCPVYDSEAVTTATATSIFSSVAGSGSYRGRRGQTWCCLGSSLH

SEQ ID NO: 127432 - protein, 67 aa, Oryza sativa
  Clone ID: PAT_MRT4530_29885C.1.pep
TSTGMDLVVMMKETHQRWIPVAVWSTSSSPSPSSSPPSPPLAPSLGSFAGRSTILSYGSCSRCRSSP

SEQ ID NO: 127433 - protein, 75 aa, Oryza sativa
  unsure (1)..(75): unsure at all Xaa locations
  Clone ID: PAT_MRT4530_29886C.1.pep
FPYFQSGKPSTSSSFFSFMYLPNFLEPNKHDINLSPSNILYNSINILVLGPSHXXKKNKKKKKKGATSKEQLRRV

SEQ ID NO: 127434 - protein, 86 aa, Oryza sativa
  Clone ID: PAT_MRT4530_29887C.1.pep
PVELTATLAHKFEIIGTSSIKITFDKTTVKTKGNLSQLPPLEVPRIPDNLRPPSNTGSGEFEVTYLDGDTRITRGDRGELRVFVIS

SEQ ID NO: 127435 - protein, 105 aa, Oryza sativa
  unsure (1)..(105): unsure at all Xaa locations
  Clone ID: PAT_MRT4530_29888C.1.pep
EQLAAQHQQHKATATVVQPAATAGXSWLVAACRRWATTGDDLDEVTAIDDEDEETVRMSDAMGTGRGAVRDGRLQRAPHPAPNPAGLLLGECQPKTNANYVPRRF

SEQ ID NO: 127436 - protein, 424 aa, Oryza sativa
  Clone ID: PAT_MRT4530_29889C.1.pep
MDRRSEAAERRGHGRAPYSAARDPVFFAHHGNIERLWIEAPALTHALSSSLIFARIEDSEYALLRKILAFLSHQISHEIKITRVLRGLRGPLPSFKKIERLWYIRRGLLFPGNTNFTVLDASFHFYNEDARLICVRDSLDAARCASRTRMRLPGNLDKTVRVAVMRPKTSRSRKEKDAEEEVLVIEGIEREREHRGGEYVHRERRANADSVHHDERMRSPRKTVARREGGSRRRRPARAIAALASLPPPSSGQIWEGGGGEPPSPPSPRCRHRRPRRPLPSLLRPDLGGRGQGSCCRGWEPRLLADVALRRHRPPRSPLPPCAPLDLGGTGRAMPPSSVALLGRAASPPRRCRPSPPPPAAVGECRSEGRGKEEMCEDLEKNYGPQWFGIGNLLDDIGADGDRTIVVSIVTRSGCDSVTIVFDV

SEQ ID NO: 127437 - protein, 960 aa, Oryza sativa
  unsure (1)..(960): unsure at all Xaa locations
  Clone ID: PAT_MRT4530_2988C.1.pep
TGWTSPPPTGVSACTAGLLCRRCWASTTSPPACLRRRRLVSSPIRSVGHTTVDGHRHLHRRPASVAADWCPRLYGRLVTPPLMGIVIYTAGLPPSPPTGVPAYTVGWSHHRXWASSSTPPACLRRRRVVPPPTQLAYYAAAVGRLRLHRRPASVAAEWCLRLHGWPIMPPLLGVYDFTAGLPPSPPSGASAYTAGLLCRRCWASTTSPPACLRRRRVVPPPTRLAYYAAAVGRLRLHRRPASVVADWCLRLHGWPIMPPLLGVYDFTAGLPPSPPSGASAYTAGLLCRRCWMSTSSPLAHLRCRRLVFPLTRLTYYAAISGHLRFHRRPPSSPPTGVFIVIDGRLCSHIGHFCHHQGEYYKAKSSFILFFRGLQMLYHIFYNIYLDCLRHNLSTKVPIELWXFYLPMLSVWFANGWLPLGRFLAPGGSLDGPSNARCXVLFGINQKHRDEINLFSTLNXLQKYPSSKLRSVKLCSINDELMSLICMFGKCLGRLPVLXAMTSWAERLNVMSXCSGKSKLTRGEIHVYKYFKILDFFSSIIFISDTTHPICLFCRIQIQICIKGIHGFRLISYAPGMDQSEHHRLACLRRCRLVFPPARLAFMPPLLGVYVFTDRLAFAAADWCFRLHGWPLXPPLLGVYVFTDGPPRPPPTGASACTAGLYAAVVGRLRLHRPACLRRRRLVFPPARLAFMPPLLGVYVVTDRPPRPPPTGVSACTAGLLCCRCWASTSSPAGRRIRHXLMSPLARLACYNAXLMLSSSRLATSLSLLIGISIFNTSCLRLPWLPTGXLHFHGCMILPVXLAYYAAVVGHLHLHRRSSRLLXLVPLPLRLVYTATTTDGHHHLPSPTXMLPPIGAFIFTTTRLHYRFTSLRQYKFVIMVERXHRQTLLLLLRKFYYFTNHDVFVNLDISACNAMIFYYNKXLSNIQDFYLDTFNTYLQSSNDYSTTRSYNSRLYVQLFLN

SEQ ID NO: 127438 - protein, 89 aa, Oryza sativa
  Clone ID: PAT_MRT4530_29890C.1.pep
LNRKKILLLKIGMEAQGRNKMMILSADKDMEHDREDGDDGSNDYNQIRSEAKHSDSDHDYTDNDSLDHTRDDVQLDRSIDKDGKRHLRR

SEQ ID NO: 127439 - protein, 98 aa, Oryza sativa
  unsure (1)..(98): unsure at all Xaa locations
  Clone ID: PAT_MRT4530_29891C.1.pep
HRPRPVLILEHVCHVLGDDTXHXXWKHHEVKVKDSKTLIFGTXEVAVXXXRNPEEIPWATAXAEYVVESTGVFTDKDKAAAHXKXGAKKVVISAPSKD

SEQ ID NO: 127440 - protein, 191 aa, Oryza sativa
  Clone ID: PAT_MRT4530_29892C.1.pep
MSNNFRNHIVKWEEGRVLPVRGGQTESHSRSDRRLKAGQTAGPRPVRPTAHGQSDRVRPAGGRRRPGREWTAGGGGEWRSEPRRYGQKLAHRAVVRDEGDEPTARIRQREFDGGKSRRRQPAGREEGNADEVTRDRFPAVRASTRPRESDASVGLDRATPSEAGDVRVLRSSSGDGGEHAASDGNGRGSAG

SEQ ID NO: 127441 - protein, 62 aa, Oryza sativa
  unsure (1)..(62): unsure at all Xaa locations
  Clone ID: PAT_MRT4530_29893C.1.pep
SYVWQYYSSPAPNEGAPXLGCCTTNDVDRPRNTTISNQLLLMMILYLTKLFHITTVFVTSHR

SEQ ID NO: 127442 - protein, 118 aa, Oryza sativa
  Clone ID: PAT_MRT4530_29894C.1.pep
HASVSLFKTFTDAVWRLAAPLEAFLRALPRRPDCVVADSCSPWTAGVARRLGVPRLVFHGPSALYILAVHNLARHGVYDRDDGDLEPVDVPDLPEAGAVTTNRPSSLGLFHWTGPERH

SEQ ID NO: 127443 - protein, 553 aa, Oryza sativa
  Clone ID: PAT_MRT4530_29895C.1.pep
MDTNGSSYGESSSEDVTTPLLLPAARGGTTTKGDRRRPASSAAPALLRALLANKYLAVAAGPAACALICGLVDLGGHRAARNMLGVLAWVFLWWITDAVPLAVASMAPLFLFPVFGISSSDAVAKAYMDDVISLVLGSFILALAIEHYNIHRRLALNITSLFCGDPVKPPLLLLGICGTTMFISMWIHNTPCTVMMMPVATGILQRFPRVDGASSSASSAADAREVQRFSKAVVLGVVYASAIGGMATLTGTGVNIILVGMWSSYFPEQRPITFSSWMSFGLPLALVLFVALWATLCVLYCSKNTGRALSAYLDRSHLRRELSLLGPMAFAEKMVLAVFGGLVVLWMSRSLTDDIPGWGSLFHGEVGDGTVTIMMATLLFIIPSGKNEGEKLMDWNKCKKIQWNIILLLGAGFAIADGFKTSGLTDILSNGLRFLKGAPTLVIVPVACVFSGIMTEFTSDDSTTTLVLPLFAELGKSIEVHPPLLMVSGAIGAQLSYLLPTGSPSNVVGFSTGYITIKDLVATGLPLKIVAIAALTVLLPTLGSTIFGMDIKS

SEQ ID NO: 127444 - protein, 548 aa, Oryza sativa
  Clone ID: PAT_MRT4530_29896C.1.pep
MDKNGSSYGESSSDDVEAPLLLPAARGGTMAKGDRRRPASSAAAAWVRALLAHKYPAIAAGPAACAAVCAAVDLGDGHGEARNMLGVLAWVFLWWVTGAVPLARASMAPLVLFPGLGIFSFDDVARADMGDVISLVLGSFILALAVDHHRIHRRLALNVLSLFCGDPVRPSLLLLGVTGTTALVSMWIHNTACTVMMMPVATGILQRFPRGDIDDGGGQEVRRFSKAVVLGVVYASAIGGMATLTGTGVNIILVGMWSSYFPEQRPITFSSWMSFGLPMAIILFLALWLTLCLMYCSNNTAKALSAYLDRSHLRRELSLLGPMAFAEKMVLAVFGGLVVLWMSRNITDNIPGWGVLFHNKVGDGTVTIMMATLLFIIPSGKREGEKLMDWNKCKKIQWNIILLLGAGFAIADGFKTSGLTDILSNGLRFLKGAPTLVIVPVACVFSGIMTEFTSDDSTTTLVLPLFAELAKSIEVHPALLMVSGAIGAQLSYLLPTGSPSNVVGFSTGYITIKDLVATGLPLKIVAIAALTVLLPTLGNIPAQINIKD

SEQ ID NO: 127445 - protein, 182 aa, Oryza sativa
  Clone ID: PAT_MRT4530_29897C.1.pep
MRRLLPLLGVLVLLCAASLVDLTEGAGGGGGGGGGGGRGGGGPAGGVGVFDGEVDSSNPRGLSGVASPSLISAKNWKREATYQGEALHMRNFSDWGCRAGSLASGEARATSHGEATGQTRARREIGSRGRAVNEPSSSELACLGSSSIKARAEPSSSRAYKMFELSNRFGSSSIKLELDYRA

SEQ ID NO: 127446 - protein, 136 aa, Oryza sativa
  Clone ID: PAT_MRT4530_29898C.1.pep
MVRCGGLCYARGIVTAPFRVISENFRRSAGFVGILPLEFRRSTGDVGLLLAYTSTEASFIKKCGRWHGGDNLVPPLYPTTFRYIIELKAGLILVDQGKIYTHVPYDSIPLEYSEVKCYSGIRALADLSVTISNTNN

SEQ ID NO: 127447 - protein, 42 aa, Oryza sativa
  Clone ID: PAT_MRT4530_29899C.1.pep
YRLIVSALYLPELLVIDTRPASEADSDVRPEQTPLHRGARRP

SEQ ID NO: 127448 - protein, 875 aa, Oryza sativa
  unsure (1)..(875): unsure at all Xaa locations
  Clone ID: PAT_MRT4530_2989C.1.pep
MGKLDEAKHVPSSLPIGFIASTVGVRRCRCRPASVAADWCPRLYGRLVTPPLMGIVIYTAGLPPSPPTGVPAYTVGWSHHRXWASSSTPPACLRRRRLVSPPIRSVGHTTVHGRPRLHRPAGLXADWCFRLHGWPIMPPLLGVYDFTTGLPPSPPTGVLAYTVGWSYHRSWASTSSPXPAGLRRRRLVFLPTRLAYYAAAVGRLRLHRRPASVAADWCPRLYGRLVTPPLMGIVNFTAGLPPSPPIGASAYTAGLLCRRCWASTTSPPACLRRRRVVPPPTRLAYYAAAVGRLRLHRRPASVAAEWCLRLHGWPIMPPLLGVYDFTAGLPPSPPSGASAYTAGLLCRRCWTSTSSPPACLRRRRVVPPPTRLAYYAAVVGRLRFHRRPPSSPPTGVFIVIDGRLCSHIGHFCHHQGEYYKAKFFLFLCLTTPIGLPLSSEIQIQICIKGIHGFKLISYAPGMDQSERHHRLASTAADWCFRLHGWPIMLPLLGVYVFTDRXASSAADWCFRLHGWPLXPPLLGVYVFTDRPPRPPPTGVSACTAGLYAAVVGRLRLHRPAASXAADWCFRLHGWPLCCRCWASTSSPTGRLVRCRLVFPPARLAFMPPLLGVYVFTDRPPRPPPTGVSACTAGPIMLPLLGVYVFTDRXAASAADWCHRLHGWPVITPTDAIFFTAGYIAVTTXASVSSTQAAYVCHGCRLVSSLPWLHDSASVDWPYHLHRWSSRLLLXLVPSPLRLVYTATTTDGHHHLPSPTXIMPPPTGAFIFTTARLHYRFTSLRQYNFVIMVERLHLYYLRHRQTLLLLLRKFYYFTTHDVFVNLDISACNAMLFYYNKWLSNIQDFYLDIFNTYLQSSDDYSTTRSYNSRLYVQLFPN

SEQ ID NO: 127449 - protein, 125 aa, Oryza sativa
  Clone ID: PAT_MRT4530_298C.1.pep
MHSCCVQPGRQQAAGTATYSRSCRAGGLLLCDDVCVHGQRPAPDTRTAVVVVVVDVIVHIAARRPGPGGPAARTEDARCVWEAGTKEGGENAGTQQCMQRRRSGCQCNAYPGLWKSLPLPCVVHG

SEQ ID NO: 127450 - protein, 393 aa, Oryza sativa
  Clone ID: PAT_MRT4530_29900C.1.pep
MNRGEFQSSLVQQMIWSGSSTGTATGVGGGGGAGSLMGSLKPCHEDQEASPNMPSLSSPSLIFSQQFQHSSPGLVPMNGAAGAAASLPSLHDGGGGGHESSMPESWSQLLLGGLAGDQERYSATAALLSKGLENWGDHAAAAAASACMVGGMKEEGSMAQAAATAAAAAYSFYGSHLAGDHQHEIQAAAAGGGASNKSQLSQMLMASSPRSCITTSLGSNMLDFSNTAAPPELRSHHHNSDNSSECNSTATGSALKKARVQASSSAQSTLKVRKERLGDRITALHQIVSPFGKALSYPYMGDANGTGPMQNGPVGERNPGLFPEYPGQLLNHNGNTGAQQPAAQPEQQGANDDGKKDLRSRGLCLVPVSCTSHFGGDNAADYWAPAPLGGILR

SEQ ID NO: 127451 - protein, 146 aa, Oryza sativa
  unsure (1)..(146): unsure at all Xaa locations
  Clone ID: PAT_MRT4530_29901C.1.pep
NFIITKFKAKLTFIKSNTLSHAGIQQENTKKGICWRPWEDICKPIAQGGLGIKDIINVNQSXLLIQSAWRIIQNPNDLVSLIIMAKFFQNTSFWKAKTNIPKSIFWSSILKVSQLWNNNKHWDPTKVNPIFDHQATQVRTCLVSLL

SEQ ID NO: 127452 - protein, 581 aa, Oryza sativa
  unsure (1)..(581): unsure at all Xaa locations
  Clone ID: PAT_MRT4530_29902C.1.pep
PRLRPPPPPPPPXPFLRFLLFSPLPAPLPFHAQPPPPPTPRGFPPPLPSPGAGAPRGGSATPAMIPGHPGAFYPFPPPSLPGVGPPRGGGAIPGLPAGFPFLLRPPPPLPVPGVICRPPPSPPYFAPPPRATPTVSLAGPPPGFNPKRGLIGRGEAITLPESERPTPPPPPPPLPPTPVAQHKRTEFSWPPKXPPPPSPSXTRAPPLSSAPKQHPESEAPPLAPAPRRRVPVSPARQLPSPCRWPSPRRSPPLSPRTPPPAPPSLWSSPGSSWPRPPPSRSSPPPARPXSAPLTPSKPPPPPRVPSLSPPPLTPSTGGLPPPPAPXACRTLRGSTVPGIPPPXPPWQRRQPPPPFTLLSCYRPHPASSPPWQRRRPPPSLTLLPLPPSSHLMAASLPLSRRRGRPPLLPLPPAAPATSSPAGVGLPPPLPRPHPLRPPTXPLLPPPSRGWSASSSSQPPSPPSSSPPPSRKTGAPSLTTPHRCCRLSWTGDPSPSQXAPKVAPPPSPSLPSSPSPAXPDPRLTDPPPSDPPPNPPPAVAAHSHRHCCSRGRGRWICASPSPVRALVADLPAAAATARRRHS

SEQ ID NO: 127453 - protein, 74 aa, Oryza sativa
  unsure (1)..(74): unsure at all Xaa locations
  Clone ID: PAT_MRT4530_29903C.1.pep
ERERLKLCYRTMICEGLRICLQCCTIVYPILLKQKGVLLNTWYQQNKAREXXGXKKKKKKKKKKKKKKKKKKKK

SEQ ID NO: 127454 - protein, 199 aa, Oryza sativa
  Clone ID: PAT_MRT4530_29904C.1.pep
MASSVGDSTAAANGGGGAAASAAPPEAAGKGSATISVTVVLLVLLVASVAAFLMSPQPGGGKPPVEGVSGGGDSDGTRGGGGGLEGVKGAEPVEQAVGPGAAAIPGFNSRLDAFRAWAKLTWMKLRRPHSGEPRRYDDDAGSSGSAADAAKRSLEMTKETVEQAAASAARAAGNAVGKASDKVKGAASPAKRAPSDAEL

SEQ ID NO: 127455 - protein, 188 aa, Oryza sativa
  unsure (1)..(188): unsure at all Xaa locations
  Clone ID: PAT_MRT4530_29905C.1.pep
RRRAGGWRPRGGGRGRGGQRAAAAGRCGGAAHRGPGEAARRRAGTLAAWSQITALCGPPASPLPSPPSLHRRHGRGGGRARSGGVRGRGGGVDGDIGGSRCGGSXLPSPPLPDPAGGRPGEGSGGVDGDVGGSPPLPSPPRSGRREAGGGWRRRGARVVGDVDDGSRCGSGGEARVWSVAPVAAAAAP

SEQ ID NO: 127456 - protein, 63 aa, Oryza sativa
  Clone ID: PAT_MRT4530_29906C.1.pep
LWGPPFKEKLQLLNHFGGTNWPNHLDSPHPGKKQRVPRGPTNHFFPGLWSIIGGGLNPISGLV

SEQ ID NO: 127457 - protein, 406 aa, Oryza sativa
  Clone ID: PAT_MRT4530_29907C.1.pep
MARLLSPLNVRQNLPPISVYTDDAVLFFRPTAEEARVIKGILELFGAATGLKTNFSKSAITPIQCDEQQYVQVESILSCRVEKFPITYLGLPLSTRKPTKAEIQPILDRLAKKVAGWKPKMLSIDGRLCLIKSVLMALPVHYMTVLQLPRWAIKDIERKCRGFLWKRTGRDQRRALPSLVAKALRLKWLAKSLEQKDRPWTLAAFRPGSDVEEIFRSVAEHIIGDGVDTQFWTDNWTGKGCFAWRWPVLFSHVSRAKLTVADALIANRWIRRLQGALSNEALGEFFQLWDEVRDVSLQQMADTIKWKLTADGNFSVASAYDLFFIATEDCSYGDTLWHSRVSSRVRFFMWIALKGRCLTADNLAKRNWPHDAICSLCQRENEDCHHLLVSCDYTAALAQAETLVQH

SEQ ID NO: 127458 - protein, 188 aa, Oryza sativa
  unsure (1)..(188): unsure at all Xaa locations
  Clone ID: PAT_MRT4530_29908C.1.pep
YLINHAIMDRSILXCRACAGRELRCYYKANVDGFSATDFHCHWPHGHRRCHRRGHXGGFSLQGYRSTDDYYDTLDAFLFYWPDTDTDAAATAVVVLPKVGGSGRRCSITRGPQFGADGLLIGPPLTAVMWMFTGPDSSAGAGDLRSTRSRFRLSYAKRKYSYPSTFGEKRRKKTVQVIGVYKVNCPPF

SEQ ID NO: 127459 - protein, 386 aa, Oryza sativa
  Clone ID: PAT_MRT4530_29909C.1.pep
MASQIESHRSGAEIVNGDAICRKKSIELLEELGLPKGLLPLEDIEEFGYNRGTGFMWLVQKKKKIEHTFKKIKQTVSYANEVTAFTEKGKLKKITGVKTKELLLWLSVVEVYITDASPDKVTFKTGTGLSDTFDAAAFALDKFALGSKESKRGPHIAGGFSEFESNLQLLAGGEIRHPAQPLQLRQKRAAATGVLVPRRRTAVPHVPRRQHPPQRQNQNHLVLDDDLIPAQLLISRELRCCYKANVDGFSATDFHHHWLHDHRRCRRRGHAVMFGRFSPQGYRSTDDYYDTLDAFLFYWPDTDTDAAATAAVVLPKVGGSGAALTGVGDLRSTRSRFGLSYTKCSTVFIYNSATFRWTKVPAQRRPNRGARTGARLAAPVTGAPSG

SEQ ID NO: 127460 - protein, 80 aa, Oryza sativa
  Clone ID: PAT_MRT4530_2990C.1.pep
SHIPSRKAKRGSLCPPLACLLGRCFSHPVAFGIVKILAGCPLVCPTGNWDGYYLIFCSSSYPWVVGSFQCFDKACMAGAF

SEQ ID NO: 127461 - protein, 51 aa, Oryza sativa
  Clone ID: PAT_MRT4530_29910C.1.pep
SVDTELLWPVWTAAPADLDPEPMGSGGAALGCGAPGRGEADAPRTAGVASS

SEQ ID NO: 127462 - protein, 88 aa, Oryza sativa
  Clone ID: PAT_MRT4530_29911C.1.pep
TGQVIIYPVPPGGDSEGGSLDPPFFFFFLPFGTPFWGAGTVGFFSWGQSPLWGPKKACFSPRLRPPSRYRVQWVFKVEGPCIHPPSGS

SEQ ID NO: 127463 - protein, 77 aa, Oryza sativa
  Clone ID: PAT_MRT4530_29912C.1.pep
LFRADPVRGGGGFADQLRGGCDYVVAARCDGGGADPVRGGSGGADHVRGGSDYVVVARRDCCGSDADRGDGGRHGIQ

SEQ ID NO: 127464 - protein, 165 aa, Oryza sativa
  Clone ID: PAT_MRT4530_29913C.1.pep
QSPQPKVMSDEKAKSKGFGFVCYTSHEEATRAVTEMNGKMLKGKPLYVALAQRKEVRRVQLAQQLNQQRMALAQGGRGPGPMGPMAGMPFPGAPGHMFYPGMPGGPGPRGPPGMMPYGPMVGPGGPGRMGQGRGPRGPPGLMIPGPPMGPPPGMGPGPRGGRGRG

SEQ ID NO: 127465 - protein, 253 aa, Oryza sativa
  Clone ID: PAT_MRT4530_29914C.1.pep
MAALFFVLLIPLILLAGGGQVAVESAATSRGKLIMVDLLEYGSGAGTLAMRVDTIHAAGFANRSGHWHALRGNGHLFDALGLAAARLPFGNTYADLVGGVANLRGLPISMPFTNRAATVLSGYDPATAAAGGDGEAALKRALATLTVAIGEAQRLRPVMDTLLFGGLGARVADEHLPYIEHWDAMWEELTRWRRSGGGAWGGPFTGVLRERANIGSAEDALAVIGVAFRDHLLRGATMPDLSPRSMGYSDGDL

SEQ ID NO: 127466 - protein, 348 aa, Oryza sativa
  Clone ID: PAT_MRT4530_29915C.1.pep
MALRRMGIILVLLAIATLLSPAVSARFISLPTDHLPITTPPLADGLGFDLYSDSCPQLETTVRSAVQAALQQEIALAAGLLRIFFHDCFPQGCDASLLLTGANSEQQLPPNLTLQPRALQLIEDIRAQVHAACGPTVSCADITALATRDAIVASGGLPYDVPLGRLDSFAPAPSDAVFQLPQPTSDVSTLLSAFQTRNLDNVDLVALSGGHSIGRARCSSFSNRFREDDDFARRLAANCSNDGSRLQELDVTTPDVFDNKYYSNLVAGQGVFTSDQGLTGDWRTSWVVNGFAGNHWWFYGQFGSSMVKLGQLQGPSGNVGEIRRNSCFVPNSQTILAAAGDDGFTASA

SEQ ID NO: 127467 - protein, 50 aa, Oryza sativa
  Clone ID: PAT_MRT4530_29916C.1.pep
PPRERGTKPERGISLRWHLCPTKVACHRVGGTCSWPLTSKVSSLHQETQY

SEQ ID NO: 127468 - protein, 332 aa, Oryza sativa
  unsure (1)..(332): unsure at all Xaa locations
  Clone ID: PAT_MRT4530_29917C.1.pep
MGLKVEDDPPSSGSVADADDSTDRLCRVCHCVEPDLRGHSALAFLGILPPPSSPDEDADDVATATATNNNVLEFVSPRGEIFVCTAATTDLESGPLHHHHHLMDLGCSCKNDLALAHYACALKWFITHGSTVCEICGHVAVNVRPADFNKVLASLKEYEALRERTSTGDLSYLHYGADAGDGPDAVAGRRGQGDTEMPPWLNPXNRTRRHFSGPNPKQTPASPSNNSIHHGAVVTTVVHTRWSLEGTGVFLAIGLGVIVLAWLVAPHVGKKAAVICLHMLLGGLCALTIIISLRFVFPRIQYGSMRCWAILFVFWFLVFGVWASRTHSIRSS

SEQ ID NO: 127469 - protein, 83 aa, Oryza sativa
  unsure (1)..(83): unsure at all Xaa locations
  Clone ID: PAT_MRT4530_29918C.1.pep
CFYPILCLGLLFVXSVFGRSAPKTCXSYLLCNNFXKNLGICXESCXVYXSMRDRNPXRSRVVXGYYTQTGYPPNCXLXXXLKK

SEQ ID NO: 127470 - protein, 74 aa, Oryza sativa
  Clone ID: PAT_MRT4530_29919C.1.pep
ETDETDIDARVSAQAHRLQLYTPTYTKAHRMHHSNHTNLTHQRTGDWRNEQHHNRRSMTLEQYKASSRARDNAH

SEQ ID NO: 127471 - protein, 422 aa, Oryza sativa
  Clone ID: PAT_MRT4530_2991C.1.pep
MGNCWGAKISSESPCRSASSPSGGTSKYASNSSVSAASVPPTPRSEDEILEAANVKAFAFNELRTATRNFRPDSVLGEGGFGSVFKGWIDEKTLAPTKPGTGMVIAVKKLNQEGHQGHREWLAEVNYLGQLSHPYLVRLVGYCVEDEQRLLVYEFMPRGSLENHLFRRSTHFQPLSWNLRMKIALGAAKGLAFLHSDKVKVIYRDFKTSNVLLDAVRSPQNYYPLCSQDSLTGDLIDRLYFQNYDAKLSDFGLAKDGPTGDKSHVSTRVMGTYGYAAPEYLATGHLTTKSDVYSFGVVLLEMLSGRRALDKNRPTGEHNLVEWARPYLMSKRRIFRILDARLGGQYSLAKAQKAATLALQCISVEAKNRPNMEQVVAVLEQLQDSKETGANPQLQKKSSSKNAGSNGSKPSSKGKPANARLV

SEQ ID NO: 127472 - protein, 51 aa, Oryza sativa
  Clone ID: PAT_MRT4530_29920C.1.pep
FFFFFFYMQTMELIFSFIFFFYSNDTVHIYIIKIPRNYYFRTFYIIPPYIS

SEQ ID NO: 127473 - protein, 46 aa, Oryza sativa
  Clone ID: PAT_MRT4530_29921C.1.pep
VDGAINALNSSGIFASGQPIRVCPSKTPIRSVASYYSTSANTMTSN

SEQ ID NO: 127474 - protein, 44 aa, Oryza sativa
  Clone ID: PAT_MRT4530_29922C.1.pep
LYGPRIDVGIGVPGLYVCSSNRDMVRSDMVVCHPDQDLTQINSI

SEQ ID NO: 127475 - protein, 106 aa, Oryza sativa
  unsure (1)..(106): unsure at all Xaa locations
  Clone ID: PAT_MRT4530_29923C.1.pep
LDHYAIAKFAXSFEMVPRTQAENAGLSALELISSVYTEHAGXNTKAGIDLEGVCKDVSIMKIWDLYVTTFCSLKYSADAACTVLRVGQVIMAKPAGGPRRDDQPGR

SEQ ID NO: 127476 - protein, 120 aa, Oryza sativa
  Clone ID: PAT_MRT4530_29924C.1.pep
MACMTVIRQRQMDGWMCSSDFMDALGWLLVLAWCVRADEAGTGGAACRSGRGGGALPSARSDGGGRGGTVAPDGFGAMAQWRPTAGGEAVAARCRCPPPPPARAMTATYASTRGLHRLRL

SEQ ID NO: 127477 - protein, 95 aa, Oryza sativa
  unsure (1)..(95): unsure at all Xaa locations
  Clone ID: PAT_MRT4530_29925C.1.pep
KNESGFDVTYSSTMNMYRDISRFVVLEYITSSARLVFYWTEGVLSVTNVSYFYFELKSKVNPAWSXSSPTPQSAFFQMRFSPRNNSIPSNNTEYY

SEQ ID NO: 127478 - protein, 77 aa, Oryza sativa
  Clone ID: PAT_MRT4530_29926C.1.pep
VFFFHDLSFVLHVFFADHEFLCTLAKLSAPSAMCGSIAAGIGPMIYKFYKSIKDRLSVRRTRRSTALYRTGTCTRAC

SEQ ID NO: 127479 - protein, 59 aa, Oryza sativa
  Clone ID: PAT_MRT4530_29927C.1.pep
PERPGSFSPGGFPKDRRGRNLSLRAMRISLPAPVVRGQDAADDGHSCDPNASLQLGLRC

SEQ ID NO: 127480 - protein, 153 aa, Oryza sativa
  Clone ID: PAT_MRT4530_29928C.1.pep
MGIQGNKATTREHDFLSLYTTAAKDPSLQLHDAKPPPPSQGFFLRTHDFLQPLEKPTPAPTPPPTSQLQQQQQQAFPGGIGTFSISHVAGARPVAAAVVKAEPTPFVLWGQPAAAAAAHPVAALGHHHHHHQWTLPFAGVGQVAATAARQQQE

SEQ ID NO: 127481 - protein, 555 aa, Oryza sativa
  unsure (1)..(555): unsure at all Xaa locations
  Clone ID: PAT_MRT4530_29929C.1.pep
MQRYFHGQTDHAVRVRKIHKVKVILDNTLVAMYFACGDVQRARLVFEGMCDRDVISWTSLISGLVQNGSPLQGIQLXRDKKLAGVRPNDVTFLGLLSACNHAGAVEKGWSYFHSMKPDYGIEPQHQHYACVVDLLSRAGQLDRAYQFILNMPIKPEMTVWGALLHGCKMHGHSNMAMAECAAQHIFELEQSNAGHYVQLANMYASAGMWSQVAGMRVTMRERGVTKATGFSFIEVDGEMHSFHAWDHSHPRATEIFAMLCLLSPTPTGVGGVDSEGGWEGWELQWKWFQILRELLPHSDQKRDKATFLLEVIEYIRFLQEKVQKFEASVPEWNQENAKILPWSNIYFRSFWKNSQSKGQNPGDDLPDPSQFIRNGSSSGYNFTGKPDDNHNMVTSAAASGAQELVETDHAASVSYRSAETPTNITNNVTSQAQAQWASPAGVDDCAMNSEMLNNQQLAIDEGTISLSSQYSQQLLGTLTHALESSGVDLSQSSISVQINLGKRAVKRPGADGSSSSKELPSTSANNENMGHQLTMLGGGTEELPHPTKRHKSGNS

SEQ ID NO: 127482 - protein, 378 aa, Oryza sativa
  Clone ID: PAT_MRT4530_2992C.1.pep
MGTKNQFDLLVDVDNDDPSHLIAAAEKKAAAAAASPKPAAQAKLPTKPPPPAQAVKESRNYGAPAREGAGRNGPGRGSGGFGGGRIGQRRDFGEGDTNGVEGGYGASGFGDGIVRREEGEHRPSERGHGPRQPYRGGGRRGGYTGGEAGDESGRAPHRAYERRSGTGRGYGMKREGAGRGNWGTVTDEALAQESGEAVSIEVSVTVTEENKQEDVPQSDEVEKHKEGESNEEEEKEPEDKEMTLEEYEKVLEEKRKALLSLKVEERKVVVDKELQSMQQLSVKKDSDEVFIKLGSDKDKKKENVERDERTRKSLSINEFLKPAEGERYYSPGGRGRGRGRGRGDRGGFRDGYSSRGPVAAPRIEDQAQFPGLAGRLVH

SEQ ID NO: 127483 - protein, 107 aa, Oryza sativa
  Clone ID: PAT_MRT4530_29930C.1.pep
PPSRRAGAPATALQLRGRRPAVRVSPATALPPHGPSATATNQPEPSNMNVALPCLGEETPIVAPKMTKSKIKGKPSCSNTPGSPTMRTRSTDKSPAMGTRSKRKLYG

SEQ ID NO: 127484 - protein, 66 aa, Oryza sativa
  Clone ID: PAT_MRT4530_29931C.1.pep
CDHYFWRNAQLLILVLNRLYPSLLVCNSMFWETWQLAHDRTNTGAVSTLDLLRRRRKTLISLKICD

SEQ ID NO: 127485 - protein, 54 aa, Oryza sativa
  Clone ID: PAT_MRT4530_29932C.1.pep
VLDIRFSVLIPGQKGSVSNQSEIGLLSLPVLNYDFSLGCIIYWGVKPGNKMLHS

SEQ ID NO: 127486 - protein, 465 aa, Oryza sativa
  unsure (1)..(465): unsure at all Xaa locations
  Clone ID: PAT_MRT4530_29933C.1.pep
MALLLLLEMRSPVVRSCRVRWPPQWGWRVLAADSRPRFPRRPGEPDCTYYVKFGSCRFGMKCKCTEGGQRRRRVGXEREGRWXWECKYYSTPGGCPPGKACKYLHRDGKEGKTDAEKVDLNFLGLPLRPGEKECPYYMRTGSCKYATNCKFHHPDPSNVASKDPQLEHENGDAPQQDVQGSSSQPNASIWPDQRTVNEHHVPFIAPSPSYSAGMLPPQGMYPPPEWNGYHQVPLNPYYPPGVPFQHFPAAPINHPMYKAPEIPGHQQVPSEEYPERPGQPECQHFVKSGFCKFRMKCKYHHPRSPVPPAGALSPLGLPIKPDQPVCTYYGRYGVCKFGPACAYNHPFNFSPVPAAGPPLLPAHEEYPERPAQPECQHFVKSGFCKFRMKCKYHHPRSPVPPAGALSPLGLPIKPDQPVCTYYGRYGVCKFGPACAYNHPFNFSPVPAAGPPLLPAQYPTPGNYTL

SEQ ID NO: 127487 - protein, 111 aa, Oryza sativa
  Clone ID: PAT_MRT4530_29934C.1.pep
INKKRKSSGKTKTTILSRKKQNLGRKQTETPESQWKQAASLLRPRLLEQLQEKERTQISSGKHKTSPHKKIKPPQENGHNLLPWKKPKLNGGLACANPSRKDPKGQNHLKI

SEQ ID NO: 127488 - protein, 141 aa, Oryza sativa
  unsure (1)..(141): unsure at all Xaa locations
  Clone ID: PAT_MRT4530_29935C.1.pep
MPKFVHRLLSSNSGGLPFFSGAGDTPTPAGRFPRSLEEWPWAVDFGWWXGGGGAAEAAGMEDGDGLALAAGAKQACGXGGSGRWLRIRRRGTAGDKDGGAGAPRRHCLEDKERGEGEGEGGFADAVDPFRPVGKAGSGAVG

SEQ ID NO: 127489 - protein, 114 aa, Oryza sativa
  unsure (1)..(114): unsure at all Xaa locations
  Clone ID: PAT_MRT4530_29936C.1.pep
MSGTSRLVISQSSSRSKRASRDARGGASRRRRGRPPHRRIGCCFARLXDDWFLPSVPESELEPLQLSKSLAHAGAGDERDEVGKTTEKLALGTDGRIGDGVARNKGICYLSDKI

SEQ ID NO: 127490 - protein, 168 aa, Oryza sativa
  Clone ID: PAT_MRT4530_29937C.1.pep
MAIDPVQHTSHVTLLIGLSPRTKRIMAAKIPDLHSTSSTVVPPSHVHLEECGGALFMCYSQNLQTAVWESSLSMIWLWRPIAPRHAPICWIVEVRMFYDLRHIFLKAMSLMPSFSPSCLQVDSTGENLFLDVGMVMVTFLEVQCWCGILGVVSIGLASMDRLWQDLGD

SEQ ID NO: 127491 - protein, 138 aa, Oryza sativa
  Clone ID: PAT_MRT4530_29938C.1.pep
RHQRRQPLPPPPSPGSRHRRRTAPPSSGSGHRRRSVPQIWLPPPPPLPSLAPARRPPPSLCSLAPATDAPPLFVDVSPAGGSATMCRCLDATQTRSSMSQELTARGSSPAAASSPRRVGLLPQLRRRSSWTGGSNLLH

SEQ ID NO: 127492 - protein, 36 aa, Oryza sativa
  Clone ID: PAT_MRT4530_29939C.1.pep
KYRIRLLYGPHLIVLVYQNGKFTLLLYRMRVLVTFC

SEQ ID NO: 127493 - protein, 207 aa, Oryza sativa
  unsure (1)..(207): unsure at all Xaa locations
  Clone ID: PAT_MRT4530_2993C.1.pep
SAHSRWSPPLIAWSPPPPPPHRHPPPPLAIRHRRRRRRSGRAHVDAXGGEHDGRSETAASSTTCHTGRIRLGMAMTXASDDDLGDDGTATSAGDGVDDGWRRHGRQRRLATITSETTVGDGADDSWQRHNDDLADRHRRINRDEDEAEMTSAARIAARRRARSSKAAAESLPHPIPELIHGDDGVRAHPFSLALVRDRLHAPPSILH

SEQ ID NO: 127494 - protein, 469 aa, Oryza sativa
  Clone ID: PAT_MRT4530_29940C.1.pep
MAATCVDTWAARMEAGADLTAKIGHAVGAAARTRCAAVQVATWSDGHRRRGDRGRGRGVLTVLAQRREGDGKAAAVAPRGGSGDGGPAAFRVREPADGCCEDMGKAVVGLGGWEKAGQGLVGRGGAVGGGGLAGRGDTRRREVAVARVGGGIGAMGWFGEKEWMLVCYTVRRSRRWRWRGLAAAGAAVALGEGESGPTRAATGGEVGGDVEVVGATRGDHQGTASGNRLSHHLRRYHDQHQWRHWWSWHHRHHGQLTGRKRQRHGGGGSNNGAGANPNGGSGAASRGQPAGSQPAQSGLVARLTWPSPYNLWADTIQMWPGQAHGPGALGRPPFTSAAVAGQPTYHTASMQASLPQHMGSAGFPNQAGLAPLQLPGPTTYSTAGSVPASPHTWAGPSQWDPQALASSFNTSTLTPPNSNECYMDSGASSHMTSNTGILSASHPLPHNFPSHIVVGNGSLIPITSTGTAY

SEQ ID NO: 127495 - protein, 222 aa, Oryza sativa
  unsure (1)..(222): unsure at all Xaa locations
  Clone ID: PAT_MRT4530_29941C.1.pep
INVKTTFLNGELYKEXEIYMDQPDGFVVEGQEGKMCMLFXSLYGIKLAPKXWHEKYYRTLTYASFVINETNKCVYYRGEELILCLYIDDILIFGTXKSFLSQNFDTKNLGVADVILNINLIRGEDGIILLQSHYVGKILSRFGYIDVKXFSPTLYNPSLLIRKNKRIDRNQLDYSQIIGSLMXLASATLPNISFTVSKLSRFTSNLGYDHWCALERSLQGFR

SEQ ID NO: 127496 - protein, 58 aa, Oryza sativa
  Clone ID: PAT_MRT4530_29942C.1.pep
MRRRHGQANAAVVGRLVTAESVASLDVVFPTVGAVKPPLSIGWISGESLVLVLRDIDG

SEQ ID NO: 127497 - protein, 87 aa, Oryza sativa
  Clone ID: PAT_MRT4530_29943C.1.pep
PTWAGPLHHRLGRILARGQYKPTYAKTNCQISTSEISLGKPNMVPTGTKERNLALSLTSSGTDSRRKTTLLSTTSQHFRPPSRQQID

SEQ ID NO: 127498 - protein, 106 aa, Oryza sativa
  Clone ID: PAT_MRT4530_29944C.1.pep
MVRPAGGCPCLACCPAVAGSPPPHAAPAAGLPQRTPRLPSAAATHAAAWLLANLGFGIGDFGSCLGGDFCFEMGSVAAQVECGPSEKGEGVENLDPTQQKWTETES

SEQ ID NO: 127499 - protein, 121 aa, Oryza sativa
  Clone ID: PAT_MRT4530_29945C.1.pep
FFFFFFLNWDDIFIPDIGYPPRNVFQLGPHTNDSAVSTLFFLSVVLTSSRGSPIPITRITTARVRQVPHQGSQVVGQLGSDITAHHVHGTDLGPNHQLWGVAACSRASQVTRPGTHVVCQL

SEQ ID NO: 127500 - protein, 65 aa, Oryza sativa
  Clone ID: PAT_MRT4530_29946C.1.pep
TPGPPPPRPTFWWWWVGRVVIATKKKMPTPGERIPHAARSSSRQCYCFFADVGEGSGFCHWRWWA

SEQ ID NO: 127501 - protein, 65 aa, Oryza sativa
  Clone ID: PAT_MRT4530_29947C.1.pep
MNIKKINIKKTMAADILLHPCHRCNMVRAQPPSPRCTVSPPAGAGGGESAGAAAAVTGDHCGLPS

SEQ ID NO: 127502 - protein, 122 aa, Oryza sativa
  Clone ID: PAT_MRT4530_29948C.1.pep
MWESESESHGGERGLVPVGGGGGSGRHEAALKNDGFVRRDRSWYVNSDIPSDLLVKVGDVNFYLHKYPMISRSGRMSRAVYESSAADEAEADAAAAVAVVEMGDLPGGAGSFELAARFSYGM

SEQ ID NO: 127503 - protein, 268 aa, Oryza sativa
  Clone ID: PAT_MRT4530_29949C.1.pep
MKSLQGEVHLNIPASKAWEMFTNNETLGKISPEMLSGAEYLEGDGSPGSLRIFKLGPALHHFVKESVQKVEKVETGRSFGYEVVSGELKEVYDPYHVTFSFAPVPGKEGEQCVAGWKAEFEPITPTSPPPEKAKDAALGFLKLFETCEATNYKTIELMQNDIKLEGVKNCLSWFMRTLLILKTKGLEGYVTGEIKVSESTSSAEWKTWSASNSLVVAWLLTSFIPVIATTVETISSASEMWKTLTNLYLGEGNVMLMVEAQEKISALK

SEQ ID NO: 127504 - protein, 113 aa, Oryza sativa
  Clone ID: PAT_MRT4530_2994C.1.pep
MEEREASAAAVQATSFCGGGVTGCCSSRGHVLPPRRSGAGAVEKPSAGGGGMRALGDGGWGGRRMKAAASGRWIALSRHEVEESESGGATVTQHGGRSSSVFCSPQHASAAPS

SEQ ID NO: 127505 - protein, 127 aa, Oryza sativa
  unsure (1)..(127): unsure at all Xaa locations
  Clone ID: PAT_MRT4530_29950C.1.pep
HFFFMRTGSVLLQIVPVGLDWAAXAFYGKPAQQLGLGYLEYKVAPEESSLAAEYGVNRPXVRDPSVISNRGWWEMKKVYMDRQNVTVNIKRFGELLRSARLHLKNATRLRQGRLGGDDDRGEVGVAG

SEQ ID NO: 127506 - protein, 604 aa, Oryza sativa
  Clone ID: PAT_MRT4530_29951C.1.pep
MTATSNAAAGAATLMPLLIHLLRGASDLASVSATHAKLLKLGAASSVASSNHLLAAYGRCGCTALARHLFDGMRDRNVVSWTALMSGYASAGRPRAAVALLRAMARSGVPPNAFTFSTAASSCARLADAGLGRQVHARAEVAGYACDSVVSTALVDMYGKAGRVGDARAVFDAMPVTARNAVSWASMLSVYAQNALGHDAIQLFAELRTNGEDMAPNHFMLSSVVNACAGVGRLGIGKCIHGMVLHHGHEDNDVVAVALVDMYSKCGIYEYSKKVFDRINQPSVIPYTSIIVATAKYGLGRCALALFSDMVGRGVQPNSVTLLGVLHACSHSGLVDTGLQLLRSMRSEYGIDPCASHYTCAVDMLGRAGQLEAAFELADEAQVNGNDALMLWSSLLSACRNHKRLDLATMAGQKVSEFTQDVAGALVVMSNAYASAGQADDAAAVWSNMRRRGIRKDPGCSWIEIKDISYVFYAGMVSPAGSRAGEVMLLLDELEGKMREKGYKGRIGSARVLDADEEEDGNHHHQEGRGVMVGVHSELLALGLGLLVIPKGMAIRVMKNLRMCRDCHEAFKVISAIVEREFVVRDLNRFHHFRMGSCSCNDYW

SEQ ID NO: 127507 - protein, 586 aa, Oryza sativa
  Clone ID: PAT_MRT4530_29952C.1.pep
MGFVSGIDDFVFPPGQAFRFSSLEFITDNFGKISLFDSDSNQSERDAVSAPFGLPNSAEIYPKIILSESASSHSDEISSTSTRPDQGDATYPSILMKLPDDLAAVFTTRASSSQELDGYLSSPGVDSRPMEILDYDDFSYNYDFSNLDDFDDFDEAYEDNYTPLFFGVFMADNETAEQRQLREAEEQRTRQEAERRRLKEERQAQERDQLQREHERAAKEAEDQRQCTLEAGQPINLRDTLNRRRVERGYVPHRSPDRYGDDEDGVAAFTSDLRRVDWPAGFKPTGIEKYDDKTNLESWLTVYGLAIRAEGGDNKAMANYLLLHGLPRGTIGSWAELREHFIANFQGTFKRPDTHFDLYNVIQKPSESLWDYIQHFSKQRNKISDITDNVIIAAFTKGVRHELLVRKFGRKPPRTVKQMFEKANEYAKADDAVTASKQPGSNWKSKKDTAVTGGSGSNNHKDHKPKDSFIYKQFAEQYAKQTKKATDGDQSTSKMKDDEDDGPTGFQDSRKELNYIFGGPQAYESKRKQKLTDREINDVQPGTPQYLRWSETTIKFDRSDHPDRMVHPGRYPLVLDPVVRNVSTPT

SEQ ID NO: 127508 - protein, 108 aa, Oryza sativa
  unsure (1)..(108): unsure at all Xaa locations
  Clone ID: PAT_MRT4530_29953C.1.pep
AAGRKLELDAVAARGRDDYHSCRSAEAVTWARAGAAAQXTLAPSGRQPRLAASAPPSLGRAWLHRSHRRRACAVAARAGAGAGARSPATRGPWLRARSPSASPASRPP

SEQ ID NO: 127509 - protein, 45 aa, Oryza sativa
  unsure (1)..(45): unsure at all Xaa locations
  Clone ID: PAT_MRT4530_29954C.1.pep
SDKXSXPPAPHXXGESGXPAGGSGXPPVAXVXLRHRXGHEXFDLG

SEQ ID NO: 127510 - protein, 136 aa, Oryza sativa
  unsure (1)..(136): unsure at all Xaa locations
  Clone ID: PAT_MRT4530_29955C.1.pep
MAAAARSSGGMSDQLFVSIKLECPRLAEMGLVPHVFGSHPVAGAWDPSKALLMEQEEAALWGLSCIVPSHRETLDFKFLLKPKDNSSHCIVEEGPDRSLVCGSNEVEIRNALFKFNDETGVVECKXFVETEILXPF

SEQ ID NO: 127511 - protein, 72 aa, Oryza sativa
  Clone ID: PAT_MRT4530_29956C.1.pep
LRQALIRLTIGKAGTPAGTGPEFPGRPTRPGGGGQGAQQAGNLPVPEGCTDPVAKNFDPTARSDDGSCLYTF

SEQ ID NO: 127512 - protein, 33 aa, Oryza sativa
  Clone ID: PAT_MRT4530_29957C.1.pep
HHHTWLMQPAALNIKTFMCCPPNITTYFHRFDV

SEQ ID NO: 127513 - protein, 352 aa, Oryza sativa
  Clone ID: PAT_MRT4530_29958C.1.pep
MKKQCNVPPLPDRAHLHLAVFIDTDDFVTSRESRLSYRPTYCPHSCAPRRISRSVTHPEITRVHPEKNLSVGHPSRNCSTRVHLGRISLSVTHPKIRHQRSINPIKPWVGMSHPHPLKTPRHREVVSDTDQHIILTRVHPGRISRSVTHPEIAPLVCIREESPGSDTDQHIVLKITCVHPGRISRSVTHPEIAPLMCTRCVHLGRIFQSVTHPEIAPLVCTQEESPGRSPISKSLMCRPTHCPQNHLCAPGEESPDRSPIPKLLLMCTRCVHLGRISQLVTHPEIAPLVCTQEESPGKNLPVGHPSRNCPTRVHLGRISRSVTHPEIAPSQSRLTSEFFQDWLPEKSYNLLI

SEQ ID NO: 127514 - protein, 68 aa, Oryza sativa
  Clone ID: PAT_MRT4530_29959C.1.pep
GKAGYARYRPEFRFDHASGFQVVSNKIKRNSLPFVPKHFFLSIFDHTRSIRSHVYRTSFLLNNHRSII

SEQ ID NO: 127515 - protein, 261 aa, Oryza sativa
  unsure (1)..(261): unsure at all Xaa locations
  Clone ID: PAT_MRT4530_2995C.1.pep
LLYKQILWLLPCLWLSTPDHWXTRSGPXYPGSTPHIQDPIPSQXLPPFPHPPSPWASPPPTTPRXPLPPPTPFTSRFQYPGKPVLPHYGXAPATLNFGPPPQPSRXPPPRPXXXKPHRYICPPPDLPXGMGFGAAPPHIHTPSTPXXPLYTPIWVPPGHPSHQPPQXNPHQPPPTXMGPPHTSPYSPRPLKGLPRNPPHPSLGPLFPPIGPXHPXHRGSSYPPXGSPPPDSPPXPSXTLPHPPLGPGGXFGPLAPNIPPLL

SEQ ID NO: 127516 - protein, 94 aa, Oryza sativa
  Clone ID: PAT_MRT4530_29960C.1.pep
LIASVKPACLKGVKAAAVVAPRRWVEVLGNRVGATFRHRQVTCLLCSLPSSSYAGRLRCIDGMRIARDLGRVGRPGNSGPVPAGVPAFPIVTSY

SEQ ID NO: 127517 - protein, 56 aa, Oryza sativa
  Clone ID: PAT_MRT4530_29961C.1.pep
SKTTFWKKNEPILLKKRGYVPGPQGEPGGENRTLKPARGFDGKKFKGGKKKKGPGK

SEQ ID NO: 127518 - protein, 44 aa, Oryza sativa
  Clone ID: PAT_MRT4530_29962C.1.pep
MTLWSVSRSGRSLIASGALDDVAVPFRETTQSRTIAARDRAVSR

SEQ ID NO: 127519 - protein, 338 aa, Oryza sativa
  Clone ID: PAT_MRT4530_29963C.1.pep
MRAVVIARAGGPEVLEERDVGEGLPPPGEGEVLVGVSAAGVNRADTVQRQGRYPAPPGASPYPGLECSGTILALGPNVPSRWAVGDQVCALLSSGGYAEKVVVPAGQLLPVPEGVSLTDAAGLPEVACTVWSTVFVTSHLSPSESFLIHGGSSGIGTFAIQIAKHLGIKVFVTAGSEEKLAACKGLGADVCINYKTEDFVARVKEETNGKVTLDMEVYLPGVDVILDNIGGLYLQRNLNSLAVDGRLFIIGFQGGAVTEVNLQPMLARRLTIQAAGLRNRSLDNKALIVSEVEKNVWPAVVQGKVKPVIYKTFPLSEAAEAHKLMEESSHIGKILLIP

SEQ ID NO: 127520 - protein, 78 aa, Oryza sativa
  unsure (1)..(78): unsure at all Xaa locations
  Clone ID: PAT_MRT4530_29964C.1.pep
VLILQFTETAKKSPWDLRPYAKADAWVDPGIPGPVPAGVPAFPIVSRIRAWRNHGHSCFLXCEIVIRSQFHTTYEPEA

SEQ ID NO: 127521 - protein, 520 aa, Oryza sativa
  Clone ID: PAT_MRT4530_29965C.1.pep
MPLPVESHKKNTVEMEFFTEYGEASQYQIQEVIGKGSYGVVAAAVDTRTGERVAIKKINDVFEHVSDATRILREIKLLRLLRHPDIVEIKHIMLPPSRREFQDIYVVFELMESDLHQVIRANDDLTPEHYQFFLYQLLRALKYIHAANVFHRDLKPKNILANSDCKLKICDFGLARASFNDAPSAIFWTDYVATRWYRAPELCGSFFSKYTPAIDIWSIGCIFAELLTGRPLFPGKNVVHQLDIITDLLGTPSSETLSRIRNEKARRYLSTMRKKHAVPFSQKFRNTDPLALRLLERLLAFDPKDRSSAEEALADPYFASLANVEREPSRHPISKLEFEFERRKLTKDDVRELIYREILEYHPQMLQEYMKGGEQISFLYPSGVDRFKRQFAHLEENYSKGERGSPLQRKHASLPRERVGVSKDGYNQQNTNDQERSADSVARTTVSPPMSQDAQQHGSAGQNGVTSTDLSSRSYLKSASISASKCVAVKDNKEPEDDYISEEMEGSVDGLSEQVSRMHS

SEQ ID NO: 127522 - protein, 171 aa, Oryza sativa
  Clone ID: PAT_MRT4530_29966C.1.pep
MERLLHFRPPKPTSANAVAAAATADGDLLELDVLWPASRAPGLLAALPEEDGKRRRKRGGSGSGSVAVRSAARPIPETAALTLVPSSSAAAMAKSAPVRIPSEAAAARRGVMWAAQAGGEDGEAAMVPPHEIVARRAAAHSSVLEGSGRTLKGRDLHRVRNAVLRRTGFLD

SEQ ID NO: 127523 - protein, 666 aa, Oryza sativa
  Clone ID: PAT_MRT4530_29967C.1.pep
MGGGGTLVDGFRRLFHRRTASGSNQSSNAGEEAASSDLEVADDPDLVALRSIRIRVPKRKMPLPVESHKKFGGEMKVSGFLVILDSWPRGVLRLDQIFVAPELLAYCTISLFLFFYDLCKVQYSSSAGLTWSGLCISLVRTVSIGNKSRLAHGMEQNTVEMEFFTEYGEASQYQIQEVIGKGSYGVVAAAVDTRTGERVAIKKINDVFEHVSDATRILREIKLLRLLRHPDIVEIKHIMLPPSRREFQDIYVVFELMESDLHQVIRANDDLTPEHYQFFLYQLLRALKYIHAANVFHRDLKPKNILANSDCKLKICDFGLARASFNDAPSAIFWTDYVATRWYRAPELCGSFFSKYTPAIDIWSIGCIFAELLTGRPLFPGKNVVHQLDIITDLLGTPSSETLSRIRNEKARRYLSTMRKKHAVPFSQKFRNTDPLALRLLERLLAFDPKDRSSAEEALADPYFASLANVEREPSRHPISKLEFEFERRKLTKDDVRELIYREILEYHPQMLQEYMKGGEQISFLYPSGVDRFKRQFAHLEENYSKGERGSPLQRKHASLPRERVGVSKDGYNQQNTNDQERSADSVARTTVSPPMSQDAQQHGSAGQNGVTSTDLSSRSYLKSASISASKCVAVKDNKEPEDDYISEEMEGSVDGLSEQVSRMHS

SEQ ID NO: 127524 - protein, 139 aa, Oryza sativa
  Clone ID: PAT_MRT4530_29968C.1.pep
FRQKKKKKKKLKKKKKKKGGNFKKNKGRPFFWGPPFLRSACLLRRFAMVSPFFSVLAVLFHRRVWATLGLANLCRFPTYSPFASCLFCQVALSVRAPLHSPFLTGVWPAPFMGPFFSRGFLFARCVTFPLFCPFPSVPF

SEQ ID NO: 127525 - protein, 354 aa, Oryza sativa
  Clone ID: PAT_MRT4530_29969C.1.pep
MRFWRDSGGGGSGGGRDLNGGGTPCGQVRVLVVGDSGVGKSSLVHLILKGSAIARPPQTIGCAVDVKYIFIEVFPQFQHITYGSPGSSSNSINSIKGDAERNFFVELWDVSGHERYKECRSLFYSQINGVIFVYDLSQRKTKTNLNKWAVEVAESGTFSAPLGSGGPGGLPVPYLVIANKVDIAPRDGKRVSSGNLVDVARQWVEKQGLLPSSEELPLAESFPGNSGLLTAAKVARYDKEALVKFFRMLIRRRYFSNELPAPSPWSLTPREDTILPVETTNDDDLFQRKSYAGQSYKYSGVTPLPAQRNLTPPPTLYPQQPMSSSSENYRYHRFSSSAIPDASSSRTNRADINI

SEQ ID NO: 127526 - protein, 65 aa, Oryza sativa
  unsure (1)..(65): unsure at all Xaa locations
  Clone ID: PAT_MRT4530_2996C.1.pep
TIPIPXGPSCSSSSSEYYAXRVRRRTQGYYGEGSSEEATTATQQHXPGMTRVELTQGRAKYAGSK

SEQ ID NO: 127527 - protein, 159 aa, Oryza sativa
  unsure (1)..(159): unsure at all Xaa locations
  Clone ID: PAT_MRT4530_29970C.1.pep
QEEVIEGLQXPMGLQNLEIFRYQGSRYPSWMVDKQTGLKNLRVLALSNCRQLKPAPELFELLVHLQSFSLCGCSWDTLPDNMEQLMSLQNLMIYLCTNLLSLPTLPRSLAHLVIGNCDPWFTRSCQTIAHENWQKVQHIPNKGIFCDGALFAILRQRNH

SEQ ID NO: 127528 - protein, 130 aa, Oryza sativa
  Clone ID: PAT_MRT4530_29971C.1.pep
GRRRAGKRGARVAPSAPRSWGPAPVAIDAPEAAGIDRPGPHSPRPGGGPLGSSPSLLYGWGAEPCPSSALRGDRDRRAPPGSCWLSPFQPLQLFFGPGKGQRLLYPATVASCGAHCVSAWPLNRVRSTDN

SEQ ID NO: 127529 - protein, 112 aa, Oryza sativa
  unsure (1)..(112): unsure at all Xaa locations
  Clone ID: PAT_MRT4530_29972C.1.pep
IPLQRSPPLGHRRGHRPEQTAPSPQNGATRQIRXLEAGFGELDGAAPEEEEAVAAAPNLAVGAGGRGGQIRPAEFLPSLVRSAVELPRVVLRSCAAELPPSLAPLGLRRRRY

SEQ ID NO: 127530 - protein, 76 aa, Oryza sativa
  Clone ID: PAT_MRT4530_29973C.1.pep
GGSYLYNTTHHCTSINREKWLAHGEKQPRTDYHRDRHCQTKKLTHYTTKTNQRRKNKPGGGPTSIARTQSRNVPAQ

SEQ ID NO: 127531 - protein, 61 aa, Oryza sativa
  Clone ID: PAT_MRT4530_29974C.1.pep
MGHHRVVVSEDELKMMTVTRMRWSLRKMTPKSRCCRTVEDETFRRRRLAEKASEMIVAREQ

SEQ ID NO: 127532 - protein, 921 aa, Oryza sativa
  Clone ID: PAT_MRT4530_29975C.1.pep
MSFLCSSELRVRAALRAPTLPSQNAAVARMAGHRAGATKGGVSAVCEPLGPDRPLWFPGSSPPPWLDGSLPGDFGFDPLGLGSDPELLRWFAQAELMHSRWAMLAVAGILVPEVLEKWGFMEDYSWIDAGARDYFADPWTLFVSQMALMGWAKGRRVAENLLNPGCVAVEPRLPNRRNPVPDVGYPGGLWFDWGNWGRGSPEPVMVLRTKEIKNGRLAMLAFVGFWFQAVYTGEGPIDNLLHHLADPGHCNVFSVRRDVAAATREKGRASAAGVPGGGVKGKHGGGHKGGGGAERRGGSLGGGCRGTEGGLDVTELEVNDRGEVEEASYGWFNVGTDGAGVRADWLATYRARAASVLVGSNSLYNRCLSFSRVVAATGMMDGSTAAAAELEAAERVVMRWDSTASASYGGGGGDEQMLFDGGGDRVEAERFLRAVDDLRRLAPPSPATVGSPRRTSSASGGGGAASNAVQVAMARLEDEFRHVLSSRALDLEIEALADLTSLSMCSDRTNSADVAEEAAAADEDDSVSSSVGRRSSYRSLRSIREIDLLPADAISDLHAIASRMAVAGYGRECVQVYASVRKPAVDSALRRLGVEKLSIGDVQRLEWEVLEAKIRRWIRAARAAVRGVFASERRLCFLIFHDLPLSSSTITTATHDAPFAEAVKGAALQLFGFAEAISIGRRSPEKLFKIIDLHDAIADLLPDVSDIFAASKAGESIYVQAAEIRSRLADAVRGILSEFENAVLRDPSKTPVPGGTIHPLTRYVMNYSSLISDYKTTLSELIVSRPLACSRIAPEGNENAPSFPDLDLADPDSQLPLAAHLIWIIVVLEHNLESKASLYKDAALSHLFVMNNVHYIAHKIKDSPELRGLIGDEYLKQLTGVSKSALRERFKSFNAAFEEAHREKIPWMRGGLKTQKISIVD

SEQ ID NO: 127533 - protein, 62 aa, Oryza sativa
  Clone ID: PAT_MRT4530_29976C.1.pep
VNRGWFFGSRGKRVFKLFDPQNFLFPKLAGQPNMAFSFFKKKPSAPQICCNFYTKPGALVRN

SEQ ID NO: 127534 - protein, 533 aa, Oryza sativa
  Clone ID: PAT_MRT4530_29977C.1.pep
MGARGDRSNSADVAEEAAAADEDDSVSSSVGRRSSYRSLRSIREIDLLPADAISDLHAIASRMAVAGYGRECVQVYASVRKPAVDSALRRLGVEKLSIGDVQRLEWEVLEAKIRRWIRAARAAVRGVFASERRLCFLIFHDLPLSSSTITTATHDAPFAEAVKGAALQLFGFAEAISIGRRSPEKLFKIIDLHDAIADLLPDVSDIFAASKAGESIYVQAAEIRSRLADAVRGILSEFENAVLRDPSKTPVPGGTIHPLTRYVMNYSSLISDYKTTLSELIVSRPLACSRIAPEGNENAPSFPDLDLADPDSQLPLAAHLIWIIVVLEHNLESKASLYKDAALSHLFVMNNVHYIAHKIKDSPELRGLIGDEYLKQLTGVSKSALRERFKSFNAAFEEAHRVQSACSKDSDEATARTVRPPVSRGGRASREQSREQRGEAAETGATAFATNRIPRPAAVVRVGGRRRESRDRAACAAPVASASAQPQAGGNRRLEAHLSRWGRVGTGRHVEKFRLAATRYQRTAWLKILNCLR

SEQ ID NO: 127535 - protein, 318 aa, Oryza sativa
  Clone ID: PAT_MRT4530_29978C.1.pep
MATAEQRQIEHVHLPVRGLTLHVAQAGKGELGTVVFLHGFPEIWYSWRHQMLAVAAAGYRAVAPDWRGYGLSDQPPEPEAAVYDDLIEDLLAILDALAVPKAFLVGKDFGAMPAYDFALRHPNRTCGVMCLGIPLGTAGLSFDTLPEGFYILRWAQPGRAEADFGKYDVKRVVRTIYILFSRSEIPIAKENQEIMDLADLSTPLPEWFSEEDLDVYSSLYENSGFRYPLQMPYRSLHQRKPIGDAKFQVPVFIVMGEKDYVFKFPGIESAMKDGTMEKHAPNIKITYIPEGGHFVQEQFRDYVNELLLGFLKDHPVVI

SEQ ID NO: 127536 - protein, 426 aa, Oryza sativa
  Clone ID: PAT_MRT4530_29979C.1.pep
MDLADLSTPLPEWFSEEDLDVYSSLYEKSGFRYPLQMPYRSMHQNKPIGDAKFQVPVFVVMGEKDYVFKIPGIESVMKDGSMEKHAPDLKITYIPEGSHFVQEQFPEVSLPTAVLPRERDRVVVHGELDTMAAATEQPQQITEIEHAHLPVRGLSLHVAQAGKGELGTVVFLHGFPEIWYSWRHQMLAVAAAGYRAVAPDWRGYGLSDQPPEPEAAEYDDLIEDLLAILDALAVPKAFLVAKDFGALVAYDFALCHPNRTCGVMGLGIPFGNDASSINTLPEGLYIFRWAQPGRAEADFGRYNIKRVVRTIYILFSKSEIPMAKEDQEIMDLADLSTPLPEWFTEEDLDRKPIGDAKFQVPVFVVMGEKDYVYKFPGVESAIKDGTMERHAPDMKITYIPEGSHFVQEQFPDYVNELLLAFLKDHP

SEQ ID NO: 127537 - protein, 91 aa, Oryza sativa
  Clone ID: PAT_MRT4530_2997C.1.pep
MSYQTPPPAATGYPYPAQEAGQQQQQAYPAYVAPPPAGYPTKDGPQEQYPAGAGAGETTSRGHHHHHHHGDGFWKGCCAALCCCCLLDMCF

SEQ ID NO: 127538 - protein, 83 aa, Oryza sativa
  unsure (1)..(83): unsure at all Xaa locations
  Clone ID: PAT_MRT4530_29980C.1.pep
VRHPHPHPGRSGLHPHPPLLARRRLRLHRQVQPPADAFPPPPPGAASNAGRCLRLYRRAPPRAGAPPPPXRAPPPVGXPPPPP

SEQ ID NO: 127539 - protein, 601 aa, Oryza sativa
  unsure (1)..(601): unsure at all Xaa locations
  Clone ID: PAT_MRT4530_29981C.1.pep
MAAIRCGGIELNEVLEGVPVVRVNFPIKYLGLPLALGRLRKVDLQPVFDKIFGRESLEQLDKQRRRFLWAGTGDITGGKCKDQTKPWVGLETPCDEIDRNLFAASTNITIGDGNTVRFWEVLAHVASRSAGIARTSCHVTHAMGRAPLVLIGRAVPIIGGAIPIIAINYGILVACWMLHMFDVVQSKLICRAMALHFSWRSTSPFLDTVCSSVYDLYNSSAIHRASCGEQLVVNGTNCDLGDYWQHSPTPDFLDSDRIYAVLVLGCVCSSGGCGRGEAHAKQGHDVSGEKRPSRRDGLGRSFWWIMVARKYEWCVTYAVVVATLQLFLRLTGANVTTLFLPMLSQATGCGKAALAGHAVLVLANAGGVLGSALAARTYGREVMCVIGGVLIVFCQVVIPVAMEMHGGGGAYXAAAATFFVACAASGGCGWSWGALFWAVPGEGVRSAGDAVGAALGFALGFAQTHCFLLMLRQLKHAALAYYAVWIWHGTARLGSCPCRPGPTTGPCLGRSLGTAPTPQPSTPPSLFVGVSDGCLAGSSTEGPDKVVYQPESGKASELSFSEAENDIIIRFIQHGELERYKQQLLPVVLPMMPVFVHSSAS

SEQ ID NO: 127540 - protein, 102 aa, Oryza sativa
  unsure (1)..(102): unsure at all Xaa locations
  Clone ID: PAT_MRT4530_29982C.1.pep
PRVRGRVGVYLLDLILDREASNGDVYTHHQNQIIESSAETLYGXMHPKHNQTSKDLAETMDNSRSTDTRTALPPSSACQWSPTPTAPCSPSSRARTTSAACR

SEQ ID NO: 127541 - protein, 1056 aa, Oryza sativa
  unsure (1)..(1056): unsure at all Xaa locations
  Clone ID: PAT_MRT4530_29983C.1.pep
MMQSLDIISWNVRGLNSAARCNTIHELMADTKCSLACFQETKLQNIDDGLAHFLGGYKLDKFAFKPARGTRGGILLLWNSAVFDVQEVRVGRFLISAQVTVILTGATFLLTGVYGPTRHHLKSAFLRHIRRIRPGPEDGWLILGDFNMIYRARDKNNSNVNLARMRRFRSTIDRCELHEIPLQNRKFTWSNERRRATLVKLDRYFCNETWDLAFPHHVLHALPTGPSDHCPLVLSDPQCPCRPSAFKFENFWTRIPGFKDKVKDAWCQPSSHTEPMHHLNEKLHRTATCLREWAKGICTEAKLQFHMAVDVIKRLDVAQEHRDLSAQETRLRAALKRKILGLASIERARKKQASRVTHIPTLGEPFSEQEVHQAIKEMPSDKAPGPDGFTRIFFKVCWEIIKEDVLLVFNSIYNLRCAHLNLINSANIVLIPKKEGAEGVSDFRPISLIHSIAKIFSKMLALRLRPHMHSLISINQSAFIKGRSIHDNFLFVRNMTRRYHRLRRAMLLFKLDITKAFDSVHWDYLLALLQRRGFPTKWIDWLGALLSTSTSQVLLNGLPGQRIKHGRGLRQGDPLSPLLFILAIDPLQRILFKAIELGAISKIRGRTTRLRISMYADDAIIFINPTRGDVTAFTDILQHFGTATGLVTNFQKSQVAAIRCGGIELNEVLEGVPVVRANFPIKYLGLPLALGRLRKVDLQPVFDKISRRVASWRGKNMAAAGRTTLIKSVLTAQPIYLLTALKITKESLEQLDKQRRRFLWAGTGDITGGKCKVNWTKTCMPTSQGGLGVLNLDKFTRALRLRWLWHEWKDQTKPWVGLETPCDEIDRNLFAASTNITIRDGNTLVALWEAVRNVXLRRWRTGSDYLEVHKQRALHGLLGLPCAVLRGAEYKLQFLDLESLGAGEMQISCLAXIQNRVWTSDRLATRGWQNNGCCPLCRRETETALHLVATCRYTKRIWHLVSAWVGYQQMDPTEWEEARSVKQWWENIANTPSVPKKGLRSLILLVVWEIWKERNRRIFDHKEVATNFLLMKIKEEASLWALAGAKRLRELILHSV

SEQ ID NO: 127542 - protein, 2169 aa, Oryza sativa
  Clone ID: PAT_MRT4530_29984C.1.pep
MSQLGDPATRPEEDTCFIPTSYAIDEELREWSETAAVSWAAHAPSTTTPRDVEQAFLDEFQLRRGEVAVSLYHPQAFLIKFQHRRHCEEALVKGYVKRRGIEIHFIKWRSLQSALGVALMFRVRLCLDGVPMHAWAADIAERIIGRTCALEQIETDVVHPVESGNTRSIDLWAWTANPSTIPKRMWLSFTNRAKDPKLAPLLAVESPPEHWQRGVRHPVLFHLEEIHDYTAATIDLEEQGSFQPTKRRLPPWSLGVLDGEQVPGRVFEDFPHHPPPPRSVHDRLGGTEREVDRHEDDRRDHHDDRRSGRGTRDGHTRRGRAARGGRPRDDDDRDDFDDDQDEDREERDRDDDRGRGDDRKDRDRGGRGRRRGSSNDHPRPWRRIDRDDDRDNRDCDLGHDCGEQRASDNDYRRERTRSLRRRDRGALAATAAVDGDRLTLSTTRASSSPRRTPLLCTAVRSKQRSPNCHRQWTSYNGSPSSRTRLWRGCRHSRSTLSRRTQGMKPGSACSLEADPGRLTATSCFADSASSRKPSQPHARSEGGGGGRGQQGWQWQPSGAAPTYSVPHPVFSGGGPGIAELNGHPRCLFASPPRAILASPPASPPRSPCVHPIQLTRRLKIQPRKCGQATRRNKRIAKQTSRPTMERCQRVLFKRLGILNDEGGTSIEQVLAQYIAMFNGLLPPHIIAALTAIFGIDDDEQDAMDAALISLVGEGVAEVADECGVFCEHLVYASSLPASALASADFTAKFSAAHYVEHLRATVNLSNQSSRFLGLSSEPGQTRYTKCSLACFQETKLQNIDDGLARFLGGYKLDKFAFKPARGTRGGILLLWNSAVFDVQEVRVSRFSISAQVTVILTGATFLLTGVYGPTRHHLKSAFLRHIRRIRPGPEDGWLILGDFNMIYRARDKNNSNINLARMRRFRSTIDRCELHEIPLQNRKFTWSNERRRATLVKLDRYFCNETWDLAFPNHVLHALPTGPSDHCPLVLSDPQCPRRPRAFKFENFWTRIPGFKDKVKDAWCQPSSHTEPMHRLNEKLHRTATCLREWAKGIYTEAKLQFHMALDVIKRLDVAQEHRDLSAQETRLRAALKRKILGLASIERARKKQASRVTHICEGDANTKFFHLKMNARRRKNTIHRLKKDNGCAVTHKEKEATIHDHFASIMGRPAPRPNKLNWDALDISPIDLATLGEPFSEQEVHQAIKKMPSDKAPGPDGFTGIFFKVCWEIIKEDVFLVFNSIYNLRCAHLNLINSANIVLIPKKEGAEGVSDFRPISLIHSIAKIFSKMLALRLRPHMHSLISINQSAFIKGRSIHDNFLFVRNMTRRYHRLRRAMLLFKLDITKAFDSVRWDYLLALLQRRGFPTKWIDWLGALLSTSTSQVLLNGLPGQRIKHGRGLRQGNPLSPLLFILAIDPLQRILFKATELGAISKIRGRTTRLRISMYADDAIIFINPTRGDVTAFTDILQHFGTATGLVTNFQKSQVAAIRCGGIELNEVLEGVPVVRVNFPIKYLGLPLALGRLRKVDLQPVFDKIFGRESLEQLDKQRRRFLWAGTGDITGGKCKDQTKPWVGLETPCDEIDRNLFAASTNITIGDGNTVRFWEVLAHVASRSAGIARTSCHVTHAMGRAPLVLIGRAVPIIGGAIPIIAINYGILVACWMLHMFDVVQSKLICRAMALHFSWRSTSPFLDTVCSSVYDLYNSSAIHRASCGEQLVVNGTNCDLGDYWQHSPTPDFLDSDRIYAVLVLGCVCSSGGCGRGEAHAKQGHDVSGEKRPSRRDGLGRSFWWIMVARKYEWCVTYAVVVATLQLFLRLTGANVTTLFLPMLSQATGCGKAALAGHAVLVLANAGGVLGSALAARTYGREVMCVIGGVLIVFCQVVIPVAMEMHGGGGAYAAAAATFFVACAASGGCGWSWGALFWAVPGEGVRSAGDAVGAALGFALGFAQTHCFLLMLRQLKHAALAYYAVWIWHGTARLGSCPCRPGPTTGPCLGRSLGTAPTPQPSTPPSLFVGVSDGCLAGSSTEDLWISIINGNSGAPDAQLWSFSPSIKTPRRWLDQSRWHSDFLFPRTAAKSMCAPLSIHENPYRPDKVVYQPESGKASELSFSEAENDIIIRFIQHGELERYKQQLLPVVLPMMPVFVHSSASATACQTLLTHNNLDFILPFPQHHHAP

SEQ ID NO: 127543 - protein, 208 aa, Oryza sativa
  Clone ID: PAT_MRT4530_29985C.1.pep
MPQPQLWKPGGHALLTSPCLPARGAHRSSRRPPMGIGGGGFGSRGVGFNSTGIAQFRVESFDLLHVVPPCFRGSRTVAAGTRWFLPSSRRVLRITSSGVGRQRCWTADLLQKRGIDSHSACPFCAQELETANHILIDCVFARQLWKERNSRVFDSVLASVTVVLESFRSEGQLWCCLRPRESVASDRSESTWKKLMSRDQEIMRNTKG

SEQ ID NO: 127544 - protein, 307 aa, Oryza sativa
  unsure (1)..(307): unsure at all Xaa locations
  Clone ID: PAT_MRT4530_29986C.1.pep
ASRPSCRGRRRCRSGTHRLEMKRARRAWVSTWCGSSGRWSTTTTRGCTRTSRGGRCWTSXQRHYRADMRTLQAFSDWLNQAKPWVGRVTPCDEVDRNLFAASTNITIWDGNTVRSWESAWIGGRRPKDLMPLVYAISKNRGKSLRQGKEEDAWVQDLKLDSQSSITVDLVEQLVALWEAVRNVHLDVGEPDQIIWKFTNNGHYTASSAYHVQCCGTPSTNFNSLIWKAWAPGKCKFHAWLIIQNRVWTSDRLATRGWQNNGCCALCRRETETALHLVATCRYTKRIWHLISAWVGYQQMDPTEWEEA

SEQ ID NO: 127545 - protein, 591 aa, Oryza sativa
  Clone ID: PAT_MRT4530_29987C.1.pep
LVDPRAAGLPPIPQTLARREGSRIFWKREKELSPSTTLMAAAAADPALLDLIPQIHALFADPLRVISYKWLSRNFSVSSNDSKRLLQEFVNKHGADLKVIYSVSGWLKKNPTNYCVKLTSGHKLEEARQEFKDSCSVQVYSIQACIPKDTAVLWNPEFVQAEELFNRPFDEENCLRDNRFCGVLNSFVKRTANGKLVSSFPPKPINSVAAAAPLKTSSAPKEQSAKGQQQGLPGSSSPKKGTSNKAEKDISSVLDKATNAPVVKEPSIALQGNKNKAQNGKALPSNGGSLATMWGRASAKPKTPATTNPTVLPSVAVTADAQICAKEEANADSSDDEQAVHYKRGSSANNRKRRAVFDLSDDDEDDNVVAIASPEPPEQCITNPIDEVAQESNPKQENLENKQEVEKDVKCCIGRTESPECKTKSSNTVSHSGITLKEKNNGPPPNDNKQDHAAETASNSPKRRKVLKTRIDERGREVTEVVWEGEASAGDKAEKNVSDTGAANRATLSSKPQPVAKTEKSNASSKTAGNKKPAKAGTKQGNIMSFFKKMLLDEYGNDMACEAVCIQAPVRPCLCHFAVWSDSAALWSPTS

SEQ ID NO: 127546 - protein, 139 aa, Oryza sativa
  Clone ID: PAT_MRT4530_29988C.1.pep
MYRLWTAEDGAGGWRSRRAPAAAAAISLLHHPPTGAPPVRVKASRAAAPWKTPSMPPSVSSPPTTGIAERLYTTLVVLPPLFHKPPTPRSPLSTPCSASSPPSPVPPIPSCSTPRSTPSPPPPTRPPPSASSPSSAATA

SEQ ID NO: 127547 - protein, 483 aa, Oryza sativa
  Clone ID: PAT_MRT4530_29989C.1.pep
MAAINREMTKRGARVDGGGSDWRSNRWVGHFGWVARTFRLMAFNRKSERMVPRGCFGGVDGKRGYRWGYVKLGRQGRSDVRGQADDGDRSGAGGSRPDLGSCRTRLEGGRGRKGVEHELGFNTHNKKRSRRIPRQTRKGIGGEFDLEIESGSICPCKAARGIHGIAEIAIESNNQSDEEIGPDFLAAVVWATNYERLVFVVALDMCMHAAGKSMGILCVGPCTEQQIDQVKFKTEDGGEHGLRGVYDVTARKEFNFAWQDNYGDMREGVALLQVESRGRSYRDSGSLLFTVSVYDELPSLLLCAGEFEQKGINKIGKIRKTIAQPYDNRSFLQYVEQGTAPALAGTLRLYRRLLELGIKPVFLTVRTENQRAVTIRNLSQQGYSGWEKLVLQPTGGLSIEAFKSGERHKLVSDGYAIVGNIGDQWSDLLGPAAGARTFKLSNPMCTTSTSLHCSPAGGDAIAGWLATSSVSNKCSFTLFTFNV

SEQ ID NO: 127548 - protein, 61 aa, Oryza sativa
  Clone ID: PAT_MRT4530_2998C.1.pep
GTVEYQPLIVSSASLRDSMLVGLVLHAETLFLDAVVSMSNIVNLHNDEFTVRIEFSECYAG

SEQ ID NO: 127549 - protein, 59 aa, Oryza sativa
  Clone ID: PAT_MRT4530_29990C.1.pep
DAYIWSIHICRGWSAGRTKSLQSGVYKIEKYNCQKSKKHEFLELAHPQKQGLFASYRPH

SEQ ID NO: 127550 - protein, 159 aa, Oryza sativa
  unsure (1)..(159): unsure at all Xaa locations
  Clone ID: PAT_MRT4530_29991C.1.pep
MDELSAGSLYLVVLGTLALALAFKRVLRGKETGVKLPPGPWNLPIIGSLHHLVGAHLPHRALLRVSRRQGPLMLLRLGEVPAVVVSSPEAAMEFLRTRDPVFASRPRGAXTLDIVSFGGKGIVMAPYGEHWRQVRKVCVVELLSTRQVQRLESIRQEER

SEQ ID NO: 127551 - protein, 60 aa, Oryza sativa
  Clone ID: PAT_MRT4530_29992C.1.pep
MGPTPKRGGGNRHSTSGAAPSGKCHVGLGAASSLQTRYPKLSWEGAATAPPGRHPSRRRH

SEQ ID NO: 127552 - protein, 438 aa, Oryza sativa
  Clone ID: PAT_MRT4530_29993C.1.pep
MSLVRRSNVFDPFSLDLWDPFDSVFRSVVPATSDNDTAAFANARIDWKETPESHVFKADLPGVKKEEVKVEVEEGNVLVISGQRSKEKEDKNDKWHRVERSSGQFMRRFRLPENAKVDQVKAGLENGVLTVTVPKAEVKKPEVKAIEISGGENISRGKYKVNWKRVCRPKDLGGLGIMDLQRFASALRLRWLWYEWTAPEKPWESNWVRDIDILRITEADHVQQSVRLWTMIRRMNPLTEDQDSIHWDLTANGQYSAKSAYRLQFLGATRSAFNQTIWKAWAPPKCKFFSWLATQNRLWTVDRLEKRGWQNQKICPLCCIIDESAVHLLAHCRVTKRVWTEIQRWTQTDLQMIKWSDCDSVEQWWNLVVDSPNNPRIPLRTLVILVSWEIWCERNARIFRNSASPPASILAKIKEEGRAWVKAGASKLQEFGILGDTT

SEQ ID NO: 127553 - protein, 81 aa, Oryza sativa
  unsure (1)..(81): unsure at all Xaa locations
  Clone ID: PAT_MRT4530_29994C.1.pep
CRHDPITKILPWIEVCLLTLCLPYKRQRRWQEYLAPXMEPNGGFNGNGVSSTMADSGEDXVIVAVIPHPYSETKLQLLQPG

SEQ ID NO: 127554 - protein, 130 aa, Oryza sativa
  Clone ID: PAT_MRT4530_29995C.1.pep
MGKSSMRMGAVSMHQRMRGGFTKIMGEYFWSLYLSRCPIFIPRPENRGDVGGELGAAVGLVEAAEGSSGCALVVQWTINHRCSVIARRKRRGGFRGASITLVAGISSVGTPGRLKIAGRGWRRRGQGLKQ

SEQ ID NO: 127555 - protein, 124 aa, Oryza sativa
  Clone ID: PAT_MRT4530_29996C.1.pep
MASVWCLSASASAAAPVAAAAAAPGPLGASVASVSLARAAVPSRRRRRWDALVEWEKPKPGRRPDIFPKFSPMKTPLPHPLPADDPLDDDEEEEEEEPQPQEEPQEDDPDKEEPEEDDPDKPTE

SEQ ID NO: 127556 - protein, 144 aa, Oryza sativa
  Clone ID: PAT_MRT4530_29997C.1.pep
MASVWCLSASASAAAPVAAAAAAPGPLGASVASVSLARAAVPSRRRRRWDALVVCAAPDEEKITRRSPLDFPIEWEKPKPGRRPDIFPKFSPMKTPLPHPLPADDPLDDDEAAEEEEPHPQEEPQEDDPDKEEPEEDDPDKPTE

SEQ ID NO: 127557 - protein, 107 aa, Oryza sativa
  Clone ID: PAT_MRT4530_29998C.1.pep
MEKASLTTVKEVDGGCSPAPRHRRVARPADLTCTAKLHLRHHCPTPGQIRRLLPSSRPWEGRGRPLLRVAPAHLLLSSVLAGDKLDDFASGRSTQRRARRSIRVAAA

SEQ ID NO: 127558 - protein, 122 aa, Oryza sativa
  Clone ID: PAT_MRT4530_29999C.1.pep
MQLNPKARTRRNRTKGRRRRWTALWSAACRGDGEDGVMAHDGKGGRRRGPRRRGRTASWPTDIPKLGIFWAEASPWDGRDRGCHYYAWKAVGWWLPIVQYGNISRPCGLTHPSPIPAQNLPA

SEQ ID NO: 127559 - protein, 144 aa, Oryza sativa
  unsure (1)..(144): unsure at all Xaa locations
  Clone ID: PAT_MRT4530_2999C.1.pep
SPLALAVGIVLAPCPSLSAVAAELRSAAVAAPDLHLTRRHLHPLRRVAADSVRRSASSADRRSTVVLVVPSRAAAFLRSGRRSRRRRCPGVSRGPPFXFPLPSSLSCAAPPRRWSPAVTIGARAHXPVGRAGEAAFGRALAVPH

SEQ ID NO: 127560 - protein, 287 aa, Oryza sativa
  Clone ID: PAT_MRT4530_299C.1.pep
MVSPPVNIMMWKAVGMHLDKVEIIWFSDELNHHAVDYWPLAMDVSRKYTMKRMARNTSCCPDNLPLHAGFCCIMPQAVLPNLLENPEFQNRRNPGRTIFMLDDEDDIEEKISCAFCPSRVVACNPCLEYIKSVVLPWFGKFEVVQKEGNGSNKTYSSMKELIADYESGDLDSFDVKLALGKAIDDILELVSEFFRSNEEAQAQIVPHRLQDEIGADIQKIQLQNEEMSGHVASTCQGISDLTFPSLSPTTEVATGGAADEKGAAHVRERRPTGGEERCAYTGGGRRG

SEQ ID NO: 127561 - protein, 106 aa, Oryza sativa
  Clone ID: PAT_MRT4530_29C.1.pep
KGPARHGPAQARLGTAQQPSGRHGPIGTSCRAVPAHGLHLPPRHGPPGPSCRAGPTCRWRGPGTAQWSGRAGTGPTSVGPCRAWAGPKYRAMGRAVGPRAFWPSIR

SEQ ID NO: 127562 - protein, 40 aa, Oryza sativa
  unsure (1)..(40): unsure at all Xaa locations
  Clone ID: PAT_MRT4530_2C.1.pep
MRLRSXVLVVANFCVQPGDKVVPTVHHHCWSSPLYVSRTK

SEQ ID NO: 127563 - protein, 75 aa, Oryza sativa
  Clone ID: PAT_MRT4530_30000C.1.pep
PQLRLVAQHFPSQAFSFVQAIVHQLQLQQFSGVSFDQTQAQAPTFLPFNFPSIFGISPNFYSAPRSLAPVGGVWA

SEQ ID NO: 127564 - protein, 108 aa, Oryza sativa
  Clone ID: PAT_MRT4530_30001C.1.pep
MVSLRGDSTWEAEQRLAGWVATAVVGEGGGRDCDDECGRHGETEYWRRTVTKRRDPPPPPPVVVTGAGSATPNTRCCCRRRIRRPPPSAVVVGTGYVRGRDPGTGSAP

SEQ ID NO: 127565 - protein, 394 aa, Oryza sativa
  Clone ID: PAT_MRT4530_30002C.1.pep
MRAPLGDFLAALFYATPSLGDAVTAEHEHSGGVERGVEAVEDSGGDGAAHEEEDKESGEALVVLKEARAAVAVERDEDEVMGHRKRSKVDISSESNSDNDCSLSSDNHDSDVHLSNHDESSDNHDQHFEENDPLLHLTKEELMKKLKIKLGKRPFTDDHKKKRHKVESDSIIDDALLEIHNDLVLHSLKMKLSMLGEQSKNKRKTFEKDNQQGFFIYNDLMKHPSKTNFGMVQKSFSGASLARPIEICDMLFFPILHLRHWFLFVVDLKDESFVFIDSLFEEEEEDYQYNARCRLISKFSIVWRKFVPEHPINFASFKIIYPPRPRQTNRLDCGIFTLKFMEIWRPRVLLTNQFSQKDIPNIRIQYVNKLFFHPCNIVLNSTTKKLVTDYYAKG

SEQ ID NO: 127566 - protein, 84 aa, Oryza sativa
  unsure (1)..(84): unsure at all Xaa locations
  Clone ID: PAT_MRT4530_30003C.1.pep
RTPHQEGGKGQXXPGXXAERRXQAPGAQQTXGXXQQGXAXAGXQGRGXPXRXXXXXXXQXAXQREXXXXERXXQPEGQXXXKXG

SEQ ID NO: 127567 - protein, 127 aa, Oryza sativa
  unsure (1)..(127): unsure at all Xaa locations
  Clone ID: PAT_MRT4530_30004C.1.pep
MLRVAGRRLTTALAWRPAAAAGARGPLAGGSLPGDDEFSREPQRPRFAVDSPFFAASRGFSSETLVPRNQDVSLTELPATVSAVKNPSAKIVYDEYNHERYQPGDPSKRAFAYFVLSGGXFIYASLL

SEQ ID NO: 127568 - protein, 101 aa, Oryza sativa
  Clone ID: PAT_MRT4530_30005C.1.pep
MGAEAVRVLVVDDSPVDRRVVELLLRAHCGGGGGAAAGEAAPFHVTAVDSGKKAMELLGRRRGDRDHLTPSSPAAAAAANVRPPAPVPAVHCSPVMSHHLI

SEQ ID NO: 127569 - protein, 108 aa, Oryza sativa
  unsure (1)..(108): unsure at all Xaa locations
  Clone ID: PAT_MRT4530_30006C.1.pep
MAVESTVANGHVVAVAPVPAPVAPKTITAILTKAGQFXTKFAQLLQTTHAGEQITNQIKGKASISGGLTVFVPTDNVFVALPTGTLNKLFDQHKTXLVQVHVVLALLP

SEQ ID NO: 127570 - protein, 267 aa, Oryza sativa
  Clone ID: PAT_MRT4530_30007C.1.pep
MASCFSCAALSAMAVQRLLLLFPVQEDGDDSDLPNLPISRAVFTSEGLVDLIFNALIPLVIKIDVQWRHEFYVKNPYGKKSRVSTDNDHYRGVGYKRRGYIGLSHPPYPLKTPHGHATSFVHKDETTVRSSQTYAKLVDLGEVPITTDRGRRIQSRRPSRSDDKARMTCPLITGIRWLFSTPTVPKYLTDGGSNWHPFPLLRASLEGGDQPRRGNSMVRDVGRHSLIFHPVNHGDRHLSSIPVPDLATLLRSPIFMAHDRHAVALAA

SEQ ID NO: 127571 - protein, 1123 aa, Oryza sativa
  Clone ID: PAT_MRT4530_30008C.1.pep
MASRSPAAAAAAMVMACVVVVLRVSCVLAVDEQGAALLAWKATLRGDGGALADWKAGDASPCRWTGVTCNADGGVTELSLEFVDLFGGVPGNLAAAVGRTLTRLVLTGANLTGPIPPELGELPALAHLDLSNNALTGTIPAALCRPGSKLETLYLNSNRLEGAIPDTIGNLTSLRELIVYDNQLAGKIPASIGKMSSLEVLRGGGNKNLQGALPAEIGDCSSLTMIGLAETSITGPLPASLGRLKNLTTLAIYTALLSGPIPPELGRCGCLENIYLYENALSGSIPAQLGGLGKLRNLLLWQNQLVGVIPPELGSCAALAVVDLSLNGLTGHIPPSFGNLSSLQELQLSVNKLSGAVPPELARCSNLTDLELDNNQLTGGIPAELGRLPALRMLYLWANQLTGSIPPELGRCGSLEALDLSSNALTGAIPRSLFRLPRLSKLLLINNNLSGELPPEIGSCAALVRFRASGNHIAGAIPPEIGMLGNLSFLDLASNRLAGALPPEMSGCRNLTFVDLHDNAISGELPPRLFRDWLSLQYLDLSDNVIAGGIPPEIGMLTSLTKLVLGGNRLSGPMPPEIGSCTRLQLLDVGGNSLSGHVPGSIGKIPGLEIALNLSCNGFSGAIPAEFAGLVRLGVLDVSRNQLSGDLQPLSALQNLVALNVSFNGFTGRLPETAFFARLPTSDVEGNPALCLSRCSGDASEREVEARRAARVAMAVLLSALVVLLAAAALVLFGWHRRGGGARGGEDKDGEMSPPWDVTLYQKLEIGVSDVARSLTPANVIGHGWSGEVYRASMPSSGVTIAVKKFRSCDEASIEAFAGEVSVLPRVRHRNIVRLLGWAANRRTRLLFYDYLPNGTLGGLLHGGAMGGGATTTAAVVEWEVRLAIAVGVAEGLTYLHHDCVPGIIHRDVKADNILLADRYEACLADFGLARVADDGASSSPPPFAGSYGYIAPEYGCMTKITTKSDVYSFGVVLLEMITGRRPLDPAFGEGQSVVQWVRDHLCRKRDPAEIIDVRLQGRPDTQVQEMLQALGMALLCASPRPEDRPTMKDVAALLRGIRHDDGVEARKAGNGVGTDAETRKRADPRQPISPTKLMALARPAQAQAQLQARANSGSLGLLNDQE

SEQ ID NO: 127572 - protein, 123 aa, Oryza sativa
  unsure (1)..(123): unsure at all Xaa locations
  Clone ID: PAT_MRT4530_3000C.1.pep
PLGYFRSCQGEGRGESNRRSTAHPGSRATTETATXSGGSGGPARVDGVGGAXPAVGERNGGVDEVGEDAAKPKXAAPRGRVVRGDDAGSRSSAGAAERESDGASSIPARREGGEWRKRWREAR

SEQ ID NO: 127573 - protein, 182 aa, Oryza sativa
  unsure (1)..(182): unsure at all Xaa locations
  Clone ID: PAT_MRT4530_30010C.1.pep
MATPCGSGGRGRRRRRPATATAXAAAGGRPPPGSGGGGPVAAGGEPSGGVGNGVAGDGDGLRRWRMGEARGKRLRAPPVGRIRRHSARARRGHRRRWVGRECLGGDGRGAQTARAGPDRDLLPTPVACKLSGARSGGYDWATADPGKASCSLVLPSPMTPTSLSSRRRRPPLDAVNVGSGLA

SEQ ID NO: 127574 - protein, 50 aa, Oryza sativa
  Clone ID: PAT_MRT4530_30011C.1.pep
GYLHQKSEPKQYGTFLNMRQKAVRRNIPTIVVNCAKMRLLNFSAAVIWKN

SEQ ID NO: 127575 - protein, 705 aa, Oryza sativa
  Clone ID: PAT_MRT4530_30012C.1.pep
MGRRHYYLPARPARPISFEDSPDWADDDVDSIHLATASASASLPTTAYPSPSPTPSSSSAACRGGERKVAGATLVWKELSVSLTRSRSGSGSADRRVVKSSTGYALPGTLTVIMGPARSGKSTLLRAIAGRLRPAERMYGQVLLNATNTRLPYGSYGFVDRHDVLIDSLTVREMLYYSAHLQLPGLFSSKTSIVEDAIAAMSLADYADNLIGGHCFINSLPAGERRRLSIARELVMRPHVLFIDEPLYHLDSVSALLLMVTLKKLASTGCTVIFTMYQSSTEVFGLFDRICLLSNGNTLFFGETLSCLQDTKSETHARLQVTLVHFSNAGFPCPIMQSPSDHFLRAINTDFDRIIAMCKNLQDDQGDFSSVSMDTAVAIRTLEATYKSSADSVAVESLVAKLMEKEGPHLKSKGRASNTTRIGVLTWRSLVIMSRNRKYFWSRFALYMLLALSVGTIFNNAGHSLSSVMVRVSAIFVYVSFVILLSVSGVPAHIDEIKIYSHEEANQHSSTMVFLLGHFLSSIPFLFLVTISSSLVFYFLIGLRNEFNLFMYFVVTMFMCLLANEALMMIVAYIWLDTYKCTLTLICLYVIMMLVGGYFRIRGGLPCTVWKYPLSYVSFHVYAVEGLLENEYVGTSFAVGAIRTIPGVQAVGGSYDISSSANAKWVNLLVLFVMAVGYRVVLYVLLRLNSSMDCTFVFGLYTAHC

SEQ ID NO: 127576 - protein, 56 aa, Oryza sativa
  unsure (1)..(56): unsure at all Xaa locations
  Clone ID: PAT_MRT4530_30013C.1.pep
MGTPGVCCLWSGPLLMSTSSGYNFLRLTRVRQYLAQLLLMFLVEPXECCIFHSGQC

SEQ ID NO: 127577 - protein, 81 aa, Oryza sativa
  Clone ID: PAT_MRT4530_30014C.1.pep
PLHITQSATARMAGRASCVLILLLAIAGFGDVLAAGGATPLSSSSQVSTTTVAGLNEVNRDACVHERVLHADCSGAPSGCM

SEQ ID NO: 127578 - protein, 482 aa, Oryza sativa
  Clone ID: PAT_MRT4530_30015C.1.pep
MTGGLPPPLRPSTAPPPPSVTRALHAINTCTTAAALAPIRGAILGDRALLRSTAVVSAFFLACGRLRHLDPALSLFACHPRPHVFVFNSLLRSLGRAPARSPLPLFRHFLRCRGVRPNRFTFPLLLTSLSSLADLRAVHCQVVKSGFGPDLHVRNALLARYADCDPDLAHAEQMFDEMPRPEVVAWTTMITSYRNRGRTFHALATFRRMLAAHVAPNRVTMVAALGACAAHCAVDTGIWIHEYVQKQGWEMDVVLGTALVDMYGKCGKVSDGMHVFSKMAKRNVYTWNSIIGALALAQDGKTALQWFSRMQNDGVQPDEVTLICVLCACAHAGFVDIGRKIFNLAIQGEYGFQPGIKHFGCMVDLLSRSGHLDDAFRVVETMPSQPNAVIWGLLLRGCRARGDSWLSEHVTMRLVELEPENASHYVLLSNLYAETGRWQEAQGILHWMKKKGLRKDAGWSLRMLEDKSKKYTTDGCLLEYVE

SEQ ID NO: 127579 - protein, 164 aa, Oryza sativa
  unsure (1)..(164): unsure at all Xaa locations
  Clone ID: PAT_MRT4530_30016C.1.pep
MSIGGGSLGAGLPYHKFVSFALEETRLRTTLTPHPSQEKFKSIKPNDDNTVFNALSFSAPKIRLLRSLTIEKKNSYQVLDFAAFSEPEYDLPIFCANVFTTHAQSIVVLDLNPLYDTTVHKNYKDKYYRSIMPLVHKYNEXSSLGWQDYEEVIEVLLSCDLDNI

SEQ ID NO: 127580 - protein, 116 aa, Oryza sativa
  Clone ID: PAT_MRT4530_30017C.1.pep
MGNTHKITHSTKETEPTRSNPKHRTQPNYGTDGKTNRVIALTGLEERRKTQTKRATVEGSRTRLFSFPLRRQLAEEELASTTTHQRLVLSDWIATCATKSGTWHHRWYLRGPTSGP

SEQ ID NO: 127581 - protein, 470 aa, Oryza sativa
  Clone ID: PAT_MRT4530_30018C.1.pep
MGDYGSGMMRGNPDGGGMQSRTKGQRVNVQQLKLMGQGHPTGLTPNLLKLFEPRPPLDFKPPVEKRKLPAYTGMAQFVSQFAEPGDPEYAPPVPTCETKAEKKDRIRKSKLDQGAAKVAEELQKYDPQSDPNATGDPYKTLFVARLNYETSEHRVKREFEAYGPIKRVRLVTDKETNKPRGYAFIEYMHTRDMKNAYKQADGRKVDNRRVLVDVERGRTVPNWRPRRLGGGLGSSRIGGENAEQKLSTRDQQHAGRPRSEEPRRDERRADRDREKSRERPRERDRDERTRERSHDRTRERDSKEDRHHHRDRDRTRDRERGRDRERDHGRDRDRERDRRDRDRDRDRGRDYERDRDRGHDRHRERGRDRERDYERASHERDRGHMHERDAEFANGEPKHDRNLAGYDQEYGYNYEQHKSHDAYETERSKRHEHEYYQMQPNNTEPEGPEEGEAYDEGDYQYHQAADEHNN

SEQ ID NO: 127582 - protein, 491 aa, Oryza sativa
  Clone ID: PAT_MRT4530_30019C.1.pep
MGDYGSGMMRGNPDGGGMQSRTKGQRVNVQQLKLMGQGHPTGLTPNLLKLFEPRPPLDFKPPVEKRKLPAYTGMAQFVSQFAEPGDPEYAPPVPTCETKAEKKDRIRKSKLDQGAAKVAEELQKYDPQSDPNATGDPYKTLFVARLNYETSEHRVKREFEAYGPIKRQTSLKNVGDGTTYLQAWGFYILGFIRLLVRLVTDKETNKPRGYAFIEYMHTRDMKNAYKQADGRKVDNRRVLVDVERGRTVPNWRPRRLGGGLGSSRIGGENAEQKLSTRDQQHAGRPRSEEPRRDERRADRDREKSRERPRERDRDERTRERSHDRTRERDSKEDRHHHRDRDRTRDRERGRDRERDHGRDRDRERDRRDRDRDRDRGRDYERDRDRGHDRHRERGRDRERDYERASHERDRGHMHERDAEFANGEPKHDQEYGYNYEQHKSHDAYETERSKRHEHEYYQMQPNNTEPEGPEEGEAYDEGDYQYHQAADEHNN

SEQ ID NO: 127583 - protein, 88 aa, Oryza sativa
  unsure (1)..(88): unsure at all Xaa locations
  Clone ID: PAT_MRT4530_3001C.1.pep
PTHPGKGGRDGAGRALRWPLSLSDSPRHERGLPVARXGTGVKPEVWCAWPEGVMRRVLSRPLSGMSWWHIGAQKRVVGLCLVGTVVHL

SEQ ID NO: 127584 - protein, 550 aa, Oryza sativa
  Clone ID: PAT_MRT4530_30020C.1.pep
MATGTNEGDGNDTEYIDSDDEESVEEGSDGELRVRGSNNARFKKKPGYPTFELGMKFSCKSQFKKAITAYALAERKVINFVKDDPKRIVTFENFHACPPRRDNKLVTATRIADKYGKFIIANPSWPLAHMKATIQEEMFANVSVSKLKRAKSIVMKKAMDATKGQYQKLYNYQKELLRSNPGSTVVVNREVDMDPPVFKRIYICLDACKRGFISGCRKVIGLDGCFFKGATNGKLLCAIGRDANNQMYLVAWAVIHKENNEEWDWFLDLLCGDLKVGDGSGWVFISDQQKGIINAVEKWAPEAEHRNCARHIYADWKRHFNEKILQKKFWRCAKAPCILLFNLARAKLAQLTPPGAQAIMNTHPQHWSRAWFRRTPRLASPPAATVSAASCPQPRNPRRESSMDQAGSMEERVITERIRRKLEEVNAAAQKHLAGVQDHVNFTMQQAYFKCAYECFDRRRSQEGINNCVENCSVPVLTANNVVETEMAKFQERLNRSLMVCQDKFEAAKLQKMKTHATEELEACVNRSIDDSIRVLPHLVDQIKSTLSMN

SEQ ID NO: 127585 - protein, 263 aa, Oryza sativa
  unsure (1)..(263): unsure at all Xaa locations
  Clone ID: PAT_MRT4530_30021C.1.pep
RIYICKVRLVTDKETNKPRGYAFIEYMHTRDMKNAYKQADGRKVDNRRVLVDVERGRTVPNWXPRRLGGGLXSSRIGGENAEQKLSTMDQQHAGRPXRSEEPREMSCRADRDREKSRXERPRERDRDERTRERSHDRTRERDSKEDRHHHRDRDRTRDRERGRDRERDHGRDRDRDRERDRDRDRDRGRDYERDRDRGHDRHRERGRDRERDYERASHERDRGHVHERDAEYANGEPKHDRNLAGYDQEYGYNYEQHKSHDAY

SEQ ID NO: 127586 - protein, 253 aa, Oryza sativa
  Clone ID: PAT_MRT4530_30022C.1.pep
MDQIYMAAVNNKTSLPDDEPMKKISGDMPVTAGNACFDCNICLDFAAEPVVTLCGHLYCWPCIYEWLCPGVGSTASNNSSLARRQCPVCKATLSPDMLVPLYGRGGSLKKSLNGVPIPRRPTVQREAVEHQNTHNNIDDRHHENMEPSPPPQPLRHSSHHSSATEFDFIYPPSPIGRGLIHSTAGGVLGGMAVAVLPWAFRGQVPPSMFMSPHYVTAHNMSSRARRHQMEVERSLHQIWFFLFVFVVLCLLLF

SEQ ID NO: 127587 - protein, 180 aa, Oryza sativa
  Clone ID: PAT_MRT4530_30023C.1.pep
MRRRRRRMIGGGGGRGRRSRCGRSCSSPSGAQTPSRPSPPSSSTSSPSPPPPTSPPAPPRPAIHRRRREVAAARRAAAGGASWPAAPPARRPAPPWRTASPNLSSPASTSSSPPPPASPPPSPPPARRRRRRHAPAASGSPPPRPRSSPPSTTPSPPPPPPRSPLLICNASLNQPLELDL

SEQ ID NO: 127588 - protein, 106 aa, Oryza sativa
  Clone ID: PAT_MRT4530_30024C.1.pep
MERRENGRPRWSSLSLPLDVAFRRRPPQSSFASAKGVGAGGEGSRHGGNTATTSTDSGHHLATELGSVRRRMRRLGYTDGSGDGALPVAPAGRRLLSRHARPSAAL

SEQ ID NO: 127589 - protein, 89 aa, Oryza sativa
  Clone ID: PAT_MRT4530_30025C.1.pep
PLSVTPESSRHRLELLLPDLPVFRHLPPQLDNRSIRGVPFPAHLVRVHSPPSSGRGHLQDHFTFPPLDKVRPPKFSFLARARALLGTEL

SEQ ID NO: 127590 - protein, 246 aa, Oryza sativa
  Clone ID: PAT_MRT4530_30026C.1.pep
MSDLRELGMRREPSRAEVVGRAKDDGDFDALRRAIIRKVKDNSWLHTDLPANKAESLVRITLIYILWPNIMQEVLRSNIIAEVKQSVVINEDGSEKLKLKDLSDAIYQDIGSKIMGQISDEIWGVILSNEIDIRGTSETVYNRMMNPEQQQDPPSKKLKRNAKEEQVSPAKASTSVAVQLEDDDPEEPPGFGFSDHQRSNIMATQQQQSSNTENHNQVKPNEGEPNAVSCPGDDDEEDPDVPPGFG

SEQ ID NO: 127591 - protein, 445 aa, Oryza sativa
  unsure (1)..(445): unsure at all Xaa locations
  Clone ID: PAT_MRT4530_30027C.1.pep
FVRKMEALDDTSPENIEVTANSKNTMPYNTLSGLEVANNRKTLESFRMFKDSSDAIDSVNLLVTVEDTGIGITKDAQTRIFTPFMQADGSTSRTYGGTGIGLSITKRLVELMGGEIGFXVSKPGVSSTFSFTAIFKENRKDPGDIKRYCPEPTPPDFQGMRALVVDGRCARAEVTMYHLRRLGIQCDLAATSESALSALLESCNSSVKSSLNMVLVDKEAWGEDSGLAFFRCLIDLRLKGTLKSWQTMPKFFLLAGSITPADSDCLRLAGYSNSIRKPLRLSTVAACLSKALGVGLTGRRSRDNSLVLRSVLTGKNILVVDDNAVNRIVAAGALKKYGAIVTCVDSGKEAISRLQPPHKFDACFMDVQMPEMDGFEATRLVRSVESKINDTIQAASAKNPFGDNNIAKQKSYAVNREQKFDWTAIYVSFDNWMKSISTSRLQPCA

SEQ ID NO: 127592 - protein, 311 aa, Oryza sativa
  Clone ID: PAT_MRT4530_30028C.1.pep
MVAHGVLPSKEIIGWRPAFDPTLPEYSCCPPKYQDIWNSLPMGEESSQALELLNKLLKIKEQGLQGEQITRHFIKCRLAPIKERYYTTFEYDGKTDPNQKDPDSLEFKIIKERMYKIFSSGIVVDFSHLLPVVPYNAFNPPPAENALMKSDPPTAQRHQGQASGGPKIQPGAQKSSAAPTEQAGSRKRKMICDDDNDSDNESAGKQPKKAALPKKKTVRGGDEISAMPQVRGWNGRGWIITWVVLDENSLGQLETAQYIYGSRHSRGGNCLEMWYYILCASCGGGFSSVREKKYMFGHFASTPSVLSLKSF

SEQ ID NO: 127593 - protein, 93 aa, Oryza sativa
  Clone ID: PAT_MRT4530_30029C.1.pep
KISQIFLFGRCCHYPRDLHGYMQRQTEKMDCSCVPKTTKKWTRERDPCETTVTSSRCRMAIKSANRNWTLPATLWHSQLRTLQSATLLARYTA

SEQ ID NO: 127594 - protein, 70 aa, Oryza sativa
  Clone ID: PAT_MRT4530_3002C.1.pep
HACDDSCFLKEPYRSNGSRHDQEVPHVRRTGAPTSAISALDLGYMRCIMLILGIERRYSTTSLPSLPWTA

SEQ ID NO: 127595 - protein, 735 aa, Oryza sativa
  Clone ID: PAT_MRT4530_30030C.1.pep
MALAPATPASAQPLPGCPDKCGNISIPYPFGIGAVCARGPKFQLECNHTYSPPRLIAVIDSQSNLEIHLESLSLADGEARIYNNASRSLYNHSTGDLVRTNDVVYLFLGREGPYRFSSAKNRFVALGCPNLGLLLDATENYVTGCISLCRSSPLAVSAGACAGVGCCQSSIPSGLHTYYVNQDKPKNVTLQYYAATDYRYVFLADAEWLSTSYRGDFNRTGDFAVPVVLDWAIREVGSCEAAMRNKADYACRSANSDCVDSTEGEGYRCNCSRGYEGNPYLDGGCQDIDECERDKDACFGNKCTNTLGGYLCMCPPGARGNPLIEKGCVKTDLGLTIGIGVGSGAGLLAMAFGAVFLTRKIKNRRANMLRQMFFKQNRGHLLQQLVSQNTDIAERMIIPLAELEKATNKFDESREIGGGGHGTVYKGILSDLHVVAIKKSKVAIQREIDEFINEVAILSQINHRNVVKLFGCCLETEVSLLIYEFISNGTLYHHLHVEGPLSLSWEDRLRIATETARALGYLHSAVSFPIIHRDIKSHNILLDGSLTAKVSDFGASRCIPAEQTGVTTVIQGTLGYLDPMYSYTGRLTEKSDVFSFGVVLIELLTRKKPYSYRSPEDDGLVSHFTTLLTRDNLGHILDPQVVEEGGKEVKEVALLAVACVKLKAEERPTMRQVEMTLESIRSLFLQQEAIHSMANKSSKENHVSMSYPANEGTSMESTKQYSLEEEYLLSSRYPR

SEQ ID NO: 127596 - protein, 620 aa, Oryza sativa
  Clone ID: PAT_MRT4530_30031C.1.pep
MSWHRAGVLLLGAQSCLPVPGVPAVGGIGSVLLSMARMGWKLCHVFRLYTVVVLFIGSLAPRILESQIDRGVRIPREQRDMGSNDHRNVALAVDRVRVLSRRLVRPSSSSSSSSSGHAPPCDIHLTPWDLRLLSIDYIQKGVLLPKPPLSGDRLADALASSFARALALFHPFAGRLVAEERADDGTVTVALRCTGEGAEFVHAAAPGVAVSDVVSSLYTPPEVWSFYSYNLVLGADAAAESRPVLSAQVTELADGVFVGMSLNHSVGDGTTFWEFMNAWSEINRRAGGAVSDGLMIREISTPAPVFRRWFVETSPVPIPMPVGKLQHIVRRLERPEVQECFFTFSATSARKLKARANEEMAGAATGTATISSLQAVLAHLWRGVCRARRLPPEQVTFYTVMVGCRGRVNGIPAGYVGNALTLGKAEATAGEIEEKGLGWTAWQLNRAVASFDEAGTRESLERWVREPEFTYMSKLQSGGGGGVALITGSSPRFDVLGNDFGWGRPVGVRSGGGNKIDGKATVYEGPDGAGSMSLEVCLAPAALGRLVADEEFMEAVSLPSSGQVETNREQSDMGSHTSESDSTGDWQEGARRNMLRYGVSFVADGAGGPRYIFTVRTAGS

SEQ ID NO: 127597 - protein, 354 aa, Oryza sativa
  Clone ID: PAT_MRT4530_30032C.1.pep
METEGWPALQPLLCLAWIATTLPIIVAALPIPAAAGGHLLRRLLSAFSSRGKTVRPSPASSSGSSSSKAKFTVPQKYFMHFYVVGVLATTILLLAIWFYAYMKMTPLLPESSSYSTIASHLVGSNSFSFGRVHSRTMGHKYHVWRTVFVLLLMEIQVLRRLYETEHVFHYSPSARMHIVGYLTGLFYYVAAPLSLASSCIPEAAEYLQGQVAEFIVKGRARMPDLVIDSSSLLQPLLKLGWTQWIGAVIFIWGSLHQIPHASADAWVREHKDSDEYVIPCGDWFNRVSCPHYLAELVIYFGMLVASGGEDIPVWFLFVFVITNLSFAAVETHKWYLQKFEDYPRSRYAIIPFVC

SEQ ID NO: 127598 - protein, 148 aa, Oryza sativa
  Clone ID: PAT_MRT4530_30033C.1.pep
GRYRHPVHCCERFRELVCKHILSATDNSNSEKVPSGTGKAILKVSEDQTQMLLNVISELPNNELLLQKHFMAVLSSVWRSKSACESHCVMSYSNTLQKPGRLSENWSMTNFRPILNLVRTALADAQVQCPRMVVPTSNHESRRNFLEL

SEQ ID NO: 127599 - protein, 87 aa, Oryza sativa
  Clone ID: PAT_MRT4530_30034C.1.pep
IASALPLRRRRLSPGTWMYRYFTGSHPVGPDRVDYAPPVPRHGLATSRTYARDVRRLPAYPATRIPPPARNPPQQQPTCVSGVWHPA

SEQ ID NO: 127600 - protein, 106 aa, Oryza sativa
  Clone ID: PAT_MRT4530_30035C.1.pep
IANRILGIAGAFAYADNLLADAPVSLLRCLVLFQTTRVRLVFHDEALQVKAVDQLEEIGENVFVGGKILWMYSTFVNSELVEATIYYLGLLQGDPHNTLTAYSLLP

SEQ ID NO: 127601 - protein, 97 aa, Oryza sativa
  Clone ID: PAT_MRT4530_30036C.1.pep
LALSANATTAITTMQYFPATLAMGTTDPYRQYMMQTVCMRSSTAMFISQPMAPLQKQWCMQLQGMMPQCNCDTRYQMMQILRQVICARLQRNQMMMN

SEQ ID NO: 127602 - protein, 118 aa, Oryza sativa
  unsure (1)..(118): unsure at all Xaa locations
  Clone ID: PAT_MRT4530_30037C.1.pep
MHHRLLLRRGAMPVPPPLPPRTPPPGVARPFASLPPXPPLQSRREVHVWYVCPDELNDHSHLDMYMELLSPSERKNALSMNGPRLQKDAMLSRALLRTTLSRYTNSKIDPRSFEFKKN

SEQ ID NO: 127603 - protein, 476 aa, Oryza sativa
  Clone ID: PAT_MRT4530_30038C.1.pep
MGRGGRGGPVAGDDTGAGEQGIGGGGGSGALASSSPARPISLCIQKRKGILFKCKPDGTLLRVAWSALKRMAKRLAALKRRRANQSLARRWRRWRWAWVQGAAESKAESSESMWEKRAWEMAMWTRKRRKSGRTKAAAMRATSKAKNHSRSCNRVISRKRFTRPKTVGDDGDGGGGRKPWFSLCCWAPPLLLLRRHTLLALPVDQAIPAETFVQPKLCQVAVVAAIDKAAVPLKFDSPSDDGGTGLMMKGMTAKNFDPIRYSGRWFEVASLKRGFAGQGQEDCHCTQGVYSFDEKSRSIQVDTFCVHGGPDGYITGIRGRVQCLSEEDMASAETDLERQEMIKGKCFLRFPTLPFIPKEPYDVLATDYDNYAVVSGAKDTSFIQIYSRTPNPGPEFIEKYKSYAANFGYDPSKIKDTPQDCEVMSTDQLGLMMSMPGMTEALTNQFPDLKLSAPVAFNPFTSVFDTLKKLVELYFK

SEQ ID NO: 127604 - protein, 851 aa, Oryza sativa
  unsure (1)..(851): unsure at all Xaa locations
  Clone ID: PAT_MRT4530_30039C.1.pep
MGFVSGIDDFVFPPEQVFLFGSLDFITNDFGKISLLDSDPNQSGRGQVSVPFGIPNSAEIYSKIISTELASNHSNEIQSTPTRPDQDDGAYPSILMKLPDDLAAVFTTRTSSSRRPRRDPALAPIQSSSREVGVILQPLGTVLTEELDGYLSNPGVDSRPTEILEYDDFGYHYDYSNLDDFDESYEDNYTPLFFGIFMADNETAEQHIERTAVFRTLQQNAVAAITLLDTLLQQDAPDHVVNILNQTKTMIVASVPVIFSSVRMPTDSRVPPLRSKDYHQPSLSVAGAGSSRRSRDHGERSVHSPADRHRERPAEQPRSPRCRRPIDLRDTINQRRAARGHIPYQSLDRYDDDVDGVAAFTSDLRRVDWPAGFKPTGIEKYDGTTNPESWLTVYGLAIRAAGGDSKAMANYLPKSGESLRDYIRRFSEQRNKISDITDDVIIAAFTKGIRHELLVGKFGRKPPKTVKQMFEKANEYAKVEDAVTTSKQSGSTWKPKKDAPTTGGXGSANHKDRKXRSHINTFDKIMNAQCPHHLNSNHAAKDCFVYKQFTEQYAKNARKSIDRDQSTSKKKDDEDDAPTGFQDSRKELNHIFVTFGTRENFRTENICFEVADFETAYQAILRRLALPKFMAVPHYTYMMMKMPGPRGVISLQSDIKQAVTCDKESCEMAQTREITLAREEIRLAASTATEGEVPAPKISKSGESDGKTKKIPLDPSDPTKTAISLKESDCLRTSFITPFGAYCYITMPFGLKNAGATYQCMIQKCFSTQIGRNVEAYVDDVVVKTKQKDDLIADLEETFANIRAFRMKLNPKKCTFGVPSGKPLGFMVSRRGIQANPEKINAILNMKPPSS

SEQ ID NO: 127605 - protein, 301 aa, Oryza sativa
  Clone ID: PAT_MRT4530_3003C.1.pep
MPAVSPDPPPPDPGEEEPGKLQWLPLSDPVIVIYFHTTASSHSPPPHLLAVVAFGLQSRGTLFPPPPRLCPVPAVALPSRTGLRARLSCWLRACCLARRGVPRLYYPVSQDTGLPIKKTAAATRPHDWIGPRRAGVASGVRRTTCHLARAPWDPRGLGVVSASGLALADKRAGVHVGPAERGAPAAGGPPGRCPLEASRWWMPRGPAAAEVLGKGDGIRGRQALGAWDWAGCGATALARGLTDGVAAWEAMDGLFRHHASRRDAAAVLCSRVVGTHHLTSYFAACMIGLEQRHWHTAPLNP

SEQ ID NO: 127606 - protein, 129 aa, Oryza sativa
  Clone ID: PAT_MRT4530_30040C.1.pep
ASGRPPTRRRDGTIYTSPPPNLLLLLLLLLAVGDGSGPARVSGPRGVLLLLLLLVLWSSGAPRPMVFGATAVAAGGGAGAAGGRKGQQAACLVPALMEPLGPLLDRLPVDLDRQKLRSFTTLAAITITL

SEQ ID NO: 127607 - protein, 131 aa, Oryza sativa
  Clone ID: PAT_MRT4530_30041C.1.pep
MGYWARSGDSKQRRWDGASGAMAVEQAAMSGRGLKEAHPVAAARQWRARAAVAGLATTRADPLTAAVGKSRPDGVQAVLVVAVAVSKSKGAVGLAPLRCDAVPIGPMATLAVNSITIILKDDDNNTTKTNN

SEQ ID NO: 127608 - protein, 126 aa, Oryza sativa
  Clone ID: PAT_MRT4530_30042C.1.pep
SKSSRSQGTVAIFSCILGYGKSEGTKSFARIIEEEKQKRPNNEEPTAADLFLLTHTHRNGKPMKKEKADIIARVREQSHKQAECSGSDSAAHKVGLESCSIGLRGKRGHRRKAVLQASFKEAEEAK

SEQ ID NO: 127609 - protein, 95 aa, Oryza sativa
  Clone ID: PAT_MRT4530_30043C.1.pep
MAAEAGGRRRRTEAGAEGRAAGGGGMELVINYRFTTFHDVTSVFTALAKTLSPISSDNPLELSGDFAGDPLRGNNPVSDNVKFRRTPERAIRRIC

SEQ ID NO: 127610 - protein, 118 aa, Oryza sativa
  unsure (1)..(118): unsure at all Xaa locations
  Clone ID: PAT_MRT4530_30044C.1.pep
PPALCWAGKTVLXSTAATPRVAVGRGGSXSPRGRAPSSRSCSSSSWWQCRSAPVRRGPRTEEGGREEEEDGXCRHGRGLWSVXAVPAAAQLHHAAAGDGGGVLLLPPXWRAPMRVSLV

SEQ ID NO: 127611 - protein, 974 aa, Oryza sativa
  Clone ID: PAT_MRT4530_30045C.1.pep
MAPGRAAASAAAEGGSPEPLEVRCAGCGETLEVEPGLTEFICPDCAMPQSLPPELMPPPPPRRKALPLPRGAADVRGARLPCGACGALLSVPVGLARCACPICAAELAVDTARLRHYLLSSAAVEGAVPVVPIGTSSPPPILQVREAHEEHPNIASRTGLIQAEPNDPLNRMEQGHTKRPNQLPEQSDPYRSDYMMDGEGIHGANEIIRRHHKQRNRESVGRGIISAEKTQEKPLNQFRHQAQDQHSSYAFRMKQTHLDHRDRVNEVQADSIDPTVFSESRCIALIDETTATRINCTTVHSVGPKPINVDKNQAQAPNSKRIIQQAQKQPSYIAISQENAQDKHADGVVHVQEKQLRTASQVNHRQETCAQLDNQTVAGDSSGRIRCPEKEQSEPFSCTIRKRKTKSLLANSNSGLELRRSKRLAKDSPAAKDKKHSKNKSFEQQVSQNDQVSAAVMDTESIHRDPVERQAASSTGHMPAAITDSEPSENEPDDLYMPSPDQSLSNSPDIDRIINSICPSSSPRHMTPEKVSNEFDNVQLTTPPPSDIDMSDPEHFACNYVPQEVRKALAKLRSSNSSFERAMSQASSGDVHALSDSEDCDERWNVGTKRNQGCGRGRGLTLCLKVWNLPKGVRIPVLLNASGEPVGKEAGTLSTFLGALARDGILAPLTHQDWRRVPEKNKDVMYHIVKLKFDIAPAAEFWIMKCIGRKWKSWKALLKQKHYDTHETVEECLADQNPRVLKEQWQYLVAYWGTEKAKAVSSRNKACRANVTATHTAGTKSFARIIEEEKQKRPNNEEPTAADLFLLTHTHRNGKPMKKEKADIIVRHKEARVREQSHKQAECSGSDSAAHKVGLESCSIGLRGKRGHRRKAVLQASFKEAEEAKRKAEDEAATLRKKMVAMEESQKKLQEDLANMKSTVSAMQKTTSTGDLSDGQTQNFPQVQNSRSAHEILQPYLDYSALYDPSASPSPRFR

SEQ ID NO: 127612 - protein, 76 aa, Oryza sativa
  unsure (1)..(76): unsure at all Xaa locations
  Clone ID: PAT_MRT4530_30046C.1.pep
FFSHPRASSPRGGFLEPTLGSKHPSLPXSDLDKPSLPPHQPLSSLPPALSFPTPHATQKNLMLHLLHTSFSQFMSS

SEQ ID NO: 127613 - protein, 144 aa, Oryza sativa
  unsure (1)..(144): unsure at all Xaa locations
  Clone ID: PAT_MRT4530_30047C.1.pep
NWIFACGPLSRLHKKIKIPNKKKKKQNPNSNLPPPPLSSPRPRRRHPRGHRLXIRHPLPSPXXKXPPPCXXXXGKXFTXFXFXXAAXXXQXPFXFAXEXXPSNXXGGXPPXFPXRXXRPXFQXXPXGXPPPVXCPXXXXRTXPP

SEQ ID NO: 127614 - protein, 104 aa, Oryza sativa
  Clone ID: PAT_MRT4530_30048C.1.pep
GTRRGTSLSFFFFFLVLKCCSAYTTLIYQEQMPIIQQASLSLSPALSEKLKKKKQRVPEMLVQISGFDRATLVRLVPPHTTCHIALAASSNHPKKKKRKFLRNS

SEQ ID NO: 127615 - protein, 1189 aa, Oryza sativa
  Clone ID: PAT_MRT4530_30049C.1.pep
MRLSRLYSFACGRRPTAVDDESSSRIGGPGFTRVVNANGGGGIPEYGYRSNSVSTTKYNVVTFVPKSLLEQFRRVANIYFLISACLTYTNLAPYTSASAVAPLVLVLLATMVKEAIEDWRRKQQDTEVNNRKTKVLQDGAFHSTKWMNLQVGDIVKVEKDEFFPADLILLSSSYEDAICYVETMNLDGETNLKLKQSLEASSGLQEDDSFNSFRAVIRCEDPNPHLYSFVGNIEIEEQYPLSPQQILLRDSKLRNTEYVYGVVIFTGHDTKVMQNAMKAPSKRSKIERKMDRIIYLLLSALVLISVIGSVFFGITTRDDLQDGRPKRWYLRPDDSTIYFKPTKAAISAILHFFTAMMLYGNFIPISLYISIEIVKLLQALFINQDIHMYHEETDTPAHARTSNLNEELGQVDTILTDKTGTLTCNSMEFIKCSIAGTAYGRGITEVERAMAKRKGSPLIADMASNTQGSQAAIKGFNFTDERVMNGNWVSQPHSGVIQMFLRLLAVCHTCIPEVDEESGTISYEAESPDEAAFVVAARELGFTFYQRTQTGVFLHELDPSSGKQVDRSYKLLHVLEFNSARKRMSVIVRNEEGKIFLFSKGADSVMFERLSSSDCAYREVTQDHINEYADAGLRTLVLAYRQLDEAEYANFDRKFTAAKNSVSADRDEMIEEAADLLERKLILLGATAVEDKLQKGVPECIDKLAQAGIKIWVLTGDKMETAINIGYACSLLRQGMTQITITLEQPDIIALEKGGGDKAAVAKASKENVVKQINEGKKRIDGSVVGEAFALIIDGKSLTYALEEDAKGALMDLAVGCKSVICCRSSPKQKALVTRLVKESTGKVSLAIGDGANDVGMIQEADIGVGISGAEGMQAVMASDVSIAQFRFLERLLLVHGHWCYSRISAMICYFFYKNITFGVTLFLYEAYTSFSGQTFYNDWALSTYNVFFTSLPVIAMGVFDQDVSARFCLRYPMLYQEGPQNLLFRWSRLLGWMAYGVASGVIIFFLTSAALQHQAFRRGGEVVDLAILSGTAYTCVVWAVNAQMTVTANYFTLVQHACIWGSVALWYVFLLAYGAITPAFSTNYFMLFTDGLAAAPSYWVVTLLVPAAALLPYFTYSAAKTRFFPDYHNKIQWLQHRGSNADDPEFGHALRQFSVRSTGVGVSARRDARDLHLPPPSQSHSHSQTTST

SEQ ID NO: 127616 - protein, 2095 aa, Oryza sativa
  unsure (1)..(2095): unsure at all Xaa locations
  Clone ID: PAT_MRT4530_3004C.1.pep
LRKSITESIDGKSPTRIELGRHCIVSGPISPSPTWRPVDLRYKRDPPGGPXGIKSQSQHIHHSLRNPRTSVPQYPLYPVYGYPPSTVARXVGALGAQGSTTMTSSFVDNSVNTNLNXGVPTSTTLVWTQVGEIVFPVYTTVPILAGPPIAGNENAVATTRGDSMSKDPPAEAEIGTSTTSEPEKDPSAAKPCFSNRNHEPTRITSEVTRSWCPIHKTRKHFLQACXVFLNVHAEIRACKEREIQRTSPTRDVYCSIHKTKNHDLLSCKVFLSAMKTPPPKVQQSRIPIRDKDKEQGATPISDRFIGVIDIDPHEPSVLHLLEDXGSSTTSTPCEVLAIDDVGTSACTNTEAENQVTTLAQHIRAVNTILRETPYDPVLNDDLARWIERLRESVTNLSNAFEEAAAAAHPEQPPTXDANGENPERRESPHRVTPPPRGTGDLRDHLNGRREAXRTRDNENRSRRHVSSRGHDNGDNRHNRHDHDDRERRVLGDTGRGRRHNDDDDGDWRRDNNGRRXQDSREPGRRPRNRTPEPSDPSSSLSSSSSSSSDRHPRRTYDRRQPTAPSAGCRAFGRSLRDVQWPERFRPGAIEKYDGSTDPEEFLPVYSTVLYAAGADDNALANYLPTALKGSARXWLMHXPPYSISSWADLWHQFVANFQGTYKRHAIEDDLHALTQNPGESLRDYVRCFNECRNTIPEITDGSVIRAFKSGVRDRYTTQELATRRVTTTRRLFEIVNRCAHADDALRRKNDKPKTGGEKKPAKDAPESSKKKNRKSGKRKAQSEVLATEYADPPNRADPQGSDTKKAWCPIHKSDRHSLEDCLVFKKSLAKHMASEKDKRVRVVEKDVEAPTQESDSAXPDSDLHVSHIFXVPRRRYPIVVEPTIRNIKVERVLIDGGSSINLLFASTLDAMGIPRSELTPTDQPFHGITPQSSSKPLGKIMLPVTFGQANNFRTEQITFDVAEFDTAYNAIIGRTALAKFMAASHYAYQVLKIPGPKGTITIQGNTKLAVQCDKQSLDMVEHTPNPLATAEPSKKVSKTNKTPKPDGAIKIVPLSSANPDKTELALITFLRDNADVFAWQPSDMSGVPREMIEHKLMVRPDAKPVKQKLWRFAPDRKQAIXEELDKLLKAGFIREVLHPEWLANPVMVRKANGKWRMCVDFTDLNKACPKDHFPLPRIDQLVDSTAGCELLSFLDAYSGYHQISMAKEDEEKTSFITPFGVFCYVKMPFGLITAGNTFQLTVQGALSDQLGNNVEAYVDDIVVKTKTSDSLIDDLRETFDNLRRYRLMLNPEKCTFGVPSGKLLGFLVSGRGIEANPEKIKAIENMKSPTRLKEVQKLTGCMAALSRFVARMGXRGQPFFALLKKQDKFVWTQEAEEAFIALKRYLSNPPVLVAXPQPNEELFLYIATTPYSVSTVIVVEREKVQRPVYYVSEALHDVKTRYPQIQKLLYAVIMTSRKLRHYFQTHRVTVVSSFPLGEVVRNKDVVGRIAKWVVELSQFDIHFVPRTAIKSQVLADFVADWTMPDNRSDNQIDNETWTMAFDGTLNSQGAGVGFILTSPSGDQFKHAIHLNFRATNNTAEYEGLLAGIRAAAALGVRRLIVKGDSELVANQVHKDYKCSSPELSKYLAEVRKLEKRFDGIEVRHVYRKDNIEPDDLARRASRREPLEPGTFLDVLTRPSVKEATGEDSPDAPNVGSGATKAERAVADIETTDDWRTPLIKFICSEELPEDDAEAEKISRKSKVYCMIGNDLYKKAPNGILLKCVSSDDGRHLLLDIHEGICGSHAAGRTLVRKAFRQGFFWPTALKDACDMXTHKAASTSTLDYPSHLAVLVLGARYARAIPTRTGRLQDPIXVAIDKFTKWIEAIPTGEIKADNAIKFIKGIFCRFGLPHRIITDNGSQFISANFQDYCIRLGVKICFASVSHPQSNGQVERANGIVLQGIKTLLWVVRTTPTTSNKETPFFLVYGSEAMLPTELRHQSTRVQKYSNEDQEEQRYDDVNLLEEHRERVAVRVASYQQALHRYHEKRILARTLSISDYVLRRVQSQAGRNKLSPXWEGPYTITQVLRPGVFKIADGDGRELANSWNIDQLRKFYV

SEQ ID NO: 127617 - protein, 42 aa, Oryza sativa
  Clone ID: PAT_MRT4530_30050C.1.pep
HVWAHVGPIIFLLFYVCTNMWVPRILLFFRVELPLKCCVSAM

SEQ ID NO: 127618 - protein, 426 aa, Oryza sativa
  Clone ID: PAT_MRT4530_30051C.1.pep
MEGEPSRRLSLLDRCDDGSEDPVVPPRVPTILNLTSHHRLDRSKFLPLIHPTPARFISSTGSSFPPYSEPPPSAPMLELGSGFGPEDLYSFFPNHFFLMESISLPPYDVVDVPPVIPVALRSGRSNQGLPSKLPLIEGHRRSHSDIPFGYSQEHPQMPPVASVKPEVTTIKGHQLEDVAAAALKDMGIQAWSPSGSIDKEVKSSGAGSTTHHCRSLSVDSFMMGNLNFGVVGQQMSSPPLLTTEVNVGGGEPIGSTASPFAAELANVKFTEDEKKKIVMDKSLSEIVLTDPRRVKRILNNRASATKSKEKKMKHVGELQRKLQVLQSETTTLGAQVTVMQRNNNELVSQNNELKTRLQAMDQLAQLGDALTSRLAAEAQHLRAVVSEISDPNLPSGSHQQLSSDIDQLQQLLTQRQTSQIQHNQPQ

SEQ ID NO: 127619 - protein, 303 aa, Oryza sativa
  Clone ID: PAT_MRT4530_30052C.1.pep
MELLLLVFLLLAAMSAAVESITSTAVKTGCQERCGGVDIPYPFGIGPGCSRHGFELSCVSNGSGAGPIAVLAGTSIQVTRLSVEPAESQVMLPVGWQCYNTSQPTRTYPDWSRAKTEMNRGGVYRISNTHNMLVVLGCNTVGYTESLRSEGGAYSSTYYIGCMSYCNNSASAQDGQCAGVGCCHVDIPPGLTDSSVNFRVYDHTGMVDYSPCDYAFLTDRTNYSFRRADLIKMDKNRNVPVWLDWAIRENGSMSCAEAKGKPGYACVSVHSECVDSTNGPGYNCKCTAGYEGNAYAPDGCTSK

SEQ ID NO: 127620 - protein, 302 aa, Oryza sativa
  Clone ID: PAT_MRT4530_30053C.1.pep
MVPGNNRPRRAVYKSMPTPLEPQLKRPRSSSWGSAVLAWTYRQLFEACCRQAPSSNISGCVLVIQMWMWLRLPVGKPKWRQSFTLWPYNEPDMEKTVAYLFESIATAHAHRDVAYKQYDRVRTKKVKDWVLEYNRSIDEWRTAERNDRYIEAIQQNHLFTEYVRWLHRTYKLFLRPTWTEANIEEDRDSDEGRHPYDVRTRVGYQMEHAPLRDRVGRGKGKAQAPPSGDDEEEEEEEDEGYIAPDAEEIGMSQSPMHLMHHSPPNTTCDPLGQRKRDTLRAHKLFGANGKSDFYEVDLCVIC

SEQ ID NO: 127621 - protein, 150 aa, Oryza sativa
  unsure (1)..(150): unsure at all Xaa locations
  Clone ID: PAT_MRT4530_30054C.1.pep
CRKLAARLGYRSVGLDDVYQPRRVPPPLPQSVCPSTARHSIRIEEREQVGGSSSSRIPQGRGKGKAQAPPSGDDEEEEEEEDEGYIAPDAEEIGMSQSPXAPHASQPTQYNLXSTRPAKKRYTPGSQAIRRQRKNWQGGRGRAPATLAPC

SEQ ID NO: 127622 - protein, 204 aa, Oryza sativa
  Clone ID: PAT_MRT4530_30055C.1.pep
MNGGQRENDRYIEAIHQNHLFTEYLRWLHRTYRLFLRPTWTEADIEEDHDSDEGRHPYDVRTRVGYQMEHAPLRDRVSRELLRSVNEMGHALRSPRGGKDTENKLRNVLEGRGKGKAQAPPSGDDEEKEEKENEGYIAPDAEEIGMSQLPDAPHASQPTQYNLRSTRPAKKRYTQGLQAIRRQRKKLSNEICCWQGGRGRRQLP

SEQ ID NO: 127623 - protein, 50 aa, Oryza sativa
  Clone ID: PAT_MRT4530_30056C.1.pep
EGNFLGHTGFPNNIPIFPNIDWKQGFKDITTILKGIYFNMDIRSNTRQYE

SEQ ID NO: 127624 - protein, 277 aa, Oryza sativa
  Clone ID: PAT_MRT4530_30057C.1.pep
MDAGDASRLGESLDAVSAAFQSRVMELQELVLARNMYPATAIPDLAAVDVSLTAMEAQLQAVRRRLQEEREAFPKAKKLVQQSLKQQRRLQLMLANMPTGMREDVFATPLEHNSSMMFPESLNFSSAVPEVRDHDLKIKEEPTAPPKKKGRGPAPRWYISTEELDSLSSYMRGRLTLEKVNIAINEVASYADGNAHLVACPKKKLSEDTWEKALELRDIAARESVKGRHFFLETDIKGPGLKLDTTGKAILTVLRHLGRFQETRIGHHRVFILSKQQ

SEQ ID NO: 127625 - protein, 57 aa, Oryza sativa
  Clone ID: PAT_MRT4530_30058C.1.pep
MAAVSSERGDDDEVGDAERETVMRGIKCKVILRSGDSSSIDSDSAPSVLNGPLFSLG

SEQ ID NO: 127626 - protein, 149 aa, Oryza sativa
  unsure (1)..(149): unsure at all Xaa locations
  Clone ID: PAT_MRT4530_30059C.1.pep
WRGCVGRRRRWIGRRNLKRERGLAAWSGQGGGGELATGVCXHGALPPGARRHGRERERPSPEGKKGRGTXKGRHVPSVFGRRGGGSTSCASRLWTHAAWGAGLDRMTPATTAKGRGLFGGFKVDPREGSRKGFKSGNFGIFGMDLYLAA

SEQ ID NO: 127627 - protein, 211 aa, Oryza sativa
  unsure (1)..(211): unsure at all Xaa locations
  Clone ID: PAT_MRT4530_3005C.1.pep
SPAEASREENXYMAKLAEQAERYEEMVEFMEKVAKTTDVGELTVEERNLLSVAYKNVIGARRASWRIISSIEQKEESRGNEAYVXASIKEFKSGAEGKEAAENTLVAYKSAQDIALADLPTTHPIRLGLALNFSVFYYEILNSPDRXACNLAKQAFDDAIAELDTLGEESYKDSTLIMQLLRDNLTLWTSDNAEDGGDEIKEAAKPEGEGH

SEQ ID NO: 127628 - protein, 86 aa, Oryza sativa
  unsure (1)..(86): unsure at all Xaa locations
  Clone ID: PAT_MRT4530_30060C.1.pep
FXXXFFXFFFFTKSMMQXNYKYCVSYTGSYKHFRHEHHLSAHFQDTTHQRLTYRAQQRRSFGFTFAMASGLYRTTNHLLIFSMVGG

SEQ ID NO: 127629 - protein, 59 aa, Oryza sativa
  Clone ID: PAT_MRT4530_30061C.1.pep
MFGSVINIFACYSYTNFHLCSMFVLFLYFDCGSAIECLDCLLAVTRSWISYSHLSQLYD

SEQ ID NO: 127630 - protein, 96 aa, Oryza sativa
  unsure (1)..(96): unsure at all Xaa locations
  Clone ID: PAT_MRT4530_30062C.1.pep
MRKACPGSRWNEDINLWRQVFVNNPVFDRSLSGFVVHLFMCTWKNKEPHLSAINDSDELRKLFXLLNLLMYQQNECESNIPNGAQDFLKCIKNAQH

SEQ ID NO: 127631 - protein, 54 aa, Oryza sativa
  Clone ID: PAT_MRT4530_30063C.1.pep
GEGSGLYIHSRVVQVHLGERIPDCAVSVAGSDDMQLAQPGTINSAVLQPKMSQS

SEQ ID NO: 127632 - protein, 90 aa, Oryza sativa
  Clone ID: PAT_MRT4530_30064C.1.pep
NGGGGHGGGGNEGGGNGAGSYDPCSGLYDSPQCCATDVLGVADLDCAGPGKTLTSAAQFQATCAGVGQRARCCVLPILGQSILCQTPAGL

SEQ ID NO: 127633 - protein, 57 aa, Oryza sativa
  unsure (1)..(57): unsure at all Xaa locations
  Clone ID: PAT_MRT4530_30065C.1.pep
HQGXTPXHXRSSXXRRRPSPTXPTRASHLPPSLARLDSSAHARPTRIRNQKRGAARG

SEQ ID NO: 127634 - protein, 266 aa, Oryza sativa
  Clone ID: PAT_MRT4530_30066C.1.pep
MRQHDNALRRVSDARMPSLPTRPKVGLGFHPSSPAYLSTAEPSPLRGHDCAGAPPSASLHELSPTAPPRTTRLFGLSFRQPLLPLHWPQPPSTAPPRASPVSAAADRPATAPAPPAGHSLPLSSPQASASSATGHCRHAAASLRFTAMSLLPRARVVPHRQAPHRPLPSPALPLAATSSDLPPDGLGEGIRPAGHSGRRLLLNVCRSASHAEEKLRYHFPHFCLPSWARFPTAGSGGVEVARGVEEGGGVGDLGFRLRAALTFRYN

SEQ ID NO: 127635 - protein, 85 aa, Oryza sativa
  Clone ID: PAT_MRT4530_30067C.1.pep
AGKSEENGSGASPRRGRRSGTHSAGDGGRSGRRGGSPPPTRLVADLPPSPHPLPTPRPDRERTSSRRHRPELVAARGKAGEGRGR

SEQ ID NO: 127636 - protein, 223 aa, Oryza sativa
  Clone ID: PAT_MRT4530_30068C.1.pep
MAEFKQAGLSLPPSLPSAVCFDRDNMQYEDLAGQNFRCTSGPLTISSVFMASVTYIDDSGSEVIDPPKTEVLDVTELAGDPVPHSPKPNVCSNGHTLCSGCKPRVHNRCPTCRHELGNIRCLALEKVAASLELPCKYQNFGCVGIYPYYCKLKHESQCQYRPYSCPYAGSECTVAGDIPYLVNHLKDDHKVDMHNGCTFNHRYVKSNPHEVENATWMLTVSPR

SEQ ID NO: 127637 - protein, 98 aa, Oryza sativa
  Clone ID: PAT_MRT4530_30069C.1.pep
MATASAQAVAVVRILILRVSIYDGGGTPEVTEASYTILVLLPPHDAADGWSSHNLEIVQAVARAPRVQIQVKTAENSVEGGNSSGIKSSHLILKVQGE

SEQ ID NO: 127638 - protein, 109 aa, Oryza sativa
  unsure (1)..(109): unsure at all Xaa locations
  Clone ID: PAT_MRT4530_3006C.1.pep
FSRGRRRERWGCRSRPRWYMGLWAYCMYILPKYCDNNEGVKGVCNEDGWTVEPSGTTYRMGWKPPQAEGPEPIGRSDSTSSCSSYXPSTRTIYIQGPASIFFPSSGYCS

SEQ ID NO: 127639 - protein, 145 aa, Oryza sativa
  unsure (1)..(145): unsure at all Xaa locations
  Clone ID: PAT_MRT4530_30070C.1.pep
LRSPVIYPXSXXQXKTFGPXXGLFKFXXXAEVVKMAXXPXVGLXGFXFSKNIPRXYXXAXAXXVGMXGVNXGXINDVASPFXXVKKXGFXXEGXXXXIXXXQVPXTITFGGMGGGYKKQKVCHSIFFFFKKKKKKKKKKKKKKKK

SEQ ID NO: 127640 - protein, 172 aa, Oryza sativa
  Clone ID: PAT_MRT4530_30071C.1.pep
LQESHEDFFPHPQPKPPAATLQSPPAAALSPSGGLTAAASVRGWLSVPKSTVRRVRGRGATLPQWLPEAARRPIPNHPTTAADRLVTEPPHRRRPPRHRAPSSRRIAKPPRRRPPRPFVTSSSAVLSPSTSSSFAKSRAPSWTSVVAAIASPELVTLRSPLIRRRPPSRCRS

SEQ ID NO: 127641 - protein, 75 aa, Oryza sativa
  unsure (1)..(75): unsure at all Xaa locations
  Clone ID: PAT_MRT4530_30072C.1.pep
FFIFFFLCSFVINDFFLLMIXFFELMYXYLFVLFFSFIYIIIYFFLFLCFFVLYRFSFLLFVDIASVLVPTLLDL

SEQ ID NO: 127642 - protein, 232 aa, Oryza sativa
  Clone ID: PAT_MRT4530_30073C.1.pep
MQASSMEASNCSIALEISHVATPGLPVLLLGSSLALLAVFLVYFYAPFWSLRTVPGPPTRFPIGHLHLLAKNGPDVFRAITKEYGPIFRFHMGRQPLVIVANAELCKEVGIKKFKDIRNRSTPPPNVGTLHQDALFLTRDSTWSSMRNMVIPLYQPARLAGLIPTMQSYVDALVDNIAGCPDQDCIPFCQLSLCMAIDIIGKTAFGIEFGLSRKAADTAAGDDGDGDDDDDV

SEQ ID NO: 127643 - protein, 39 aa, Oryza sativa
  Clone ID: PAT_MRT4530_30074C.1.pep
DRKKVGKYVFFDNVVQLQSCIGFITKYFGSLSTICYHVI

SEQ ID NO: 127644 - protein, 604 aa, Oryza sativa
  Clone ID: PAT_MRT4530_30075C.1.pep
MAGGGDLQSPKKRKRDAAGKPKTLAKGGDDGKKRKRPSDANMAQGGGGGEVKVKKEPVTAKEKRLAAKEMAESRKKKRKRNYSLEKELTVLWEKMRCHNVSSTERSKLVSEALRKMDGKYSEIAGSHVTARVLQTCVKLCSQSERDAIFEALQPDLLTLSLKKYAVFLVKKLIKRATKKQFEWFISSLHGRVAKLLRHTIGASETISNLGLQKSSVLQHMTTVIYPILEKGIVEYPIVHTAVLEYFTIADKTSATDVIRQFIPLLTQGSSAIDGDEPSVAPELQKKLKAKKKRLTEPLLVRIMNTREGLKIGVSCLKHGSAKDRKKIIKSLKGHIMKLALSDYGCILLVAILSVVDDTKLVTKIVIQELAKHLKQLIFDKDEASESAAEDIPENKVDVATNKEQDGSESMQSASDSKKDPFQRRHELLIKSELAEVLIQTLIENVGELLRTNFGKDMVKPAFYYMLTIFHVITSLAWHDLWLVAVGGEDNILEGITDRIHSLHNAIASDAARPKAEDTEHAFDNYHSSRLIRRLILESPAFAAILWKKALEGKCKTWADGHSSKVVAAFLESPDSKVRDLAKAELQPLVDRGILKISDHKAVEK

SEQ ID NO: 127645 - protein, 438 aa, Oryza sativa
  Clone ID: PAT_MRT4530_30076C.1.pep
MARLPLRSRAAHLRRRLQPRVVPAEQPVFPPPRESDSHRRRTDDGKGMAEEDGVERGEEELATDEVHSGGGGEEGLSLETQHTRYSILRWYQVPDTPYIIISSTGYGTFRYQAGLGTRYQAGLGTRYLIPQVLDALYQIWYLWDSCRSRYQVPNAQYQIWHLWDSCRSRYQVPCYPRYQAGLGTRYMIPQVPDAQYQIWYLWDSCRSRYQALMPMGAMRKREKRRGKHKNKMAIFLGGGRTLFLLVAILDSDRRCYILDTHVTMMVMDIACDKLHLDGGEHHEQLRAITVFVVGLQEPGDAGTCRRACNPEEEGCDHTGGLPASSQRFSIKGRVYPAILPVDGKEVSGKVFKGITDRELNVLDIFEDEEYVKRTVEISLTDTSEKLLAYAYIWGNQDDPDLYGEWDFEEWKRVHLEDYVKMTQEFMEELEQLEPKTET

SEQ ID NO: 127646 - protein, 645 aa, Oryza sativa
  Clone ID: PAT_MRT4530_30077C.1.pep
MAGGGDLQSPKKRKRDAAGKPKTLAKGGDDGKKRKRPSDANMAQGGGGGEVKVKKEPVTAKEKRLAAKEMAESRKKKRKRNYSLEKELTVLWEKMRCHNVSSTERSKLVSEALRKMDGKYSEIAGSHVTARVLQTCVKLCSQSERDAIFEALQPDLLTLSLKKYAVFLVKKLIKRATKKQFEWFISSLHGRVAKLLRHTIGASVVDFAYQLATPPQKRRLLLELYSTELQLFTDLTGQKTHSLLETISNLGLQKSSVLQHMTTVIYPILEKGIVEYPIVHTAVLEYFTIADKTSATDVIRQFIPLLTQGSSAIDGDEPSVAPELQKKLKAKKKRLTEPLLVRIMNTREGLKIGVSCLKHGSAKDRKKIIKSLKGHIMKLALSDYGCILLVAILSVVDDTKLVTKIVIQELAKHLKQLIFDKDEASESAAEDIPENKVDVATNKEQDGSESMQSASDSKKDPFQRRHELLIKSELAEVLIQTLIENVGELLRTNFGKDMVKPAFYYMLTIFHVITSLAWHDLWLVAVGGEDNILEGITDRIHSLHNAIASDAARPKAEDTEHAFDNYHSSRLIRRLILESPAFAAILWKKALEGKCKTWADGHSSKVVAAFLESPDSKVRDLAKAELQPLVDRGILKISDHKAVEK

SEQ ID NO: 127647 - protein, 623 aa, Oryza sativa
  Clone ID: PAT_MRT4530_30078C.1.pep
MAGGGDLQSPKKRKRDAAGKPKTLAKGGDDGKKRKRPSDANMAQGGGGGEVKVKKEPVTAKEKRLAAKEMAESRKKKRKRNYSLEKELTVLWEKMRCHNVSSTERSKLVSEALRKMDGKYSEIAGSHVTARVLQTCVKLCSQSERDAIFEALQPDLLTLSLKKYAVFLVKKLIKRATKKQFEWFISSLHGRVAKLLRHTIGASVVDFAYQLATPPQKRRLLLELYSTELQLFTDLTGQKTHSLLETISNLGLQKSSVLQHMTTVIYPILEKGIVEYPIVHTAVLEYFTIADKTSATDVIRQFIPLLTQGSSAIDGDEPSVAPELQKKLKAKKKRLTEPLLVRIMNTREGLKIGVSCLKHGSAKDRKKIIKSLKGHIMKLALSDYGCILLVAILSVVDDTKLVTKIVIQELAKHLKQLIFDKDEASESAAEDIPENKVDVATNKEQDGSESMQSASDSKKDPFQRRHELLIKSELAEVLIQTLIENVGELLRTNFGKDVLHEVAVGGEDNILEGITDRIHSLHNAIASDAARPKAEDTEHAFDNYHSSRLIRRLILESPAFAAILWKKALEGKCKTWADGHSSKVVAAFLESPDSKVRDLAKAELQPLVDRGILKISDHKAVEK

SEQ ID NO: 127648 - protein, 92 aa, Oryza sativa
  unsure (1)..(92): unsure at all Xaa locations
  Clone ID: PAT_MRT4530_30079C.1.pep
RPMRPRXLFHXLVHVGELLNTMASQQQQKQPRKAKQKEGEGHSAEEAAVLEEIGRYRAQAHHNSREAIXXXLERYSKANLEHGGATLAPGAT

SEQ ID NO: 127649 - protein, 684 aa, Oryza sativa
  Clone ID: PAT_MRT4530_3007C.1.pep
MCMDYRALNDVTIKNKYPLPRIDDLFVQLKGATVFSKIDLRSGQLRIKEEDIPKTDFTTQDGLFECTVMSFGLTNAPAFFMNLMNKVFMEYLDKFVVVFIDDILIYSRTKEEHEEHLRLALEKLREHQLYAKFSKCEFWLSEKDVKYKWSEECEQSFQELKSRLISTPILILPDPKKGFHVYYDASKLGLGCVLMQDGKVVAYASRQLHPHEKNYPSHDLELAAVVHALKIWRHYLFGTRTEVYTNHKGLKYIFTQPDLNMRQRRWLELIKDYDMGIHYHPGKANVVADALSRKGYCNATEGRRLPWELCKEFERLNLGIVSRGFVAALEAKPTLIDQVREAQINDPDIQEIKKNMRRGKAIGYLEDEQGTVWLGERICVPENKELKNAILKEAHDTLYSIHPGSTKMYQDLKEKFWWASIKREIAETSSGHDSIWVIVDKLTKVAHFIPVRTTYSGSRLAELYMARIVCLHGVPKKIVSDRGSQFTSKFWKKLQEEMGSKLNFSTAYHPQTDGQIERVNQILEDMLRACALDFGGSWDKNLPYAEFSYNNSYQASLQMAPYEALYGRKCRTPLLWDQTRERQVFGTDILREVEEKLKKCLRVHTEEANLEQIEIQEDLTYVEKPIRILETDERRTRNRVIRFCKVQWSNHSEEEATWEREEELKSAHSHLFASSSESRGRDSV

SEQ ID NO: 127650 - protein, 200 aa, Oryza sativa
  Clone ID: PAT_MRT4530_30080C.1.pep
GPPLRGARRMLAEVEALGDQPVAALGSGKPPEIRRSAPPPSSRWSSPSLRGAREASRDPPLGAAAVFWAELQKLAPHLARQWRWQGPRPRSFGAVPPPSTTVSLTQPSSTTPLGAAGVFGRTAGCCRICCSSPHGSLHPSAGATELRRAGRSTPPWPPSQSNCKEGTTIQRNVSGLAVLVSCCLQKEIIVTTKANLISTA

SEQ ID NO: 127651 - protein, 288 aa, Oryza sativa
  Clone ID: PAT_MRT4530_30081C.1.pep
MVSAFFLLCGCVDQASVAVVEKWGRFLRLAEPGLHFFNPFAGEFVAGTLSTRVQSLDVRVETKTKDNVFVQLICTIQYRVVKEHADDAFYELQNPQQQIQAYVFDVVRAIVPRMNLDDLFEQKNDVAKAVLQELEKVMGDYGYSIEHILMVDIIPDAAVRRAMNEINAAQRLQLASVYKGEAEKILLVKKAEAEAEAKHLSGVGIARQRQAITDGLRENILNFSHSVSGTSAKEVMDLIMVTQYFDTIKELGDGSKNTTVFIPHGPGHVRDISEQIRNGMMEASCSNV

SEQ ID NO: 127652 - protein, 63 aa, Oryza sativa
  Clone ID: PAT_MRT4530_30082C.1.pep
GPQVFPFKFSGFIFFGNFNGKQFLPGKNFFHFFPKLLKDPLKGKFVTLQGPVPNFRVEPTGRF

SEQ ID NO: 127653 - protein, 90 aa, Oryza sativa
  Clone ID: PAT_MRT4530_30083C.1.pep
FEVSFVGRDTLGLQTEMKVFLPLYASGVVMTLSCAWGVENDPEYLKRIEDMQYVYNFASIGDQWKHRGWVDEELHSGSERRVCGSSNAEL

SEQ ID NO: 127654 - protein, 47 aa, Oryza sativa
  unsure (1)..(47): unsure at all Xaa locations
  Clone ID: PAT_MRT4530_30084C.1.pep
FFFFFFQRAWLANPEANQYLAFFFXGINSSVTGRNKNPSKVTSPVTD

SEQ ID NO: 127655 - protein, 85 aa, Oryza sativa
  Clone ID: PAT_MRT4530_30085C.1.pep
MDDHQTQDLVKELVHRLISAESGGGGRDAGGALRFAHRLFSSRLAPAVLPDEHALAESVKRRLAAWGRPDDALALADLHAKLSAR

SEQ ID NO: 127656 - protein, 134 aa, Oryza sativa
  unsure (1)..(134): unsure at all Xaa locations
  Clone ID: PAT_MRT4530_30086C.1.pep
AEKLVLPLLPPSNRSSSDLLPGANMAIMGATTMDSRLLQSLGIGDTICNTGALNTQIQRVQQIMPSICGSSCTTYLTMPLVVLCEVWGNDYNAHVMSGYTPEQAATHIXTIADRISKGVEHLISLVAIYVFAPG

SEQ ID NO: 127657 - protein, 159 aa, Oryza sativa
  Clone ID: PAT_MRT4530_30087C.1.pep
QIGIGPSCGGGQEEAGRWWRGGRRGGRRGELTEDDRRTGKGRALVGDIVPSGLRREGERPSSWRRRGRKSPAPTRADGALRCRGDGAWWGRDVGAGGGVVDEEEDDEGDGPSGCNRHPRRHALVAARRMPPLPAPGRKRPRRREPHRLAVHGRREGEGL

SEQ ID NO: 127658 - protein, 587 aa, Oryza sativa
  Clone ID: PAT_MRT4530_30088C.1.pep
MAPLAALRGLRALSIANNNLTGPFPDVSMLPALKMLYMSRNKLDGGIPPAAFAHMRGLRKLFLSDNAFTGPIPTSITSPKLLVLQLSKNRFDGPLPDFNQKELRLVDVSDNNLSGPIPPGLRRFDAKSFQGNKNLCGPPVGAPCPEVPILASPSPSPLSSSWWSPRSLKILMIIALVVVVVGALLAFAGALTAMLARRREATTETQGGGVGGAAANAAAARMKATPNPAVTVAHGGGGGGGEQQPHVTVSAVPAKRGGRRDDHGRLVFIQEGRERFELEDLLRASAEVLGSGSFGASYKATLVEGQSMVVKRFKEMNGVGRQDFNEHMRRLGRLVHPNLLPVVAYLYKKDEKLFVTEYMVNGSLAHLLHGGSSMAALDWPRRLKIIKGVTRGLAHLYDELPMLTVPHGHLKSSNVLLDAAFEPILSDYALVPVMTPRHAAQVMVAYKSPECGETGRPSKKSDLWSLGILILEVLTGKFPANYHRQGRTGTDLAGWVHSVVREEWTGEVFDQEMRGARGGEGEMVKLLKVGLGCCESDVDKRWDLRDALARIEELRERDAGAGADDSSAASSVASGGGGGEASRSHSS

SEQ ID NO: 127659 - protein, 72 aa, Oryza sativa
  Clone ID: PAT_MRT4530_30089C.1.pep
ALKLVVQSSGNSAPINFNKPGPSLGLGKPIPPIKFYYSKPGGAKASVSLIKENPHDFILRYNKKKMFYVPCA

SEQ ID NO: 127660 - protein, 1239 aa, Oryza sativa
  unsure (1)..(1239): unsure at all Xaa locations
  Clone ID: PAT_MRT4530_3008C.1.pep
MSSSFVDNRVNTNLNQGVPASTMLVWTQVGEIVFPVYTTVPISAGPSMIGSENAVASTQDDSMSKDPPAEAENGTSTISEPKKDPSAAKPCLFDKNHGPTRITSEVTSCKVFLSATKTPPPKVQQSRISLRDADKEQGATLISDRFVGVIDIDPHEPSVLHLLEDYGSSSTSTPREVLAIDGTSTSARANAEAENQVTTPAQHIRAVNAILRETLYDPILNDDLARWTERLRESVTNLSNAFEEAAAAAHPEQPPTGGANGENPEQRESPHRATPPPRGTGDLRDHLNGRREARRARHNRNRSRHRVSSRRHNNEERGGRSSEDEDRDNRHNHHDQNDRERRVPGHASRGRHHNDDNDGDQRRDNNGGRRQDSREPGRRPRNRTPEPDRHPRRMYDRRQPTAPCAGCRAFSRSLRDVRWPERFRPGAIEKYDGSTDPEEFLQVYSMVLYAAGADDNALVNYLPTALKGSTRSWLMHLPPYSISSWADLWQQFVANFQGTYKRHAIEDDLHALTQNPGESLRDYVQRFNECRNTIPEITDASAIRAFKSGNNKPKTRGEKKPAKDAPESSKKNNRKNGKRKAQAEVLAAEYADPPKRPDPQGSDAKKAWCPIHKSDRHSLEVCLVFKKSLAKHMASEKGKRVRVVEKDTEAATQESDSAYPDSDLHVSHIFGGSTAYSSKREYKKVEREVCSTWQGAAPKMKCSIKLLFASTLDAMGIPRSDGDPTDQPFNRITPQSSSKPLDKITLPVTFGQANNFRTEQITFDVAEFDTAYNAIIGRTALAKFMATSHYAYQVLKMPGPKGTITIQGNAKLAVQCDKRSLDMVEHTPSPPATAEPPKKVSKPNKTPKPDGAIKIVPLSSANPDKTELTLITFLRDNANVFAWQPSDMPGVPWXREVLHPEWLANLVMVWKANGKWRMCVDFTDLNKACPKDHFPLPRIDQLVDSTAGCELLSFLDAYSGYHQISMVKEDEEKTAFITPFGVFCYVKMPFGLITAGNTFQRTVQGSISDQLGNNVEAYVDDIVVKTKTSDSLIDNLRETFDSLRRYRLMLNPEKCTFGVPLGKLLGFLVSGRGIEANPEKIKAINNMKSPTRLKEVQKLTGSMAALSRFVARMGERGQPFFALLKKQDKFVWTQEAEEAFIALKRYLANPPVLVAPQPNEELFLYIAATPYSVSTVIVVEREKVQWPVYYVSEALYDAKTRYPQIQKLLYAVIMTSRKLRHYFQAHRVTVVSSFPLGEV

SEQ ID NO: 127661 - protein, 741 aa, Oryza sativa
  Clone ID: PAT_MRT4530_30090C.1.pep
MAPPPLHLFSPSPRPPSPTPPPWLHGPHVPSTSVSPPDPATEAPPAPKQHRGPRPAPRNPGSAKPLTAGVPGGRTRRAVLGIIRKVRSLELSDPRTPSPNGGGGSSSSSTATARVPFHLPIHPPPPEREEEEEKKGIRRAVPWAAARDEETKVVLRREKKTRVPTRAETELEAGELERLRRAARGKERWARAKKAGITDEVVEEVRGQWAKGQELAGVRIVEPLRRCMDRAREILEIKTGGLVVWTRGGIHFVYRGSSYLENAKRHRDFVNYNEELSPVTSNNPTSQGKYWSKDETLTNDNDEADDKDDKPIKGTLYEREVNRLLDSLGPRFIDWWWNTPLPVDADLLPEVVPDFKTPFRQCPPGVRPALADEELTYLRKHARPLPTHFVLGRNTKLQGLAAAILKLWEKSLIAKVAVKVGIQNTNHEQMARNLKRLTGGTVILRNKDYIIIYRGKDFLPGGVAESVIERESQVHDQQAKEEEARLKMADSLQMIVGLSSERSYVGTFREYQDFHDSHARRTTENNFRIQLEAKKHRLEKELKDQEWRLSMLTKKIERSNQVLAKLHSSWSPSKKDGDRELLTEEERRIFRKIGLKMDEHVLLGRRGVFEGVIEEIHQHWKHKEVVKVITKQNQASQITYTSMMLEVETGGTLIAIERFTTSHAIILYRGKNYRRPTKSAPSNLLTKREALQRSIEVQRRGSMKYFAQERKKSIDELKRELRNVTWEIRKLNHDTEQSWTA

SEQ ID NO: 127662 - protein, 116 aa, Oryza sativa
  unsure (1)..(116): unsure at all Xaa locations
  Clone ID: PAT_MRT4530_30091C.1.pep
QNGGFFFPPPPPGKKKGGGIGPNRGGGKKGPQQNPLTKGKSPPGGENFLFFQGNRPTTPGRGGPKGGGFFPTPPLLPPKNLFEKGGXNFTFGPGGPFQRGPXPPGGPLKNPKQTPF

SEQ ID NO: 127663 - protein, 90 aa, Oryza sativa
  Clone ID: PAT_MRT4530_30092C.1.pep
AFNLGGKTLPVWAKQTQSTTQKTTGEGGGPYRPHHAKKINRLKTGEKAKKKKEKKPQRPTGQGGTLTPHPRLKLARNNGTYSRSNGNSTL

SEQ ID NO: 127664 - protein, 74 aa, Oryza sativa
  Clone ID: PAT_MRT4530_30093C.1.pep
FCTGKIVLSTGRLMLSQILVLHMHISASGSPAGVSVYESLGQLAGVSSHPVYVTCRSASMYPVVVICCTVRHVL

SEQ ID NO: 127665 - protein, 99 aa, Oryza sativa
  unsure (1)..(99): unsure at all Xaa locations
  Clone ID: PAT_MRT4530_30094C.1.pep
MVRTKTMLMEEQRSSVVGISCEKVTSXGFLEINFXSTVGIETRLREELRSRRSRMLGDEVGYEMAHVGWTHCVKEIFATGFTRCACKRRCSRRKLVKEN

SEQ ID NO: 127666 - protein, 42 aa, Oryza sativa
  Clone ID: PAT_MRT4530_30095C.1.pep
PNQHNILPTDSYPHPMTVRSVNTGGNRHQEDTWQKEKLRRCS

SEQ ID NO: 127667 - protein, 153 aa, Oryza sativa
  unsure (1)..(153): unsure at all Xaa locations
  Clone ID: PAT_MRT4530_30096C.1.pep
GANPPFLKSIPGAPRKRVYKKYISSGPRGPLNPTPGDPPPPNSLQKKGWAPPTPWGLPQTGWFPTPPGGGPPGGGGPPLDGGHREGAAPPPLVAQKKQPPVGGGNPPLGPEPGPSNXQGGGGPHPPKGGASPGRASQKSASPPGDKPPGGGDT

SEQ ID NO: 127668 - protein, 718 aa, Oryza sativa
  Clone ID: PAT_MRT4530_30097C.1.pep
MDLLGFAVVLLLSLASSTSSCKDHEKSFFLQFLAGLSEDGGLAVSWQNDTDCCTWEGITCGTDATITEISLVSKGLEGHISPYLGNLTGLMRLNLSHNLLSGELPLEELVSSTSLVILDISFNHLSGALQEFSAQISETTIRPLQVLNISSNLFTAQFPTNTWKVMNNLVALNASNNSFTGQAPSSFCISAPSITELDLSFNRFGGSVPQDIGNCSMLRVLKGGHNNFHGALPDELFNASSLEYLSFPDNVLNGVLDDANIIKLRKLSILDLERNMFIGKIPNSIGQLKRLEELHLGHNNMYGELPLTLGNCTNLKILDLKINYLSGDLGKINFSSLSNLMIIDLLVNNFNGTIPESIYDCTNLIALRLSWNKFHGEFSQRMDRLRSLSFLSVGGNAFANIRNALHIFKSFRNLTVLSIEQNFMHEILPEDETIDGFESLQHLEIYGSSLSGKMPVWLSKLKNLEKLFLYDNRLTGTVPVWINKLNFLICLDISNNSFTGEILMTLIQMPMLKSEKTVANIDARVLILPTYMSSKKDLPALKDWKYEYRILRAEVNVARNGFTSVIPPEIGRLKALDMLDLSFNSFSGEIPQAICNLTNLEMLDLSSNNLMGAIPLELNKLHFLSAFNVSNNDLEGPIPTGGQFDTFDNSSFIGNPKLCGGMLSHHCNSAKAVHAPASTLSTDQFSDKVIFGVAFGLFFALGVLLDQIVLSKLRFLQF

SEQ ID NO: 127669 - protein, 120 aa, Oryza sativa
  Clone ID: PAT_MRT4530_30098C.1.pep
RAASLPRFLPSWASPKKGVKTLSVGSVRHLALLVGGRPTLSMGGHFRHVVYTPGGHKIGGDFYWGTLLKRFMLPGVPIKKHLLPGILGPKGQGGPVLRFPEGKNLFNAIALPKKKKKKPP

SEQ ID NO: 127670 - protein, 45 aa, Oryza sativa
  Clone ID: PAT_MRT4530_30099C.1.pep
KLSFEDKTFTVPRVTVWSGSLCLCKYQSDTSFNLKSPCSCLAVFN

SEQ ID NO: 127671 - protein, 209 aa, Oryza sativa
  Clone ID: PAT_MRT4530_3009C.1.pep
LALLAFPNVGFNFHEERIFRSCCVGCTRLTPAGAGGPTRQPHPRARAADGRAPRGSHSARPRAANQRGRREAARPRPDGRRRRPPARRSGARERGGKGEAKRRPTAHPGSTATTGMATEAERGGGAARVDEDGGVPAVGGRNEGVDEIGEDAAMPKQAMPKREEVRGDDGGGPELGGDGGERGRRRELDSDGEKERRVAETEEGGTGRV

SEQ ID NO: 127672 - protein, 166 aa, Oryza sativa
  Clone ID: PAT_MRT4530_300C.1.pep
TRRRHRTLQKPRLKPPRNTTTPAGPPSRLGPIPPPPSYLSPQSPPHSNGEAEAARPPPPRRPPPRPLLLARGSEGRAAGEAGAPLRAVALGPPGRRWDGVDGGGLLRSQAQHQPPRRRAPPDRPQLAAGALTAADHRRSTVSFHPGQPATYLRINTLYILYYRINT

SEQ ID NO: 127673 - protein, 74 aa, Oryza sativa
  Clone ID: PAT_MRT4530_30100C.1.pep
YTHRSHPRGAKQLRTRGTRVKLDEPSMCRHGLGTHESVRSIMNHIVDMISIGMLTTETIVDSRDDRTWDSVSGS

SEQ ID NO: 127674 - protein, 66 aa, Oryza sativa
  Clone ID: PAT_MRT4530_30101C.1.pep
LITAKVHAHRPIPQWQVVAPCAVHNLLGTCVAGEAVDDKASSNTVDIVDDVEDHGECWSRNKPRPL

SEQ ID NO: 127675 - protein, 164 aa, Oryza sativa
  unsure (1)..(164): unsure at all Xaa locations
  Clone ID: PAT_MRT4530_30102C.1.pep
LRGGRLRRQVGPACQRLKRERGRRHVGPTGSGTRREGVRLAGGSHRPRLQRGGGAWLGSAPSRPAGHGAAARVELAAAHGYRRRRGSRRQRLEAAAWEAAASAEGDGVCVERXGANEREGTREERGSSPASTAAGAKDEGGGDDPTSGGADGRRLHLRRKMERN

SEQ ID NO: 127676 - protein, 76 aa, Oryza sativa
  Clone ID: PAT_MRT4530_30103C.1.pep
MVGTDRWADADQVYNITPSNSPFHNDGMMIEGAMSEVPPNRHQGVIWDVHAKTWDQRSGRRASWRASNKPLTGKGE

SEQ ID NO: 127677 - protein, 50 aa, Oryza sativa
  Clone ID: PAT_MRT4530_30104C.1.pep
MWRQRSRGVASAWRAARRRHCAAVACHGGVMASQRLGVTASWRGLASWRG

SEQ ID NO: 127678 - protein, 133 aa, Oryza sativa
  unsure (1)..(133): unsure at all Xaa locations
  Clone ID: PAT_MRT4530_30105C.1.pep
RQRDLWLAGNNRNPQAYWREGEEWSQHILSGFSTXRLLYEASGISNQDSRLLQCQNDLKREIVRLERVLTMLQPYASLQEQEQGQMHSREHYQEXRYHHSQYVSGCSNGMDETFCTMRVTQNIDDANRADTYN

SEQ ID NO: 127679 - protein, 66 aa, Oryza sativa
  Clone ID: PAT_MRT4530_30106C.1.pep
MELLLQWVDCGVVASESVALVITAEWTTFEKGSGDGRETVDEKGAAGRQRRRRLWRNRRNELDVRF

SEQ ID NO: 127680 - protein, 81 aa, Oryza sativa
  Clone ID: PAT_MRT4530_30107C.1.pep
DGEDEKNEKALGDPHDNNYSIARPSPSTNPRAAVHASSPDGRSCISEYTGTGLIHRAQRLMTTDTERTRVFDHGLTRQRAR

SEQ ID NO: 127681 - protein, 57 aa, Oryza sativa
  Clone ID: PAT_MRT4530_30108C.1.pep
MIYGLDEFDCELFIPDLDNVVMHGNSIELPTHVLKMLDEKREHELAAGKDDAKATQE

SEQ ID NO: 127682 - protein, 729 aa, Oryza sativa
  unsure (1)..(729): unsure at all Xaa locations
  Clone ID: PAT_MRT4530_30109C.1.pep
AEWGPLRSVRVIKERSSGMSRGFAFIDFPTVEAARRMMEGVGDNGLLIDGRKVFFQYSSKPTSGMSGPSHGEENFTRYNYGHRTAAAPCDWICTICGCMNFARRTSCFQTLAFSGPTHVLVVRGLTENFDXKVLRYEFAKHAPIKDIRLVRDKFTHVSRGFAFIHFHSVEEATKALEATNGITLEKNGQVLRVTYAKSTHGPVSGASQSNSLAAAAIEAASFSQQYDAIGWAPKEYNPDDKLNSNSEPQSSGSAPQSGFVWDEKSGYYYDSAFHSVEEATKALEATNGITLEKNATRNLRAVALLHSLDLFGMKSLVITMIQPQDSIMMEIPDFTMMVMLECGYSYXQQTRQYVPCXEQNSSKAAGDMANTSTKTSESSGKNVVISAPAATIKQSEKTSLPEAVQAAASAALAAKNKQNSNSLGTTIMGSDQTLHFMRHLMLVVLILSPTYQHENXLKVCSWEPTSAPLITELCTQASYNLSCGTGYGKGRLGTTIMGVIRGSGRGIVRSDTAFHARSDAGGADAFSNIQTCACGLAASAGAASNVGFRTLCNMGWQEGLGLGKTGSGIKDPEAPGHSQYRDRAAERRNLYGSSSSLGSDNDRLDTTSEYPPMAPFGVRSLPFPPGVGERSSGEIGNTENYEVITADRAIDESNVGNRILRNMGWQEGLGLGKTGSGIKEPVQAKSVDVRAGLGSQQRKSSDPSLEAQAGDSYKTIIQKKAMARFREMS

SEQ ID NO: 127683 - protein, 279 aa, Oryza sativa
  Clone ID: PAT_MRT4530_3010C.1.pep
MAQFLGAHGDHCFTYEQMDESMEAMAAMFLPGLDTDSNSSSGCLNYDVPPQCWPQHGHSSSVTSFPDPAHSYGSFEFPVMDPFPIADLDAHCAIPYLTEDLISPPHGNHPSARVEEATKVVTPVATKRKSSAAMTASKKSKKAGKKDPIGSDEGGNTYIDTQSSSSCTSEEGNLEGNAKPSSKKMGTRANRGAATDPQSLYARKRRERINERLRILQNLVPNGTKVDISTMLEEAVQYVKFLQLQIKLLSSDDTWMYAPIAYNGVNISNIDLNISSLQK

SEQ ID NO: 127684 - protein, 252 aa, Oryza sativa
  Clone ID: PAT_MRT4530_30110C.1.pep
PTRPKNVVISAPAATIKQSEKTSLPEAVQAAASAALAAEKKEKERAKEIKLASKGSLLANKKKMNNVLAMWKQRNQEGQAGRAILDDKEPSNSADDKLNNLHNSTGFAVKAKPKSDVGNAKDMNSPASYNSLGRTAAPTEMIDSDIKPTPVSNSLGTTIMGVIRGSGRGIVRSDTAFHAPSDAGGADSFSNIPTSTCGLTANAGAPTSAPFKTELSALASYTPSGVSGSGKRRFSEAPGHSQYRDRAAERRN

SEQ ID NO: 127685 - protein, 165 aa, Oryza sativa
  unsure (1)..(165): unsure at all Xaa locations
  Clone ID: PAT_MRT4530_30111C.1.pep
STAAADALELVDPPGCRNSARAARVLPLLLVVVVAAGMAKAPTAXAWGKDGHYMVCKIAEGFLTNDVVTGVNELLPRLGRGELAETCSXWADTERFRYRWSXPLHFADTPREMPIQLSPRNLLQNQPVKKKLFFLFGIQFINLYPYGASKEIPLFSFLIPTPQKI

SEQ ID NO: 127686 - protein, 166 aa, Oryza sativa
  unsure (1)..(166): unsure at all Xaa locations
  Clone ID: PAT_MRT4530_30112C.1.pep
MAAVRSIGSLPVPNVQALAGTCNGSYDQMSWRHITTEATCEEVISNYHGDMAMTIIDLSRLFCPQSSAAECVKLTPACQCRGFFQVIKHGVPEEVIDNFRSIIIEFMSLPLDAKTESXQLPNSLEGYGQTFVVSEDHKLDWRDMLYLQVHPTESRDLRFWPVTLHL

SEQ ID NO: 127687 - protein, 59 aa, Oryza sativa
  Clone ID: PAT_MRT4530_30113C.1.pep
GISGIILSFLCFLHQHCILQQNLLFRLDYMRFLSNVVCTLNYRILFSKPNIKFKMILCV

SEQ ID NO: 127688 - protein, 95 aa, Oryza sativa
  Clone ID: PAT_MRT4530_30114C.1.pep
VLLLSLLSLIIITLQLAWLVGGAWELRSNSHRYTLLFLFSLHFFLYIVSFLISQSTKLLLALCSAASSHPWRRLPATHLPTSSLSSSSAQIGEGW

SEQ ID NO: 127689 - protein, 103 aa, Oryza sativa
  Clone ID: PAT_MRT4530_30115C.1.pep
NIKREKRGEAWQLQTLAFSDRIARPSTTSSPPLPPPVACLPRAGYLLRPPQWRFPPSSPARRRGHVAHLRIRSVGCFLQESLPRAPQEKQPGGRRVVDSIAGV

SEQ ID NO: 127690 - protein, 65 aa, Oryza sativa
  Clone ID: PAT_MRT4530_30116C.1.pep
AGSRGVVQCAGEASAMPGKEKKWEKKKDSMNNPQTFQLRPLYYANLSLHQVMAFRLFHDFSCLPS

SEQ ID NO: 127691 - protein, 834 aa, Oryza sativa
  Clone ID: PAT_MRT4530_30117C.1.pep
MGCTTSHDAFAAARARARASSSSLERPRRAQADPAALCRERAALIRAAADRRYALASAHAAYFRSLAAVGGALRRFAAAALAPGTPPSGSSPVLTLPPSPAKPVDASAAAARSSLPPSPSSSSTVSPLSHTLSDEDLDAHGAAKHATAAAASSTRYHYHYMRNSPTVPTTVYEDPNGEASYGGYGGYGYTYSYGPYGEVVAEERPETATPPPTAEVAAWDFFDPFTSYDQFIEDYKGHDGGNLPSNSPNYSELRRVEGIPELEDEAELEAAEAKAKASKPSTSVVADQGGKGKRPISSDVSSKGEASDGKLLQRKGSGGNGEPENASLKGSGSGDNNGSSTSKKKGIAFDGIEQPIAAAQGEGGSGKSVQSTAVSSESFSPLHQGNRSVMEAMDEIKERFDEALNCGEEVSKLLEVGKVPPQSSTPRVLRYLSSRVMDPLSLTVPSSSCLPKPRRKSRTLSGKASTSSNPSVAGRRNSAGSLSSTLEKLCAWEKKLYQEIKDEEKLRILYEKKYRRLKSLDERGLDSTTIDATRLSVRNLQSRITINIRTANAFSSKIQNIRDEELYPQLVDLIIGLRRMWKAVLLCHEKQLSAIQDSKMHLIKAVTISQSNAAAVATVELERELAKWYRCFNKWISSQRSYAEALNGWLRKWLTEPEVQEENTPDGAPPFSPGKLGAPPVFVISNDWLQVIEMVSKNEVLKTIDQFSKLVHEYKKTQEKEHRQKRKADHASRDYNKRRKVLQRELGLSTSLDMVAVMENTHHSHDNRVIELEKMSRKKDEEKTKHDEIVKHAHLAASATLPVGLVPVLHQIVSFSQENVQKYTSIRTRGARVH

SEQ ID NO: 127692 - protein, 167 aa, Oryza sativa
  unsure (1)..(167): unsure at all Xaa locations
  Clone ID: PAT_MRT4530_30118C.1.pep
VGTNYNSLIWKSWAPAKCKFYAWLVIQNRVWTSDRLAARGWPNSGTCPLCRATNETAFHLIASCRYTKRIWRLTASWVAYQXLDPTHWEPYQSVQEWWEMLTNINEVPKKGLRSLILLIMWEIWKERNQRIFEHKETAAPNLIAKIKEEARTWIIAGARRLGEFLPS

SEQ ID NO: 127693 - protein, 40 aa, Oryza sativa
  Clone ID: PAT_MRT4530_30119C.1.pep
EAARANTLHYCCSRRGRDADITPSTFWRDKKHTGARLPPP

SEQ ID NO: 127694 - protein, 2073 aa, Oryza sativa
  unsure (1)..(2073): unsure at all Xaa locations
  Clone ID: PAT_MRT4530_3011C.1.pep
GLIPPSSMRRPPHLRYKRGPPGRXRIESQTQHNLHSLRNPCINVPQYPLYPVYGYHPSTVARXVGGLGTXGSTTMSSSFVDNNVSTSLSQVLPASTMLVWTQVGEIVFPVYTTTPISTGPPMTGDENAVATNQGDSMSKNPLVETENGISTTSKLKRDSDTAKPCPSDMNHEPTKMTSEATRSWCPIHKTKKHTLQDCWVFLNVRAEIRACKERGIQRTSPTRDVYCPIHKTKNQDLSSCKVFLGAMKAQSPKSYVPIRDNDKEQGVTPTSDRFVGVIDIDPHEPSVLHLLEDYGSSTTSTPREVLAIDDVGTSAHANAEAGKQSTTQAQHIRPVQAILRETPYDPVLNVDLERWIERLWESVTNLSNAFEEAATAAHQEQPPTGEANSEDPERRESPQRATPSPRGTGDLRDQINGRREARRTRDNVNRSXRHVSSRRHDNGNRGDCSNEDRDHDNHHDHNDRERRVPDNTGHGRHRIDDDDGDRRRDNSGRRRQDSRDPGRHPRNRTPEPSDPSSSSSSASSSSSDRYPRRTHDRQQPTAPXAGCRAFGRSLRDVXWSERFRPGAIEKYDGSTDPEEFLQVYSTVLYAAGADDNAIANYLPTALKGSARSWLMHLPPYSISLWADLWQQFIANFQGTYKRHAIEDDLHALTQNSGESLREYVXRFNECRNTIPEITDAFVIRAFKSGVRDRYTTQELATRRITITRRLFEIVERCAHANVVLRRKNDRPKTGGEKKPATDTSESSKKKNRKNGKMKAQAEVLAAEYANPPKHPDPQSSDTKKSWCPIHKTDRHSLEDCLVFKKSLEKHMAFEKGKRVRVVETNEETAPHEPDSAYLDSNLHVSHIFGGSTTXYPIMVEPTIRNIKVARVLIDGGSSINLLFASTLDAMGIPQNELTPTDQPFHGITPQSSSRPLGKITFPVTFGQANNFRTEQITFDVAEFDTAYNAIIGRTALAKFMAASHYAYQVLKMPGPKGTITIXGNAKLAVQCDKRSLDMVEQTPSPPATTEPPKKVTKTNKTPKPDGAIKIVPLSSSNPDKTKLALITFLRDNADVFAWQPSDMPGVPRKVIEHKLMVRPDAKPVKQRLRRFAPDRKQAIREELDKLLKAGIIREVLHPEWLANPVMVRKANGKWRMCVDFTDLNKACPKDHFPLPRIDQLVDSTAGCELLSFLDAYSGYHQISMAKEDEEKTAFITPFGVFCYVKMPFGLITAGNTFQRTVQGALSNQLGNNVEAYVDDIVVKTKTGDSLIDDLRETFDNLRRYRLMLNPEKCTFGVPSGKLLGFLVSGRGIEANPEKIKAIENMKSPTRLKEVQKLTGCMAALSRFVARMGERGQPFFALLKKQDKFVWTXEAEEAFIALKCYLSNPPVLVAPQPNEELFLYIAATPHSVSTVIVVEREKVQRLVYYVSEALHDAKTRYPQIQKLLYAVIMTSRKLHHYFQAHRVTVVSSFPLGEVVRNKDVVGRIAKWVVELSQFDVHFVPRTAIKSQVLADFVADWTMPDNKLDNQGDNETWTMAFDGALNSQGAGAXFILTSPSGDQFKHAIHLNFRATNNTAEYEGLLAGIRAAATLGAKRLIVKGDSELVANQVHKDYKCSNSELSKYHAEVRKLEKKFDGIEVRHVYHKDNVEPDDLAXRASRRESLEPGTFLDILTKPSVKEVSGKVSPNTPDISSEVTEAERAIADIETTDDWRIPLIKFISSEELPEDDTEAEKITRKAKIYCTVGNDLYKKAPNGVLLKCVSTDDSRHLLLDIHEGICGSHAAGRTLVGKAFRQGFFWPTALKDACDMXTHKATRASAPDYPSDLAILVLGARYTWAIPTRTGRLQIPIXVAIDKFTKWIEAVPTGEIKADNAIKFIKGIFCRYGQPHRIITDNGSXFISADFQDYCIGLGVKICFASVSHPQSNGQVERANGIVLQGMKTLLWAVRTTPTTSNKETPFFLVYGSETMLPGELQHQSTRVQKYSDKNQEEXRDIDVNLLEEHRERVAVRAASYQQTLRRYHKKHIRARILSIGDYVLRRVQSQAGRNKLSPKWEGPYTITQVLQPGAFKIVDGDGRELANSXNIDQLRKFYV

SEQ ID NO: 127695 - protein, 868 aa, Oryza sativa
  unsure (1)..(868): unsure at all Xaa locations
  Clone ID: PAT_MRT4530_30120C.1.pep
KGLPGMFWGEAVTTAVYLLNRNRRCXPGEGVVWTSSSPACVVHQEMEGALVSTATGALKPVLAKLAALLGDKYTIFKGLHKEIKSLSTELMAIHAFLLNMSEEENPDAQDQAWMTEVRELSYDMEDIIDEFMVHVDDESATPDGFISKCKKSLANMKTKRRIAKAIEDFKSQINIVGERHARYRSEKTICRTSNTIIDHRALSIFEHASNLVGIEGPKNEVIKLLSDDDGCESKQQHPKVVSVVGFGGLGKTTLAYQVYQQLKGNFSCSVFVSVSRNPDMMRILRTILSEVTQRDYAVTEAGDEQQLIIKISNFLSKKSKIITTTRISDVARSCCSSFRGHLYNIRPLDTVHSRTLFHRRLFNPQEKCPSHLEEVSDQILKKCDGLPLAIIAISGLLANKLRTKDQWEHVKNSIGCALERNPTVEGMISILSLSYFDLPPHLKTCLLYLSIFPEDYVIRKNDLILRWIAEGFIHKEDSNTLYESGEMCFNELVNRNLLQLEKQNYNGCRVHDTVLDFIISMSKKNNFVTLVTSPCLTIEGQNKIRRLSLQVGSEEGNSIQRTMLSHARSLDVFWLHLQEIPSLVEFRHLRVLSFQGCRWLQSQHLANIGKLFQLRFLNLRKTGLNELPEEIGFLQNLQALNLEGSNMHRLPPHITRLGNLVHLFTDIRIQLPEGIAKMRSLETLKWVDLSNHSSNIVKELGQLENLRELKLFMPNDDICDEHVKVIASCLVELGRHNLRRLYIVGYTELPNSLLPDPWCPSPLKLEELDISDSPMVQVPSWMRSFVQLKRLGLILKDVSDEDLTTLGRLPSLLHLHLNIPRGEPGYEDRLLISGCHGFSCLRQFYLTGQQPIFTAGSMPRLELLRIQI

SEQ ID NO: 127696 - protein, 272 aa, Oryza sativa
  unsure (1)..(272): unsure at all Xaa locations
  Clone ID: PAT_MRT4530_30121C.1.pep
MRRRRRPAAPHPRPAPGRGVGAGAASGGAVADDGRRHAAVAGPGTAAAPSPSPSPAELSLLAMLRFPSALPPCPPPEPPPAWPRWSPSPPTPAPHPTRPAAPAPPPPRPPSRPAAAPPPPPAPPAAGSAPAPPLPTPSATAPAIAREAAMGRRLDPWRHLYIQRGSIPQSPTPPSPPPPPPPLPPANEANEAKRSGRCCSEGERQTPRRSAPPPLLPRTAEPLPPRAAAPPRRFASAPPPPPRIAEPPXPAPPCPRASGPPPPSQERRRPRH

SEQ ID NO: 127697 - protein, 80 aa, Oryza sativa
  unsure (1)..(80): unsure at all Xaa locations
  Clone ID: PAT_MRT4530_30122C.1.pep
MLLYLHNCIDEKWDAALQLNHEAYARVDLLADHIEGYVVRLNAFDDIEAQLTIIXKSCAXRCDLLKVVDQEYIGVVIGAV

SEQ ID NO: 127698 - protein, 146 aa, Oryza sativa
  unsure (1)..(146): unsure at all Xaa locations
  Clone ID: PAT_MRT4530_30123C.1.pep
MEVAPGGRGWRPRRRRSPPPRLLTDESSRRTAAPPRAVENSTPCRRRSQPRAAAPPRRFTSAPPPLLPRTAEPLPPRAAAPPRRFASAPPPPPRIDEPPSXPPCPRASGPPPPSQERRRPRHFFYRCRKCSDACAWPDLDPDRYRG

SEQ ID NO: 127699 - protein, 60 aa, Oryza sativa
  Clone ID: PAT_MRT4530_30124C.1.pep
VFWQLINHRTCRVNQSQALSFHYFFLPFFLPRFILPFLNVLKSVNYMGGFLTNALPLSSC

SEQ ID NO: 127700 - protein, 98 aa, Oryza sativa
  unsure (1)..(98): unsure at all Xaa locations
  Clone ID: PAT_MRT4530_30125C.1.pep
MKVAPVGRGWRQWRRRSPPPRLLTAASSRRTAAPPRAVENSTPLPLQEKPDXRNKRRESRGERRGRRMGVLPPPLAATRRRTTSPLHLCTAAAAATHR

SEQ ID NO: 127701 - protein, 362 aa, Oryza sativa
  Clone ID: PAT_MRT4530_30126C.1.pep
MDPIGDPSPSSRRSVKRRPPARSPELSPKAWGGEAPELIRRLEELEEAAARLRGEKEAAEEAARELQAELDAERASAETATSEAMLMIERLQREKAAAQMEARQFRRYAEGREDREREVQEELASLSDLAASYHSRLQSHGIDPDSFSDDGEEEQHDEEDGEEVEQIDTAALQTDGSSGGDSIGGMQVKAMVDDDEEEQFTPVEKEFEYTVDVRCASSTTKVSGAVVVGEFMGEGNAAAGGLYARVEALEADRAAMRREIAALRAERAQLVMARAMARRLCREVVAEQKAKKVAASPRSFSVLGVCKKLTVLYLFAAVGALDNLLEKQKFHSQVYLRSVNYVPWLPTAARQIHHVESLASSA

SEQ ID NO: 127702 - protein, 74 aa, Oryza sativa
  unsure (1)..(74): unsure at all Xaa locations
  Clone ID: PAT_MRT4530_30127C.1.pep
ERDRAARDIRTPAPTDMVIIPKGAGGLTGLSTAXERHVKLLRYLLYVAKXCSKHAGLAEGSRIVIDDGPKVCQS

SEQ ID NO: 127703 - protein, 140 aa, Oryza sativa
  Clone ID: PAT_MRT4530_30128C.1.pep
MAAYCDGGGGRGDPSGGGGGGGVGAPPYRPAAGSVWSLPGMTPRPPGPPPKYQQPGHQPAVVYRAPSAKEVEQKLFVSETALAPPAAAASASAGEAPVSKKGLAHPTRRPGFGTAGNEVMIRANRFLVNVADNNHYSRTS

SEQ ID NO: 127704 - protein, 68 aa, Oryza sativa
  Clone ID: PAT_MRT4530_30129C.1.pep
ETWINKGASKHLGQGGQKQQHTFSTHQKQRTANPPRRKPRHKTTTRWPTCWRPQRGKPPGDRRHPWRR

SEQ ID NO: 127705 - protein, 70 aa, Oryza sativa
  Clone ID: PAT_MRT4530_3012C.1.pep
KMDCYYFRRVYNQWFNSQLPTPHQFVFKSPCSDLYYTKTICLICYLPDKGQMAHIIKLLSILHGGTKYAR

SEQ ID NO: 127706 - protein, 167 aa, Oryza sativa
  Clone ID: PAT_MRT4530_30130C.1.pep
MTMTVAMPSSSSSRRGGLRGPRPLPLKVSSSSSRGSSPSSSASKGASKKSAAAPVIVYEHTPKVVHARPQEFMTVVQRLTGKPPAAPPVMMPAYDAPAMVEQGAAAACGAGGDPLLLTLGQRQAAASAPAQPPAVPSPMMAAGMLLSPGFVFSPNTMQSIQELSPLF

SEQ ID NO: 127707 - protein, 82 aa, Oryza sativa
  unsure (1)..(82): unsure at all Xaa locations
  Clone ID: PAT_MRT4530_30131C.1.pep
APLDGSRPFFQEFKDEILWVAGQIYKGGISLFVIETQNKFVSPGFSKEIARVAQGXYYFLPNGLDAVISPAPKNALLDLKSL

SEQ ID NO: 127708 - protein, 1022 aa, Oryza sativa
  Clone ID: PAT_MRT4530_30132C.1.pep
MTRYKLLFMTLLLLLLHTQLVVPSSSATSATYTNHTGVPPSAVPCMPDQASALLRLKRSFSITNKSVIALRSWNAGEDCCRWEGVRCGGGGTAAAGGRVTWLDLGDRGLKSGHLDQVIFKLNSLEYLNLAGNDFNLSEIPFTGFERLSMLTHLNLSSSNFAGQVPVHSIGQLTNLISLDLSFRFKVTELFDMGYLYTGAYSHEWQLVLPNLTALVANLSNLEELRLGFLDLSHQEADWCNALGMYTQNLRVLSLPFCWLSSPICGSLSNLRSLSVIDMQFSGLTGRFPDFFANLSSLSVLQLSFNHLEGWVPPLIFQKKKLVAIDLHRNVGLSGTLPDFPVDSSLEILLVGHTNFSGTIPSFISNLKSLKKLGLDASGFSGELPSIIGTLRHLNSLQISGLEVVESFPKWITNLTSLEVLEFSNCGLHGTIPSSIADLTKLTKLALYACNLFGEIPRHIFNLTQLDTIFLHSNSFTGTVELASFLTLPNLFDLNLSHNKLTVINGESNSSLTSFPNIGYLGLSSCNMTRFPNILKHLNKNEVNGIDLSHNHIQGAIPHWAWENWKDAQFFFLNLSHNEFTRVGHTIFPFGVEMLDLSFNKFEGPIPLPQNSGTVLDYSNNRFSSIPPNISTQLRDTAYFKASRNNISGDIPTSFCSNKLQFLDLSFNFFSGSIPPCLIEVAGALQVLNLKQNQLHGELPHYFNESCTLEALDFSDNRIEGNLPRSIASCRKLEVLDIQNNHIADYFPCWMSAFPRLQVLVLKSNKFFGQVAPSVGEDSSCEFPSLCILDLASNKFSGTLSEEWFTRLKSMMIDSVNGTSVMEYKGDKKRVYQVTTVLTYKGSTMRIDKILRTFVFIDVSNNAFHGSVPKAIGELVLLNTLNMSHNSLTGPVPTQLSHLNQMEALDLSSNELSGVILQELASLHFLTTLNLSYNRLVGRIPESTQFSTFLNNSFLGNDGLCGPPLSKGCDNMTLNVTLSDRKSIDIVLFLFSGLGFGLGFAIAIVIAWGVPIRKWSLLGQRVP

SEQ ID NO: 127709 - protein, 240 aa, Oryza sativa
  unsure (1)..(240): unsure at all Xaa locations
  Clone ID: PAT_MRT4530_30133C.1.pep
AASSAADWCLCLYGWLVTPPLLGIYVFTTGLPSPPTTGVSACTAGLLCRRCWASTSPPPACRLAFAVDDWCLRLHGWLIMPPLMGVFISTXRLAFPADDWCLRLHGXRIMPSLLSVYVFTXRLVFAADXLVSSHGWPILPPLLGVFVFIDRLAFAAADWCLRLHGWPIMPPLLGVFVFTXTGLPSPPPTGVFAASCLRCRRLVSPPAPLAYYDAVVGCLHLHRPATSYDASWRYRLHGWP

SEQ ID NO: 127710 - protein, 123 aa, Oryza sativa
  unsure (1)..(123): unsure at all Xaa locations
  Clone ID: PAT_MRT4530_30134C.1.pep
YVSTTGLPSSLTTSVSACTAGVLCRRCWASTSSXTGLPLPSTTGVSXTAGLFCRRCWASSSSSTGLPSPPPTGVXPPAAFAVDDWYLRLHRWPIMTPLLDAYIFTDRPPRMMPAGAIVFTAGH

SEQ ID NO: 127711 - protein, 393 aa, Oryza sativa
  unsure (1)..(393): unsure at all Xaa locations
  Clone ID: PAT_MRT4530_30135C.1.pep
MTMPWSYEPRIDPFKSPNLLSFWRFSKRGSRSSPKTGYKQKYTDGGGRSRGSMDISRTNEGYTSCGPVVEMSWHRAGVLLLGAQSCLPVPVVPAXRGWVGIDQSEHHHRLAVIAADWCPRLYGWVVTPPLLGIVVFTDRLLHLPPTAYYAVVVERLRLHHRLVFAADDSCLHLHGWPIMPPLLGIYVFTTGLPSLPPTGVSAYTAGLFCRRCWASSSSSTGLPSPPPTGVSAYTAGLLCRRCWASSSSPTGLPSPPPTGVFAYTAGLLCRRYWASMSSPPAAFAVDDWYLRLHRWPIMTPLLDAYIFTDRPPRMMPAGAIVFTAGHVAATANRHQHLQRTSSSSLLAALSDADWLIRLHSYVSSSTLTGVIVITSLPLPPPMVSRLYVQLFLN

SEQ ID NO: 127712 - protein, 398 aa, Oryza sativa
  Clone ID: PAT_MRT4530_30136C.1.pep
MTFPDEIIANILTRLPPKELVRARVVCKQWHALTSEHLFMHTNLLRTNAGHPVIAGFFLNDEIHETFSYNPLLRGYSSPDLSFIPTTADTANSETYVTSSCHGLLLCRRRRRIDGELGVYRARHYVCNPETMEFFEVDVPAGAGGAGQYLNLAYDPLKSRHQYRIVARGHDGIRVYSSRTRSWRTAVRYDGRCRRSPFAGLRHPRGVFWNGSLVWAMLSPRLLRFAIDSGELSEMPLPPRLRSEGWFHAGWVYAYVGESGGRLQVIGYTDEERRAACFDVLEMRDDEEGEWTVLYRVDLTRVKELYDPGDDDGARVARVTLEHFSWGGAPLHVVRGPGEAGRHGVLFFSVPGKIACYDAESRAVSVVWQDTATTSSPKHLLSYTWFNFYAYTPSFLRL

SEQ ID NO: 127713 - protein, 426 aa, Oryza sativa
  unsure (1)..(426): unsure at all Xaa locations
  Clone ID: PAT_MRT4530_30137C.1.pep
LFQLSFYGAAFTWFISLAPNSIQDWFQLQQKIHDYFFSFFXNFYSGNIKLNLMHITSVKQKYNESVLEYIRKFRYTRNQCYSLTLSNKDLVYLTYSGLLXVFKENLDGHSFLDVSQLLQKSLAQESRVREAKISQKVRSNRPXVNTVNEVKSSDDEXDRYIYAAEWAWSSKSKPFVCSTLKPIGHNNXQEEVKFKFDVAKCDRIFDYVLENKQIKLSXGYVRPSLDELKWRAYCKWHNAYSHATNDCSAFCRQVQSIINERRLVYRKMQVDESCFHIHNTEFQEDKIPNDKEKATSKTSMLGGQDDKTEIPKDDKXSRRSSSPTKRDGRRARTDPDRARGGGPCRRETHSPRRPTTAVWGSVKKLLFGYSHRHGTXRPRAVSVLPSLPPTRYPLPLASPRIISLSRLSSPTPSRSSILAELVVSVE

SEQ ID NO: 127714 - protein, 128 aa, Oryza sativa
  unsure (1)..(128): unsure at all Xaa locations
  Clone ID: PAT_MRT4530_30138C.1.pep
MVTGKAYLLSDDLWDIRIRVHSLRVLLRDXVTHGIKGAPPEGSRSSNLNTNTTXTIVYEPEDAKPTRREISSKPSRQGSRRSSYQRIPIPYSSGLRVSPVDMYQIPSIYNPITPLCSLQLNLYIKISH

SEQ ID NO: 127715 - protein, 60 aa, Oryza sativa
  Clone ID: PAT_MRT4530_30139C.1.pep
FTTPFFIDQGKNLHKNTPFRDRNYLFFKTCTLKNGGHTNSNIYSGHVRSFTGPGTQTQTF

SEQ ID NO: 127716 - protein, 126 aa, Oryza sativa
  unsure (1)..(126): unsure at all Xaa locations
  Clone ID: PAT_MRT4530_3013C.1.pep
HPGSTATTETATGAEEGGGAARVDGVDGAPAXRDRNEEVDEVGEDAANPKEPAPRWKVVRVDDGGGPELGGDGGKRERRRELDSGGERGGXVAETVVGSSGRVYIGLGVKEGGRKRGNGRGRPGRH

SEQ ID NO: 127717 - protein, 52 aa, Oryza sativa
  unsure (1)..(52): unsure at all Xaa locations
  Clone ID: PAT_MRT4530_30140C.1.pep
LPFFSAHKFSYNRSCXXMPCCALLYLSDNNDCNIFGSIFYNWFSRELIRLAA

SEQ ID NO: 127718 - protein, 104 aa, Oryza sativa
  Clone ID: PAT_MRT4530_30141C.1.pep
FKEYCFGLLPFGAGQRICTGLSWGLRMVPMTSPTLVHASDWQLPWDMAPRQLNLVEAFTLFQERAKPLVVHPGPRLLPSAGVIASLFASLIAFVKSYYGVCGIV

SEQ ID NO: 127719 - protein, 166 aa, Oryza sativa
  unsure (1)..(166): unsure at all Xaa locations
  Clone ID: PAT_MRT4530_30142C.1.pep
MLTVIFRRHTNAYITALEARVASLEKQLAMHAKHPESPDSMDNCGPVDEEAVPPTTDPSFSLAPVDSAPDEMDELTIPLDVSPSVRSESCVILAPPVISPSFPTMLSRSLRHCRRGIGVSKQHGQCLVSSNPQINSATSFXTIFWKWQNSWQYIVPRELFVRDFVR

SEQ ID NO: 127720 - protein, 134 aa, Oryza sativa
  unsure (1)..(134): unsure at all Xaa locations
  Clone ID: PAT_MRT4530_30143C.1.pep
TPXKKXGGVGXPPPPLGKKKNPPPKTFXWALXXGPKKEKFGKXLGGFLPAWALFLLPPVVLMLVLCNFGGIIGLTGCMFLLTDQICNLPLLLPQSVVWTLEAGKGWLLKNLTLQNLHCWKINFNSENEKNIQFT

SEQ ID NO: 127721 - protein, 100 aa, Oryza sativa
  unsure (1)..(100): unsure at all Xaa locations
  Clone ID: PAT_MRT4530_30144C.1.pep
PLKAGQALKDMGFSSADSRVCPLVTMGLEPGQVLTVRNIGNMVPAYCKNKHAGVGSDIEYAVCALKDELIGVIGHNRXRGMNALLSLKDGAPDCFHLVED

SEQ ID NO: 127722 - protein, 106 aa, Oryza sativa
  Clone ID: PAT_MRT4530_30145C.1.pep
MTTGNLNSNIRICLTKTPCILKHPCTGAWMLRQRTSTKAASHCPTRGKRASKDSDLISAVLDNQNPLNHGQTKAPLSTIIVARGSTFVARRNFPFKKTRKKNMYAL

SEQ ID NO: 127723 - protein, 188 aa, Oryza sativa
  Clone ID: PAT_MRT4530_30146C.1.pep
MGESRNDYNKLQTPCLIFGMSDTSGECRVTKTRSIYTAADSELFLAVLPFLSEMPEQVVSTVEPFLSTIPEQKRKTHSRSRPMARTSQFKLLRTTVANGFKLSAVDTSLPLLPQINSSSSFHHERVKPQNGYTAKHESKQTIIRVTKPSKWGCACNLAVIERAAYGPEKALGLSEENGLLARWFEGLV

SEQ ID NO: 127724 - protein, 127 aa, Oryza sativa
  Clone ID: PAT_MRT4530_30147C.1.pep
MSSEGLASALSNTDGLIEAIGKFSENGFQSSRKLILLSGDFQNSPKMVFGISEMVEISLKSGDPPWHPKSTFLLLMPSVHLDDGWSAGTGRNHHWEAVTTERNLGLGQQLLGWNKVTEVPQINSEIF

SEQ ID NO: 127725 - protein, 98 aa, Oryza sativa
  Clone ID: PAT_MRT4530_30148C.1.pep
KGQSKDIVTVFLKDFLLLVSSGGLVQLIPQLSKPPRIPHFTGVLAPMTRTVTWNTQYLGNTLGRDDCTTGGRADKRTPWVPGRSKSLRPCRRMTRTPP

SEQ ID NO: 127726 - protein, 41 aa, Oryza sativa
  Clone ID: PAT_MRT4530_30149C.1.pep
TSGCILCEGSVDADNPFNVKAYHGFRIKCHIMMRFCDRLPV

SEQ ID NO: 127727 - protein, 115 aa, Oryza sativa
  Clone ID: PAT_MRT4530_3014C.1.pep
GRREARRTRDNENHSRRHISSRRHDNEHQGGRSSEDRDRDNRHNRHDHDDRERRLLGDTGRGRRNNDDDDGDRRRDNSGRRRHDSREPGRRPRNHTPEPSDPSSSSSLSRPKTTL

SEQ ID NO: 127728 - protein, 74 aa, Oryza sativa
  Clone ID: PAT_MRT4530_30150C.1.pep
RDWTNVAKKGQVDNRKNKFAAAHSGVETLCADESPNDFEQCSKKAHDQFLADLASILPSNTTPLIVSDAGFKVP

SEQ ID NO: 127729 - protein, 134 aa, Oryza sativa
  Clone ID: PAT_MRT4530_30151C.1.pep
MTGTAVAHGWSDGDDGGSRLHGARALPTARDESKGGGGSRRHRGSFYRGKEAAAKAHGDRRREGKLGLGERETDPTRPRNQHFPNDFSRGFQKRKGRRDPEDHFPSIDFTGNGKTRPNLEGDGGARVSDGGGQR

SEQ ID NO: 127730 - protein, 105 aa, Oryza sativa
  Clone ID: PAT_MRT4530_30152C.1.pep
MEDVEPLAPGHLLVGGGVEMAAGRHHGSHCRPRQIHRAVAKFVRVGWTGGQIHAEGGSGGGGGAVAPPARLPRHAPAAMPRAHSHASRPPALGRLLVSVGAVRGR

SEQ ID NO: 127731 - protein, 103 aa, Oryza sativa
  Clone ID: PAT_MRT4530_30153C.1.pep
SSVLPFPLIRLSHSCITFPLGLRGPDDEHPDMPSPSSAPYRRQPPPPPRAAARRRPSPARSALDRAGRPAGWHRTPTRRRRGFPHPSAVSPSGSDYVVAPLVP

SEQ ID NO: 127732 - protein, 62 aa, Oryza sativa
  Clone ID: PAT_MRT4530_30154C.1.pep
MFCISVRAIIPVYIENAKPHLYSGAASKSVTLNPSNNRSSSSYKEAANVSHVCSVRLQDEFP

SEQ ID NO: 127733 - protein, 254 aa, Oryza sativa
  Clone ID: PAT_MRT4530_30155C.1.pep
MSYGSSSSGGRGGRRVEYGRTYVVRPKGRHQATIVWLHALGDNGASWSQLLDSLPLPNIKWICPTAPTRPVAAFGGFPCTAWFDVEDTSVDGRDDIEGLDASAAHVANLLSSEPSDVKLGIGGFSMGAAAALHSAACYAHGRFTNGVAYPVTLSAVIGLSGWLPCSRTLKSKMDSSQTALRRAGALPILLSHGRADEVVTYRNGEKSADFLRGSGFQYLNFKPYNGLGHYTIPEEMDDVCKWLSSRLGLDRSRG

SEQ ID NO: 127734 - protein, 436 aa, Oryza sativa
  Clone ID: PAT_MRT4530_30156C.1.pep
MADSHETDKNIEIWKVKKLIKGLDAARGNGTSMISLIMPPRDQVSRVTKMLGDEYGTASNIKSRVNRQSVLAAITSAQQRLKLYNRVPPNGLVLYTGTIVTDEGKEKKVTVDFEPFRPINASLYLCDNKFHTEALNELLESDDKFGFIIMDGNGTLFGTLSGNSREVLHKFSVDLPKKHGRGGQSALRFARLRMEKRHNYVRKTAELATQFFINPATSQPNVSGLIIAGSADFKTELSQSDMFDQRLQAKILKVVDVSYGGENGFNQAIEISAEELSNVKFIQEKKLIGKYFEEISQDTGKYVFSVDDTMSALEMGAVETLIVWENLDINRYVLKNSVTGETTVKHLNKAQETDQSNFRDKATSAELEVIEKTLLLEWFAENYRQFGCSLEFVTNKSQEGSQFVRGFGGIGGILRYQVEINAYEDLSDEEYDEDYE

SEQ ID NO: 127735 - protein, 230 aa, Oryza sativa
  Clone ID: PAT_MRT4530_30157C.1.pep
LVLGGDDGKECTYGGGYLKRQAVFSCLTCVPAGVAGVCTACSLACHDGHEVVELWTKRKFRCDCGNSKFGSHVCKLCPEKDPENPVNSYNHNFKGSYCTCGRPYPDPEAEKQVEMIQCCICEDWFHEDHIGLNSIEEIPRDEEGEPLYEDFICPKCSPKCYFLKLYPDTIWASNKQSSAPQAETTNSTVMNGNSSLGDIEKSENGALINHLNCEKTSDNENCPKDSVAPD

SEQ ID NO: 127736 - protein, 130 aa, Oryza sativa
  Clone ID: PAT_MRT4530_30158C.1.pep
WWTCGASCCTGRWWRSSTSASSSTPLAPSTTSASPTLLLLLSLALPTTAGEATPRSTTSTTTSRPPPPPRGPHGWWPAGEPACRSFPCHPRAAPLPAARAPPLPPPPRRPSLRRRSPAAGRRDLRCTFSN

SEQ ID NO: 127737 - protein, 477 aa, Oryza sativa
  Clone ID: PAT_MRT4530_30159C.1.pep
MAGEGSGGEGGAGAFEDEAEPTVTIGEYIEGIEAEELEADLVLGGDDGKECTYGGGYLKRQAVFSCLTCVPAGVAGVCTACSLACHDGHELGLVSMFIWVRRMSATRVILGVALAVAKLSIAIFCIKYLYDWVMRTQLMLGWFFLLKVVELWTKRKFRCDCGNSKFGSHVCKLCPEKDPENPVNSYNHNFKGSYCTCGRPYPDPEAEKQVEMIQCCICEDWFHEDHIGLNSIEEIPRDEEGEPLYEDFICPKCSPKCYFLKLYPDTIWASNKQSSAPQAETTNSTVMNGNSSLGDIEKSENGALINHLNCEKTSDNENCPKDSVAPEKASLDDSSDGKCKLGMNICSNTPSADSEKKMPFFMSKSWREVICRCETCTDFYAQQGVAYLIDKEDSIEEYEKVAKQKREKKLEQQEGVEANFLNSLDHVQKIEILSGINDMKNELQSFLETFDSSKPVTSEDIRAVFENLAKKKKQRLS

SEQ ID NO: 127738 - protein, 577 aa, Oryza sativa
  Clone ID: PAT_MRT4530_3015C.1.pep
MASLVLSLRIAPSTPPLGLGGGRFRGRRGAVACRAATFQQLDAVAVREEESKFKAGAAEGCNILPLKRCIFSDHLTPVLAYRCLVREDDREAPSFLFESVEQGSEGTNVGRYSVVGAQPAMEIVAKANHVTVMDHKMKSRREQFAPDPMKIPRSIMEQWNPQIVEGLPDAFCGGWVGFFSYDTVRYVETKKLPFSNAPEDDRNLPDIHLGLYNDIVVFDHVEKKTHVIHWVRVDCHESVDEAYEDGKNQLEALLSRLHSVNVPTLTAGSVKLNVGQFGSALQKSSMSREDYKKAVVQAKEHILAGDIFQVVLSQRFERRTFADPFEVYRALRIVNPSPYMAYLQARGCILVASSPEILTRVEKRTIVNRPLAGTIRRGKSKAEDKVLEQLLLSDGKQCAEHIMLVDLGRNDVGKVSKPGSVKVEKLMNVERYSHVMHISSTVTGELRDDLTCWDALRAALPVGTVSGAPKVRAMELIDQMEGKMRGPYSGGFGGVSFRGDMDIALALRTIVFPTGSRFDTMYSYTDKNARQEWVAHLQAGAGIVADSKPDDEHQECLNKAAGLARAIDLAESTFVDE

SEQ ID NO: 127739 - protein, 66 aa, Oryza sativa
  Clone ID: PAT_MRT4530_30160C.1.pep
KNENRNNTSKTVISNAKIKKTGDILYVQQNASIKSTKNSIKKPLYKILQKTTKNRTRPKQISPEFA

SEQ ID NO: 127740 - protein, 514 aa, Oryza sativa
  Clone ID: PAT_MRT4530_30161C.1.pep
MLRAAARALTVSSLNPKVLALADHHLGGLVARRAQLVTVTVNILIVERKKILQADTSMQQELDANPASHPFSEVLALCNHPHLLDRSEASFMFSSDAITRAREIVGFIPGKTTGGYSHCQANSIVSEFRANADKYGNELSSNLTIFDRGIEGLRDAIAAGIASRDGLPSYSEDIFLTDGAAAPVHMMMHLLIRGKKDGILCPIPSHSLYTDSMVLRGATLVPYYLDESRGWSVNISDLKKQLDGARAKGIDVRGLVVVNPGNPTGQVLVEENQCEIVELCKNECLVLLADEVYQENIYTDQKKFNSFKKVARSIGYGEGDISLVSFHSVSNGYYGECGRRGGYMEVTGFSSEVRGEVYKVASLSACSNISGQILMSLVMNPPKVGDESYPSYRAERDSILSSLSCCAEAMVSTFNSMEGMTCNKAEGGISVFPSVRLPPRAIEAAEAMNTEPDVFYALRLLESTGIVVVPGSVFGQVPGTWHFRCTILPQEEKTRQIISRFNVFHEAFMEEFRS

SEQ ID NO: 127741 - protein, 148 aa, Oryza sativa
  unsure (1)..(148): unsure at all Xaa locations
  Clone ID: PAT_MRT4530_30162C.1.pep
SLVISLSLSLLVLLLISHRTRXSSSSXSSSSXISRHRHTSSCVSPRLSVTSSSSFSAAPHYRRMFLFILALAPHVVSXXPHTLSLSARLXQSKXIMSQLGLCVCVRPWVPXRTSRRSSSSFSRRYRRHXPPFXSCIRVVALLAILSFR

SEQ ID NO: 127742 - protein, 60 aa, Oryza sativa
  Clone ID: PAT_MRT4530_30163C.1.pep
QAMGTPGPGEFNKSSRLNTTGKNLNALVELTQGRGEAYTSSNAKSTDQARVLNDNNSDQH

SEQ ID NO: 127743 - protein, 233 aa, Oryza sativa
  unsure (1)..(233): unsure at all Xaa locations
  Clone ID: PAT_MRT4530_30164C.1.pep
MSEGFDGTESGGGGGGVGKEQDRFLSMANIGRIMRRAVPETITNISPAATCASLPSSASFTFYVGRYVTVYPYQDPHISLRIGISSGWVVNFIKTSVNQPKTPRNGQRKVQGVHQLKARPGGLGPDFICNRIKYQQALAKVTKDKECIARHYNKKVVPKSFSEGELVWKLILPIETRDNKFGKWSPNWEGPFQIHKVVSKGAYMLQGFDGEVYGRALNGKYLKKYYXSVWVNA

SEQ ID NO: 127744 - protein, 46 aa, Oryza sativa
  unsure (1)..(46): unsure at all Xaa locations
  Clone ID: PAT_MRT4530_30165C.1.pep
WSFRGTVRTTRVNCVLIPRVHCRVQXVVVPKGVKEYKFXRGTAAFT

SEQ ID NO: 127745 - protein, 49 aa, Oryza sativa
  Clone ID: PAT_MRT4530_30166C.1.pep
HSDHSCDKIDRQTRLLLWPRKHLASLDASASTNIGTHHIRSHHGTKKPH

SEQ ID NO: 127746 - protein, 129 aa, Oryza sativa
  Clone ID: PAT_MRT4530_30167C.1.pep
MAVDLPSPCVQALPAPAPKLRPRPRPRAVAASEHRRARTRESPPRPRPSSASARSRDSPPAPERLPPAPELATTHSVEGERELEEEEKGAGAPVVCGGVNRGDGSRRWLGRRRAGGGGEGTGGETENGR

SEQ ID NO: 127747 - protein, 365 aa, Oryza sativa
  Clone ID: PAT_MRT4530_30168C.1.pep
MAATSLLSLPSLRLTHRLLVPASSSAPASRSQFQTLAAKKAAVATGTGEGGGGGRGAGGGLLSVLDRAMADEEEYRRARAQVHRKGVEVEGYAIEGVSVGGHETCVTVPSLNVAFDIGRGPLFAVSQDYLFITHAHLDHIGGLPMYIATRGLYNLKPPVVFVPPCIKDDVEDLLQIHRRMSQVDLKVELVALDLGETFEIRNDLVARPFETHHAIPSQGYVIYSVRRKLKKQYAHLKGNQIMKMKQSGAEITDTILYPEVAFTGDTKSDFILDPRNADALRAKVLITEATFLDDQIDVDHAREHGHMHLSEIMEHSQWFRNKAIVLTHFSNRYSLEDIRQAVSKLQSKLSSKVVALTEGFKSDYR

SEQ ID NO: 127748 - protein, 161 aa, Oryza sativa
  unsure (1)..(161): unsure at all Xaa locations
  Clone ID: PAT_MRT4530_30169C.1.pep
NPLDCVRRRRRRRRRRRSHGWATAWLNILPXKRWNVYNFDNREKVRRDEAEAAREEQLQREADRRRESGLRLAALRRNRXLQSADAVPLSPRPPTYAADPADPSPAADDFDXGHINLFSGVPCVSGGAADFLSLAYADGGRGAAREREPSANPNPKKRKRK

SEQ ID NO: 127749 - protein, 101 aa, Oryza sativa
  Clone ID: PAT_MRT4530_3016C.1.pep
MRPRRSSAARRLGRSAIPTTSGDAASLQPLALHSIHASRRAGLRRSPPPPSPSLALLSFSTPPHLRWASAGRRPSDEGGDLVEKIKIEKSEDALFPHGRYS

SEQ ID NO: 127750 - protein, 250 aa, Oryza sativa
  Clone ID: PAT_MRT4530_30170C.1.pep
MGGHGGLNILPQKRWNVYNFDNREKVRRDEAEAAREEQLQREAVRRRDSDLRLAALRRNRGLQSADAAPLPPRPPTYAAEQCPADPADPSPAADDSDGGHINLFSARGGGGGATDFAVLASADGGRGAAREREPPANPNPKKRKRKEEEVRAVGPDEEKYRLGYGLAGKGVAAPWYMSKPSASSSMERKDREAGEGSVGKKNGGKKSIEELREERRKREAKEKERERALLGVPSRKEKYSERGRSSRWAR

SEQ ID NO: 127751 - protein, 104 aa, Oryza sativa
  unsure (1)..(104): unsure at all Xaa locations
  Clone ID: PAT_MRT4530_30171C.1.pep
PHIQPGYFLHRWFQWGANILLGNLHHIILCNDAKNCVYHTSSQXSYTNHMYNLLQFTLIINNTPEQNPDLYNHYKINVLYYDDKSFTVNRTHTSTCLYFQPQTI

SEQ ID NO: 127752 - protein, 57 aa, Oryza sativa
  unsure (1)..(57): unsure at all Xaa locations
  Clone ID: PAT_MRT4530_30172C.1.pep
CIRKRPXYDYDFESPXDLTSISAISAKRNRYQRAKSVMLAEMEAHGPDGYYTNGGAH

SEQ ID NO: 127753 - protein, 50 aa, Oryza sativa
  unsure (1)..(50): unsure at all Xaa locations
  Clone ID: PAT_MRT4530_30173C.1.pep
FWGGGDLFFIWTXVGFFAVQLKSLQFKKVFEADVSATFYPYTAFYTTGAA

SEQ ID NO: 127754 - protein, 102 aa, Oryza sativa
  unsure (1)..(102): unsure at all Xaa locations
  Clone ID: PAT_MRT4530_30174C.1.pep
EPAGERARSGPARGPREIPCKHRFHDRCIXCPVCRYQLPTDDEPTSRQRRRSAEGGDELIGNARGGGGDGDGDGGSSGRRRWLSWPFGGLFSHRSSRRSSSS

SEQ ID NO: 127755 - protein, 68 aa, Oryza sativa
  Clone ID: PAT_MRT4530_30175C.1.pep
TMPTKRLEHNTISLASSSKHQPKYKVHLQRNPPIYAYTQLPARQTKPYNYTPHPPTLPAPPTHTHTIA

SEQ ID NO: 127756 - protein, 165 aa, Oryza sativa
  unsure (1)..(165): unsure at all Xaa locations
  Clone ID: PAT_MRT4530_30176C.1.pep
YNFSVIIFKEKVRITTPNYRGCPNYPPEPQNRTFFTSNYANRTNYPPRTNSERFCPTWRTRGNPXARGDGVGAARTATAEAVASAEAARVGRRAAGLGGRGGERRRELALLVEEARRRRRGAAEEAAALEGRRGGGQRVRGEDGGKGAGRGEGEGAEGKYREGRE

SEQ ID NO: 127757 - protein, 92 aa, Oryza sativa
  Clone ID: PAT_MRT4530_30177C.1.pep
FFFFFFLNQKKGSICAQGLFQPDCGPNKGSNHQHCTTHLGTNSFYIHHTVHCAHTTVAAPSLHKFFIDCHTQTQARRASHTLQVTPVWVTHV

SEQ ID NO: 127758 - protein, 136 aa, Oryza sativa
  Clone ID: PAT_MRT4530_30178C.1.pep
MEEEMVAVVMSCECCGLEEECTGEYVGGVRAYFGGRWLCGLCSEAVKYEAGKSSPRAPVDVEEAVRAHMAFCRMLKRGGPAERVAEGMCQMLRTASWKQRRRASGSSSSSSSPSPRAAPERHHHHRAPSTLSVQLI

SEQ ID NO: 127759 - protein, 44 aa, Oryza sativa
  Clone ID: PAT_MRT4530_30179C.1.pep
ENVLKKKYCPRFIPLPTYDPLVPANFSRGVITVESEVYGYLFPS

SEQ ID NO: 127760 - protein, 68 aa, Oryza sativa
  Clone ID: PAT_MRT4530_3017C.1.pep
MINLGRPLDYANILNKWMYSVPIKTSNSINIIHFNECKRRYPESGCAQVACNTEKATYMHVMSSVSPI

SEQ ID NO: 127761 - protein, 68 aa, Oryza sativa
  Clone ID: PAT_MRT4530_30180C.1.pep
MALGGEDEGVFEISGWEEEEVGGEIWVSDAVPRAKACPGDLRGPFGCSRHIIEWLEDDGRRAPEKPWP

SEQ ID NO: 127762 - protein, 126 aa, Oryza sativa
  Clone ID: PAT_MRT4530_30181C.1.pep
MSRVCVTGAAGYIATWLVKKLLGRGCVVHATLRDLGDEKKTALLRRMPGAAERLVLFEADMYDAATFEPAIAGCEFVFLIATPLQHDPSSTKYAGTDGMRPRFLGQLVTVHASNHVTSMKYLHEQS

SEQ ID NO: 127763 - protein, 143 aa, Oryza sativa
  unsure (1)..(143): unsure at all Xaa locations
  Clone ID: PAT_MRT4530_30182C.1.pep
LGPVFSKGGCFLCGSPSIPPPLXLAPLRVSPGVLLGLGGPSQGRVAIPAPPGVLLGVSDGAVLWAQGFFGPPALLPKGFGVSHEGFFPPSLFSLPFPPSLADFFCPIFFRLLGFPIWDSFFPSFPLLPVLFFPRELANKTSPA

SEQ ID NO: 127764 - protein, 143 aa, Oryza sativa
  Clone ID: PAT_MRT4530_30183C.1.pep
MRGSRMSLVGAAMLAQLYVVASFQGASGATSDGPPSSSGARTPTSGGSPGGSGTRSSAASTSSARAGSTPAGVRGSPAGAGGSPGGGSGSTPVGGGRSFAGGGSADDGDDGTGISSSGGRMLSRSYDVEHFFIYFMLVVLAAF

SEQ ID NO: 127765 - protein, 44 aa, Oryza sativa
  unsure (1)..(44): unsure at all Xaa locations
  Clone ID: PAT_MRT4530_30184C.1.pep
KNTQEGVKCIQQSLILLVVIRLRIIQDGVAYKALCMDGXKNVSH

SEQ ID NO: 127766 - protein, 68 aa, Oryza sativa
  Clone ID: PAT_MRT4530_30185C.1.pep
VFLFSLPLAIPLLSLSLRCSQRSSGLPPVVSPRMLAAAHRTAAPSICELYPYIILILLLRWGIERNSF

SEQ ID NO: 127767 - protein, 62 aa, Oryza sativa
  Clone ID: PAT_MRT4530_30186C.1.pep
PQSEWVISEIGKQPICVYIVLSEVLGRLASQIAVVLQGKDKPTYAPHVENRDMCDVLNAKDN

SEQ ID NO: 127768 - protein, 202 aa, Oryza sativa
  unsure (1)..(202): unsure at all Xaa locations
  Clone ID: PAT_MRT4530_30187C.1.pep
SLSLPSLGHPETRPPVAVVLPWLAAAVRRRLPPRRPPSCRRLRVAFAPSPPPPDAVAGNAXRAHAVAITAAGRPALSQAEPGRRRPSDRPRGRSRPFXTRDWTRDCLAMLSSTSAQLGSTQSCSIFPNPRVRVCVRCRFLXGVGFVRAVKDACGVVFPLQFXSRLSSCFLSFFXRCIYNCIREFLGVTSIRLNSKSNLSSIA

SEQ ID NO: 127769 - protein, 185 aa, Oryza sativa
  unsure (1)..(185): unsure at all Xaa locations
  Clone ID: PAT_MRT4530_30188C.1.pep
SLSLPSLGHPETRPPVAVVLPWLAVDVRRSLPLRRPPSRRRLRVAFAPXRPPPVAVAGNAFARAXAVVFAAAGRPSLSQAEPGRRRPSDRPQGRSGPSVLWTGGGPPAWSRSAVNRPXLSRXPVGPACRRPFPPSPEPLTGVGFVRAVEDACGVVFPLQFXSRLSSCCLSFFRCIYNSIREFLGV

SEQ ID NO: 127770 - protein, 119 aa, Oryza sativa
  Clone ID: PAT_MRT4530_30189C.1.pep
MSSSVVVSASGSGSGGGGGGGGGGAGGGGGGGPCGACKFLRRKCVQGCIFAPYFDSEAGAAHFAAVHKVFGASNVSKLLQQIPAHRRLDAVVTICYEAQARLRDPVYGCVAHIFHLQHQ

SEQ ID NO: 127771 - protein, 96 aa, Oryza sativa
  Clone ID: PAT_MRT4530_3018C.1.pep
MATDEEVGRGGSDGGFLPTVVVAAAWPAATETVVVLRSASPLLIVIRSKPSPASSTPPSLAVALRVEGRGWEKGEGSRPTQSRNSGRDMQHDGGDD

SEQ ID NO: 127772 - protein, 126 aa, Oryza sativa
  Clone ID: PAT_MRT4530_30190C.1.pep
MERGCNGNGGGGGGVKVTFIETQFVTSDAAGFKSLVQRLTGNDAAVPAAPPQRPRPCRADGWRGAGGASATVVKREAVPPPVAPWVDEMMMLYETCDLAEMLRVDVVGASGGGRCHGGGGYGGFPC

SEQ ID NO: 127773 - protein, 97 aa, Oryza sativa
  Clone ID: PAT_MRT4530_30191C.1.pep
YLTSGLNVRISRLVFITTFTFHQKNPVFVSLYLLFYIWSCNSEWPASPPPAPGAPTTGGRPLSSHATLLGTLLVKGVLSPTSRAICLGAGQEALALR

SEQ ID NO: 127774 - protein, 47 aa, Oryza sativa
  Clone ID: PAT_MRT4530_30192C.1.pep
MEMQIDWHMKPEGGTKQPEAESSVSWGTCQIELSSDAPLGGTNHCAA

SEQ ID NO: 127775 - protein, 164 aa, Oryza sativa
  Clone ID: PAT_MRT4530_30193C.1.pep
MNLIFEDTRFSGSSLQVMGTIPQDGEWSIIGGTGEFVAAQGIVEHNVIQEAGGAWTYELKIHAFYTPMQSSGPSSRLPPPPAVSCERRWNHAGLLCTAAPVRTSEVFRVAPEAPAAGKRVDAGREGELNKRGRRRVLPPAEGNVMHKRRRQKESLSPPPLNCDG

SEQ ID NO: 127776 - protein, 41 aa, Oryza sativa
  Clone ID: PAT_MRT4530_30194C.1.pep
MENARNPKSASHHRLQVGSGALRLESQKWNEKDAPQTLLPA

SEQ ID NO: 127777 - protein, 67 aa, Oryza sativa
  unsure (1)..(67): unsure at all Xaa locations
  Clone ID: PAT_MRT4530_30195C.1.pep
MATATEEDASAAADDNQAQPLSHPAMVDEANDAXDAPQPDEAPXAAEDHEKNADGQNEYEKAKKEKK

SEQ ID NO: 127778 - protein, 47 aa, Oryza sativa
  Clone ID: PAT_MRT4530_30196C.1.pep
EAQTNTRSPDRCLSQEKTVGRTIFFRVKAQYLPTNPKDASSYNIGIH

SEQ ID NO: 127779 - protein, 79 aa, Oryza sativa
  unsure (1)..(79): unsure at all Xaa locations
  Clone ID: PAT_MRT4530_30197C.1.pep
GRVGGKMRSNFLGTKFVVYNRQPPYNGGSLMSCXHGSRRISSRRVSPKLPTGSYPIAHVKYELNVLGTMGPMRILCTMH

SEQ ID NO: 127780 - protein, 64 aa, Oryza sativa
  Clone ID: PAT_MRT4530_30198C.1.pep
FTPPDLHILRLSHAGVPVVGVPLSVLKVLQGHLVPFPSMEDWSHRSSVCPCYSTLIPWSHRLIC

SEQ ID NO: 127781 - protein, 858 aa, Oryza sativa
  unsure (1)..(858): unsure at all Xaa locations
  Clone ID: PAT_MRT4530_30199C.1.pep
QQQRRPRRRNHGGGGQRRGPPQERPSAAPPPPPPQQQQRQQHAAPAPTRAAAPAPARVAATKAAAGGDGAVPQLVQEIQDKLARGAVECMICYDMVRRSAPVWSCGSCFSIFHLPCIRKWARSPASAADASDPDSSWRCPGCQSVHAVPARELAYTCFCGRRREPPNDLFLTPHSCGEPCSKPLEKADPAVKADDAAATRCPHVCVLQCHPGPCPPCKAFAPDRLCPCGKQTIVRRCADRTTPVTCGQRCDRLLPCRRHRCEKVCHTGPCGDCNVLISARCFCGKKTETLLCGEMELKGNLSEKDGVFSCSEACSHMLSCGNHACQDICHPGPCGECELMPGKVTACHCGKTRLLEKRASCLDPIPTCDKVCDKKLPCGVHRCKVTCHEGDCPPCVVRVEQRCRCGSSGQMVECYKVLEEEFRCNKPXCNQPCGKNRQCGMHACNRSCHPSPCDPXLQMEMLAQVLVVELHVDSAGGTANGDNMFEVSIIQKLPMPLQPVESDGRRVPLGQRKLSCDEDCAKMERKRVLAEAFDITPPNLDALHFGENSNASDLLSDLFRREPKWVMAIEERCKFLVLGKTRGNSSGNLKVHVFCHMTKDKRDAIRVIADRWKLSVQAAGWEPKRFITIHPTPKSKAPARILGSKPGVFVAASHPFFDPLVDMDPRLVVAMLDLPRDADVSALVLRFGGECELVWLNDKNAVAVFNDPARAATALRRLDYGSAYQGAAVFLPSSSAQPGNVWVAGQKDGVAATKSSANPWKKATASEPDPSSGDWTGVLGQAPGSVWRRGGDTVAQVMGTSNRWNALESDAATSSRPVEESKPAPRTDAVSSAGPSTAPPVSKMQPEVEVDDWEEACE

SEQ ID NO: 127782 - protein, 445 aa, Oryza sativa
  unsure (1)..(445): unsure at all Xaa locations
  Clone ID: PAT_MRT4530_3019C.1.pep
MGVHVFTDRLAFAATDCCLHLHGWPIMPSLLGVYDFTAGLPPSPPTGVLVYTVXLVTPPFMGVHVFTDRLAFAAADWCLRLHGWRIMPPLLGVYDFIAGLPLSPPTGVLAYTVGWSHHRPWASTSSXPACLRCRRLVSPPIRLAYYTAVVGRLRLHHQLAFAAVDWCPRLHSWLVTPPLMGIYLPTSLVASAAYTEWISQXSPPACRRRRRLVSSPIRLGGHTAIVGRRCLHXRPLTGVFAYTVGLAYYAAVVGRPRLHRPAASSVADWCFRLYDWLVTPPLLSVYVFTTGLPSPPPTGVFACTAGLLCRRCWVSTSSPPVCLRHRRLVCSPSRLVGHTTVVGCLCLHHWLAFVATDWRLCLHAWPIMPPLLDVYIFTDRPPRMMPTGAIVFTAGHVAATANRRDHLQHKLSISSADEFLHLNGCMILPVLIGLIVFTAGRLICC

SEQ ID NO: 127783 - protein, 467 aa, Oryza sativa
  Clone ID: PAT_MRT4530_301C.1.pep
MEMGFDEKFALLRSIAEECICEDELRVLLKKKPNPICCVWFEPTSMMGIEQGIMKTIYVNKMVRAACTVKILIADWFPQRNPRFTCNLNKIQAIIRYNLWWWNPVGMHLDKVEIIWFSDELNHHAVDYWPFAMDVSRKYTMKRMASYCKYVEPYGPGILPAAQIIYPCMLVSAVLCHKICINFSAHCIPYVLQADIWLFSMDLRDIVMLTRDYCEDTNRGNIPTIFLHCILIQTVCIFWLFVICFWCVRVCEHAQMTVLPNLLENPEFQNRRNPGRTIFMLDDEDDIEEKISCAFCPSRVVACNPCLEYIKSVVLPWFGKFEVVQKEGNGSNKTYSSMKELIADYESGDLDSFDVKLALGKAINDILELVSEFFRSNEEAQAQIVPHRLQDEIGADIQKIQLQNEEMSGHVASTCQGISDLTFPSLSPTTEVVTSGAADEKGAAHVRGRRPMGGEERCAYTGGGRRG

SEQ ID NO: 127784 - protein, 161 aa, Oryza sativa
  Clone ID: PAT_MRT4530_30200C.1.pep
GFKDIRCNQPCGKNRQCGMHACNRSCHPSPCDPPPANGDASSSTGGRASCGQVCGAPRRECKHTCTAPCHPSSPCPDLRCEFPMTIACSCGRITATVPCSAGGTANGDNMFEVSIIQKLPMPLQPVESDGRRVPLGQRKLFCDEDCAQMERKRVLAEAFDI

SEQ ID NO: 127785 - protein, 178 aa, Oryza sativa
  Clone ID: PAT_MRT4530_30201C.1.pep
LSFSVQAAGWEPGRFITIHATPKSKAPARILGSKPGVFVAASHPFFDPLVDMDPRLVVAMLDLPRDADVSALVLRFGGECELVWLNDKNAVAVFNDPARAATALRRLDYGSAYQGAAVFLPSSSAQPGNVWVAGQKDGVAATKSSANPWKKATASEPDPSLGDWTGVLGQASGSVWRP

SEQ ID NO: 127786 - protein, 72 aa, Oryza sativa
  Clone ID: PAT_MRT4530_30202C.1.pep
GGGGKQRDPTRFGGGQLMPGGGQNGKGGPAGGEAGPAKAFAPPGVLTRPPGGPPNFEIGAFKGKNFSYRGWV

SEQ ID NO: 127787 - protein, 51 aa, Oryza sativa
  Clone ID: PAT_MRT4530_30203C.1.pep
FFFFFHKIIYSTLSPAIWFSKHFIIHYCLITISVACNTATGVILLAMRQAS

SEQ ID NO: 127788 - protein, 60 aa, Oryza sativa
  Clone ID: PAT_MRT4530_30204C.1.pep
RSLGRSVLISRSEGTELFSPIILKASCLLPSICGKPFSDPHRRGHGPRNHSSSSHARWLT

SEQ ID NO: 127789 - protein, 42 aa, Oryza sativa
  Clone ID: PAT_MRT4530_30205C.1.pep
TRILLTMLLNKLQKPISCSTVLDLIVTLMMQHSLHPTSRDLN

SEQ ID NO: 127790 - protein, 109 aa, Oryza sativa
  unsure (1)..(109): unsure at all Xaa locations
  Clone ID: PAT_MRT4530_30206C.1.pep
PLASLHSPPLCGEGGGGGXKEVRQWHGEEGGGGSQRXGADLAPASLGRADPPPPVLGSGXGGGGSCGAQQHRRVGGAVGSRAAQAXPGERIRRRPSTPSLGSNKSILAS

SEQ ID NO: 127791 - protein, 126 aa, Oryza sativa
  Clone ID: PAT_MRT4530_30207C.1.pep
PSPPPQLVSSSPSPSRCGERRRGAALLDPSHLIVVVAWRMAEEVQRHWIRATEGGRGAPPPNLSGGEASCRRIPATSSSSPSSPSRGVRWKRGVPPDPGGGGRERGTAAGSERWRGAAPPNPGHLV

SEQ ID NO: 127792 - protein, 118 aa, Oryza sativa
  unsure (1)..(118): unsure at all Xaa locations
  Clone ID: PAT_MRT4530_30208C.1.pep
ISPPSPTTATSPPPXDEAPPPPARPRPPPPLNPLPLLPPPPPRAAGPPVVVVVVPPPRRXPPPPPPRGRRWRRIQPDPRRGRRAVRQRVDLDVPQPREPPPAALPPDAVRLLPARPDA

SEQ ID NO: 127793 - protein, 219 aa, Oryza sativa
  Clone ID: PAT_MRT4530_30209C.1.pep
MTFSAVAAAVALDDCGLSVSARFSARRRQIRQRWTPAAALGVAAAWEYGRKRISSAAVVQIFTSDGFSLSQRLVTDDFESPVIGEGPLESQIELIKITLVPISNPLRPEPSRCLHPNSIAFTFPFASLAPPSPPQLPLTRRRRLVLHLRTPTGDHLLPIEVASIRCKWWSGTSDNLPVMGLGPWPHLLRPPVKAVTCKAIRDETLYPVTDEKIWRSDFA

SEQ ID NO: 127794 - protein, 417 aa, Oryza sativa
  unsure (1)..(417): unsure at all Xaa locations
  Clone ID: PAT_MRT4530_3020C.1.pep
MGVHVFTDRLAFAAADWCFRLHGWPIMPPLLGVNDFTAGLPPSPPXVPPPTRLAYYAAAVGSLRLHRRPASVAADWCLRLHGWPIMPPLLGVYDFTAGLPPSPPTGVLAYTAGLLCRRCWASTTSPPACLRRRRVVPPPTRLAYYAAAVGRLRLHRRPASVAAEWCLRLHGWPIMPPLLGVYDFTAGLPPSPPSGASAYTAGLLCRRCWAFTTSPPACLRRRRVVPPPTRLAYYAAAVGRLRLHRRPASVAAEWXPPPTRLAYYAAAVGRLRLHRPAASSAADWCFRLHGWPIMPPLLGVYVFTDRPPRPPPTGASACTAGLLCRRCWAFTSSPTGHLDRRRLVFPPARLAYYAAVVGRLRLHRPAAASAAEWCHRLHGWPVITPTDAIFFTTGYIAVTTNRHQYLQHKLPTFAMAA

SEQ ID NO: 127795 - protein, 522 aa, Oryza sativa
  Clone ID: PAT_MRT4530_30210C.1.pep
MPRRDAVSWNALLTALWRAGRDLPAARSLFDDMPSRNVISWNSIIAGCLAHGDLAAASAYFARAPRRNVASWNAMLAGLVRLGSMEDARSLFDQMPERNVVSYTTMVDGLARCGEVASARELFDAMPTRNLVSWAAMISGYVDNNMLEEARKLFEAMPEKNVVACTAMITGYCKEGDLQNARRLFDGIRAKDVISWNAIISGYVHNGLGEEATKLYIIMLREGIKPDQATLIALLTACSSLALLRQGRSTHAVVIKAMLESSISICNALMTMYSKCGNVDESELVFMSLKSQDIVSWNTIIAAYAQHGRYQKVIALFHEMELCGLIPNDITFLSMLSACGHAGRVDESLKLFDLMFSKYAISPRAEHYACIVDILSRAGQLEKACSYIKEMPSEAEKNVWGTLLCASQTHGNVQLGELAAKMLVLSDFESSGAYVMLSNIYAAAGMWGEVNRVRSQMKEKGVKKQPGHSWTEIADKVHMFVGGDASHPEMDMILSELRKISFHMQMVTDKTQMMEELVQECG

SEQ ID NO: 127796 - protein, 165 aa, Oryza sativa
  Clone ID: PAT_MRT4530_30211C.1.pep
MVQSGGKVKGEMDEMGSPRRGKANGRYCAKFIPNQNYPFPIRIVMLSALSKPNPTIDAGQYQQGPYMQYSLIDSFLASEQKGLRGDTLSAANLVLYVSIHFLSKLTVQPYKGGSVVGLRMEDNMMYPIKDQETMLHVTQGSAEILLFSLNLGYRIEIQVYKIAYN

SEQ ID NO: 127797 - protein, 577 aa, Oryza sativa
  Clone ID: PAT_MRT4530_30212C.1.pep
MSQQGEYHAEMMAEFLRGSGGAAVIDGGLATELEANGADLKDALWSARCLFTCPDLIRKVHLDYLEAGASVLITGSYQATIQGFLSKGFSQEESESFLRRSVELACEARAIYLEKCSNGSDEAKDVTKYRKRPILIAASVGSYGAYLADGSEYSGDYGNEGTLEFLKNFHLRRLQVLAEAGPDVIVFETIPNKIETQVTSKPILIYPNSGESYDPIRKEWVGFLLPFRLRPSAAVVPLLSGEEPPSPPSPERATVATATTTTITILVSRQGQSPLPPASTNPSIPPFPPSLFSPPDLATTMMATLARRSMVALGRRALCSGSDLEAAAREVVCSGAGSLDEVGGALDRLGVAVSPAMVARVIDACSERMGSGRRLLRFLSWCRSKDAGGIGDEALDSAIAALARMGDLTAMRIAVADAEKDGRRMSPETFTVVVEALVKLGKEDEAVRLFRGLERQRLLPRRDAGDGGEGVWSSSLAMVQALCMKGHAREAQGVVWHHKSELSVEPMVSIVQRSMLHGWCVHGNAKEARRVLDDIKSSCTPLGLPSFNDYLHCLCHRNLKFNPSALVTEAMDVLSEM

SEQ ID NO: 127798 - protein, 273 aa, Oryza sativa
  Clone ID: PAT_MRT4530_30213C.1.pep
MLLLHSSPRLLLRHRLLLPPSRDLLPAASASALRLRRSVAVRAEPELSTSAAEPPPGDDGEGDGPVELRTPTLFSIDENPTPLQTATSVLLTGAISVFLFRSIRRRVRRAKELRVRSGGVEKPNNLSKEALEGLRLVSASPIEVDKPPSPVQALLGGIAAGVIALILYKFTTTIEAALNRQTISDSFSVRQITITIRTIINGICYLATFVFGINSIGLVLYGLQLTFASIMGDDNSSSAAEKISEQSNTMASSNSSTDSTSDNESTSNDKSKG

SEQ ID NO: 127799 - protein, 219 aa, Oryza sativa
  Clone ID: PAT_MRT4530_30214C.1.pep
MIGPLTITRKFSSATVTTIHRTIVPSHHITSTSLHQESNEHDILFLHFFYSHVLTILYFKWALKEVKEAAKAREHQLRNEIGQLQDINLEYRGLVKEKDGLFCERIFGPIKSRICACGNSRASGAENEDERFCQKCGVEFIDSRIRRYQMGYIKLACPVTHRRHCFAVLMGVGVRRGERTRRIMTSWCDRLLPLYRRALLCESSFDFLAPSSATQRVEW

SEQ ID NO: 127800 - protein, 65 aa, Oryza sativa
  Clone ID: PAT_MRT4530_30215C.1.pep
APLIGQDLLVVVNAHAHAPAAPRTINQFSVCSPPSASPPLGSLRPSFSSTATSIIIMRHNLRQES

SEQ ID NO: 127801 - protein, 52 aa, Oryza sativa
  Clone ID: PAT_MRT4530_30216C.1.pep
ATVETKNGGLSRARAKPLPHARPSHRYPVAAHRQQSGTPVSPRHHAGARPAR

SEQ ID NO: 127802 - protein, 269 aa, Oryza sativa
  Clone ID: PAT_MRT4530_30217C.1.pep
MDAMVQDATYPVTKLRSETAGFVLPVDHWTSAEVVTGSTAWIGKGLSCVCAQRRDSDARLSFDLTPVQEECLQRLQNRLEVQYDSSNSDHQEALKDLWRASFPGAELRGLISEQWKEMGWQGKDPSTDFRGGGFISLENLVYFSKNFPKSFQELLRKQNGDRAIWEYPFAVAGVNITFMLIQMLDLQSVKPRSFIGAVFLKLLSENDQAFDILYCITFKLMDQQWLDMHATYMDFNTVMKSTRRQLERELLLEDIQRIEDMPSYKLLAR

SEQ ID NO: 127803 - protein, 80 aa, Oryza sativa
  Clone ID: PAT_MRT4530_30218C.1.pep
LFFFLLASPFFFFFFFFFFFFFFFFFLEECHKATLKWQNRSISKHCCLITNGDPIYSSYRLIGPQPEQSFSRAMFSSPLT

SEQ ID NO: 127804 - protein, 50 aa, Oryza sativa
  Clone ID: PAT_MRT4530_30219C.1.pep
LIYHMENTNTPKSSNVNPGNYRTCGIFDLMAEDYRTTAISRQIKIESGVN

SEQ ID NO: 127805 - protein, 142 aa, Oryza sativa
  Clone ID: PAT_MRT4530_3021C.1.pep
CATVGKGDRCGPLRYYASWRKGFSDGRIVGFHGREGWYIDGIGVHVQEGNLAAPRVSSRSTIEMNPSLRYDMLAQSRSETYNEVPYSMVKEPVPMGPGPWGGEGGRPWDDGVYTGVKQRDNGKNIVAQGATIGRNPDRGPRA

SEQ ID NO: 127806 - protein, 223 aa, Oryza sativa
  Clone ID: PAT_MRT4530_30220C.1.pep
WASSSGGSRPPSSPPRGPIPRRRPPRTRTRRWRAPRRTTRRRRRRPRTTWTRSSPSAAARAYPRRRSPPRSPTASARRLPATGTPAWPSSASSSSGSCSPAAPSSSAISSSPPSSGTPPPAATPSRSPPSRSADPSPRPRGSGSPRASSSFSSSSPTPPTTPPTPTTSSPFPTRTSSPSYPPTRPSPTPSARPRHLPPPRSTTASSGSSSGSPKKTASRRSAT

SEQ ID NO: 127807 - protein, 98 aa, Oryza sativa
  Clone ID: PAT_MRT4530_30221C.1.pep
RRRTRTSSNSRSRLASSRICSRRTPRTTHYAGSRVSARARAAPMIRRPSRLVCGVSGTTLRATPQATLAVAAAVTTLAPTRAPRAAQRAASRVPSQDV

SEQ ID NO: 127808 - protein, 303 aa, Oryza sativa
  Clone ID: PAT_MRT4530_30222C.1.pep
MSSRRHGMKAVVVVVVIAHVLLCHVAGGGGGVPAVIVFGDSTADTGNNNFIQTMARGNYPPYGRDFAGGVATGRFSNGRLAADFVSEALGLPPAVPPYLDPSHSIHQLASGVSFASAGTGLDNITAQILSAMTLSQQIDHFRQYKEKLRWAKGEAAAHHIISQALYILSVGTSDFLHNYLVFPIRGNRFTLPRYEAYLAGAAAGAVRAVHGLGGRRVKLAGLPPLGCLPVERTINPDRPGDCNEMYNMVALSFNARLKRLIGRLNWELPGAQVEYVDQYSILSAIIAKPWEYGQYPVMHFASY

SEQ ID NO: 127809 - protein, 55 aa, Oryza sativa
  Clone ID: PAT_MRT4530_30223C.1.pep
NIMKNRFTFKILLTIENENHNSTYHDLLLPVFFNNPCIVGYTIMNFPNPDYTFSL

SEQ ID NO: 127810 - protein, 95 aa, Oryza sativa
  Clone ID: PAT_MRT4530_30224C.1.pep
ILHTLALFAANKSKPDLFSFWVCFPLTPLHYLWGDKKPSPPLNPPGGIKKKKKGKTFGGRKQSKNNIPPLNSQIFSAVHAKTGGRNRKIGGPPKT

SEQ ID NO: 127811 - protein, 146 aa, Oryza sativa
  Clone ID: PAT_MRT4530_30225C.1.pep
MGLREGGRGNLAAHLCPSVPSVSSPHDRPILQEGDQQVNNDSSNEKDAVKGGPHPLCSSYRSAAAVGEPTNSSTSVKDSRPSSIGAAPTPPLPMPGSRLRSRPASLSSEDGCRFTASIYSADHIIRRPTLTIVPLSWDPLSASPGL

SEQ ID NO: 127812 - protein, 543 aa, Oryza sativa
  Clone ID: PAT_MRT4530_30226C.1.pep
PSSLPGPRHDHAVKRPGGEAAGGRSVNGAAPAPAPAPAEAPAKAPQRRQRRGPHDVEDEAWGLLRESVVRYCGSPVGTIAACDPNDASPLNYDQVFIRDFVPSGIAFLLKGDYEIVRNFILHTLQLQSWEKTMDCHSPGQGLMPASFKVRVVPLDGDDDVTEEVLDPDFGEAAIGRVAPVDSGLWWIILLRAYGKCSGDLSVQERIDVQTGIKMILKLCLADGFDMFPTLLVTDGSCMIDRRMGIHGHPLEIQALFYSALLCAREMLTPEDGSADLIRALNSRLIALSFHIREYYWLDKRKLNEIYRYKTEEYSYDAVNKFNIYPDQIPPWLVEWIPPKGGYFIGYMQPAHMDNRMFYLGNLWSIVSSLATSHQCDAILDLVEAKWSDLVADMPMKICYPALEDQEWKFITGSDPKNTAWSYHNGGSWPTLLWQLTVACIKVDRSEIAAKAVEVAERRIANDKWPEYYDTKRARFIGKQSRLFQTWTIAGFLVAKQLLENPDKSRILWNNEDEEILNAMNRMTDASNLKRRRGRKGLKKTYIV

SEQ ID NO: 127813 - protein, 55 aa, Oryza sativa
  Clone ID: PAT_MRT4530_30227C.1.pep
MGIAERGVVVTGLWADVARPAPPMRKIGSSSNSTPPRVRAQPNSFSSIKTGSGVG

SEQ ID NO: 127814 - protein, 45 aa, Oryza sativa
  Clone ID: PAT_MRT4530_30228C.1.pep
KFLLKTAQTPGEGLNLKAVSVPRRPHQLEEFTLVEASIDTSHRQT

SEQ ID NO: 127815 - protein, 61 aa, Oryza sativa
  Clone ID: PAT_MRT4530_30229C.1.pep
MAVVVANERVEVEPHYTKKNTKAATPVEDHRQSSERMDSKTTETEESTELKTLKFRSFHSY

SEQ ID NO: 127816 - protein, 200 aa, Oryza sativa
  unsure (1)..(200): unsure at all Xaa locations
  Clone ID: PAT_MRT4530_3022C.1.pep
WRRWLFPPSQIWPEGGRGRAVAAASVPXPSRSGRREAGGGRWRHWRPRRFERLIDSHLPPSLCLGNPLMLFDTEEKVIVDLGLGLGPSTWGAPTTASVMPVGATHLPGSYITGTSSLTLPPLELFVPHDAPDPNCCRYTRRRSCRIDSPETTPPLPPPSGRAELDATRSAMIAAKITNTTILGCLIITMCPAQNSEESEQ

SEQ ID NO: 127817 - protein, 105 aa, Oryza sativa
  Clone ID: PAT_MRT4530_30230C.1.pep
LSWLKILRLPGEKEQGKYTRTFCSPSTNWCHPSLVLACVKRFCVSLPTHASSFVFVSVCCRVSWRPGDNSSCSCIRSAWRLKKKKAFASIAERLLSFSFDSSCRG

SEQ ID NO: 127818 - protein, 358 aa, Oryza sativa
  Clone ID: PAT_MRT4530_30231C.1.pep
MSQRRVAGPMGVMSKQQQEAMAEEMMELRRGPWTLEEDNLLMNYIACHGEGRWNLLARCSGLKRTGKSCRLRWLNYLKPDIKRGNLTPEEQLLILELHSRWGNRWSRIAQHLPGRTDNEIKNYWRTRVQKQARQLKVDANSTVFRDAVRCYWMPRLLEKMAGAATDPTPPPPPPLHHHAAMATASSSPFDFDTHLQQAEAATACVVPNNVYHHHIDPSPSTSTSAGSTAAAAAFQPLPCFSELRWDQQMQSSGELDDGAAGVFVDSASALGSLSLDGLDLGPAEYYSDSTLLDYLNSSCTGSAMMTMMTASGNAGSYNYCGGAMDGGDTWRSDELMDELFHHIDQDRSTSDRSSKNQK

SEQ ID NO: 127819 - protein, 207 aa, Oryza sativa
  unsure (1)..(207): unsure at all Xaa locations
  Clone ID: PAT_MRT4530_30232C.1.pep
GYVGSWLWYEWTSPEKSWIGTPPPSXDCALFVAAIKVTVGDGRKAKFWESNWIGDQPLKYLAPNLFKHSKRKNKSTLEAITNNAWIEDIRGRNLEIVRHLFMECPFTQQVWRDIGRKIRLSRFLNMTIDDTLLNWWREQTDEAEKLQQKRLRSVFLATLWEIWIERNNCIFRGTESTPPALASKIIDELHLWEMAGAKGVQCIMLRE

SEQ ID NO: 127820 - protein, 297 aa, Oryza sativa
  unsure (1)..(297): unsure at all Xaa locations
  Clone ID: PAT_MRT4530_30233C.1.pep
GYVGSWLWYEWTSPEKSWIGTPPPSXDCALFVAAIKVTVGDGRKAKFWESNWIGDQPLKYLAPNLFKHSKRKNKSTLEAITNNAWIEDIXRKVTIQLLQEYICVWEVLHNAGDVIHEGADDTILRRWSASGMYTAKSAYAMQFMGKTXSESAELVWKTWAPGKHKFFVWLLAKNRIWTTDXLQCRGWPNNYFCQLCVQKXEIVRHLFMECPFTQQVWRDIGRKIRLSRFLNMTIDDTLLNWWREQTDEAEKLQQKRLRSVFLATLWEIWIERNNCIFRGTESTPPALASKIIDELHL

SEQ ID NO: 127821 - protein, 131 aa, Oryza sativa
  unsure (1)..(131): unsure at all Xaa locations
  Clone ID: PAT_MRT4530_30234C.1.pep
TARSTPRRPPPXQAAAPRLLAPPSPPEHRPRSPPPPXPPAAEPRPAAAVPCRPKPSKARAGRRSRAEPSLPAPPSPAEPRRSLPPPPXPPDASPRPAATARRRAAPGPSRAGERRKKTSSKPPHPVQGKPL

SEQ ID NO: 127822 - protein, 96 aa, Oryza sativa
  Clone ID: PAT_MRT4530_30235C.1.pep
MGLIALALASTGIIIISYSLHRRFLADLKLSIARAQQQQEQQEQEKPQRPRERTRRVRFAADVVEPSSDGDEYRRRKKTKLAEFAVAVAARCDHYY

SEQ ID NO: 127823 - protein, 137 aa, Oryza sativa
  unsure (1)..(137): unsure at all Xaa locations
  Clone ID: PAT_MRT4530_30236C.1.pep
ATHQIERPKPVCYIGLDTGAGRRYSPNQDIPHQPPEMFLPGLVVHIERQTGGLFHLWKRWSLHGSEPPYXKAFLHNXENFTDLDRTTSRFTEHLPWRRHYAMHRVLDAHTVACCPDSPVDLYGLTRSLRIELSLISL

SEQ ID NO: 127824 - protein, 147 aa, Oryza sativa
  Clone ID: PAT_MRT4530_30237C.1.pep
MTLSLVARSSGEGITLALIKCDVCDVATNQNKSRTPCNRYTTNDVALGSFEVSAVSGGRTGFQNPLDFNILTAYPPPLGAALPAAVARSPRRRRPLACHHREERGGRRGGGSRSVAPTGTKDPRSPDMPLTGNEPGLQIIFGNTNRD

SEQ ID NO: 127825 - protein, 70 aa, Oryza sativa
  Clone ID: PAT_MRT4530_30238C.1.pep
GNKRRFPGRHETADINPFSWGVANPGPSVRFGRETDQNAKGFFEDPRPGSNMDPYIVPPMIAEPPFFWKP

SEQ ID NO: 127826 - protein, 309 aa, Oryza sativa
  Clone ID: PAT_MRT4530_30239C.1.pep
MMDSKGKVKKETDGLPPRKGGLKFAPKVRPKKAMASLLAREPAEESKDETVDKELLMKLKTSQSTDPFVRKFKTEKKEMRTQVAFGQGNSSYARSFPMQSSADGSASKLPKEYVEPWDYTHSDYPVTLPLRRPYSGDPEILNEEEFGESSATGAQDGELTTAEELGLMHRSDKAQLLFFQMPASLPLPKQPDSVAETDKGDGVDAEPTSTSSKEMHAGTRPPKVLGSKLKDLPEGFMGKILVYRSGKVKMKIGDSLFDVSPGSNCMFVQEVAAINAREKHCCTLGEISKRAIVTPDIEHLLDSFDKMEA

SEQ ID NO: 127827 - protein, 807 aa, Oryza sativa
  unsure (1)..(807): unsure at all Xaa locations
  Clone ID: PAT_MRT4530_3023C.1.pep
LRGTIEAIDAGHGLEASQLSGRSAASPLRRLVLATAIADRNNDFTAGLPPSPPTGVIAYTVGRSHHRSWASMSSPXPAGLRRRRLVFPPARLAYYAAAVGRLRLHHRPASVAADWCPRLYGRLVTPPLMGIVIYTAGLPPSPPTGVPAYTVGWSHHRXWASSSTPPACLRRRRVVPXRLRLHRRPASVAAEWCLCLHGWPIMPPLLGVYDFTAGLPPSPLSGASAYTAGLLCRRCWASTTSPPACLRRRRVVPPPTQLAYYAAAVGRLRLHHRPASVAADWCLRLHGWPIMPPLLGVYDFTAGLPPSPPSGASAYTAGLLCRRCWMSTSSPLAHLRCRRLVFPLTRLTYYAAISGHLRFHRRPPSSPPTGVFIVIDGRLCSHIGHFRHHQGEYYKANNWLXICIKGIHGFKLISYALGMDQSEHHHRXASSAADWCFRLHGWPIMPPLLGVYVFTDRLAFAAADWCFRLHGWPFMPPLLGVYVFTDRXPSPPPTGVSACTAGLYAAVVGRPRLHRPACXAAADWCFRQHGWPIMPPLLGVYVFTDRPPRPPPTGVFACTAGLLXPPLLGVYVFTDRLAFAASDWCFRLHGWPIMLPLVGVYVFTDRPPHPPLTGVTACTAGLLXTPTDAIFFTAGYIAVTTNRHQYLQHKLPTFAMAADWFLHFHGYMILPVLISLIFFTAATTTDGHHRFLPPTRVMPPSTGAFIFTTARLHYQFASVAADSCXTSSRRCNFVIMVERLHIYYLRHRQTLLLLLRKFCYFTNHDVFVNLNISACNVVLFYYNKWLSNIHDFYLDIFNTYLQSSNDY

SEQ ID NO: 127828 - protein, 58 aa, Oryza sativa
  Clone ID: PAT_MRT4530_30240C.1.pep
VYELYTSPRFSLCNAMQQWNWPYSHFRGLSLRAFSVITHAPTLDLQVIAATPGPIRPN

SEQ ID NO: 127829 - protein, 380 aa, Oryza sativa
  Clone ID: PAT_MRT4530_30241C.1.pep
MTNSPHPKSIPISTAWPEVPWVEVPLAELGPVGDNGYGQAIDPVGDCDFLPPCAIFSMDDGIAFLLGMLEGAGGFIGSWVVKELLIRGYAVRGTARDPSSQKNSHLQKLEGAKERLCLNYADVMDFDSLSVAFNGCEGVFHVASPVSVDPRLVPVAVEGTKNVINAAADMGVRRVVFTSTFGAVHMDPNRSHDTVVDESCWSNLEFCKQKDWYCYAKTVAEMVAAEQASKRGIQLVVVLPAMTLGQMLQSTINPSIRHIADFLNGSRKTHRNAVAGYVDARDVARAHALVYEDPKAHGRYLCIASVLHRSELIQMIRELFPQYPITCNKCEDSKQMVQPFKFSNQRLRDLGLTFTPIKESLYNTLICLREKGHLPPYSSL

SEQ ID NO: 127830 - protein, 65 aa, Oryza sativa
  Clone ID: PAT_MRT4530_30242C.1.pep
MATRGQEGTCGTASGIARRGRPRGAGVSTLAGMRCDGGRRRTCSLIPLSNDAETTSATGAAVQHP

SEQ ID NO: 127831 - protein, 581 aa, Oryza sativa
  Clone ID: PAT_MRT4530_30243C.1.pep
MPPATPSATRWPKTLTADHLHRLVRAERDPRRALALFDAATARPSSASPPDDSTAAAAAPVLPSRDTVSLLTSRLASASLLPLASSLLSRSRELFPSPGELEPPFLSLLRAYSRAHQPLAALHLFRSAPSALGLPHSARSYTAVLAALVAHSHLSLARSLLADMRAAGFAPTTATYNVLVKAHCSDAAVPIDDAVRVFRNIPKPDACSYNTVIDGLCRRGRLPEARDLFAEMIANGTAPTVVTYTTLIHWLAREACFDDALKLFDEMARRGIMPNVVTYSSLIDGLCKGGRAASAVELLDRMVKERKLPNTITYSSVIDGLCKEGCLGQAMEILDRMRLQGRKPDAGLFGRALEASNYLDEMNFAGIRPNRLTWSLHGRINDAVVTALCSKGEVVRAFQVYQSMRTRGISTKPTTFHLLVECLSKKNNLEKAAHVVRDMLSERCIPERETWDTIVRAYWSKKKLRAVGSVQEYNHEKKSTAKISSIEIHATGPCAAVAKVGARNWKTGTVSEGRNLMFLCLGDCFLHGLMLLASSVLRGSLARGGITHMDTSGSVRYMYSIVRYMECIRSKSSVSVTRSNI

SEQ ID NO: 127832 - protein, 56 aa, Oryza sativa
  unsure (1)..(56): unsure at all Xaa locations
  Clone ID: PAT_MRT4530_30244C.1.pep
CRRGACDLQGNFYIVGRRRRRHIPSPRRRRRRCTDRRRQAKXLQTMGNGEWGTEMV

SEQ ID NO: 127833 - protein, 112 aa, Oryza sativa
  Clone ID: PAT_MRT4530_30245C.1.pep
SDSRSTTRPTPVPIDLRFPDRPGLSPPPPPPPIRLLNPSSPARFHPDRCPFHAVPCADYGSCARIFGGWAGVARWVCSFGGVIRRGRKEGPIPLPEKPLPFLIWGMAHGRGG

SEQ ID NO: 127834 - protein, 44 aa, Oryza sativa
  Clone ID: PAT_MRT4530_30246C.1.pep
GILGFLLRSSNVLNRRGSEWIFGFEKEGQIRQSDKIRVKLIVRP

SEQ ID NO: 127835 - protein, 53 aa, Oryza sativa
  Clone ID: PAT_MRT4530_30247C.1.pep
LKEHTYIFILPTIHYYISPTSSTLLLLMIYLQTILNNPRLLSTLFANTLTDIS

SEQ ID NO: 127836 - protein, 48 aa, Oryza sativa
  Clone ID: PAT_MRT4530_30248C.1.pep
RPSVAPARPHTVDEAIAAKLADGLSLSLVYDMRSSVSVSPGISGARTS

SEQ ID NO: 127837 - protein, 48 aa, Oryza sativa
  Clone ID: PAT_MRT4530_30249C.1.pep
SPRRVIQCSGKKGLVLLMGNLHLKGISQRGLHVYMIPGKISPVSEPFI

SEQ ID NO: 127838 - protein, 54 aa, Oryza sativa
  Clone ID: PAT_MRT4530_3024C.1.pep
FEPTIFEYTDVWTMLGSVSSQWLGCCFLQVSCRPDARLARRYSDLLCILVNGKS

SEQ ID NO: 127839 - protein, 46 aa, Oryza sativa
  Clone ID: PAT_MRT4530_30250C.1.pep
PPSKWFPPCGLPQPHVPTKFCFISCVNATWDKKNRKPLFRRMRNTV

SEQ ID NO: 127840 - protein, 65 aa, Oryza sativa
  unsure (1)..(65): unsure at all Xaa locations
  Clone ID: PAT_MRT4530_30251C.1.pep
IHTDRSSNSSRNHGPCTVGVGRRCGSSVLAARRRRGITCGRSTPRWXCSPTSRAXPVAAAEGVRS

SEQ ID NO: 127841 - protein, 83 aa, Oryza sativa
  Clone ID: PAT_MRT4530_30252C.1.pep
AAGFFFFFFFFFFFFFFFFFFFFFLFFPRKLVQQRPCAPNICGKHNQATLRDHKFPGSRHTWSFLEGLARHIVFEHMKLFLNS

SEQ ID NO: 127842 - protein, 383 aa, Oryza sativa
  Clone ID: PAT_MRT4530_30253C.1.pep
MRSSDIEKQDEVMLPGFRFHPTDEELVRFYLRRKIQQKSLPIELIRQLDIYKYDPWDLPKLASTGEKEWYFYCPRDRKYRNSTRPNRVTGAGFWKATGTDRPIYSSDGSKCIGLKKSLVFYKGRAAKGVKTDWMMHEFRLPSLTDPSLPQKKPLEKIIPPNDSWAICRIFKKTNSTAQRALSHSWVSPPLSSTNEAYTAPVSQTTQRSQHTSDNTSSVMTDAISSTIQFTGSSYLPSTVPSCHNPLSMIDSNSRPDASVPLPSPVAEHQTMGILSAIPLDITAGIDIASMVFNASSFTLPNMDRMTANIEFGQPQKCNSSSSMTNRCVVDMPDVANNINSGPRSINFNLQGTLSDDWRMTLPWESLPCTTEVSTNFQSTKCYT

SEQ ID NO: 127843 - protein, 78 aa, Oryza sativa
  Clone ID: PAT_MRT4530_30254C.1.pep
KNDEISCLIVFKDFFSKVSLSYIHLLYSSFRLIGTRFCEIFFFFTSFEYHRVIQYHLDPCFYQSSKLLTPLLTFELVF

SEQ ID NO: 127844 - protein, 63 aa, Oryza sativa
  unsure (1)..(63): unsure at all Xaa locations
  Clone ID: PAT_MRT4530_30255C.1.pep
SVKNXPGEKKNPLRAEAKVDRSIPPSSRDDVVDDGWRVELEVKPRRAVARKPPSSSPAAANGR

SEQ ID NO: 127845 - protein, 152 aa, Oryza sativa
  unsure (1)..(152): unsure at all Xaa locations
  Clone ID: PAT_MRT4530_30256C.1.pep
FIRYYKEAVLPXLIEERLIRISPFANRLSFDAPSAVQRLRCLANFEALKFSKPITTLSDILVSRMREKSAENNGKYVAVHLRFEEDMVAFSCCVFDGGEKEKKELDAARERGWRGKFTRPGRVIRPGAIRMNGKCPLTPLEVGLMLRGMGFS

SEQ ID NO: 127846 - protein, 261 aa, Oryza sativa
  Clone ID: PAT_MRT4530_30257C.1.pep
LIRISPFANRLSFDAPSAVQRLRCLANFEALKFSKPITTLSDILVSRMREKSAENNGKYVAVHLRFEEDMVAFSCCVFDGGEKEKKELDAARERGWRGKFTRPGRVIRPGAIRMNGKCPLTPLEVGLMLRGMGFSNNTAIYLASGRIYKSEKNMAPLLEMFPLLQTKETLASDEELAPFKNFSSRMAAIDYTVCVHSEVFVTTQGGNFPHFLLGHRRYIYGGHSKTIKPDKRRLAILFDSPRIGWKSLKRQLVNMRTHSDA

SEQ ID NO: 127847 - protein, 358 aa, Oryza sativa
  Clone ID: PAT_MRT4530_30258C.1.pep
MASSRSSLVVAMAVVILHRWCCAAAPAAAAANRTRTPALFVFGDSIVDAGNNNAITTLIRCNFAPYGKDFPGHNATGRFSNGKVPGDILATQMGIKQYLPAYLGAELSDFDLLTGVTFASGGCGFDPLTAELVSVLTMDNQLDLFKEYKEKLRRVAGDARAGEIVSESLYMVVTGTDDLANTYFTTPFRRDYDLDSYIDFVVRCASGFVRKLLGMGARRVNVAGAPPIGCVPSQRTNAGGLDRDCVALYNQAAVVYNARLEKEIERLNVTAAPPGTVLKYIDLYTPLLDMIQRPAAYGFEVTNRGCCGTGVFEVTLTCNRYTADVCRDVDKFLFWDTYHLTERGYNILLSQIITKYGF

SEQ ID NO: 127848 - protein, 73 aa, Oryza sativa
  Clone ID: PAT_MRT4530_30259C.1.pep
TRPGSLQTFTGEFAHMQSERILQIVKLHEHICYCRVHSHMHQESSTDEFPATMAYRKNMASSPSFLRRHGTRA

SEQ ID NO: 127849 - protein, 937 aa, Oryza sativa
  Clone ID: PAT_MRT4530_3025C.1.pep
MPPLLGVYDFTAGLPPSPPTGVLAYTVGWSHHRSWASTTSPPACLRRRRLVPPPTRLAYYAAAVGRLRLHHRPASVAADWCPSLYGRLVTPPLMGIVIYTAGLPPSPPTGVIAYTVGRSHHRSWASMSSPTGWPSPPPTGVSACTAGLLCRRCWASTTSPPACLRRRRLVSSPIRSVGHTTVDGHRHLHRRPASVAADWCPRLYGRLVTPPLMGIVIFTAGLPPSPPIGASAYTAGLLCRRCWASTTSPPACLRRRRVVPPPTRLAYYAAAVGRLRLHRRLASVAAEWCLRLHGWPIMPPLLGVYDFTTGLPPSPPTGVPAYTVGWIQIQICIKGIHGFKLISYALGMDQSEHHQPAASSAADWCFRLHGWPLMPPLLGVYVFTDRLVFAAADWCFRLHGWPLMLPLLGVYVFTDRPPRPPPTGASACTAGLYAAVVGRLRLHRPAASTAADWCFRLHGWPIMLPLLGVYVFTDRPPHPPLTGVTACTAGLLCRRCWASTTPPPACLHRRRLVFPPARLAFMPPLLGVYVFTDRLAFAAADWCFRLHGWPLCRRCWASTSSPTGLPSPLPTGVSACTAGLYAAVVGRLRLHRPACLRRCRLVFPPARLAFMPPLLGVYVFTDRLAFAAADWCFRLHGWPLCRRCWASTSSPTGRLVRRRLVLPPARLAYYAAVVGRLRLHRPACLRRHRLVSPSARLAYYAAVVGRLRLHRPACLRRCRLVFPPARLAFMPPLLGVYVFTDRLAFAAADWCFRLHGWPLCRRCWASTSSPTGRLVRRRLVLPPARLAYYAAVVGRLRLHRPACLRRHRLVSPSARLAYYAVVVGRLRLHHRLASTAADWCFRLHGWPLCRRCWASTTPPPACLHRRRLVFPPARWPIMPPLMGVCVFTDRLAFAAADWCFRLHGWPIMPPLLGVYVFTDRPPRPPPTGVSACIAGLL

SEQ ID NO: 127850 - protein, 52 aa, Oryza sativa
  Clone ID: PAT_MRT4530_30260C.1.pep
HASAKDADEDDDDLDLFGEGTEEDMKAAYDLSAFKAFSKYIVCVKLFFLSYA

SEQ ID NO: 127851 - protein, 119 aa, Oryza sativa
  Clone ID: PAT_MRT4530_30261C.1.pep
MVPTSCTLHSGALAGGTIPVVEMEMAQQEASEEMGRATAPRPRSVSWVALQAMAAAATVRWAVAAAGREQDGKERGVSRAPRKDCLGGAAVGQPRCMVANRPRAEPQRPAMRRSDGASC

SEQ ID NO: 127852 - protein, 85 aa, Oryza sativa
  Clone ID: PAT_MRT4530_30262C.1.pep
EQSSSDPRAYRVITDKPSKSWLSSLQIPPTHSSIVHQHQHAHSASRQQPNLQFLGVAQCAPGSSSNHLGLPPSGATYTGASVFTQ

SEQ ID NO: 127853 - protein, 107 aa, Oryza sativa
  unsure (1)..(107): unsure at all Xaa locations
  Clone ID: PAT_MRT4530_30263C.1.pep
RPFPFPPFWSELKCVFFLQYQVFFGGPFQFCXPVNPCARGVLFNQKMVSPLVKGPPFSRGIFLSGFLFSFQNFLGCFLTPLFFPPKKKKKKKKKKKKKKKKKKKPKK

SEQ ID NO: 127854 - protein, 193 aa, Oryza sativa
  Clone ID: PAT_MRT4530_30264C.1.pep
YKLDPLAVFTLVLSDVAADSAWGPHGSHISASSSPPLSTSLLFLSLTEQGNRRVWGGDRWGRRETGLRRSATGDEAAAATTREQEGLPPRRRRRRNAVSCLRWALRRKSAAAARDKAAESKDQTSGFLGEKTEKAKQKATETDETARWRVLHRLPAPVPISMPAAFCYIHRRRRLCQHGHALVLVTVSTHVHL

SEQ ID NO: 127855 - protein, 533 aa, Oryza sativa
  Clone ID: PAT_MRT4530_30265C.1.pep
MGSCCSRATSPDSGRGGANGYGYSHQTKPAQTTPSYNHPQPPPPAEVRYTPSAMNPPVVPPVVAPPKPTPDTILGKPYDDVRSVYSLGKELGRGQFGVTYLCTEIASGKQYACKSISKRKLVSKADKEDIRREIQIMQHLSGQQNIVEFRGAYEDKSNVHVVMELCAGGELFDRIIAKGHYSERAAATICRAVVNVVNICHFMGVMHRDLKPENFLLATKEENAMLKATDFGLSVFIEEGKMYRDIVGSAYYVAPEVLRRNYGKEIDVWSAGVILYILLSGVPPFWAETEKGIFDAILQGEIDFESQPWPSISESAKDLVRKMLTQDPKKRITSAQVLQHPWLRDGEASDKPIDSAVLSRMKQFRAMNKLKKMALKVIASNLNEEEIKGLKQMFTNMDTDNSGTITYEELKAGLAKLGSKLSEAEVKQLMEAADVDGNGSIDYVEFITATMHRHKLERDEHLFKAFQYFDKDNSGFITRDELESALIEHEMGDTSTIKDIISEVDTDNDGRINYEEFCAMMRGGGMQQPMRLK

SEQ ID NO: 127856 - protein, 103 aa, Oryza sativa
  Clone ID: PAT_MRT4530_30266C.1.pep
MRGVEQAKTGKGPATVKTLACTLSVILMSSVASILKIQNRGLKLGTVSPMDQVLWRTHLLEASLIGPLCGQLNISLITSVSMLFCSINLINHIVANAKEVFKN

SEQ ID NO: 127857 - protein, 115 aa, Oryza sativa
  unsure (1)..(115): unsure at all Xaa locations
  Clone ID: PAT_MRT4530_30267C.1.pep
DLHERRRRXHHGGPGADYTDLNYGMXXMAINLPGSLLPRLRVAGTRVRAAGCLDGRRAPPPRVQTSGAMDIWTAHRXEXXGAPRGLHFXPLVRYFXLAYHGILFCXIVSVTFHTH

SEQ ID NO: 127858 - protein, 127 aa, Oryza sativa
  Clone ID: PAT_MRT4530_30268C.1.pep
MGACATKPKTLEGKAPEEATPIEAAPKVALETTMISNKEVVADQAPEKVVEEATAMAELPPNDDAIVMQDKEEEVEEKIVEEEKPSAPAAEVNNTEVVEETIEVKNTEVDKGTTEVKNSEEEKPIQS

SEQ ID NO: 127859 - protein, 100 aa, Oryza sativa
  Clone ID: PAT_MRT4530_30269C.1.pep
MMVVEGELSEVPSNRHWDAILDVHTKTWIQRRQDWFGQTTRFGRTWGWPNPAQFWLVASSIAPLRRLVNFGPIHRVNFEFLAHSYISLIVDIVRLIYRLC

SEQ ID NO: 127860 - protein, 114 aa, Oryza sativa
  Clone ID: PAT_MRT4530_3026C.1.pep
IVIRLTYGDECGTYFSTSFSDGRIVGFHGREGWYIDGIGVHVQEGNLVVTVFQVPYSMVKEPVPMGPGPWGGEGGRPWDDGVYMAQSGNLQAGNTGFHTNRGIPERTLWHKAPQ

SEQ ID NO: 127861 - protein, 110 aa, Oryza sativa
  Clone ID: PAT_MRT4530_30270C.1.pep
WPCCTQETGIVGHLPQFHLTLHSNPCPWTIHLSQHHQITSPVLVAPDPLRASSPCMLLAFGAYQQQYTTACALRHAWVCTRGTFLAPGHLAVRVPAFPLISAVCHSTALA

SEQ ID NO: 127862 - protein, 217 aa, Oryza sativa
  Clone ID: PAT_MRT4530_30271C.1.pep
MSLSLIPSSSSLSSLLHLAACISSRAPSSWASPPTSLHSSPAAASPASASAPSAFLHPTPPVQRIVIAALGIHFFQHLTGIEAVVLYGPSIFKAAGIASRNSVLAATIGVGVTKTAFIMRLRLASPAAVATAPPTLAAPLMTPSRRRRSHAWSSDRPCRRQKRCPLRAPEPCRWERSFLKSVLVSLGAARGTSRRFRPSPSTLPDDLPLIPTNRLTI

SEQ ID NO: 127863 - protein, 92 aa, Oryza sativa
  unsure (1)..(92): unsure at all Xaa locations
  Clone ID: PAT_MRT4530_30272C.1.pep
MTNPGVKRGGPSAHHTESTRASTAPRPRPGVVVLLXLRLRLPLLPPPPRRRRRRRRGRGGPPVGTIPRVVTGVACRRAIRAACHCTPLLWRR

SEQ ID NO: 127864 - protein, 54 aa, Oryza sativa
  Clone ID: PAT_MRT4530_30273C.1.pep
NDRGPILTSTKEATFLSMHIWKAPLERGSFLLGGSLDHLGTGRVLLLLVLMTPT

SEQ ID NO: 127865 - protein, 149 aa, Oryza sativa
  Clone ID: PAT_MRT4530_30274C.1.pep
RSASSDAPLLAARGRRRRRRRRFGSTDSPPPALYQPPIGPAAAMHRSLPRAGPATASTAATRVSTACLPSHRAPPRLSDREQTRRAGGCRSGRRRRREHRKPRRSGRLLLGEAAAGSHGARGDGSRKPRGSRRRRGGQCSRRRRSTRVN

SEQ ID NO: 127866 - protein, 52 aa, Oryza sativa
  unsure (1)..(52): unsure at all Xaa locations
  Clone ID: PAT_MRT4530_30275C.1.pep
SGRSTRSRTKNHQFDAXXXEXPTTRXXXXLDGDALHMLKLFCLFERTPTPVP

SEQ ID NO: 127867 - protein, 56 aa, Oryza sativa
  Clone ID: PAT_MRT4530_30276C.1.pep
KKELYSTLASRLVSQKLFVFVDQWGITRSTSREGGREFYQHWQLECHCFNRYPSKP

SEQ ID NO: 127868 - protein, 36 aa, Oryza sativa
  Clone ID: PAT_MRT4530_30277C.1.pep
HEGENNTIAPNLYYQFCLKLFYDYSSYKKRLLLAFH

SEQ ID NO: 127869 - protein, 59 aa, Oryza sativa
  unsure (1)..(59): unsure at all Xaa locations
  Clone ID: PAT_MRT4530_30278C.1.pep
TTLYANPPSTYSFXVFLLTHTHFTFXHTRYHTHSTHTPVLYSYLXRWACLTTTTPVLTF

SEQ ID NO: 127870 - protein, 84 aa, Oryza sativa
  Clone ID: PAT_MRT4530_30279C.1.pep
IANYLIFIFITLWYLNCSSICSNNYYKSSHYSTIPVKKLVLLCIISLHLYVLFYLHFMTSHILLQSISFFPILHEQNTMQLINN

SEQ ID NO: 127871 - protein, 55 aa, Oryza sativa
  Clone ID: PAT_MRT4530_3027C.1.pep
STEIKSSTCTTTSTSQLYLNFHQILNSFCCTVVVLGAILITFAVGEILSYHITAR

SEQ ID NO: 127872 - protein, 576 aa, Oryza sativa
  Clone ID: PAT_MRT4530_30280C.1.pep
MQPNSKAKTRRNNESKKGGDAPKCIELTSLDYMGSGHIYTRTVKGFNQPVDDRRANFLEAGCIGLTSSDPVLSRYVAADTIKPIYVTTDAVRNQCVLCFLKRTLSKLASFPISNPTHGTTKFSRQHHCSYCSSAAAELQQPSLPNRPIIVVQVAKTTEILSVTQQLRPHCDATPTPKRANRNDTHEEHQPKLPKNHFLHEASINNPIRKMQCVIVAKLRRTPTTKQLRLYPTETKKDDKHPPALETLQKSTDYRCTRKVLDARRGQRKTTPSRRRTAPNGVVVVMPAHGLARLSPAIPNQSSTQPSCTPTIPGPSRDAAAETGSGSSRSSTAAVIFAPATKLYHRLRICLGKRRIHLREHRIHCSLVVSGRRGGAPSSRAEEEFRRAALPPPRPSRLAAWLSGGGEVARVSPPSRPCESDAVVPIEARKKLETKRSKQQEHSEFQIQLLTSRRGMHASDLMLTSPPVARRGPGLGMHAVPLSPSLPSRCRQRLRSFFLGGYRSTSHITYVKKKRKKEYGRNLCSVGGLSLFTFSSKLIYSMLNLDRQTEQKQEEYTSVLINKEKKLLNFENKPCCY

SEQ ID NO: 127873 - protein, 170 aa, Oryza sativa
  Clone ID: PAT_MRT4530_30281C.1.pep
MAVVVGGLHASPPADSAAVAAVAKDAEYQKGVQKLVDLWSKLNPVAREFIPSSAAVSSLSRKALSEDAPVFDYNSIGSWNRGGKESGVDAYQQHRATAAAAPGPGDGSGSCGCVSRRLQPCPEAAAGPGGYEPATAAATPGCSEPMTAAAAPRGCDGGGPLVLSPKRHSS

SEQ ID NO: 127874 - protein, 445 aa, Oryza sativa
  Clone ID: PAT_MRT4530_30282C.1.pep
MVSSPSPSSPFPAAAVSDARRAGGGRTTASEVDEKYAHVATPLHNHRGGSGGAKKTPRRAKSEGGGGADPAAYVAAVSCSDCRFKQRLHAPASPGPGAVIRSLFVSLTRRSTPWSSPSPTSASGGDGGESEQWRLAAADLSRRLAAATRTRDEALEETTRLKHSLTELEMKLARLEARVLPTPTAAAFPVESFLRAVSTARAAVRSLTRALSNHLRSPVNPGPNLESFLNRAFHADFELDTEGDVHTADPAGRCEANLAAYHSIAALTWEEVLLHGTKHYSEGLSRFCDAKMSEVVSSLGWARARAWPEPLLQAFFLAAKGVWGVRLLARSVHPPLPVVRVDRGARFDSRFMEDAAAGRAGKLEPASVKMMVAPGFHVYVACAGVVKCKVVCFYSSSSSSRTGGHRDGGSIANGSVGLGSSCSDVNGSATDAVDGCNNQSSSVVT

SEQ ID NO: 127875 - protein, 318 aa, Oryza sativa
  unsure (1)..(318): unsure at all Xaa locations
  Clone ID: PAT_MRT4530_30283C.1.pep
MDVVTHAGRHHRTSTPPPSPRPASRPTAPSPRLSPPAHGRHRHHRPSEPEKTPTXSPRSPPGPRPPRWTRSTPTSRPPSTPPAGGPGVPKRPPRHPKPKDEADPTPPPTAPAGSSSDRPFQPPAPPPRPPPAPAGRPSPPPFPLPPPPNPTPRALPPPPHPALPRAPRGTTPPSPPPPPLPSPRVLSDSPAPPAPPPSPNPPPRHPPPPAPTRTPRPPRPRTPHPPPPSRPESHRGPPPAPPLPPCPTPRPPPPPPPNPPAPPPALPAPPTPRPPPPPPPPCTSPRRRRRRTRGTPAPPSSSRLPAPASRRARRPRPP

SEQ ID NO: 127876 - protein, 119 aa, Oryza sativa
  Clone ID: PAT_MRT4530_30284C.1.pep
SAILEKTEMLTSEEEDAYCCGGEGRGRRGRGDHGWRAMDRARARRARSTPCLGALANYTKDNSVWLRLAGSVASQVGVFSGSEGRWCLCLPCAGGDRRGDGAVGRDAGRGDGGGVLVRW

SEQ ID NO: 127877 - protein, 709 aa, Oryza sativa
  Clone ID: PAT_MRT4530_30285C.1.pep
MAWRRVLSQLARSRPASTIYNELITSRPSWLLRGDVNGGGTLKNLNERYQSSFVGSLARRVQNLDVPSEASLLKEIYKSDPERVIQIFESQPWLHSNRLALSEYVKALVKVDRLDDSTLLKTLRRGMAVSGGEGERVGSSSALKSAGQATKDGILGTANAPIHMVTSETGHFKDQIWRTFRSLALTFLVISGIGALIEDRGISKGLGLSQEVQPIMDSKTKFSDVKGVDEAKAELEEIVHYLRDPKRFTHLGGKLPKGVLLVGPPGTGKTMLARAVAGEAGVPFFSCSGSEFEEMFVGVGARRVRDLFAAAKKRSPCIIFMDEIDAIGGSRNPKDQQYMRMTLNQLLVELDGFKQNEGIIVIAATNFPQSLDKALVRPGRFDRHIVVPNPDVEGRRQILESHMLKVLKSDDVDLMIIARGTPGFSGADLANLVNVAALKAAMDGAKAVTMNDLEYAKDRIMMGSERKSAVISDESRKLTAYHEGGHALVAIHTEGARPVHKATIVPRGRTLGMVSQLPEKDETSFSRKQMLAWLDVSMAGRVAEELIFGDSEVTSGASSDFQNATKMARAMVTKYGMSKQLGFVSYNYEDDGKSMSTETRLLIEQEVKSLLENAYNNAKTILTKHSKEHHVLAQALLEHETLTGAQIKKILAQANSTQQQQEHAVEAPRKTPAAPSSPAASAAAAAAATAAAAAKQAAAKAKGVAGIGS

SEQ ID NO: 127878 - protein, 53 aa, Oryza sativa
  Clone ID: PAT_MRT4530_30286C.1.pep
MGNLSYGTMNWCFRHYADSYNVRVPTVLFKFIYVGLHSSVCRHPHAVNQHLRS

SEQ ID NO: 127879 - protein, 454 aa, Oryza sativa
  Clone ID: PAT_MRT4530_30287C.1.pep
MADDGRCPPDVVSYNTIIDGLFKEGDVDKAYITYHEMLDRRVSPDAVTYNSIIAALSKAQAMDRAMEVLTVMVMPNCFTYNSIMHGYCSSGQSEKAIGIFRKMCSDGIEPDVVTYNSLMDYLCKNGKCTEARKIFDSMVKRGLKPDITTYGTLLHGYASKGALVEMHDLLALMVQNGMQLDHHVFNILICAYTKQEKVDEVVLVFSKMRQQGLTPNAVNYRTVIDGLCKLGRLDDAMLNFEQMIDKGLTPNVVVYTSLIHALCTYDKWEKAEELIFEILDQGINPNIVFFNTILDSLCKEGRVIESKKLFDLLGHIGVNPDVITYSTLIDGYCLAGKMDGAMKLLTGMVSVGLKPDSVTYSTLINGYCKINRMEDALALFKEMESNGVNPDIITYNIILHGLFRTRRTAAAKELYARITESGTQLELSTYNIILMDFAKTNSLMMHFGCFRTYV

SEQ ID NO: 127880 - protein, 420 aa, Oryza sativa
  unsure (1)..(420): unsure at all Xaa locations
  Clone ID: PAT_MRT4530_30288C.1.pep
KLIVHTPCNSCPVAFAKNPPAASPVPPPQLSRSTELPPSPNYKTRYSSPPVERPPPHPPPPPRHPPPPPCTPSSXPPPHPPSSAPPAAAASSPRSASPPWPPPPPPPHLPPPTAFAALCAGAPFLRASPRRRSLPSRRTPPPPDPSPXASPPPDPPXLPSPLLVVEPPPLLRLAEPPPPTLLFVEPPPSLPCRRRRRPPPCRAAATPPPXEPPLPSFPFPPPSPSLLPPPSPPPPPACKQPRDPPPGPAQPPPPNPPPDEPSPGSPPSRSCTATPACPSSMTPPATALPLPPSPCSSTPPLHDHALPXPANSQPEKPPLPPPPLCRSRRPPPLPPADVLPAPTPXEPPPTDLGKPPPLRLWPRKEPPHRRPWGIRRRTRELCRRSPRRQLLIREPPPPPQAPARAPMNAAEYHAAARHLQ

SEQ ID NO: 127881 - protein, 104 aa, Oryza sativa
  Clone ID: PAT_MRT4530_30289C.1.pep
GGGSTKRRVGGGGSARRRSGGGSTTRRGDGSRVDPAEARQPGDGSGGGGVLREGRERRRGDARRKGAPAHRAANAVGGGSRRRRWSSSCRADATTGGLPHHQAV

SEQ ID NO: 127882 - protein, 852 aa, Oryza sativa
  unsure (1)..(852): unsure at all Xaa locations
  Clone ID: PAT_MRT4530_3028C.1.pep
WASTSSPTGWPSPPPTGVFACTTGLLCRRCWASTTSPPACLRRRRLVFLPIRLVGHTTVHGRPHLHRPXAFGVADWCFRLHGWPIMPPLLGIYDFIAGLPLPPPTGVSAYTAGLLCRRWGQLRFHHRRLVSPPTRLAYYAAVVGRLRLHRRPASATTDWIQIQICTKGIHGFKLISYAPGMDQSEHHHQLAVIVADWCLRLYGCLVTPPLLGVYVFTDWPPRSPPTGVSACMVDLLCRRCWASTSSPTGRLVRRRLVFPRARLACYTTVVGRLRLHRPAASSAADWCFHLHAGLLCRRCWASTTSPPACLRCRRVVPPPTRLAYYAAAVGRLRLHRRLASVAAEWCLRLHGWPIMPPLLGIYDFTAGLPPSPPSGASAYTAGLLCRRCWASTTSPPACLRCRRVVPPPTRLAYYAAAVRRLRLHRRPASVAADWCLRLHGWPIMPPLLGVYDFTAGPPPSPPSXLLCRRCWASTTSPPACLRRRRLVSSPIRLFGHTTVVGRLRLHRPAASFAADWCFRLHGWPIMSPLLGVYVFTDRPPRPPPTGVSACTAGLLYHRCWASTSSPTGRLVCRRLVFPPARXAYYAAVVGRLRLHRPAASSAADWCFRLHGWPIMPPLLGVYVFTDRLAFAATDWCFRLHGWPIMPPLLGVYVFTDRPPRQPPTGVSACTVGLXYVAVVGRLRLHRPAASSAADWCFRVHGWPVXHRCWASTSSPTGRLVCRRLVFPPARWPIMPPLLGVYVFTDRPPRPPPTGVSACTAGLLCRCCWAFTSSPTGRLARRRLVFPPARLAYXPPLLGVYVFTDRLAFAAADWCFRLHGWPIMPPLLGVYVFTDRPPRPPPTGVSACIAGLL

SEQ ID NO: 127883 - protein, 48 aa, Oryza sativa
  Clone ID: PAT_MRT4530_30290C.1.pep
VITKDTPLATAERPSTHSMSYRQPLGQPVPSVRYYAQRLSSRLTTLTS

SEQ ID NO: 127884 - protein, 285 aa, Oryza sativa
  Clone ID: PAT_MRT4530_30291C.1.pep
MAGGDSAAVSAVEGRLSELSTNSDEKGLPRRGKSLSGRTLNTAQIQLVASHPEVYEPCDDSFALVDALLSDKAQLLTLKPRLCMEIGCGSGYVITSLAIMLRQLGSGTQYLATDINQHAVETTQATLEAHGVHADVIATDIVSGLEKRLHGLVDVVVVNPPYVPTPEEEIESNGIASSWAGGINGRQVIDRILPAVRELLSERGWLYMIALEDNDPLDICHLMNEKGYASRVLLKRCTEEESLYVLKFWQDASTGTNASHAARSPRSESSWLSQLPFRSLWHKNA

SEQ ID NO: 127885 - protein, 184 aa, Oryza sativa
  Clone ID: PAT_MRT4530_30292C.1.pep
SPPGFSGYAPPLFGKFCLLDHRGAQKTSRGVSLIQNPGCSNRPSGETCCGGPLVFLALPGPALGVKGRRRQTGGNRGAPRVRGRGGGGPSLANSFRNSFRPQSFGRRQGGGAGATNCRVCLARFKPESVVNRFPCGHFFHRACLEKWLDYDHATCPFCRHRFLPATTESPSPSPATATPHFARI

SEQ ID NO: 127886 - protein, 104 aa, Oryza sativa
  Clone ID: PAT_MRT4530_30293C.1.pep
AKEGFPPNQQGLFFSGKQLKNGRTLPGSNIQKESPPPLVPPPRGGQEPLIDGIAPGLLSWVGITPVKTFFVLLVDPRARFNWAGPPARTFVGSYPFYLIFKLPF

SEQ ID NO: 127887 - protein, 66 aa, Oryza sativa
  Clone ID: PAT_MRT4530_30294C.1.pep
FWCFFFFFFFFFFFFFFFGKFNIRVLVMAHHQNINRGAPYYILFPLFFLGIFLDKLLRNIKLTRQP

SEQ ID NO: 127888 - protein, 194 aa, Oryza sativa
  Clone ID: PAT_MRT4530_30295C.1.pep
KLKRRAHMSMPFPRSRASGLNRGIQQLRQEDEADLSRRSRGTRRSQAVGVVPLVDGGCGQVQQRQGIARRQPTSQVEPGGAAKGTRPAGANTGNRDPNRTARWRKSSKVGGAEAMEADANSDLGREEMSCRELTGASKSRRWCRRDRMEQISTNPSNAARQQTERDVLELFVGRTPVRSTEGPSSPVAHTSRAL

SEQ ID NO: 127889 - protein, 144 aa, Oryza sativa
  Clone ID: PAT_MRT4530_30296C.1.pep
KICLFSPGVRPPFFFPKKIWGFVPQKTGFGALFPPCFVRKEGFPPFFFWGLGPPPPPTFFLRVFFPPPLWGPLKKRSRGFFCLGVFFSKKISPRKGCFFFLTFSGLPACGGRNRFFFVFLGGTFFHPGGFFPPRLGFLKKKKRY

SEQ ID NO: 127890 - protein, 92 aa, Oryza sativa
  Clone ID: PAT_MRT4530_30297C.1.pep
MYRAISSTSPALIHHATIGPLEPSTTYYYVPTGWTASTLSHIDGASAGDYDMLPGDLSYADRNTRGPTAVVTDILTRLTAWFICQCHAVYRS

SEQ ID NO: 127891 - protein, 73 aa, Oryza sativa
  Clone ID: PAT_MRT4530_30298C.1.pep
MKRMDLAVAVLKTTGFASTAAKERDGGGEGGGSGSGGVRGRQVNFHGEYSGTVTTGKLSPLSAMEAGGGIVAG

SEQ ID NO: 127892 - protein, 154 aa, Oryza sativa
  unsure (1)..(154): unsure at all Xaa locations
  Clone ID: PAT_MRT4530_30299C.1.pep
MIWLNKNKKVDNLVHISILGEKNMRISWVTDDLNAPSXVEYGTSPGKYVNGVGDGRPPMYRAISSTSPALIHHATIGPLEPSTTYYYXTGAIEKADDEFRLRTPPARLPRGVRSSWLATXLGQTGWTASTLSHIDGASAGDYDMLPGDLSYADV

SEQ ID NO: 127893 - protein, 700 aa, Oryza sativa
  Clone ID: PAT_MRT4530_3029C.1.pep
MTTRFVIRPANDASRQIMATSLSWREGVGNNLSPKFLLWVVCWNCWISEGGPEKENISGWEKTSFLFMCVNCELDPVACDSGWFPGVVCSGHPINWQSIKSSDGKSPIVVGPWGGTGGYPWDDGVYSTVRQVIITHGAAIDSIRIEYDLKGSSVWSETHGSTDGGSETDKVKLDFPDEILVSVSGYYGSVCGTPVIIRSLTFQSNRSIYGPFGTEDGTPFSLPVSSGKIIGFHGRSGSYLNSIGFYLKQVNVSDRSNSPVLPQSRSITSAYNKNGYSFPEGASGYDMVLAVRDRGDSYAVYTSNYPNQQYTNPSPDYNDGIRWNKVPQTSPSLQMVSFPSGYGDRGGAALSSHETYGPWGGSGGTMFDDGMYTGVWQINLTRAVGITSIKVLYDRNGQAVWGNKHGFSGAVSPDKIVFDFPSEVLTHITGYYGTTMIMGPTVVRSLTFHTNKRRYGPYGDECGTYFSTSFSDGRIVGFHGREGWYIDGIGVHVQEGNLAAPRVSSRSTIEMNPSLRYDMLAQSRSETYNEVPYSMVKEPVPMGPGPWGGEGGRPWDDGVYTGVKQVYVMRGTFIGSIQIEYDRGDQSVWSARHGTSGHITHRIKLDYPHEVLTCVYGYYNTNREEGPRVLRSITFISNRGKYGPFGEEFGAYFSSAKTEGKVVGFHGRSGQHLDAIGVHMQHWMGDRRPAPKYVLSKYLF

SEQ ID NO: 127894 - protein, 733 aa, Oryza sativa
  Clone ID: PAT_MRT4530_302C.1.pep
MSVAQSKERGNPAARGVEEDILVPLLARLATIRTVLDNAPAPSRRRLPVHVRDAEEDARVEARALLEKVQGEMSYLQRVFRRIDEAENSILYGFDPVEEQIDDALQQAQVGLDVEQVHEALLAVDADIEVIKASIREVYRFPCDGDERRGPPPPSTAPATGVVMTRRMGEIRRGPQMRHLGLAIGGFEARLRGCVLTLAAFPECAVIKKRLLIHWWLGEGFVRSAAEGKSRFDELIAKGLIVPIPGHLCATVHRCTVRPWMRDLLTGVAKRTAFLDLDSGNDFTLARRACLNAGRMSSGFSAEARAIYNIDQKYLELDDAWFAGKKELRALQLGQWREFGPLEQIANPMDSHIELSGVEHLADMESCKNLRYISFRGISRIESLPDSIGRLRELTVLDLRACHNLEELGQGITRLDRLGYLDLSECHLLVGMPKGIGRLTRLEVLKGFVVANPSRREPCHLNELTKLNKLRKLGIVIGTMAVPTDDEFMKLGEFRALESLKIRWGVLASDSKGKIEASSHQKPIDKMKFALPPNLKKLDLRCFPLTDFAQWVTPKGVKKLYIRGGKLMTLGDEQGWEAEEASEVTIMASSPDKGKETAAAAVDAPSSSSGSSPEKKKKNSSNNNNRGEATAAAVAGDEGRKKMVRMSPPQINLLMSFDPPPLEHVRGLTKEEEGIDALAAEWERGIRAVTEAVRTQYEQGGYVEYEAGADLLACPGRIQAKGQQNKFDFGRLS

SEQ ID NO: 127895 - protein, 201 aa, Oryza sativa
  unsure (1)..(201): unsure at all Xaa locations
  Clone ID: PAT_MRT4530_30300C.1.pep
EQKFFPTSLTLPKFLPLFLCYRILPFFRSPARIGVXGTSRCLRNSVRLRTCMGRQAIMFLGSTLSATAPVLRDYCCCSIDAFANMSTEIGDKEVNDINGGNTASKSSDVCLLIFFVMASLCYSVNVDAYFTLCMLILYTTSTITXSTHIANAMFIVLIFWIKICXIMTKFPTIQKFHGPLLVVGFATSLKPHAFDGSNYKI

SEQ ID NO: 127896 - protein, 81 aa, Oryza sativa
  unsure (1)..(81): unsure at all Xaa locations
  Clone ID: PAT_MRT4530_30301C.1.pep
KRKKMKLIKKGRRNKKKRKXKQHKGKKQKRLXSKKIKEEKETRKGKQYEVKKKKQKKKIRIKRRKQKEAQPCKISTYTETQ

SEQ ID NO: 127897 - protein, 143 aa, Oryza sativa
  Clone ID: PAT_MRT4530_30302C.1.pep
KIEKEGKPVRTKAPKIQRLVTDARLRRKRVYKAHKKARWERTRQAQADYQKVLEEYRKKKAAEHKEEVAHRKEAAHAKAAPKEEAKAPAKTAATKAAPTKAAPTKAAPTKAAPTKAAPATQQKTTQKAPAATQQKGATKTTKK

SEQ ID NO: 127898 - protein, 71 aa, Oryza sativa
  Clone ID: PAT_MRT4530_30303C.1.pep
MNSVYCTYGGTLTRCCFGSIGAAVNISPGARRREKWRTSEAQIITRHETNEGVDCWWQINHFALETTLEAC

SEQ ID NO: 127899 - protein, 491 aa, Oryza sativa
  Clone ID: PAT_MRT4530_30304C.1.pep
MAARRSRVAFVLVDGIGDVSIPSLRGRTPLEAAAAPGLDAVAAAGVAGLMDPVEPGLACGSDTAHLSLLGYDPRVYYRGRGAFESMGAGLAMAPGDIAFKSNFATLDESTGIIVSRRADRHFEEEGPILCAALDGLKLPSFPEYEVRVRYATEHRCGVVVKGPRLSGNISGTDPLKDNRLHLKAEPLDDSEEAKNTAAVVNELSKEITRILVSHPINAQRSAEGKNIANVVLLRGCGIRIEVPAFETKHGLAPCMVAPTKIIAGLGLSLGIDILEAPGATGDYRTLLTSKAKAIAKALSAPLDTPPRVFVPGEDEYKSGKENGYDFGFLHIKAIDDAGHDKAGKLKVLGLEAVDRAIVQLARLLWEAEKSGKYQYFLCVTGDHSTPVEYGDHSFEPVPFVLCRLRDFVGAMGEDNVINFPLDDFLLPSVKSGEDVAENIDVADRKSDQRKAFSGDSVFEFNEIAAARGCLGRFPGSEMMGIIKKFIKAKND

SEQ ID NO: 127900 - protein, 100 aa, Oryza sativa
  Clone ID: PAT_MRT4530_30305C.1.pep
VHMEMSLHSMEVVNRLTTAVDLPPGFIHDYISNCIRSCRSLQDKYMQNRLVRLVCVFLQSLIRNKIINVQDLFIEVQAFCIAFSRIREAAGLFRLLKSLE

SEQ ID NO: 127901 - protein, 118 aa, Oryza sativa
  Clone ID: PAT_MRT4530_30306C.1.pep
CSPRSPSSRRSSALPCPARILRGNLAAGFEESAGFRGESRNPRKVFVHGHGAAAVAAVTVSAPAPPAAGAREGVHLLAAPLALPFPGVCAWRLLQGAAHLSASAGAASIATSARPPAN

SEQ ID NO: 127902 - protein, 94 aa, Oryza sativa
  Clone ID: PAT_MRT4530_30307C.1.pep
VACCSSLSSFNFLKYICSWLIACYWLVLLTGTKDLFVVTVDNTDREKRSTRRSERPTRSDRAAVGRGDARLARGRRGAEGGAAPGEAVAAGGGL

SEQ ID NO: 127903 - protein, 171 aa, Oryza sativa
  Clone ID: PAT_MRT4530_30308C.1.pep
DADGSVPFYWGVDPDSRLVVSDDDEIVNKACGKSSAPFPKGFFFTTSGGLQSYEHPMNEVKPVPRLDSKGERPTVALAGNDGQGEEADPNGVEHRAGELEAFEVDKVANKVRTHGDKGVNNGELDIGGVEAVEELEELVVRGPEGVGDGGGEGDDDGERWSLATRLSVCIA

SEQ ID NO: 127904 - protein, 164 aa, Oryza sativa
  Clone ID: PAT_MRT4530_30309C.1.pep
MAMAVAWLTPQCCIGAGSAILIFYTRFSTGKDGSHCTEWVGGEDKGNSAFPSNRYFAGWSLIGIIMKFYLIYGLGRLAGLITLEAEDSNAPLDALKRVGKSIAMHIVATKPLFLSKELVSASAVENERGILRTQSVLNDLSKEVGEGVQRPDEYTGSEATARAA

SEQ ID NO: 127905 - protein, 300 aa, Oryza sativa
  unsure (1)..(300): unsure at all Xaa locations
  Clone ID: PAT_MRT4530_3030C.1.pep
WTTLFPHWSPLPSSRGILQHHHRLAFAAADWCHRLHGWPIMPPLLGVNVFTDRPPRPPPTGVSACTAGLLCHRCWASTPSPTGXPRPPPTGVSACTAGLLCRRCWASTSSPTGRLVRRRLVFPLARLAYYAAVVGRLRLHRPAASSAADWCFRLDSWLIMXITDGHLCFHRLVFAIADWCFYLHDYASSPPVCFRCLRLVFTSSRQCNFFIMVERLHLYYLRHRQTLLLLLRKFCYFTNHDVFVNLDILACDAVLFYYNKWLSNIQDFFLDIFNTYLQSSNDYSTTRSYSSXLYVQLFPN

SEQ ID NO: 127906 - protein, 136 aa, Oryza sativa
  Clone ID: PAT_MRT4530_30310C.1.pep
HEPDEWRESSSPSAMVPGHHGAPYGIIDAPPSAAVKRMVRLAMKTPVQRLAKAKRSISLGSKAMARHGLAAVIRCDKDDLISRFMDVAMCDSRDAATITSTLDDSLNEVVGLYFAAAAEKLIRPSFVRLSGHRPRR

SEQ ID NO: 127907 - protein, 365 aa, Oryza sativa
  Clone ID: PAT_MRT4530_30311C.1.pep
MALMDGGEHAGERRKAKEYGEKARRAMEKGGSSSEQTFFMMWTENPRNAEAAAAAAGAAGRRGGAGERAGGGQDGVLERTRGAGARPRKEVGDDDAANAASRPTVPVARVEQELDRAWSWSCSRCCRVQSSCFLNETIFSGGYTDTGASVTFDLLFLLVIGSYPFDEALILFNFVVTAARGPEDLINIFWRPPSSKIKGHRQLFHVLLAFLRTWDGKYGVCFTVCSIFAEQASTILTGCVFWDGGSTWGSGDQINGSRRNSGAAAVGGELPLGHSRTKGRGRAARTTEPRRTVVAQPHGGSRQQEDEGSSSGGWWRALTGLQSNKGRRSASRTVATQPHEGRADEFLRSGREVKANDFVEAVVKS

SEQ ID NO: 127908 - protein, 138 aa, Oryza sativa
  Clone ID: PAT_MRT4530_30312C.1.pep
PLVEELGTLVDEMLAVTDLVILDLKQLNDEIHQDLIGVSNKRTLDFARYLHKIHKQTWIRYVVVPGYTDDDSAHKLGQFIQNMDNIEKVELLPYHRLGAHKWKTLGYKYELEDVLPPSKEDLERLKAIIESYGHTVKY

SEQ ID NO: 127909 - protein, 784 aa, Oryza sativa
  Clone ID: PAT_MRT4530_30313C.1.pep
MAIDGFLLLSNSLAAAAAAFSSALSATCTPEMRRRLASGPQDRCPHTSAISEGTGYSTRWERGVGGGDAMMHMLVAPDGGGGGEMPPPYGGAAAAPPPPMEQELELHRDNADDGLDGHVRCLRCGISGNATPHMRRGPDGPRTLCNACGIAYRKGKMRRMIEAEPPIDEAALAKLVPEVGMEFESEDKAYEFYNKYAGHVGFSVRKSTSHKSSGNITKVRTFVCSREGYNRDKKSLEAKKPRLDTRIGCPARLIIKVTPESKYRVTDFKADHNHQLAPPSTMHMLRSQRILTELQSGEAELSDDSVMTPTTKATGDLVVRQIGFLRSISLLPADYKNYLRSKRMKAMQLGDGGAILKYLQTMQMENPAFFYTMQIDEDDKLTNFFWADPKSREDFNYFGDVLCLDTTYKINGYGRPLSLFLGVNHHKQTIVFGAAMLYDESFESYRWLFESFKIAMHGKQPAVALVDQSIPLASAMAAAWPNTTQRTCAWHVYQNSLKHLNHVFQGSKTFAKDFSRCVFGYEEEEEFLFAWRSMLEKYDLRHNEWLSKLFDERERWALAYERHIFCADIISALQAESFSSVLKKFLGPQLDLLSFFKHYERAVDEHRYAELQADFQASQSYPRIPPAKMLKQAAHTYTPVVFEIFRKEFELFMDSVLFSCGEAGATSEYKVAPSEKPKEHFVRFDSSDCSCICTCRKFEFMGIPCCHMLKVLDYRNIKELPQRYLLKRWRRTAKSANEENQGTLLFLICMRIHFAEAHDAGDLNLNIIPSARCLLHDTGVEAVR

SEQ ID NO: 127910 - protein, 141 aa, Oryza sativa
  Clone ID: PAT_MRT4530_30314C.1.pep
KFFFFFFFFFFFFFFFFFSFFFFFFFFFFVKTFFFFLFKFPPPLCLNGAPPKNHNFIFLSGPTKLLQFNPQSPPRGKSPREQFFTLGKTPILPAFLGPTKLGLELAFLSSLPFQTVVARSFSTLPPPPLMALFFFLGPYPP

SEQ ID NO: 127911 - protein, 89 aa, Oryza sativa
  unsure (1)..(89): unsure at all Xaa locations
  Clone ID: PAT_MRT4530_30315C.1.pep
RSDGDGDGDYVSDGGPMGGIESQEWLIQRWDIINCAXSSSLXLPRDTKLHYLVLFLEPLKRYSYEHLLNYMAINNFIFLVNFLVMEDLY

SEQ ID NO: 127912 - protein, 63 aa, Oryza sativa
  unsure (1)..(63): unsure at all Xaa locations
  Clone ID: PAT_MRT4530_30316C.1.pep
ELAWAKRWSSQAYLXCRTTSLHELTRLVIKHVENLVIARVTNDDRRFMGPYSIGSISLIVLAI

SEQ ID NO: 127913 - protein, 129 aa, Oryza sativa
  Clone ID: PAT_MRT4530_30317C.1.pep
MSCLNSLFNRSTFGTKCKTCLNLVITRIKLLRNRRELQLINMRTEMVQYLQTGHESIARIRVEHIIREQNILAAYEIAELFCEFVLARVPIVEVQKECPFELREAIASIISASGRCSDLPELMHLRTLF

SEQ ID NO: 127914 - protein, 38 aa, Oryza sativa
  Clone ID: PAT_MRT4530_30318C.1.pep
EGYEIKSVMWTNHKNIPEHRAFVTCPFCMPQKTRYVVL

SEQ ID NO: 127915 - protein, 344 aa, Oryza sativa
  Clone ID: PAT_MRT4530_30319C.1.pep
MCREDLKRKNSDKNENLGYTDFGRFISSRSFITGSQPIDFIQTFQYGDLVHCETTFEKMGRTSQVNIICGQCPNKECKGKQGCICSISYDELMCRVTVELAIPCPKSGPRVFKGFTVGFHPRSSELVYNGLTQLGFEQSHHEFSFQGEQSHVSLYLSAVFSLSGLVGKPSLKVNPVKGLDVTLTGSGTNGAMPTTLSPTILNVIWRCEIARSSPYEVNILIPVEGYDPIEFTLTKECVHIQEKESNPMRGWATFGIISCIFIVLSSLLCCGGFIYKTRVQHQSGLYALPGMTILSAFLDAVGGPSYMRADDHGGNHASQASWERMPGTSQAAEHGTKDRRYGSL

SEQ ID NO: 127916 - protein, 545 aa, Oryza sativa
  unsure (1)..(545): unsure at all Xaa locations
  Clone ID: PAT_MRT4530_3031C.1.pep
QQRLHRRPASVAAEWCLRLHGWPIMPPLLGVYDFTXRPASVAADWCLRLHGWPIMPPLLGVYDFTXRPASAATDWCFCLYGWRTPPLLMGFIIYTTXLGSTSADWCFCHHXDGLLYSHIGYFCCHRGNTTKLSHHLFHSLYDILSFPLPHYINFTTGSPRPPAIGVSACTAGXLCRRCWASTSSPTGXPRPAPTDASACTAGLLCRRCWASTSSPTGLPSPPPTGVPACTAGLYAAVVGRLRLHRPACXAAADWCFRLHGWPXMPPLLGVYVFTDRPPRPPPTGASACTAGLLCRRCWASTSSPTGLPSPLPTGVSACTAGXLCRRCWASTSSPXPACLRRCRLVFPPARLAYYAAVVGRLRLHRPAAASAADWCHCLHGWPVITPTDATFFTVPSPLRLVYTATTTDGHHRLPLPTGYAAADXCFYLHNCASSLPVCFCCRRLVFTSSRRCNFVIMVERLHLYYLRHWQILLLLLRKFYYFTNHDVFVNLDISACNAMIFYYNKXLSNIQDFYLDTFNTYLQSSNDYSTTRSYNSRLYVQLFPN

SEQ ID NO: 127917 - protein, 520 aa, Oryza sativa
  Clone ID: PAT_MRT4530_30320C.1.pep
MATAADQNPNDAEHREAAAGANAAEEEYEEEDEEEEEVELDGPAAVAAEREKVQAVFKRLSSDPVGIRVHDVIIKGNVKTKEELIEAEVAELLRAAPTVQDLLRNASIASARLRQLDVFDSVNITLDAGPPELPGTTNVVVEVVEAANPITGSIGKLLRAMARSWSLEGSVKLKNLFGYGDIWDASGAYSWDQTSEVGIGVSLPRFKSISTPLMARASLSSQDWLKFSSYKERLLGLSFGLISTMQHDLSYNLTWRTLTDPSQVSSKSIRRQLGHNLLSALKYTYKIDQRNSHLRPTKGYAFLSTSQVGGLWDSKGLRFFRQEFDVRGAVPLGFYNSALNVGLGVGAILPLGRGFMNLSSSVPDRFYLGGHSSPVCSLSGLSSLLGFRTRGIGPTEPRRLVPSESEDGSAASPGRDYLGGDLAVSAFADLSFDLPLKIFRDAGIHGHAFLTAGNLAKLSEGEYKKFSLSEFGRTFRSSAGVGIILPTKLFRVEVNYCYILKQAEHDSGRTGIQFSFSSPL

SEQ ID NO: 127918 - protein, 99 aa, Oryza sativa
  Clone ID: PAT_MRT4530_30321C.1.pep
DLRPQGGAPVTEGARPPERHRRHDQEGDAVDGAPGPDPGVQARRRDRGRLREYHTVNINPQDVVVRAEVVFNKNMWTFPCVFFSGYALIPVFVLALHVD

SEQ ID NO: 127919 - protein, 29 aa, Oryza sativa
  Clone ID: PAT_MRT4530_30322C.1.pep
SRRQHTRRRARDVVVDDCTSQHIRIRSGH

SEQ ID NO: 127920 - protein, 46 aa, Oryza sativa
  Clone ID: PAT_MRT4530_30323C.1.pep
FLNAKDILYIKKFLKKRGKKQKKKKKKKKKKFKKKKKKKKKRGRAF

SEQ ID NO: 127921 - protein, 475 aa, Oryza sativa
  Clone ID: PAT_MRT4530_30324C.1.pep
MKIASPQTNNVCPSVEQRKSENISPLKEPCVRNELSCTTNSDSNGLQYNGGLGGHKGSAPGLPVSSSPSFSSNVATRPISTSSVSMKIVQGLVASKSCIQASSRTGDSRSLLGEHHNRSPAMIHDGTNMKSSLESSNNSCRLIASDYNATPCHSSKDQVLVTPGTNASVVTLKDSSQVHSASSQQFVRTGPWTQSASHEASSPSTSALKPSLDPPAMKNLYGGFTQGSAHPGPPSFSNQQPNDGRLQRTSESLPGVEARARGHPTVTAQPALEIHSRNGGAQKGPRIANVVHRFKCSVEPLEIGVVLSGRLWSSSQAIFPKGFRSRVKYFSIVDPIQMAYYISEILDAGMQGPLFMHLYILLLISFLQPPGSVDGLEMFGLLSPPIVQAIWARDRDHICTEYWRSRPHVLIEDPNNRHMLSQGPPLLALRGLIQRANRDELQVLRSLMTNSNNLDDSSRQQAAHIIEEEIAKQLC

SEQ ID NO: 127922 - protein, 76 aa, Oryza sativa
  Clone ID: PAT_MRT4530_30325C.1.pep
GIRRQVMVLIKKVGGFFFSEQGLLDFNGGGPSPSVLDPSLMVLSCVLKPNNVFLVGTHLVRCMVKLAPPSPILDPS

SEQ ID NO: 127923 - protein, 63 aa, Oryza sativa
  Clone ID: PAT_MRT4530_30326C.1.pep
SALLRTASSTSISSGRRRDASRRCHGHRVRASTRLSPRTPTPYPPSRTLASPMWLVTDLLRRA

SEQ ID NO: 127924 - protein, 60 aa, Oryza sativa
  Clone ID: PAT_MRT4530_30327C.1.pep
GGIISVSKKEPSFIPICTQALQDTYSHYSLHFALQVTLFGGSMGKIGRGLLSGIALKMIK

SEQ ID NO: 127925 - protein, 74 aa, Oryza sativa
  Clone ID: PAT_MRT4530_30328C.1.pep
LHMLQQKQQRGNAGFTPAQGCSQPRTTANIAVTHNLELNLIILPHTSLLSLLIMYSTIKHSNQNPSMSQKRKPQ

SEQ ID NO: 127926 - protein, 77 aa, Oryza sativa
  Clone ID: PAT_MRT4530_30329C.1.pep
CSRSCYNLRLISALKRVLNFQSSMYSSITSGFLFAMSYDSFQLFKFQIFIKIKSFTALLIFPRSIPWLLQWQSGQTK

SEQ ID NO: 127927 - protein, 834 aa, Oryza sativa
  unsure (1)..(834): unsure at all Xaa locations
  Clone ID: PAT_MRT4530_3032C.1.pep
WASTSSPXPAGLRRRRLVFLPTRLAYYATAVGRLRLHHRLASVAADWCPRLYGWLVTPPFMGVHVFAXGWPSPPPTGVSAYTVGLLCHRCWASTTSPPACLRRRRLVPPPTRVAYYAAAVGRLRLHRRPAFAAADWCFRLHGWPIMPPLLGVYDFTAGLSPSPPSGASAYTAGLLCRRCWASTTSPPAYLRRRRVVPPPTRLAYYAAAVGRLRLHRRPASVAAEWCLRLHGWPIMPPLLGVYDFTAGLPPSPPSGASAYTAGLLCRRCWMSTSSLLAHLRCRRLVFPLTRLTYYAAISGHLRFHRRPPSSPPTGVFIVIDGRLCSHIGHFCHHQGEYYKAKXMDQSEHHPRLASTAADWCFRLHGWPXMPPLLGVYVFTDRLAFAAADWCFRLHGWPLXPPLLGVYVFTDRPPRPPPTGASACTAGLXYAAVVGRLRLHRPAASSAADWCFRLHGWPIXRRCWASTSSLTGXLRRRRLVFPPARLAXMPPLLGVYVFTDRPPRPPPTGASACTAGLLCRRCWASTSSPTGXLHRRRLVFPPARLAFMPPLLGVYVFTDXLAFAAADWCFRLHGWPLXPPLLGVYVFTDRXPSPPPTGVSACMAGLYAAVXWASTSSPTGLPSPPPTGVSACTAGLXYAAVVGRLRLHRPAXLVRRRLVLPPARLAXMPPLLGVYVFTDRXPSPLPTGVSACTAGXLCRHCWASTSSPTGXLRRRRLVFPPARLAXYATVVGRLRLHRRACXAAADWCFRLHGWPLCRRCWASTSSPTGXLRRRRLVFPPARLAXYAAVVGRLRLHRPACLRRCRLVFPPARLAYYAAVVGRLRLHRPAAASATD

SEQ ID NO: 127928 - protein, 576 aa, Oryza sativa
  Clone ID: PAT_MRT4530_30330C.1.pep
MLVGSRRFEEEEWGEGAGAAATMQIRLSPSMRSITISSSGIGIGGGNGGGGGGGGGVGSGLLDLMKLKAAARHFSYRTVFHTVLILAFLLPFVFILTALVTLEGFNKCSSLDCLGRRLGPRLLGRGNDGSMRVMRDLYRMLDEINSEEVPVDLKVPDSFDEFIWDMKNNDYDLRSFAFRLKATMESMDRELRTSRLSEQLNKHYAAIAIPKGLHCLSLRLTDEYSSNALARKQLPPPELIPRLSDNSYLHFVLASDNILAASVVVSSTIRSSLKPGRIVFHVITDKKTYPAMHSWFALNTLSPAIVEVKGVHQFDWLTRENVPVLEAIETQHTVRSRFHGNHLARNSAGDSPRVFAAKLQAGSPTYTSVLNHIRIYLPELFPNLNKVVFLDDDVVVQRDLSSLWDIDLGGKVNGAVETCRGGDTWVMSKRFRNYFNFSHPLIANNFDPSECAWAYGMNIFDLSAWRKTSIKDKYHHWVRENLSSNFTLWRLGTLPPGLIAFRGHVHPIDPSWHLLGLGYQEKTDIPSVQKAAVIHYNGQSKPWLDIGFKHLQPFWTRHVNYSNEFIRNCHIMEPQL

SEQ ID NO: 127929 - protein, 135 aa, Oryza sativa
  Clone ID: PAT_MRT4530_30331C.1.pep
MSVEIVDGSTVRSFVDDEAAFNASVDGRFAALDADRDGVLSYADMSGELMALRVLDTHFGVDDGHGGADDGLYRGLFARFDRDGDGKVGLHEFRAEMKEVMLVVANGLGFLPVQMVVEDGSFLKVAVDRELAKAA

SEQ ID NO: 127930 - protein, 265 aa, Oryza sativa
  unsure (1)..(265): unsure at all Xaa locations
  Clone ID: PAT_MRT4530_30332C.1.pep
MTTALFLRCGCLAAAPALRRGGAALRPRRTPSRLVAVGATSSSGDGVTTAADAVLRGVGGADGSPAGKPRGYGLVGGANGAMAPPPPPTTKSTAVETTVERVIFDFRFLALLAVAGSLAGSLRCFLNGYLSGEDVXGEYCAEGNNGVRTGELVLLPVQVIRFTVVATLLLPAGIGLLGFSSLITSTGVHKKQXRCIRITSLSGMLALRVKPKWKKTAFLDELITKRGQVTVVILPVKMVESNNMVKKTSELELLSYSVCIYLSSA

SEQ ID NO: 127931 - protein, 173 aa, Oryza sativa
  unsure (1)..(173): unsure at all Xaa locations
  Clone ID: PAT_MRT4530_30333C.1.pep
GGNRRPETAGGGGARVGSGSGVRAAVWGGNVVAKLDLAAAKPVVVAARRDDGXDGGEWWLEITSNGGERGATRGAREGAMGARANGEKERGWHREAFYSARESRAWPXRAATTGEEVGRHRGVAAAIRCRXFGGKWGKECGGGGATWPRDEGERAGGGEGGIGGDVGRPWRRL

SEQ ID NO: 127932 - protein, 61 aa, Oryza sativa
  Clone ID: PAT_MRT4530_30334C.1.pep
ATGLPGRPTAGPPWRPSSRPPGRPPSCPGKTFYSSQKKVRPLPRIAPGKQERGAGSALTCA

SEQ ID NO: 127933 - protein, 43 aa, Oryza sativa
  Clone ID: PAT_MRT4530_30335C.1.pep
MSRCFPFPPPGYEKTARPDGQLASHLLEKEKHKEKKHKKDKKD

SEQ ID NO: 127934 - protein, 84 aa, Oryza sativa
  Clone ID: PAT_MRT4530_30336C.1.pep
FDTSKTSRLNTMILAALIWTLWSARNDMIFRNKLISSPLIISFRLIGFLLQWKILLKPEKAHDLEMKTQAMQGVLVSLRRAGIG

SEQ ID NO: 127935 - protein, 69 aa, Oryza sativa
  Clone ID: PAT_MRT4530_30337C.1.pep
KQKEPIHLFSNNRLPIKGSCFVGIIPLLIDPYGMEVSPFFIRSRKYERLSKIGESPILGEKQTTRPICN

SEQ ID NO: 127936 - protein, 75 aa, Oryza sativa
  Clone ID: PAT_MRT4530_30338C.1.pep
MGEAVAAAAPGMRRTAAGDALPSTRGERRRSGAALSQSEDSTMRKVAGEAPSGAADLVPRNQITVAYPRVDVAGA

SEQ ID NO: 127937 - protein, 106 aa, Oryza sativa
  unsure (1)..(106): unsure at all Xaa locations
  Clone ID: PAT_MRT4530_30339C.1.pep
IWRGERAGRGPRLNNHQCAAPQLSLTAFNAVRADVRCNQSVTGLLPVTSDXNGWPCPHVTSVTGGVEVEGMTGLSPVSGEGWRWVPLKDRLLLSFRAKARIVARSR

SEQ ID NO: 127938 - protein, 63 aa, Oryza sativa
  unsure (1)..(63): unsure at all Xaa locations
  Clone ID: PAT_MRT4530_3033C.1.pep
FFFFFGSKPNSAPHFLISCLEKVHPSSLNLSSNYKIVPQPQNQIYDIPXLYKTVPFRFFGGFD

SEQ ID NO: 127939 - protein, 58 aa, Oryza sativa
  Clone ID: PAT_MRT4530_30340C.1.pep
KLIAPSTMKIKIIAPPERKYSVWIGGSILASLSTFQQMWISKEEYDESGPSIVHRKCF

SEQ ID NO: 127940 - protein, 34 aa, Oryza sativa
  Clone ID: PAT_MRT4530_30341C.1.pep
LTELEPTPPLHAKYDQKPQTLKRRHESSLTPQTN

SEQ ID NO: 127941 - protein, 89 aa, Oryza sativa
  Clone ID: PAT_MRT4530_30342C.1.pep
MAVTPHHRLYEFAKTALIKIFAFPYATVCDLYCDDGVDTDKWGDAQIGHYIGIDASASGVNDARELWESRKKLFTSEFIELDPSADDFE

SEQ ID NO: 127942 - protein, 105 aa, Oryza sativa
  unsure (1)..(105): unsure at all Xaa locations
  Clone ID: PAT_MRT4530_30343C.1.pep
VERRRGGALALRWMEDCDAGGNTCSRATRIRGXDXSAEEVREEAGTAQARALLRRQKRRLWWLVLKGKGKGKGVKWIRLDETKLVARGLGRQRSGEGDRLVAATA

SEQ ID NO: 127943 - protein, 85 aa, Oryza sativa
  unsure (1)..(85): unsure at all Xaa locations
  Clone ID: PAT_MRT4530_30344C.1.pep
FFFFFYHTRNTKQQHFAGNAVXKIKLSHQAMELTDSETISNYICIFSTSISKLENLSTRITEVTLSLPCKKEKKRKEKKERSPFP

SEQ ID NO: 127944 - protein, 160 aa, Oryza sativa
  unsure (1)..(160): unsure at all Xaa locations
  Clone ID: PAT_MRT4530_30345C.1.pep
MRGEGGDVGARCGRGVEARRGRGRNEEDGGAAVSAAAVGASAPAAGGKKRERGRGGWRGGGRRGEEANAAAAGAERGREAAETAGAAGGAEGGAERGRGDRRVGGRHAGTTTRKGGERNRRPTTAEAGEHGARLLTLADQDPAPHXPPTAAPPAALVEAE

SEQ ID NO: 127945 - protein, 93 aa, Oryza sativa
  Clone ID: PAT_MRT4530_30346C.1.pep
DICPMYYSSVRLCSFGSSPVWSKPVTCVCFKFQMGKYRILCNWIQKIVMLPIYPLEMLTDSDSFPPTCELRCETLYFVIINLLVKLWKNIVKK

SEQ ID NO: 127946 - protein, 61 aa, Oryza sativa
  Clone ID: PAT_MRT4530_30347C.1.pep
SKVHHRSLNLYRCVIPVPKIANRPFRSSNLFDYVIPVPKLADHSFRSSNLFSCVTTVPKQD

SEQ ID NO: 127947 - protein, 86 aa, Oryza sativa
  Clone ID: PAT_MRT4530_30348C.1.pep
KTCKILSGMNYLAIYPPSLKCLMKAVMLALFSTFPILKVQTKQHLPGPIIKYLLKHQASINFTRFRTHPKGQGHNIWSNSRPYFVP

SEQ ID NO: 127948 - protein, 120 aa, Oryza sativa
  Clone ID: PAT_MRT4530_30349C.1.pep
KGHLKIIWTGTQELHEPFLWGCFLTNIMVHYPPLVPQKSKFERKKGRELFNRVIPNQIHSSPESFECQMANTPLPTGEADLPARRGPIKSTGITGGRCRRRGRRNNPIWPGGAPPFAWGS

SEQ ID NO: 127949 - protein, 743 aa, Oryza sativa
  unsure (1)..(743): unsure at all Xaa locations
  Clone ID: PAT_MRT4530_3034C.1.pep
MRQPDRQINTHPADSNPQTGVGLEASQLSGRSAAGLSSPPPLLITTTTSPPACLRRRRLVPPPTRLAYYAAAVGRLRLHRRPASVAAEWCLRLHGWPIMPPLLGVYDFTAGLPPSPPSGASAYTAGLLCRRCWASTTSPPACLRRRRVVPPPTRLAYYAAAVGRLRLHRRPASVAAEWCLRLHGWPIMPPLLGVYDFTTGLPPSPPIGASAYTAGLLCRRCWASTTSPPACLRRRRVVPPPTRLAYYAAAVGRLRLHRRPASVAAEWCLRLHGWPIMPPLLGVYDFTAGLPPSPPTGVLAYTVGWSHHRSWASMPPPTRLAYYAAAVGRLRLHRRPASVAAEWCLRLHGWPIMPPLLSVYDFTAGLPPSPPSGASAYTAGLLCRRCWASTXHRWLTFVAVDWXDQSEHHHRXPRPPPTGVSACTAGLLCRRCWAPTSSPTGLPSSPPTGVLACTAGLYAAVVGRLRLHRPACLRCRRLVSSPARLAXMPPLLGAYVFTDRLAFAAADWCFRLHGXAFMPPLLGVYVFTDRLAFVAADWGPRLHGWPIMPPLLGAYVFTDRLAFVAADWCPRLHGWPIMPPLLGAYVFTDRLAFVAXRLVSSPARLAYYAAVVGRLRLHRPARXVAADWCPRLHGWPIMPPLLGAYVFTDRLAFAAADWCPRLHGWPIMPPLLGAYVFTDRLAFAAADWCFRLHGWPIMLPLLGVYVFTDXAAASAADWHQYLQHKLPTFAMAADWFLHFHGCM

SEQ ID NO: 127950 - protein, 99 aa, Oryza sativa
  Clone ID: PAT_MRT4530_30350C.1.pep
KFFAPVLAGKAPFPRKFLRGLAFHKKIEKQVGPPVGPANFIGNVGNPFKKWGPPPTPRVFWPTAGEPKKGAALWAGKARPKSGAPLLYQKGWVRPPQGG

SEQ ID NO: 127951 - protein, 861 aa, Oryza sativa
  Clone ID: PAT_MRT4530_30351C.1.pep
MRSSRGVIRHSVWCLVFVWSWRVAAAQDQQAPKTDPVEAVALNTIMRRWGKEASSEWNVSGDLCSGFAADKNDWDYYPNINPFIKCDCTFSNNTLCRITKLDLNYNYLTGFIPSFIGKFTSMKYLALGFNPLSGPLPKELGNLTNLISLGISLNNFTGGLPEELGNLTKLKQFLASDNGFTGKIPDYLGSMTNLEEMRIGDIVNGISPLALISNLTSLNTLILRNCKIYGDLGAVDFSMFEKLSLLDLSFNNITGKVSQSILNLGNLQFLFLGNNNLAGRLPDGISSSLKAIDFSYNQLTGSIPSWASQNNLQLNLVANNFLLGSTSNSNTSTRGSDNTIYEADPANLGAATYYVTGQTRWGVSSVGHYFRATDAKNIIYSSQNFNNVVDSKLFETGRVSPSSLRYYGLGLENGNYTVLLRFAEIAFPDSQTWLSLGSRVFDIYIQGALKEKDFDIRKTAGGKSFSVVNRSFMVTVSKNFLEIHLFWAGKGGGIYGPMISALSVTPNFTPTVRNGIPKSESKVGIIAGISIGAIVLVLAALFGVFTLLKKRRALAYQKEELYYLVGQPDVFNYAELKLATDNFSSQNILGEGGFGPVYKQYFVHAQNIHVTNLAGKTPLLVYEYLENGSLDQAIFGDSSLNLDWVTRFEIILGIASGLTYLHEESSVRIVHRDIKASNVLLDTDLTPKISDFGLAKLYDEKQTHVSTRIAGTLGYLAPEYAMRGHLSEKADVFAFGVVMLETVAGRPNTNNSLEENKIYLLEWAWGMYDKDQALEIVDPTIKDFDKDEAFRVINVALLCTQGSPHQRPPMSRVVAMLTRDVDVPKVVTKPSYITEWQLRGGGNNGNTSNSYAGSSYQPEVQ

SEQ ID NO: 127952 - protein, 88 aa, Oryza sativa
  Clone ID: PAT_MRT4530_30352C.1.pep
PKHNSVQGLQLAPLLNKGVFSGETIAFRFRNCQGCFHTLMLHLSRKDTRSQAALCHDHALKTSHLWHEKIKLTNKQTDNCGRVGGRVG

SEQ ID NO: 127953 - protein, 483 aa, Oryza sativa
  Clone ID: PAT_MRT4530_30353C.1.pep
MRSSSSKATPTTSPAFPVLGFPPSAKSPRPNKGEDGGGEAEASHRRGKGDAMWDLNDSPAAEAAPPPLSPSADDSGASSSSAAAVVEIPDDADDDSAAVVVVTRQFFPPAVPGGGGDPAPGNARAGWLRLAGAAPPVAAAGPAASAAVSKKSRRGPRSRSSQYRGVTFYRRTGRWESHIWDCGKQVYLGGFDTAHAAARAYDRAAIKFRGVEADINFSLEDYEDDLKQMSNLTKEEFVHVLRRQSTGFPRGSSKYRGVTLHKCGRWEARMGQFLGKKYVYLGLFDTEEEAARAYDRAAIKCNGKDAVTNFDPSIYAGEFEPPAAATGDAAEHNLDLSLGSSAGSKRGNVDGGGDDEITGGGGGGAGSDQRVPMAFDLDWQTAAARSTKAKFLSNGDPGTAGGLSLTIGAGMAGHWPPQQQQGWGNAGGMSWPLPPHPPPPPTNAAAAATATAAAASSRFPPYIATQASTWLQKNGFHSLTRPT

SEQ ID NO: 127954 - protein, 61 aa, Oryza sativa
  Clone ID: PAT_MRT4530_30354C.1.pep
LLCICIYNTLFFCVKASTTLKYQSTLFTEVVACVIFCLSIEPIFLVNLSVCPVNYSMFFWY

SEQ ID NO: 127955 - protein, 237 aa, Oryza sativa
  unsure (1)..(237): unsure at all Xaa locations
  Clone ID: PAT_MRT4530_30355C.1.pep
EEFVTCSRQEHGVPXGSSKYRGVTLHKCGXWRLGMGQFLGKKYVYLGLFDTEEEAARAYDRAAIKCNGKDAVTNFDPSIYAGEFEPPAAATGDAAEHNLDLSLGSSAGSKRGNVDGGGDDEITGGGGGGAGSDQRVPMAFDLDWQTAAARSTKAKFDQNSNHPQMPPVLQVTHLPFSPRHHHQFLSNGDPGTAGGLSLTIGAGMAGHWPPQQQQGWGNAGGMSWPHPPHPPPPPTNA

SEQ ID NO: 127956 - protein, 57 aa, Oryza sativa
  Clone ID: PAT_MRT4530_30356C.1.pep
DYSWADPTWEQDHLPSHSPRQMRWRSAPFPHLFSSEKSGADETADFLSFTATNSINT

SEQ ID NO: 127957 - protein, 101 aa, Oryza sativa
  unsure (1)..(101): unsure at all Xaa locations
  Clone ID: PAT_MRT4530_30357C.1.pep
SEKAAPPMPHGPPPRRVRPEAFEASLRNVRWPPKXFRPSLTEKYDDGVNPSESLQIRTTIIEAAGGDDQVMASFFPMALRGQARVASFGLVGWLRCLARLN

SEQ ID NO: 127958 - protein, 43 aa, Oryza sativa
  Clone ID: PAT_MRT4530_30358C.1.pep
SHNMMCVLTVSHVVVRGLTDQSERIIRLLTASRDQNERIITMY

SEQ ID NO: 127959 - protein, 95 aa, Oryza sativa
  Clone ID: PAT_MRT4530_30359C.1.pep
MAGDDDQPRRRWRRRAGIPGGDAPRTGQRERPYRAFIRSVAVGWGRHGHMPDDGRWPRCVDSYVTELATTASHDDSRPPCTYALPQRMATKTRLR

SEQ ID NO: 127960 - protein, 169 aa, Oryza sativa
  unsure (1)..(169): unsure at all Xaa locations
  Clone ID: PAT_MRT4530_3035C.1.pep
SEHHHRLAFAAADRCLRLHDXPIMPPLLGVYVFTDQLAFAAANWCLRLHGWPIMPPLLGVYVFTDRLAFVAAVDWCLRLHGWPIMPPLLGVYVFTDRLAFAAADWCLRRRLAFVSADWCFRLHDWPIMLPLMGIYVFTDRLAFAATANRHHHLQRKLFTSAADWFLHSH

SEQ ID NO: 127961 - protein, 178 aa, Oryza sativa
  Clone ID: PAT_MRT4530_30360C.1.pep
LAGFSATLQAIISFVENSGDHIKFVRAAKHQIVFLVKGPIYLVCISCTEESYEGLRGQLELMYGQMLLILTKSVNRCFEKNPKFDMAPLLGGTDAVFLSLIHAFSWNPATFLHAYTCLPLAQSTRQAASAVLQDIADSGVLFALLMCEHKVISLVGAQKATLHPDDIFLLSNFILSSE

SEQ ID NO: 127962 - protein, 507 aa, Oryza sativa
  Clone ID: PAT_MRT4530_30361C.1.pep
MDVVVESPPVRDEKKVDVAAIGGAPPIVFESFAPSTQRDSTIIKKEEKMEAAKAEMGEVREENERLKTMLTRIVSDYKSLHTHFLDVVKVKEQTAAELSGDDDDDEPDDLVSLSLCTRPNAAATRRKGHERTPSSGGGGDDGRLSLGLSCARGGVASDDDDDKQASRRALPPMPVLNLSSDSSGDAAGAGAGEPTQPNKASRSSSGGGDGADDEVLQQQQAKKARVSVRVKCDTPTMNDGCQWRKYGQKISKGNPCPRAYYRCTVAPNCPVRKQVQRCADDMSILITTYEGTHSHPLPPAAAAMASTTSAAAAMLTSGSTNSTMHGSGGVHHHLPFASAVGGGGGVGLLGPTTISTATSCPTVTLDLTAPHSLLHPSSASPYAAAAAGYESSRALPAAWSSGYLAYGGAAAAQPYYAKGVAPSPFGHHFGMMGMAAAAARPAPEQLFGGQTTSPYLQRAIGGGGVAPAAVTDTIAKAITSDPSFQSVLAAAITSYMGRGGGAAAPNK

SEQ ID NO: 127963 - protein, 145 aa, Oryza sativa
  unsure (1)..(145): unsure at all Xaa locations
  Clone ID: PAT_MRT4530_30362C.1.pep
MVAVVPANFGEGDGYGEHQXSKGSAVVAAARPGAAWSXWPNRAATPGGGAGGTPASDXMGEERGKGVLGIENPFLPSISEDLRFKERRRYGGGKLEVSRRHSFVVRPRASVCGRVARAGRHELGASVRGIGARQHGAGSVRKCCL

SEQ ID NO: 127964 - protein, 111 aa, Oryza sativa
  Clone ID: PAT_MRT4530_30363C.1.pep
AEVELAWAVDGGDGALPGGRRPVAERAAAAAVAELARAGTAAARRSSPRQPRRGVPMAVIYKGGTMCTHYTAVVWKNTTGGGGGRVVCTSGDTIMVCSYWPPGNYVGVKLY

SEQ ID NO: 127965 - protein, 401 aa, Oryza sativa
  Clone ID: PAT_MRT4530_30364C.1.pep
MRQQEGGDHRHVAADDELLARLSSQRDNDNGSTPLHLAASINGLPSALYIPICSPRVLAPLRRPKPVELLLKANEFAAYQPDNQGMYPIHAAASAGSLETVKILLEKHPDCATLRDARGRTFLHAAVEKKRFGVVKYVCHWKRKESMMPLKCYYAWDLRVHIRTLLLKLGAPYGESQSHIFNKKRHAIIVDPKFKGGEEKMLENVTAATQVLALFSVLITTVTFASVFTLPGGYRSAGDGGSAAGTPLLAGRGCYAFDAFILSDALAFVCYFMATSVLLYAGVPAYKLEVRLRHINFAYSLMMNSGRSLAAAVALGLYVVLLPPVGRTIAIAIAAAMVMLALLLSKASEGIESLFGIAIARNRKLSIRDSVVGFTIYVGERYWSFILIFGLPAIRKWARAG

SEQ ID NO: 127966 - protein, 117 aa, Oryza sativa
  Clone ID: PAT_MRT4530_30365C.1.pep
RLSTLTLASLPQRSSAAAAPSAIAADGLLPAPPRCSPPPTLAQQRHHQRPSRAPVSSLLPGCLVNRRRRRAAPAPRTGLRLAASYCDVGTTLSSPICFPVRSLVEIPWIIELEAQVL

SEQ ID NO: 127967 - protein, 217 aa, Oryza sativa
  Clone ID: PAT_MRT4530_30366C.1.pep
MDPPARRLMDSRAAQLAAPLPDPYSAETFEDLLRELGVDPSIHTIVRSAGRWMDPAAAAARVPVRFHRTLQRLGIDPNSDARSIRDMLQEFYRVVYHGEVYWAGRVIRPRPSSMPTPVIGRRRRAADGDAPMQPPSKYARVHAVSRDVLLGLALTKACDARQEECAVCLSDFEEKDRLRTMPCNHSFHEICLFRWLSDSCLCPLCRYALPKQQQVRL

SEQ ID NO: 127968 - protein, 51 aa, Oryza sativa
  Clone ID: PAT_MRT4530_30367C.1.pep
MVGWMDTVFIFGGREEVALSLDGGPHDLGSLAPASAPPLLELELGQTVSAL

SEQ ID NO: 127969 - protein, 82 aa, Oryza sativa
  Clone ID: PAT_MRT4530_30368C.1.pep
MRWVGSVGRHRRSETRQSSVKTSEDTSGISGSRKDTLNQMGRSLLIGEPQGGACISDGTPEENFSLSLLSFSRLRLWGARCN

SEQ ID NO: 127970 - protein, 54 aa, Oryza sativa
  Clone ID: PAT_MRT4530_30369C.1.pep
MTSSRQKIRIILVQAPDQITKRVVETNNTDEIVVEGFDEISRQIGFVYSGFANY

SEQ ID NO: 127971 - protein, 177 aa, Oryza sativa
  unsure (1)..(177): unsure at all Xaa locations
  Clone ID: PAT_MRT4530_3036C.1.pep
GRPLNCQPANGYKESNXTGDTGKIIVEGFDEISRRVGSVDSGFVNFGGGSGGGASSQRQRRRERGGGEWIRHLLLLPSGDDGIEEGWRLAHAAAVLERGKSSIDGPWEVDPPPPGLGSGAGMRAAGAVALSVNSRLSGTGERAGADPAPPPPSPPAAAAKRRDGGIKVASAGGGVYL

SEQ ID NO: 127972 - protein, 1123 aa, Oryza sativa
  Clone ID: PAT_MRT4530_30370C.1.pep
MTPVVHCSVGNISLFHIGSFRPSHEIQIRRFRSTERYSRVPSRRLLQPQRAFNLISIYKRSSWSSARRPRTLSAATVGTDVTVEDPNPPPSGETSEESSEDTAPDTAEASEQAEASTSSIPKAGRNIRKSEMPPLNDEDLVPGASFTGKVRSIKPFGVFVDIGAFTEGLVHISRVSDGFVKDISSLFTVGQEVSVRLVEANKETGRISLTMRTGGDYVKPKTETPKAASGGRNTTATTSRGSPRQTRERDEAKSMGETNYVQGQFLDGVVKNSTRAGSFVTLPDGSEGFLPREEEAVALFTLIGHSALEVGQQVRVKVLNVVRGQVTLTMKEGEDDEEDLASLNTQLKQGWSRGTNAFELAFRRNKEISAFLDQREKIIVPDVQEAAVASVGTELDAEVGIEQSPGKEPETGNAESVAIDSSITEVKETDSIAAVEKDSEISKTESVETASSVVISEDDSTVDGKLVEPTASVSATETEIKEDSSEGSVTTEPTEAASTEFVTAVVEESAPTASSVETSEDDSTVDDKLVEPTASVSATEAESKEDSSEGSVASTESVTAVVEESAPVSSVAIEVPAPEASEASAQEIIEDSTTVEGAADDQTVESDSPPPEGVELSSNGAPDSSIAEDKPDEPEESLIVEEVPVTASSESEDKEPAAVPEEVAASSEKTADVAVAGAEASTATATISPALVKQLREATGAGMMDCKKALAESGGDIEKAQEFLRKKGLAAADKRAGRATAEGRIGSYIHDSRIGVLIEVNCETDFVSRGDIFKELVDDLAMQVAACPQVQYISLDDVPEEVMKKETELEMQREDLLSKPEQIRSKIVEGRVKKRLGEYALLEQPFIKNDKVTISEWVKQTIATIGENMKVNRFVRYNLGEGLEKRSQDFAAEVAAQTAAKAPPAAPPKDDKPEETAETEEKKPAVAISAALVKQLRDETGAGMMDCKKALAETGGDIQQAQEFLRKKGLSSADKKSSRLTAEGLIGAYIHDNRIGCMIEINSETDFVARNEKFKELVNDLAMQVVACPQVEYVSIEDIPESVVIKEKEIEMQREDLQSKPENIREKIVEGRISKRLGVLALLEQPFIKDDSKTVKDLVKETIATLGENIKVRRFTRYTLGEN

SEQ ID NO: 127973 - protein, 251 aa, Oryza sativa
  Clone ID: PAT_MRT4530_30371C.1.pep
MRSASNAASNVIMPLQSPTNGAYYPNSTACQGYSSFGSIPYSAPFETFGVPIIPCGSVALHEQQVMLGTDLFQSAGTKMKGGQLTILGNGPNSSVSCSVHVQQRNSGGNSSQGLKANVHMGAPPPWLEASERDQENESLSGYARPSSRKGKSGKLNPKRVGAAWAERRRAEMEMEKRGELVPETSDSSWLPNFGGVWQSGTRKESRKEFEKNHKPHEEKSNKLSLEMKPYISKRMRVGSNKGEQSDIDVEQ

SEQ ID NO: 127974 - protein, 133 aa, Oryza sativa
  Clone ID: PAT_MRT4530_30372C.1.pep
RHRRHCTGPRDHRCYRARPGYPRAPSWRGRRGELTGAQNNDGRRRTAAGGELQRRRGSGRRRRRDSGGSRRQRRSGRGAAPLGEPDGDNSERRRRPQRWRGAARLAATTRTDAAAVLWTTAEDVASGQCWRAR

SEQ ID NO: 127975 - protein, 322 aa, Oryza sativa
  Clone ID: PAT_MRT4530_30373C.1.pep
MAAAAAAVSRALQPRAVPVGFPQPQQLRAHLPVGVPQQLHPRGLPVMRSHHVVHVPLPRPAVAVAVPVPQVRPAQPQPVPRPPVAVPLKPESPKPPRARLYEGKDGTPTKKKCCNCKHSKCLKFLMRFCSISTVDSKRIPLLSLVPLSLCLYCECFASGVYCDGCNCSNCFNNVKNETARREAIDATLERNPDAFRPKIGSSPHANRNNMEAAGDLPLVGKHNKGCHCKKSGCLKKYCECFQANILCSENCKCMDCKNFEGSEERKALFQGDHKNSIHMQQAANAAVNGAFFFFFFSRKTFFFLLIEHLISLYPVHEMDIAS

SEQ ID NO: 127976 - protein, 245 aa, Oryza sativa
  Clone ID: PAT_MRT4530_30374C.1.pep
AVKQLILKFMVSVYEEARERWTWKNQVTEEGPYGFKILSQIRRQDHDCCTFSAMASTLEANVRVQHGRNDQFSIPHLQFIDAQSKISAPNTNETKVLRLLKSLKERDGGVYLDEDYDSEGNLRALDAKVCRVWKFNLYHVKDIIHLRSALHRLRRQGPLLAVIRISRNYDECRKSGHVYKYDPARICTYDDGKPKTHALCVVSFVTEKGTPCLECQDSHGTAWGIGGYLTVEIRSLKELYSVRVT

SEQ ID NO: 127977 - protein, 76 aa, Oryza sativa
  unsure (1)..(76): unsure at all Xaa locations
  Clone ID: PAT_MRT4530_30375C.1.pep
LLGFSIWLVLRSRSALIPTCHAQKFPNRISSRMCIKIPVQDRPGYTNDNVDIQIHVLQTSXKSYINAAEEKKRQQE

SEQ ID NO: 127978 - protein, 53 aa, Oryza sativa
  Clone ID: PAT_MRT4530_30376C.1.pep
RFCSVKSNSGAVDASSYLWLPLVLYRAITSAYYRGAVGALVVYDVTRHVTFEN

SEQ ID NO: 127979 - protein, 296 aa, Oryza sativa
  unsure (1)..(296): unsure at all Xaa locations
  Clone ID: PAT_MRT4530_30377C.1.pep
MGQLQQQHQEQPLRKDLYPQTEPYDFGFLKVSGVHTIYYEQSGNPQGHPVVFLHGGPGAGTSPGNRRFFDPEFFRIVLFDQVFGGSWGSTLALAYSESHPDKVTGIVLRGIFLLRKKELDWFYEGGAAAIFPDAWEPFRDFIPEDERNCFIAAYSKRLTSSDADVQAEAAKRWTMWEMMTAHLIQNHENIKRGEDDKFSLAFARIENHYFVNKGFIXLPSDSHLLDNVDKIRHIKAFIVQGRYDVCCPMMSAWDLHKAWPEAEFKMVPDAGHSANEVGVAAELVSANEKLKSMFTK

SEQ ID NO: 127980 - protein, 331 aa, Oryza sativa
  unsure (1)..(331): unsure at all Xaa locations
  Clone ID: PAT_MRT4530_30378C.1.pep
MGQLQQQHQEQPLRKDLYPQTEPYDFGFLKVSGVHTIYYEQSGNPQGHPVVFLHGGPGAGTSPGNRRFFDPEFFRIVLFDQRGAGRSTPHACLEENTTWDSVVRIEKLREHLGIPEWQVFGGSWGSTLALAYSESHPDKVTGIVLRGIFLLRKKELDWFYEGGAAAIFPDAWEPFRDFIPEDERNCFIAAYSKRLTXSDADVQAEAAKRWTMWEMMTAHLIQNHENXKRGEDDKFSLAFARIENHYFVNKGFLPLDSXLLDNVDKIRHIKAFIVQGRYDVCCXMMSAWGSYKXWPEAEXKMXXDAGHXANEXXVXAGELVXXNEKXKXCQN

SEQ ID NO: 127981 - protein, 121 aa, Oryza sativa
  Clone ID: PAT_MRT4530_30379C.1.pep
MGDIFIYYYSLGIKKTLSMTVSNKKGQACMHACSLLYKLSTGSLEMNHLHYFSFVSTLHLQKFTMLIEWCFNPNPSLTGTRKARRTLAGGLGLRLPLAPLTAPPPFLHTFKRTPPLRCPQA

SEQ ID NO: 127982 - protein, 173 aa, Oryza sativa
  unsure (1)..(173): unsure at all Xaa locations
  Clone ID: PAT_MRT4530_3037C.1.pep
YLICSLYPFAQSFKYILDILYYISCLLENIFQEQLSTLVGCGRVHRFIENVLEKCXVVTPNLPTKTDDLSHXSAGCGWTIXENWSSYDYNXVFDQRCSDSPTTFAILSVRSGGYXSTLLKTPCLYDSIPGSTKXSTANVLKALSQTLRLLDYSRTVDGARQGIXNKAMVYPPR

SEQ ID NO: 127983 - protein, 96 aa, Oryza sativa
  unsure (1)..(96): unsure at all Xaa locations
  Clone ID: PAT_MRT4530_30380C.1.pep
YTSDIIFSSRRVFLFTHYKLVDHVGPTPRYGXHKPITYYAPLRLTTPLTPTLDPLCLIYTVMYWCDLAGLCLATFVVPGNFCCVHEIQRLINHSVL

SEQ ID NO: 127984 - protein, 43 aa, Oryza sativa
  Clone ID: PAT_MRT4530_30381C.1.pep
NYRQHHRMNTSNIPHDSVLTQQNKTNLLYIYMLYRSMHTSCDR

SEQ ID NO: 127985 - protein, 76 aa, Oryza sativa
  Clone ID: PAT_MRT4530_30382C.1.pep
AASTQAHLASQKACLAPPRPPSSRPRSHERRGCYSRRYCCCAGNVLYVEHGVACNMDAYITRVCHIFICPVTLPCV

SEQ ID NO: 127986 - protein, 83 aa, Oryza sativa
  unsure (1)..(83): unsure at all Xaa locations
  Clone ID: PAT_MRT4530_30383C.1.pep
CAYTSRKVIFEAAVLTAAVVIRSTAYTFWAAXRGHDLNVLKPFLLSVVMXLILSKMIQIFSPWGKISVMIYGALASLACSGYM

SEQ ID NO: 127987 - protein, 102 aa, Oryza sativa
  Clone ID: PAT_MRT4530_30385C.1.pep
APRPQARRRRRRRRRRRCLALPVSRRGGRRHFPALSPPVRRAGRRRRRQSSARRRRRRRRRSRSRTGAGLRHLESGHTARRRARSPSRRRRRPRRLARARRS

SEQ ID NO: 127988 - protein, 38 aa, Oryza sativa
  Clone ID: PAT_MRT4530_30386C.1.pep
CRLCDLQRAEESLPAFCNVDIPNGTGWCCYWLGYPTTH

SEQ ID NO: 127989 - protein, 45 aa, Oryza sativa
  Clone ID: PAT_MRT4530_30387C.1.pep
CEEAVSDLANPTDINLITLCADLHAGTWPSDSLHAWSIAGYKEHS

SEQ ID NO: 127990 - protein, 151 aa, Oryza sativa
  Clone ID: PAT_MRT4530_30388C.1.pep
APLTHSNLPTMYMKGVGIKLDPSSSNHFFPFPFPSLPDPRLSPQHFPFQIHELSGRQEETETTIAELAGGASASLPPWASGDARQLFSNGKYDDGNSIHGLIREGGIPFPERDGSTTTEAASSTRISDAAAKGACSGGSRLGTASCGRRLR

SEQ ID NO: 127991 - protein, 133 aa, Oryza sativa
  Clone ID: PAT_MRT4530_30389C.1.pep
GRVGGRVGGRVGGVSLSSMNLSGRISPAIAALTTLTRLELDSNSLSGSVPAELSSCTRLRFLNLSCNGLAGELPDLSALAALDTIDVANNDLSERFPAWVGNLFGLVTLSVGMNSYYPVETPASIGNLKNLTY

SEQ ID NO: 127992 - protein, 93 aa, Oryza sativa
  Clone ID: PAT_MRT4530_3038C.1.pep
LGDCPIIVEHQHQLRALVVLLPVEHVRRLVLPPLLFSRALLVGLCVVVRALGNSPRKIFFAGSCGSLRVSNAAPTVSKSVCRARVTHRERHRG

SEQ ID NO: 127993 - protein, 103 aa, Oryza sativa
  unsure (1)..(103): unsure at all Xaa locations
  Clone ID: PAT_MRT4530_30390C.1.pep
GLVSTHGYKYVHXGNYKXTSRSIELLSVHHHPLFRGFYLSXGGTWHLMRDCIGFRSSAKGXVLCFTDPGNCIGYIGVVQGCIASTSQITLVRLIYLSAYLSYI

SEQ ID NO: 127994 - protein, 411 aa, Oryza sativa
  Clone ID: PAT_MRT4530_30391C.1.pep
MESLSSVSTIVRIAQEIAGAVSTVSRCRKLANRVQCIGDLLRELESSSAAAAGDDDEATRRLLAVLEDALHRALELVTSCQDSGCPRSLIDGGRMAGLFDEVDGDIDRCLLELGVANRILITRLEGLLHRNAFRSCDLPPPPPSPATIGTETETTVTVRIGMPRVEHIEHRVHMVQGATNVAAVVASSKDHLTGRSSAAPRGNVGVTDVVTVVASNKDKFTVKSGTAKRGNARVTDMAPVIASDSDKDKFTMRFGTATRGNTGVTNVAPVVASNRNKFTVRPDAATRGNARVTDVAPSAASNKDKFTVRSSGATRDNARVTNVAAIAGSNKNQFTFRNGATSIATLLQEPPSNGYGYCPYAEGLTTGESYRDTTGGGPFDAAATAAATYYYFPPFQHMFSEEDPTNTYTIL

SEQ ID NO: 127995 - protein, 157 aa, Oryza sativa
  unsure (1)..(157): unsure at all Xaa locations
  Clone ID: PAT_MRT4530_30392C.1.pep
GADPFRSPSVRSCSPAAPGGPTNQGSASRRCQPGWAPVYXAPAAVVKRQCVGHGAPGRRVEQLRQDCAAARRGRDSWCSAXSTMVGGIYGARRHRVGHPMAEXFPGCRXGDLERAAAASGVLHGTSMGQVGCYWLGYPSPGTVLALKLLVYDSGGAK

SEQ ID NO: 127996 - protein, 61 aa, Oryza sativa
  Clone ID: PAT_MRT4530_30393C.1.pep
QSCACTLTQKRRSLHLMKLQSSMLGLHMTATNVMHAPVVRFSLVHSYGCQTCDIFVQCLHN

SEQ ID NO: 127997 - protein, 61 aa, Oryza sativa
  Clone ID: PAT_MRT4530_30394C.1.pep
SYLFRCTIKNYTCMTVVSWSSKGAPIKEGPSELFIVCYIFFFLFFFFFFFSQVRGGGSTGI

SEQ ID NO: 127998 - protein, 56 aa, Oryza sativa
  Clone ID: PAT_MRT4530_30395C.1.pep
MGHSNVWNSHPKNYGPGSRVCRVCGNPHGLIRKYGLMCCRQCFRSNAKDIGFIKYR

SEQ ID NO: 127999 - protein, 441 aa, Oryza sativa
  Clone ID: PAT_MRT4530_30396C.1.pep
MGASGKWIRTLVGLRPAAEREKERGGGGGKGRKWSRLWRSSSSQRGGGNASASEVYSETSSSADALSSVVAAVVRAPPRDFRLIRQEWAAVRIQTAFRAFLARRALRALRGIVRLQALVRGRRVRKQLAVTLKCMQALVRVQARARDRRARISADGLDSQDMLDERGGRVDHVKEAEAGWCDSQGTADDVRSKIHMRHEGAIKRERARTYAQSHQRCSNHGGRPSSPAVSLKHHGNGATRSNHSWSYLEGWMATKPWESRLMEQTHTENSTNSRCSESVEEVSVGGPKLSDASSVKIRRNNVTTRVAAKPPSMISATSSDFVCDESSPSTSSVTPLSANNSLATERRSDCGQVGGPSYMSLTKSAKARLSGYGSHKPPLQRQRSGDLLHHNNRMAFSSIDVQSTAGSEVSVTSKRLNSLALKGRATRSLDKENERRPSSLL

SEQ ID NO: 128000 - protein, 84 aa, Oryza sativa
  Clone ID: PAT_MRT4530_30397C.1.pep
SSLHACRSTLEDPLSLRRGCWVIALLVPVAEAQQHCWSGRPCCTASANASRCTPHGTNVGNRTRFLRTLGFDMRCSKQCSVRKC

SEQ ID NO: 128001 - protein, 164 aa, Oryza sativa
  unsure (1)..(164): unsure at all Xaa locations
  Clone ID: PAT_MRT4530_30398C.1.pep
RMWNRIPARLLPRMRLPSSDIDAPHIAHTLGRARATTDVQWLTTRYTRPRDPTHAGREPPMAKHDVFFGAVADATKRTRRQLVATPALPRARPAFFATRAPRPQRRGANSRVFPHAPPPXARGRDRPPGEVKWTFAEGFDLEGFGFGIELDDRSGIEILRWHGH

SEQ ID NO: 128002 - protein, 135 aa, Oryza sativa
  Clone ID: PAT_MRT4530_30399C.1.pep
PPAPPPPNASSCLAVAGNRAAGREGGGGENAPAAEHPLGVGGSVTHARWKAAARAAGGADPASPVEDLAPWRPDREKCSGGAPRRRTASSSRRWWRGKTAGGLTLAVTAAGPRACGSGGAPRWDSSRRQRPRRHG

SEQ ID NO: 128003 - protein, 95 aa, Oryza sativa
  unsure (1)..(95): unsure at all Xaa locations
  Clone ID: PAT_MRT4530_3039C.1.pep
RCCVAGNPRRANVSSPLXRPRDICRPSHLNLQHGRHYSDESRIRRHRCLARICMPYSGAIRAPTRPPTYLNPLRLXFTRTQPSXXFGQPSSLHTK

SEQ ID NO: 128004 - protein, 94 aa, Oryza sativa
  Clone ID: PAT_MRT4530_303C.1.pep
TGATFAISITYRNLQSCALLDCSDLSINSTRFHELAPASRFGRETSPAPVRPPLRPKQSGGRKAGSDDGAWAENGGKAFPLFRRAWRGNFRAET

SEQ ID NO: 128005 - protein, 43 aa, Oryza sativa
  unsure (1)..(43): unsure at all Xaa locations
  Clone ID: PAT_MRT4530_30400C.1.pep
PSSTKVTVGKMYAQTKCXHGCHNKFKTCSVWMIGQIMDSCLQG

SEQ ID NO: 128006 - protein, 487 aa, Oryza sativa
  Clone ID: PAT_MRT4530_30401C.1.pep
MPSRRPSPLLLLLLALALAFLFLLLSPSAGIGDSRRRAAVPGAPALGGVVALQRGPMAVADELYVKLGSVFTVSFLGVVKATFLVGPEVQGGFYSRPESEVHQGGTYRMTVPMFGRGVMYDVDVATRSEQIAVCFEALRPTKLRSSTVTMVRETEEYFAKWGEQGTVDLKRELDLLILTIASRVLLGKEVRETMFADVVASFHELMDNSMHLISLCFPNLPIPRHRRRDTASARLKELFSRAIQLRRGSGRAEDDVLQRFLESRYRDGRAMSDNEITGMLIALVVAGQHMSSSASTWTGAFLLRDPKHLAAAVDEQRRLIGDDRVDYDALTTGMSTLHRCIKEALRMHPPAPALVRTVRRGFAVWTREGKEYRMPAGHSVVSYAAFNHRLGYVYRDPDEYDPERFGPERKEDRVAGKFSFTAFGGGRHACLGEHYAFLKMKVIWSYLLRNFELELVSPFPEVELNNIMLGPRGEVMVRYKRRKLTST

SEQ ID NO: 128007 - protein, 49 aa, Oryza sativa
  Clone ID: PAT_MRT4530_30402C.1.pep
VKKQNFKLPVVGYINTRYSANYFSISQLPLSYQTFNFNHSHTLRHMKII

SEQ ID NO: 128008 - protein, 132 aa, Oryza sativa
  unsure (1)..(132): unsure at all Xaa locations
  Clone ID: PAT_MRT4530_30403C.1.pep
MGCRGEACRGRASRGTAGTTGSSTAAATTSCCRCRRRSPPRPPAQEPAPPRPHPPRRTASTRRRPARTPGGXSRSRSRPATGPAAPSRRRRRPWSRRRSPGRSRRRRRGGCAGHGRRRRAGGGRRGWTASSP

SEQ ID NO: 128009 - protein, 135 aa, Oryza sativa
  unsure (1)..(135): unsure at all Xaa locations
  Clone ID: PAT_MRT4530_30404C.1.pep
RSTLEDPPLRAHRTSDRQYLCCVGCGGHRETRLHLFFTCPFSVRCWXTSGNHMESTHEFFQMNVLVRLNFARKGFLEIFFIASWHIWKQRNGFIFQNISPPFQSWRNHFKNKILQYICRMKDPLKQLVFDWLQTL

SEQ ID NO: 128010 - protein, 90 aa, Oryza sativa
  Clone ID: PAT_MRT4530_30405C.1.pep
LPTATATTNASPKRSKVAAGAGDDGDADADAAEEKPEPAKDYIHVRARRGQATDSHSLAERVRRERISERMKLLQSLVPGCNKITGKALM

SEQ ID NO: 128011 - protein, 34 aa, Oryza sativa
  unsure (1)..(34): unsure at all Xaa locations
  Clone ID: PAT_MRT4530_30406C.1.pep
XSXDPWVXDSLGYGLRFVMGLEEAFQDQVSMNQA

SEQ ID NO: 128012 - protein, 106 aa, Oryza sativa
  Clone ID: PAT_MRT4530_30407C.1.pep
MEVFQDVESVRLRSRVDGSVGRDLSTCLAAGRPCTSSLSSPTPQMRNDSHSRKINSFEQIRFVSSEQNKFRCSLNLQSFRGLIQSLGVSELKLAPMERFSRINWTS

SEQ ID NO: 128013 - protein, 355 aa, Oryza sativa
  Clone ID: PAT_MRT4530_30408C.1.pep
MAASATQEADCKASEDARLFFDAAKPPPFRIGDVRAAIPAHCWRKTPLRSLSYVARDLLIVAALFAAAATRIDVSVAWAAWPLYWAAQGTMFWALFVLGHDWRISHRTHHQNHGHIEKDESWHPITEKLYRKLETRTKKLRFTLPFPLLAFPVYLWYRSPGKTGSHFLPSSDLFSPKEKSDVIVSTTCWCIMISLLVALACVFGSVPVLMLYGVPYLVFVMWLDLVTYLHHHGHNDLPWYRGEEWSYLRGGLTTVDRDYGWINNIHHDIGTHVIHHLFPQIPHYHLVEATKAARPVLGRYYREPEKSGPLPLHLFGVLLRSLRVDHFVSDVGDVVYYQTDHSLNGTDWAEDAKHK

SEQ ID NO: 128014 - protein, 385 aa, Oryza sativa
  Clone ID: PAT_MRT4530_30409C.1.pep
MAASATQEADCKASEDARLFFDAAKPPPFRIGDVRAAIPAHCWRKTPLRSLSYVARDLLIVAALFAAAATRIDVSVAWAAWPLYWAAQGTMFWALFVLGHDCGHGSFSDSAMLNNVVGHLLHSFILVPYHGWRISHRTHHQNHGHIEKDESWHPITEKLYRKLETRTKKLRFTLPFTLLAFPVYLWYRSPGKTGSHFLPSSDLFSPKEKSDVIVSTTCWCIMISLLVALACVFGSVPVLMLYGVPYLVFVMWLDLVTYLHHHGHNDLPWYRGEEWSYLRGGLTTVDRDYGWINNIHHDIGTHVIHHLFPQIPHYHLVEATKAARPVLGRYYREPEKSGPLPLHLFGVLLRSLRVDHFVSDVGDVVYYQTDHSLNGTDWAEDAKHK

SEQ ID NO: 128015 - protein, 108 aa, Oryza sativa
  Clone ID: PAT_MRT4530_3040C.1.pep
MAAGSDGDLAGARVVGRGFGGHLHVEGDDANPKVLTYASNDDRRRPATRGGGGGGLDLADGGPPMAGDDGEGAAGPSVTRTRRRREEAVVTARATAQRGWWLAGDGGG

SEQ ID NO: 128016 - protein, 86 aa, Oryza sativa
  Clone ID: PAT_MRT4530_30410C.1.pep
TPSPLPPSPPPLPLSPVFLAAAGGGRRGGPAAASAGRRGGRWWRRWRPAAAAAPRGGPGGGGCPSGGPRGGGLRGGGWGRPGRRAL

SEQ ID NO: 128017 - protein, 323 aa, Oryza sativa
  Clone ID: PAT_MRT4530_30411C.1.pep
MGISHPLSDDFDASPVLSPPPPPSSCCPPAHDDHYLEHQISDIKRANSLMTDSQMFAHKMLLIPLPGRPMPSSVRLNGSGQKMKRAWAPNNQQNRDVTDSLDSSNYNSSKQQMSLAMSTLQSYYGLTPQNGAMTDAGTEMSLYSKGSLERINSETLVTSSRLPDTHNTDRSRNSEDTSNGFSATNGASGAKINGTAKAKQDGSIRRRQKVEADQVSNTTDTQDDVFTDPIKMTKSLLPRPISSIRQNMDTSNPESSLKSNGSFLSGFRSVRKSPSTPNFADAENGISMWSSSAWTFNHESFTRPLLDGLPKPTAPRRTKAALD

SEQ ID NO: 128018 - protein, 86 aa, Oryza sativa
  Clone ID: PAT_MRT4530_30412C.1.pep
VGTFIGADLAPIYRQSGNQGNTIQEQVVTCISYYHCQNANQKQTVFNGIDCLHISEMIVLFVDTKYHFKFVDYCFYLNTALNSCSS

SEQ ID NO: 128019 - protein, 68 aa, Oryza sativa
  Clone ID: PAT_MRT4530_30413C.1.pep
TRCTEPAQHPSRPVDAQVKRGTPPEVFNCRAAGLVRGMTNHPMEDYHVAELAEEKGNELGLFAIFDGH

SEQ ID NO: 128020 - protein, 73 aa, Oryza sativa
  Clone ID: PAT_MRT4530_30414C.1.pep
MELAAISNTSSSLSNLICDICLPPPPFACFADVPPALCDQLHRSRCSLPVLPPLPLGGILGGWSLCSTSSASS

SEQ ID NO: 128021 - protein, 89 aa, Oryza sativa
  Clone ID: PAT_MRT4530_30415C.1.pep
NDDSSLSGQGRFTSHGTRQTIPPYITQPRMQARIEMIAPCNGLPRNARISCAGGLGRRPAGETTSAAVLPPPPIVGILSSSCRRKPTRP

SEQ ID NO: 128022 - protein, 172 aa, Oryza sativa
  unsure (1)..(172): unsure at all Xaa locations
  Clone ID: PAT_MRT4530_30416C.1.pep
HQHTHLLPLFVFPQFKKRRRERGGGGEKVLDCSGGGGMWGRQYWGGGRRPSGGGGGVVVMFAWLSSQERQVRAYVELYAALGWACLVCHSEFLTLFFPDKAAMLADRVLAELVKELKVRPVPVVFASFSGGPKGCTYKVLQLIERRCEGQLSLVXYQLVRDCLCGQMYDSSP

SEQ ID NO: 128023 - protein, 184 aa, Oryza sativa
  Clone ID: PAT_MRT4530_30417C.1.pep
MAMFIYYECGTRTPKDVPLSVQLESFAYSGFTMAWSTSTDYVLVDERAFLRGRRAGEQATAGGGGGVRSRQGVTGGGRATAPQRGCGVGVAVLWRAERGGGGGVQRTTTYGSDGGRCRGRWRGGRSRPGEDDSDALGVSPGDLAFTVFVPSPESFHRVLRLRRPNNNVADGTRVHAALALDAMN

SEQ ID NO: 128024 - protein, 135 aa, Oryza sativa
  unsure (1)..(135): unsure at all Xaa locations
  Clone ID: PAT_MRT4530_30418C.1.pep
MPPNIDIRDKPRQTPYGACGGRXEGFSAISDIDEFVFEEEDYPVVDYVLMSKEQHRLRPIGXRAITRQIRDPNMYKILXLCLFYLNLAYTLVPMISLPSKYRSRDLKRLHIGSKEETVTDESSVTISKGNRQKVT

SEQ ID NO: 128025 - protein, 112 aa, Oryza sativa
  unsure (1)..(112): unsure at all Xaa locations
  Clone ID: PAT_MRT4530_30419C.1.pep
RHRLHVAFVPPPSPPVFVAGDACARAVAIAVXGWAGLSRAEPGFRRPSDQPRERSGPSVPWTGGGPPAWSRSTVDXPPLSRCRVGAPRARXPFSLSPEPLTGGPRMSAPRPP

SEQ ID NO: 128026 - protein, 271 aa, Oryza sativa
  unsure (1)..(271): unsure at all Xaa locations
  Clone ID: PAT_MRT4530_3041C.1.pep
ILPRGSELVARGGEDVAGDVALTAARERTTEVDVLAVEGNATIGEAAATASSAESVLPSCYSVEAFSKAYGFNIXPCSDISKWEKTNGPEVRPPVYEKKVGRPPKSRRKAPHEVQGKHGLKMSKHGVEMHCKYCNEPGHNQRGCKLKKTGLRPTQQPQRAATTTVEESXSNQPRGNAISNFKLTHDQLLTQIPNAMVSQMFDESSQVSQMNLAPGPLPDNQFVMTNTPTVRPTLLTTATKAGKARATKRKAAVVAPAKKATTSSSPSSPSK

SEQ ID NO: 128027 - protein, 59 aa, Oryza sativa
  Clone ID: PAT_MRT4530_30420C.1.pep
HLCLASQANSSSKTTQILIIYKEDYNQQFTRYDTTLRLQVRSRRIRSASNISTYNTTSI

SEQ ID NO: 128028 - protein, 81 aa, Oryza sativa
  Clone ID: PAT_MRT4530_30421C.1.pep
TLLSGGISLRPRGRLGRGMEDGAHLVEGHGPSLDGVHTYTRWHRVRLSSRTQTCMCIIFVFLTSCWNSHLSVDAPTSLHAM

SEQ ID NO: 128029 - protein, 66 aa, Oryza sativa
  Clone ID: PAT_MRT4530_30422C.1.pep
SMATTSSGVCRLLVTSRPMVGWELCKPQTCRTKSRRMLTCMTGGLSNRSLMAGPCSLTWPICTRTW

SEQ ID NO: 128030 - protein, 113 aa, Oryza sativa
  Clone ID: PAT_MRT4530_30423C.1.pep
NNPWKILIHLVRHIPTTLSSRCLLRMIWVAKAEKNLRVLCVDHIASSAAMCNLQRISAYIDSIFVFLNRMFVDLHALLQSNIEIDLLRDFKQSENTGVSDAHPATQGDMKFAL

SEQ ID NO: 128031 - protein, 1106 aa, Oryza sativa
  Clone ID: PAT_MRT4530_30424C.1.pep
MASLLLEQQEKLRRHVDEWRFRCRAAVAEIGPRSASTSVSSASVRLRVAPTDPGVGVGAASLLTAAAAAEDNVDVSKFVAVLSHSCLEISRLSDAASSNLYRQLLLFGHTAEGPNEALLEGEPQKTFAHSIPLLLEVYEIINGLVMILGNLLRQLDAICSVRDKNVRPLNSFKGLDLTTVFGSLGEGLMVFLLVDEILRHNGNTRSYLSLFSRMLDKVKSEVDVFSMSFEDVDFLDQVVHNLQKLFDIGFFQRLVQEDSPLCSSITLVRSNKKLLDTFYSFFSESSSEIIQRIGEAPDKKSMNLLVEIFQLVPVVYVEGGKRIVLSDLIRFHCSPSLSLLPPIKEACEAFGIMKNSYLARLNEMHSRDIQAINDSLSCWSVSFQSAIHPSSQMLTEEWVRHLQKQILQGVVLADRIHMLVLSMLDLHMHLEVPLRREKAKSLCQMIVSLKTKLQNEIAKGSQAVKTGFLSSLIRGGTDTETRLIDSLSLFAHGFISELLQVLMSLQLLEGGGSSQRQLTLSITMDILHSLPDFSDVCDTNVLAMKQGYLDIELVGVRKLISKFSILSNFWSLIDERTNCSFLYWRKEMLVTWLSMVYGDACKLSWLQNIIDAFSDGMSLLTLGNVGTVTLQHYEEEIENALRKTGVRNLSWYLRMKPLRLPSKFVDIKFLVENHLNSAFYTYSVMSNYDNRMYAEMHQLGELKYGVELEDFHLTVDTADQDFDLKQSMENLDSFSEAYSYNIVKQMFIENDLGGQGRKNLRVLCVDHIASSAAMCNLQRISAYIDSIFVFLNRMFVDLHALLQSNIEIDLLRDFKQSEVIFTTTVPNYSQRVTRSLQALQQNTGVSDAHPATQGDMKFALGKLGLGDHALDLLEQVQAAVTRIGSVLGLMMDLLFNRRYVRKPKFDLRYTTSCKLLGWDDDIVEISKVLDMGTRNNDPSDDRIQPFSILATNFSKVNASSGCKNSKFRVMLAVMSYLQSAVMARVLAGNIVQMQFSFPSSLFYRNIYEHVLVVGITLLVLEQDNSFDELNWFASTKAKLEGEAKDRDDKKTDRNTSGASFVSLKLWRSSPPVRTEQQKGGVDKGTRYMQEIELIECLFRLARTVLR

SEQ ID NO: 128032 - protein, 60 aa, Oryza sativa
  Clone ID: PAT_MRT4530_30425C.1.pep
VGSMSIKARIKTVPAFDQMNSILGMDSAAYIGASQLATKSVRPSAEKKKRMSHFGQQPLR

SEQ ID NO: 128033 - protein, 1119 aa, Oryza sativa
  unsure (1)..(1119): unsure at all Xaa locations
  Clone ID: PAT_MRT4530_30426C.1.pep
MGTELTVTGWFLSPIIREMQDTALSYIRGQFSWEKDQEKDLERLDTILTEILAIVDAIEKREIKDGNQRKLLRKLKDAIYSAVDVLDSFQYMALKSKVDSQAMVSRVTSSCVYLGKRVVGTDKFRRKLTDMLKKLDEVKTTADTLFKLVSFDSATAKLLPVTQARVTSPLKEENHIYGRKDDLDRLRDLLLMQSDSSAPGPSNSCVPVISIIGVGGIGKTSLAQLAFRDERIRASFGLRIWVCVSDIYDEITLARDILESVTGENYRSVTKLDELKNVLQEKISQKNFFLVLDDVCCAFGEKHPGLFQELKEIGMQIAERLNGLPLAAKVIGRLLNVDLDSSHWKKVLESDISGDVMKVLRLSYQHLPIHLQLCFSFCSLFPKNWRFDPRRLTDMWISQGFVQKEDESDNDMNVEDVAKGYFNDLVQRSFFERSLLDLPIEYVMHDLINDLARNVSKDEYTRIESEKQKEIPPNIRHLSISXICGPKSKYIRVLDLTVVXLERLPTSVKNLKHLRYLAFRVPEKPLPTALVQLYHLEVLVTRGHSCRGSECFQLPTNMKKNLLKLRKAYLFNVGGATISGFGGQTLLHGPGEFHVKKESGHRLGELKEMNNIRGRLSVRFLENVEHQQQAVDAHLDCKEHVKHLQLEWSDLPRPITSELDSDVLEALRPHPDLDRLNITGYKGLRSPTWFETNWMKALTSVILENCMGWVQLPPLGQLPLLEDLVLRNMHAVGQIGEEFYGNGEMKGFPKLEEIVFDGMPNWEKWSGIEDGSLLPCLTRLYIAKCPKLQEAPPLNARPKVEVAITSDSLPSSCLFDSLMASASYLILLVNCCSFLSSLNTDQLSHVEELNVKSCTDPMPACGFIGLSSLKVLRISNCSALLSSVCVEAGEELDTCFFPQSLSELEIVDSNIQSSLLPRYLQGLTNLSVLVINSCDSMDLLSLAYGTHHLTSLEAIIIKDCIFLSSLDGFENLIALRKLVVADCKNFCFLPADLNALISLKTLAIYGCPKMKFLPQNGVPASLQLILLSLLHPELDRQLQRREGTEWDKIAHVPEKKLEFFLTSVVIFGRVVCLPEPLYYIYFNRITTSHILLVLFNLPVSASLFDPEILEFPSMKPKNC

SEQ ID NO: 128034 - protein, 53 aa, Oryza sativa
  Clone ID: PAT_MRT4530_30427C.1.pep
GGTGSLGYSSGLYFVPFCHSRPNFSQVATNAMYPYTINIMNSSGFPMGSVWFC

SEQ ID NO: 128035 - protein, 42 aa, Oryza sativa
  Clone ID: PAT_MRT4530_30428C.1.pep
RTRSATDVRAAYRRLAMKWHPDRCVSDLGEANRRFQRIQEAY

SEQ ID NO: 128036 - protein, 246 aa, Oryza sativa
  Clone ID: PAT_MRT4530_30429C.1.pep
MGRHYAFVAHVILLLSIAHAAPRPPLPRIVAVGAVLCTPARPFASSVGNIGGGTWGSTYATARAVKAGHGALECAVCLAEFVDDGEKLCLLPGCCHVFHTACIDVWLAAHVTCPVCRADLADRAVAAAGHVLAADQAAPQVGEHGHHARDRIKRAVGFGGIADNVGGASEPEKENNMPTPRQAEQETLERCARTPRASTPSSLWELTDDAFSGNERKRKKRMGERTRDIHEKIHVLWMSHSKCHKF

SEQ ID NO: 128037 - protein, 1731 aa, Oryza sativa
  unsure (1)..(1731): unsure at all Xaa locations
  Clone ID: PAT_MRT4530_3042C.1.pep
MLVWTQVGEIIFPIYTTTPISTGPPMTGDENAVATNQGDSMSKNPPVETENGILTTSKLKKDSDTAKPCPSDMNHEPTKMTSEATRSWCPIHKTKKHTLQDCWVFLNVRAEIRACKERGIQRTSLTRDVYCPIHKTKNHDLSSCKVFLGAMKAQSPKSYIPIRDNSKEQGATPTSDRFVGVIDIDPHEPSVLHLLEDYGSSTTSAPREVLAIDDVGTSAHANTEAGNQSTTPAQHIRVVQAILRETPYDPVLNVDLERWTERLRESVTNLSNAFEEAATAAHQEQPPTSKANGEDPERRESPQQATPPPRGTGDLPDQINGHREARRTRDNVNRSRRHVSSRRHDGAMITEXRGNCSNEDRDHDNHHDHNDRERRVPDNTGHGRRRIDDDDGDWRRDNSGRRRQDSRDPGRHPRNXRFRPGAIEKYDGSTDPEEFLQVYSTVLYAAGADNNALANYLPTALKGSARSWLMHLPPYSIPSWADLWQQFIANFQVTYKRHAIEDDLHALTQNSGESLREYVRRFNECRNTIPEITDASVIRAFKSGVRDRYTTQELATRRITTTRRLFEIVERCAHADDALRRKNDRLKTGGEKKPATDTSESSKKKNRKNGKRKAQAEVLAAEYANPPKRPDPQSSDTKKSWCPIHKTDRHSLEDCLVFKKSLEKHMAFEKGKRVRVVETNEETAPHESDSAYLDSDLHISHIXAVPQRTPPSENTRKWNVKSARHGRGLHXKMKCTLDAMGIPQNELTPTDQPFHGITPQSSSRPLGKITLPVTFGQANNFRTKQITFDVAEFDTAYNAIIGRTALAKFMAASHYAYQVLKMPRPKGTITIQGNAKLAVQCEKQSLDMVEQTPSPPATTEPPKKVTKTNKTPKLDSAIKIVPLSSANPDKTELALITFLRDNADVFAWQLSDMPGVPREVIEHKLMVRPDAKPVKQRLRRFAPDRKQAIREELDKLLKAGFIREVLHPEWLANPVMLRKSNGKWRMCVDFTDLNKACPKDHFPLPRIDQLVDSTAGCELLSFLDAYSGYHQISMAKEDEEKTAFITPFRVFCYVKMPFGLITAGNTFQRTVQGALSNQLGNNVEAYVDDIVVKTKTGDSLIDDLWETFDNLRRYRLMLNPEKCTFGVPSGKLLGFLVSGRGIEANPEKIKAIENMKSPTRLKEPSSPXVLADFVADRTMPDNKSDNQGDNATWTMAFDGALNSQGAGXATNNTAEGLLAGVRAAATLGAKRLIVKGDSELVANQVHKDYKCSNPELSKYLAKVRKLEKKFDGIEVRHVYRKDNVEPDDLARRASRRESLEPGTFLDILTKSSVKEVSDDWRIPLIKFISSEELPEDDTVAEKITRKAKIYCMVGNDLYKKAPNRVLLKCVSTDDGRHLLLDIHEGICGSHAAGRTLVGKAFRQGFFWPTALKNACDMVQRCEACQFHSXTHKATRASTPDYPSDLAILVLGARYTWAIPTRTGRLQIPIXVAIDKFTKWIEAVLTGEIKADNAIKFIKGIFCRYGLPHRIITDNGSQFISADFQDYCIGLGVKICFASVSHPQSNGQVERANGIVLQAMKTRVYDRIMSHDKRWVEELPSVLWAVRTTPTTSNKETSFFLVYGSEAMLPGELQHQSTRVQKHSDENQEEQRDIAVNLLEKHRERVAVRAASYQQTLRRYHEKRIRARILSIGDYVLRRVQSQAGQNKLSPKWEGPYTITQVLRPGAFKIADGDGRELANSWNIDQLRKFFV

SEQ ID NO: 128038 - protein, 128 aa, Oryza sativa
  Clone ID: PAT_MRT4530_30430C.1.pep
KSENDSLLSCSIITTSVQLLASFFPCELVLVPRNSSGIWAQICTDKGLSDRAFQCRGCKFASNSGNLHNLQICLQGSGETSSFFIWRLERHPSLFCEGKEKPDAWADAWADAWEKYKKRYKKIRYKKN

SEQ ID NO: 128039 - protein, 1127 aa, Oryza sativa
  Clone ID: PAT_MRT4530_30431C.1.pep
MAAARRSSADWPRSSSPAKICITHGEAAFFQDAEARRMEDSVVEKWLDQLRDVMYDVDDIIDLARFKGSVLLPDYPMSSSRKATACSGLSLSSCFSNIRIRHEVAVKIRSLNKKIDNISKDEVFLKLNRRHHNGSGSAWTPIESSSLVEPNLVGKEVIRACREVVDLVLAHKKKNVYKLAIVGTGGVGKTTLAQKIFNDKKLEGRFDHHAWACVSKEYSRDSLLRQVLRNMGIRYEQDESVPELQRKIKSHIANKSFFLVSDDVWNSEAWTDLLSTPLHAAATGVILITTRDDTIARVIGVDHTHRVDLMSADVGWELLWRSMNIKEEKQVKNLRDTGIEIVRKCGGLPLAIRAIAKVLASLQDQTENEWRQILGKNAWSMSKLPDELNDLSAFFFFDNVREIGVEEAHRVDLMSPAVGWELLWKSMNIQDEKEVQNLRDIGIEIVQKCGGLPLAIKVTARVLASKDKTENKWKRILAKNVWSMAKLPKEISGALYLSYDDLPLHLKQCFLYCIVFPEDWTLKRDELIMMWVAEGFVEVHKDQLLEDTAEEYYYELIIRNLLQPVYTYFDQSRCKMHDLLRQLACYLSREECHIGDLKPLVDNTICKLRRMLVVGEKDTVVIPFTGKEEIKLRTFTTDHQLQGVDNTFFMRLTHLRVLDLSDSLVQTIPDYIGNLIHLRMFDLDGTNISCLPESIGSLQNLLILNLKRCKYLHFLPLATTQLYNLRRLGLADTPINQVPKGIGRLKFLNDLEGFPIGGGSDNTKMQDGWNLEELAHLSQLRCLDMIKLERATPCSSRDPFLLTEKKHLKVLNLHCTEQTDEAYSEEGISNVEKIFEKLAPPHNLEDLVIGNFFGCRFPTWLGTNHLPSVKYVVLIDCKSCVHLPPIGQLPNLKYLKINGASAITKIGPEFVGCWEGNLRSTEAVAFPKLEALVIEDMPNWEEWSFVEEEEEEEEEEEEEEEAQEEDASAAVKEAGEDGTCASKEEGALSPTPRSLWLLPCLTRLELDDCPKLMALPRLLGQQATNLKVLLIRDASCLKTVEDLPFLSGVLSIGGCEGLERVSNLPQVRELLVDECPNLRHVEELGGLEQLWLAKNMQEISQLWVPGLQEQHRQLHGDEHELEVNEWL

SEQ ID NO: 128040 - protein, 202 aa, Oryza sativa
  Clone ID: PAT_MRT4530_30432C.1.pep
MKQKLDRLLVQADIQLTERQKEQLIGFVHLLHKWNKAYNLTSVRDPEEMLVKHIMDSLVVSVHLQGQSFIDVGTGPGLPGIPLAIANPDKQFVLLDSLGKRITFIKQVLRELAITNVTPVLSRVEQYTARQFDGVLSRAFASLDDMLNWCYALPNDSGKFYALKGVYDGTELQAVQKPIKLVDAIKLNVPQLVGERHLIVLA

SEQ ID NO: 128041 - protein, 682 aa, Oryza sativa
  Clone ID: PAT_MRT4530_30433C.1.pep
MSMDSDTSSQGGDHRSFRQITRDRLLFEMLRSTRKHSKSTWKVLIMDKLTVKIISCSCKMADITEEGVSLVEDLYKRRQPLPSLDAIYFIQPTKENIGMFLNDMSGRNPLYKKAYVFFSSPIQKELVTQIKKDSSVLPRIGALSEMNLEYFAIDSQGFTTDHERALEELFSENALDSHKYNACLNTMATRISTVFASMREFPRVHYRVAKTIDASVTTTLRDLVPTKLAAAVWNCLSKLKTSIPDYPQTETCELLIVDRSVDQIAPIIHEWTYDAMCHDLLCMDGNKYVHEVPSKNGSSTEKKDVLLEDHDPIWVELRHAHIADASERLHDKMSNFVSKNKAAQLQQARTGGEISNRDLQKMVQALPQYSDQIEKLSLHVEIAGKLNSIIREQGLRDVGQLEQDLVFGDAGTKELINFLRTQLGVSRENKLRLLMIYAAINPDKFESDKGEKLMQFLFILDKRDFYAGIKYLLAGLSTDDMIAVSNMRCLCGPDTKKSSGGGFTFKFDVHKKKHGLRKERTGEESTWALSRFYPVLEDLIEKLSKGELPKDEYYCMNDPSPSFHGLPMSSSVRTSPAHQPAHSMRSRRTGGTWARPRGSDDGYSSDSVLKHSSSDFKKLGQRIFVFVIGGATRSELRAVHKLTSKLKREVILGSSSLDDPPQFITKLKMMSVDELTLDDLQI

SEQ ID NO: 128042 - protein, 1036 aa, Oryza sativa
  unsure (1)..(1036): unsure at all Xaa locations
  Clone ID: PAT_MRT4530_30434C.1.pep
ILCSLVGSCLDKTPAFITEEATLISGVKNESEELQLGTDFTSFSLQVASSMWLKDWAVQSXSALQLNLELXIQQIFKIWDDLNELSYDGASPRHPVXGPLSLKDSKACRGSPTVPEVRELHGTKSAPICAKIGKRMVWSRYFYTQVSHDDSAGIRIESFSVVEPKVVGKEIIRAXRQVVDLVLAHKEKNVYKLAIVGTGGVGKTTLAQKIFNDKKLEGRFDHHAWVCVSKEYSRDSLLRQVLRNMGIHYEQDESVGNLQSKIKSHIADKSFFLVLDDVWHYKAWEDLLRTPLNAAATGIILVTTRDDTIARVIGVDRTHRVDLMSADVGWELLWRSMNIKEEKQVQNLRDIGIEIVRKCGGLPLAIRAIATVLASLQDQTENEWRRILGKNAWSMSKLPRELSGALYLSYEVLPHQLKQCFLYCALFPEDATIFRGDLTRMWVAEGFIDEQEGQLLEDTAERYYHELIHRNLLQPDGLYFDHSCCKMHDLLRQLASYLSREECFVGDPESLGTNTMCKVRRISVVTEKDIVVLPSMDKDQYKVRCFTNLSGKSARIDNSLFERLVCLRILDLSDSLVHDIPGAIGNLIYLRLLDLDKTNICSLPEAIGSLQSLQILNLLGCESLRRLPLATTQLCNLRRLGLAGTPINLVPKGIGRLKFLNDLEGFPIGGGNDNTKIQDGWNLEELAHLSQLRCLDMIKLERATPCSSRDPFLLTEKKHLNVLNLHCTEQTDEAYSEEGISNVEKIFEKLAPPHNLEVLAIGNFFGRRFPTWLGTNHLPSVKYVLLIDCKSCVHLPPIGQLPNLKYLKINGASAITKIGPEFVGCWEGNLRSTEAVAFPKLEWLVIGDMPNREERSFVEEEEVQEEEAAAAAKEGGEDGIAASKQKGEEAPSPTPRSSWLLPCLTRLDLVGCPKLRALPPQLGQQATNLKDLLIRDTRYLKTVEDLPFLSGGLSVEGCEGLERVSNLPQVRELFVNGCPNLRHVEELGGLEQLLLDEGMQEISQLWVPRLQEQHRQLHGDEHELEVTEWRLAHRIR

SEQ ID NO: 128043 - protein, 34 aa, Oryza sativa
  Clone ID: PAT_MRT4530_30435C.1.pep
MPGDQADNVESDNSAFTENVLDKRVYSTTTYSSA

SEQ ID NO: 128044 - protein, 94 aa, Oryza sativa
  unsure (1)..(94): unsure at all Xaa locations
  Clone ID: PAT_MRT4530_30436C.1.pep
ARYXGAKQNRFSWPQPWCLPSQRSSKTSPTHIATVPPVQHIAFRSSGARTAKXTFPSTNWDIIKLSALLSIQGTKIKTPXCRCAIVTILIVLWP

SEQ ID NO: 128045 - protein, 267 aa, Oryza sativa
  Clone ID: PAT_MRT4530_30437C.1.pep
MAAAAAANDTTPAKAAGPQLKLLVDKRSRRVLYAEARKDAVDFLIGLLRVPAGLAARVLASHGVAAPGSLATLYAAARALDDAFFLASPPSPGPDRRDAVLAPAVLPSAALPLLGERPPPPPPPPPKRYYRCNAYAMPCRSNPLNVTDTAGLACPGCRQPMTVEMKWAAGGGSKPAEEEEAAAGGEGGYVKEVVTYLVMDDLSIEPMSTISAVMLLKKFDVKDCSALDEMTVDLGPKECVKLLKASLESTTALTDVFSGGVSIDRLE

SEQ ID NO: 128046 - protein, 927 aa, Oryza sativa
  unsure (1)..(927): unsure at all Xaa locations
  Clone ID: PAT_MRT4530_30438C.1.pep
MNLKARFWTCTGFKQIFQAKKQSPSSGVKPPNPPRAKLPNPPGTKHPNPPGTKQSSYEVGTDNIVPVTIDKLSPEQKLEFVQIMKSAQEKFMNSFKETRQGTVIQKYKLKVVAADEPGTSSSQDGRTKGAKGGVDGSGDKGAEPRDGEVEDIGEEDAEEQEPPRCNNFQDQVDYAVQHALTNQSGVLVNTLTNMIKSVVDGTITEHQNTGPVFLPNGVFPQYKNLVIGNQQHTANAPPVQPMAAVSALATGAPSSAQRQVVNPHVLTREQPQHVGQNINRLTQEQIAAMFAPTQPTVEPVQSTPIRQQVIQPIRQQTVQQIPTGQRTPIAQKIHLSEPSLCLNSRCIMFNKPLKTILVQQMQGVPQQKPWAGMIADVMREQFGLKPKDTGNLYRHPYPEWFERVLLPNRYKVPDFSKFSGQDNISTYEHVSRFLAQCGEALAVDALRSLIAPIKEKFSSQDFESLSHLALKVTLHEQRFVEAKKNFKKVNHVYPYMYDSEEEDDSKVAAAEWARSKKIIACPWVKSSGKEERYDFDITKAXRFSICYFGRGRFNFLLLAIEGGKIKFVDSKKPMKVNGNPFPINMVHISGRTADEGKHRSSQLNSVRIINKYQRRHDKQQERDNAGSSSRSYNRGNRLGQKRVLFIRDEDEGRKTQWCPSGIFTKNQKKRVQRMRNRERFLEVQQEINHRLKKTKQEWRVKSKVTTADEFEADKAKRLTKSKAVASTSVNMVFMLPAEFEAKQANVDDVEEASARLILSPEQAIFEKPEGTENRHLKPLYVNGFVNGKPMSKMMVDGGAVVNLMPYATFGKLGKNIDDLIKTNLILKDFGGNPSETKGVLNVELTIGSKTVPTTFFVIDGKGSYSLLLGRDWIHANCCIPSTMHQCLIQWQGDKIEIGSKINDTSSATSRSAIIYGFNHGFSCLYSC

SEQ ID NO: 128047 - protein, 1452 aa, Oryza sativa
  unsure (1)..(1452): unsure at all Xaa locations
  Clone ID: PAT_MRT4530_30439C.1.pep
MKSAQEQFMNSFNEIRQGTVIQKYKVKVVAADEPGTSSSQGDNTKGTKSAADGSGNKGEGLQDGTVEDVDEDDDEEQEEPLRCNNFQDQVDYAVQHALINQSGVLVNTLTNMIKSVVDGTIAEHQNTWPVFLPGGVFPPYRNLPPQNYLGGNFNLQYPPQSPQIQYQIGGSPQPQFVPQLNQFDPIQQQMQGVPQQKPWADMIADVMREQFGLKPKDTGNLYRHPYPEWFERIPLPNRYKVPDFSKFSGQDNFHSYFYSGIHEMKLSDLTAIRQRHDETVQDYIQRFREMRNRCYSLALTDSQLADLAFQGLIAPIKEKFSSQDFESLSHLAQKVTLHEQRFAEAKKNFKKVNHVYPYMYDSEEEDDSEVFIQQIQLAIEGGKIKFDDSKKQINMRHEKQEQRYYEDNDGFDPHWDCEFFRFCWNEGMRLPSIEDCPGCSDNAGSTSRSYSRGNQLGQKGCMXSSEKRRVQRMRNREXFQEVQQEINHWLKKTKKEWRVKSKVTTADEVEVDKAKRLLKGKATASTSVDLAPEQAIFEKPEGTENRHLKPLYVNGFVNGKPMSKMMVDGGATVNLMSYATFRKPGKNTDDLIKTNMILKDFGDRKGSYSLLLGRDWIRTNCCIPSTMQQCLIQWQGDKIEIVPADSELKMKSPNYYFEGVVEGSNFYTKDTVDDLDDKQGQMSGLSRSIVEHRLPIKPGFKPHQQPPRRCKANMYDAIKAEVTRLYDASFIRPCRYAEWISNIAPVIKKNGKLRATPKDGYPMPIADQLVDAASGHKIISFMDGNAGYNQIFMAEEDIHKTTFRCPGAIGLFEWVVMTFGLKSAGATYQRAMNYIFHDLIGLLVEVYIDDVVVKSKEVEDHISDLRKVFERTRKYGLKMNPTKCAFGVSAGLFLGFLVYERGIEVTQRSIDAIKKIQPPEDKKQLQKLIRKVNFIRRFISNLSGRLELFTPLLSLKADQEFTWGAEQQKALDNIKAYLSSPLVLIPPQKGVPFRLNFRRLLDAETRYSPMEKLCLCLYFSCTKLRHYXCYTVVCKANVIKYMLMAPVLKERVGKXTEFDLRYESPKAIKGQAIADFIVEHRDDSIGSVDIVPWTLFFNGSVCTHGCSISLVKISPRWASFEFVYTIKPYTTNNQAKYEAVLKGLQLLKEVEADAVEIMGNSLLVISQLVGEYECKNDVLMIYNEKCRELMNSFRLNVEANDLALGASGYKPMMKDIKIEAAAIMANDWRYDVFQYLQNPSQSASRKLRYKALKYTLLDDEFYYWTIDGVLFKCLSADQAKVVMGEVHEETTIGSRRIDLQDDLPAYKLVYGHEAVLPWETTIGSRRIDLQDDLPADEYYNLMVDETEALVQSRLRALTKVTKDKERVARHYNKKVVPKSFSEGELVWKLILPIGTRNNKFGKWSPNWEGTFQIYKVVSKGAYMLQGLDGEVYGRAFNGKYLKKYYPSVWINS

SEQ ID NO: 128048 - protein, 382 aa, Oryza sativa
  unsure (1)..(382): unsure at all Xaa locations
  Clone ID: PAT_MRT4530_3043C.1.pep
MSRVPTSWGFVYSRVNKEIRRGARTGSTGVGPTRQPHGPRWTGCTRLAPAGAVGPTRQPHPRARAADGRAPHGSRGARPKAATPAQPTGGGAPAPXWSPPATTGAAERRPREGREGGSETAVHGSPRVDGDDGNGDRSGGRWRRGSGRRGRRRSGGRRPKRRGGRGRRGCGEAEGAGPEVGGGPGXRRRRTGARRRRRXERATSRAQIRRGGRAARGGTGRRRCGEGLNRAGAREGGRGREETGAGXSAAINGAGEICGGXIRPFERGREREKWGERERGSRGIFPPALLHAGTTGGGGIRGGGGARARAXRERREDRDDRWAPPVSEGGGRGHPSAARARGGGRMGRGXRGEREGGGPSRPKRGRGGEKGLFRVFLFIKSF

SEQ ID NO: 128049 - protein, 74 aa, Oryza sativa
  Clone ID: PAT_MRT4530_30440C.1.pep
ERAGNNPPGFIPQLRGTKGSLQKPKFFPVLEKVPFPPTAYFKKVALVILPHLGSCKMLKAPMNSEHLILRENLL

SEQ ID NO: 128050 - protein, 60 aa, Oryza sativa
  unsure (1)..(60): unsure at all Xaa locations
  Clone ID: PAT_MRT4530_30441C.1.pep
MTSDCDKTLCITPLSQTNHTAGFAPTLKIGVGSPLLCCGESESQSTLKTWXPNSITLTLA

SEQ ID NO: 128051 - protein, 73 aa, Oryza sativa
  Clone ID: PAT_MRT4530_30442C.1.pep
MRTLCLPYKARRARLLTMLDTITEDDREAMESPRAPPRRTSYDKEFGGTSVHCTNKEVLLAPMVKVGYLKIKA

SEQ ID NO: 128052 - protein, 323 aa, Oryza sativa
  Clone ID: PAT_MRT4530_30443C.1.pep
MVATIAPDISKTASNFSSWEDTAILETIRGRLGLARSSIVRLLNVLDLEGCTGFEEETDLRTICTEATHLKYLSLRNTGVTQLPKHIQNLQQLETLDVRGTNVSKLDVVLPMLKELHSGQSEWSLYRSRRRRERADEVMCIGRMLKLTKLGIVVTGKEASYLMKLLQTLSISGLHQLVKITLRETYLTGDALYVLGNLRSLRCLRFLPKALAEGIIKFSAGEFSNLVHLFFQEDYIISVIFDHETAPRLETVVFDVKIITSLHGIRNLPSLKDLQIKGELRGEQAVQQAIADHPNSPDYESKIQGKDRYRYSPGLFVLCCICC

SEQ ID NO: 128053 - protein, 59 aa, Oryza sativa
  unsure (1)..(59): unsure at all Xaa locations
  Clone ID: PAT_MRT4530_30444C.1.pep
KFGDACLRAMRGDAGVVECSYVASAATELPFFATNVRLGRAGAEXASPLGPLNCFSESC

SEQ ID NO: 128054 - protein, 97 aa, Oryza sativa
  Clone ID: PAT_MRT4530_30445C.1.pep
RPPGTCEVLACPPRRSLRATLPERHREYLVKFFLKRAVSLRTICTEATHLKYLSLRNTGVTQLPKHIQNLQQLETLDVRGTNVSKLDVVLPMLKELH

SEQ ID NO: 128055 - protein, 93 aa, Oryza sativa
  Clone ID: PAT_MRT4530_30446C.1.pep
MAFLLLSLLDSKTIVSDVDCWAVMTVVAMGNVHFAPATDIERASGAYTWRAKLVGHRQVSGKALDTDRKVDAAGIDIDGDLEGISTSGIVPDT

SEQ ID NO: 128056 - protein, 253 aa, Oryza sativa
  Clone ID: PAT_MRT4530_30447C.1.pep
MSLYYVPRQGGLNEGVKPLYRGRYDGCEKGKCPNCPATVIGRASGASTPNPRINGDQGGSAEPGCSAELGLGPAGLAFDVGGIESTFNSRQQVPDLGLPLTIDVVMQTPCYSSLLSLDFRVGTCGIVVDTYMYQPWYSRIRPCFGYRMIPVGTKRYPIGTKYKAHHAAVGTNFGHYAPPYVLSPSASTSRVLLHRLGLLADKGEAGRCLCDNKDPPPTPSRIKPAKTGVRQAQWPIVPFFGEVRHQAKPGSSS

SEQ ID NO: 128057 - protein, 284 aa, Oryza sativa
  Clone ID: PAT_MRT4530_30448C.1.pep
MRGAPAPGRGGFTGAGRPSRRSRTPTDDGGAWEFLDNLTNCNTLAEIFLNGNMFADLAPRRSPPTAPAPGPPPLLFSCFFPTPRHARTAAGRRTRICPPLQRREEKREYAADIGGQAEAAAAGRGGGLGLLNAPTPLVANYVLHQAAATTTIRRSTGSVASFLSVASFLSGMATLGAKLVTVVEEEGEAEEDDGNSAGNAGVAGRGGERRGGGARAIFPFFIFGFFGARRWRSSDFSFCFLFLVFLVRAGSITQPYGIIDYPVRSTPPHAKILIFADSRLQGAG

SEQ ID NO: 128058 - protein, 141 aa, Oryza sativa
  unsure (1)..(141): unsure at all Xaa locations
  Clone ID: PAT_MRT4530_30449C.1.pep
XRGRNXXSXXKRWXDALSDXPRRSGTSGLSXXGXGGXRSLGSKXGKPASTAKXKXVLEXDXRSICFXHGKGXXXIXXDNNCXSYXSKGPSXXXFLXRRXIXFXSPANXXXXXXXGGCXLXKLSXXPXXXLFAXLYXXSXEN

SEQ ID NO: 128059 - protein, 60 aa, Oryza sativa
  unsure (1)..(60): unsure at all Xaa locations
  Clone ID: PAT_MRT4530_3044C.1.pep
KXIIYLALCHKTHKYKFIEKNVKIKHHIQNESIKQGTKSQTPRFISGTATWGWFLSASQS

SEQ ID NO: 128060 - protein, 440 aa, Oryza sativa
  Clone ID: PAT_MRT4530_30450C.1.pep
MSFRSIVRDVRDGFGSLSRRGFEVRILGHRRGKSHGAVHELHDPVPVIQSSCWASLPPELLRDIIERLEESEATWPSRKHVVACAGVCRTWREMCKEIVKNPELCGKITFPISLRQPGPRDGTMQCFIRRDKSTQTYYLYLSLGSAVLVDNGKFLLSAKRNWHATCTEYVISMNANNLSRSTNTNIGKLRSNFLGTKFVIYDTHTPYNATSDSQSGKTSRRFSNKGTAKHPCSTYSIANISYELNVFGTRGPRRMCCLMHSIPASSLEAGGTVPSQPDSILAHSLNESSFRSVSFSKSSVMDHSMHFSSAQFSDISIGDGPRIGGRVLSDDEECKETPLILQNKAPRWHEQLQCWCLNFRGRVTVASVKNFQLIAATQPAAGAPTPSQPVPPPPPEHDKVILQFGKVAKDMFTMDYHYPLSAFQAFAISLSSFDTKLACE

SEQ ID NO: 128061 - protein, 87 aa, Oryza sativa
  Clone ID: PAT_MRT4530_30451C.1.pep
MARQIGNVVLVACLAAICSDHHLITSSSHADKQEQIDHRSTACSSCSCMRSRTHSSRRAGSDGGDDGARQPLQRRGKAAASRVHLDC

SEQ ID NO: 128062 - protein, 67 aa, Oryza sativa
  Clone ID: PAT_MRT4530_30452C.1.pep
SLSPVSNLYRCVILVPKLANRSFRSSNLFDCVIPVPKLTELSFRSSNLFSCVTPVPKQDGLKSLYQK

SEQ ID NO: 128063 - protein, 100 aa, Oryza sativa
  Clone ID: PAT_MRT4530_30453C.1.pep
WTLFLQLIGPSSFQTHIPPVPVEDGDPYFFSSPPTQPFHKLGGGRPGLTLCVGCRRQTLTKDLSRIPFQGPPPPWHNLLMFFSSSPRDGPPPARVPPGNA

SEQ ID NO: 128064 - protein, 108 aa, Oryza sativa
  unsure (1)..(108): unsure at all Xaa locations
  Clone ID: PAT_MRT4530_30454C.1.pep
PKPEPKPNPEPKPDPKPNPKPEPNPEAPPKKPKPPHKPPATDQXRRTPETEPQQPPDXALPPKNPQREERASPSPGPILEKSDEPAFRLLFFPFKPRKTREAPPPPRK

SEQ ID NO: 128065 - protein, 127 aa, Oryza sativa
  Clone ID: PAT_MRT4530_30455C.1.pep
NESTMQTARTEKIATPILLQITVFRSCSAKFLKTYRCCDVHGFWIQRIDQHKKKERKNYGYKLLYLSLTDCRFTDQLIDQRPSPLLSCEKALLLAIPESVTLSSMRKLVDDVHPSAGTDHVGGELRG

SEQ ID NO: 128066 - protein, 153 aa, Oryza sativa
  unsure (1)..(153): unsure at all Xaa locations
  Clone ID: PAT_MRT4530_30456C.1.pep
GSLNAKKKNKTGWTTHKGQQHKLPRSRFLHTASTNNPXRDCSXVIVAKLHCNPTTKQLRLYPAKTKKXDGYSPVSEPLQESINDHHCTRLVLEESGQHHNXPPRRGTTPNGVAVVKPAQGXARLSPTIPNQNPTQPSCTMTIAGPPHHAAAAR

SEQ ID NO: 128067 - protein, 82 aa, Oryza sativa
  unsure (1)..(82): unsure at all Xaa locations
  Clone ID: PAT_MRT4530_30457C.1.pep
RSPPVAMSTSANPSAAPLSEYAEVSTHRLDLXFFSTLICVCSICPTIANSAKDEPLMSAATYFWSNTINAFRIGCNFIGQSH

SEQ ID NO: 128068 - protein, 380 aa, Oryza sativa
  Clone ID: PAT_MRT4530_30458C.1.pep
MLRCDGDRVVIVGGGIAGALLAKTLQNHADVVLIDPKEYFEIPWANLRAKMDPAAVARTVIPHSEYLTQAKVVTAAAVGVDDSVVLTSAGGAVGYDFLVVATGRECSRPQKREDRLQMFEHDKARIASAGSVLVVGGGPIGVELAAEIVMASPEKRVTLVHGGPRLLMVMGEKASAKALEWLRSKNVTVLLDQTVDLAAAAAGANTDDKVFTTSAGETVAADCHFVCTGRPVASGWLRESFLGEHVGGDGKVAVDEHLRVGGLRNVFAIGDITDVPEAKQGYLAQRHAMVVSRNLRLLVKAGGGDGGGSSKERKLHRYKASKAAITVTLGRRDALAELPFMTVIGHLPGVIKPRDYFIARTRRMMGLRTGARYDQSMFRI

SEQ ID NO: 128069 - protein, 72 aa, Oryza sativa
  Clone ID: PAT_MRT4530_30459C.1.pep
MAPVAVGDTLPDGQLGWFDGEDKLQQVSVHGLAAGKKVVLFGVPGAFTPTCRSLPPFFDFLSPLFLGDVIFP

SEQ ID NO: 128070 - protein, 84 aa, Oryza sativa
  Clone ID: PAT_MRT4530_3045C.1.pep
QTENWANLVISIFGLVGIHKYKIILTKLIKFEKENEKPRKSYFPRKMKIRSTLYCEKRQKNEIKDLMVIQEMENYHDHYGDYRE

SEQ ID NO: 128071 - protein, 385 aa, Oryza sativa
  unsure (1)..(385): unsure at all Xaa locations
  Clone ID: PAT_MRT4530_30460C.1.pep
MDAKKPYVIVIVIQLINTGLFVISKAAFNHGMNTFVFIFYRQAAASLLLLPLAIVXLRGEMHHRCRSGCSLSFSCMLCXGNTLSLNMYNLGLKYTSPTVASATTNSIPVVTFFFALLLRRAQSIIHLWVEVIRLKSLSGAAKMAGVVLCVGGVLAIALYAGPAISPVNHHRAFGGGGGGGHESASATTRTRWVKGTLLMLLSNATWSLWTVLMASLLREYPSKLLATAAQCALSAAQSLALAAAAAGRDPAAWRLRPDAGLLAVAYSAVAVTGASLYMQAWCIEKKGPVFLAMSNPLSFVFTIFCALFVLGEVVHLGSVVGGVLMVVGLYSVLWGKSKEHDTLTLATAMPTPASVQQQEKKVAAVPAPADSSSSDSEQERLASIA

SEQ ID NO: 128072 - protein, 420 aa, Oryza sativa
  Clone ID: PAT_MRT4530_30461C.1.pep
MASNADQHAAANGGGGTTPAATGSPPAGKKAAAAAAWKRPGNGAAVPVVVAPGSPIMDADSWPALPGLASPPPTTLTPTPMPPKASPKVAPLPPPARGNGGGGGGGRRGQEHHGGFDGQRRGGGRRDGHGPGHQQRGHHPSYIRAPLAVVTAAPPPPPPFVNPATPQTPPYGAPIGFPEIAPHVYYFTSPLEGVQALPFVPHPASPPAMLIPQFDPLRAELLKQIEYYFGYFFVYIYVKYLFHIIAEVNLLSHFRPGCSDDNLCKDIFLRRHMDDQGWVPLPLIAGFNQVKKLTNNVQFILETVLQSTVVEVQGDKLRKRERWEIWLLPKQGYSAGNSSGSLSPVTSNIDSLASQFQSVGLEGAGYHASQGMPGEALLTRSATSVSLGYQAPPLGGLYSNGSGPLFGQKSARSLLRSDTF

SEQ ID NO: 128073 - protein, 1012 aa, Oryza sativa
  Clone ID: PAT_MRT4530_30462C.1.pep
MSCMVTLRVFNVEASLVHLQAVLDVAERRPVVDDNFTGWLELIKKIASEAEELLDDFEIKRIQKSQQNKVSGFLAYMMKNLGFVDDDIYRLKTLLARLDKIASKSGNFFDLLKLNDSKEDMVGFLPEIQVVFHGREKEKDQLMSIIFPNEAQAEHFPASRMQEETRGTATVKVVCIVGEAGVGKTALAQVIYNHPNVKKAFNQRGWVSLSQRSDSEDFIKKIFCSFAAEQHPFDSEMGLETLQASSEHDLSRTIQNKRFFLVLDNAKDNLQREWKTVRAKLTGAAAGSIVLVTTRSEVTHAIPGGIVITLDKIPTSVLSMILKHHAFGLTRKDSLESIGDKIAGKLHGLPLSAEVIGRLLRTKLDEDHWRNVCESNWWNDYEDLVITNPALPSVTIALEFLRNDLKKCLGYCSMFPSSYLFDKRKMTQMWVCNSMQQHQESAYEITDIRWLDELLNRSLIQSTVWKGKYTVNEMIKKVVASINQTGCYTIDDLHSPRQNLSNIIHMAVDKYDFEVSLDLRKQSKVRSILFFDGQRTTMLNTALNSILPVSSSLRVLDLSCIETKMERPPDVISTCSHLRYLDLSFTGITMFPDSFCKLLLLQVLGMRGCRFTELPRDMNKLVNLRYLYAEACTLSLIHSIGQLSKLQYLEEFAVSEKEGYRITELKDLNYLGGHLCITNLEKVACVNEVCDARHAELSKKMYLQKLALKWNSQPATLDGCTETVSHLKPNGQLKDLEIHCYMGVKFPGWIADDQHFTTLRYIKFSGCKKLVELPPLGNLSHLAVLILQGLEQIKDIGKEFYGSYDRVFPSLEELTFRDMENWRRIPRTGRIVRTEEAEEENMTCLKVHDCLAIMIDLPNHLLASTEFLRQLVVYEECKKGFKAIDYPLGFIFTPTSSGPHLTHPKEANKAKSGVREKCAFRRASGEHHSPGQRDGPQKQPAEERRGSSPASPRHRLPRERRHGSGARRGRGRAARAIGLRRRVLTRDSGEGVRLAASRPSGKMQNFYFIFLF

SEQ ID NO: 128074 - protein, 52 aa, Oryza sativa
  unsure (1)..(52): unsure at all Xaa locations
  Clone ID: PAT_MRT4530_30463C.1.pep
MPDDXSTHGGRRDTSKVEKYRLFMGDAGLMEYSIPLSNLVARAKEELMRHVT

SEQ ID NO: 128075 - protein, 188 aa, Oryza sativa
  Clone ID: PAT_MRT4530_30464C.1.pep
MGTAAGDAAEQPPAAPEAKRAAAPRTLVFTYGTLKRGFSNHGLLQDLARDGDASFVGAATTAPRLPLVCGPYRVPFLLNLPGAGHRVSGELYAVTPRGLDRLDELEGVSRAHYERLPISVLLAEGAQVDAVAYYAHRGYADDLWARSGKKGYPEYSPAVADGYIRRKDRPQQLTFLEQIRVFVSSQSS

SEQ ID NO: 128076 - protein, 1344 aa, Oryza sativa
  unsure (1)..(1344): unsure at all Xaa locations
  Clone ID: PAT_MRT4530_30465C.1.pep
MHREFHHAKGRSPWRRLFLLLQAPPKCCVSPITPSNGLRWPCKREGRDLERSRAGCIDMTRREIRGRRLGKGVKSHGDLLCQQMSPYQSYPCEINGGIEVVPQGTWVGIKLPTVEVRYENLNIEAESYVGRRGLPTILNTYTIIMEGLTNALCITKKITHKIPILHNVSGIIKPHRMTLLLGPPGSGKTSLLLALAGXINLKVRETVNFAAKCQGVGHHYXATTGEQKAEVVTNHILKILGLDICADTIVGNNMLRGISGGQKKRLTTGNVSLELLECMMVTISDPLPNIDATAEMIVTPGRALFMDEISTGLDSSTTFQIVNTIRQTIRILGGTAVIALLQPAPETYELFDDIILLSDGQVVYNGPRDHVLEFFKSVGFKCPERKCVADFLQEVTSRKDQKQYWIGSDDTYQYVPVTMIAEAFQSFHVGQAIRSELAIPFEKSKNHPAALATSKYGVSMKELLKANIYREILLMKRNSFLYIFKAIQLKLVAINAMTVFIRTNMYRDSIENGRSYMGALFYGMMMIVYSALAEMGPAIAKLPVLFKQRDLLYYPSWTYSLPSWIIKIPISFLNTTVWVFLTYYVIGFDPNVLRFFRQFLVLFVLCEVIYALFRFIVALTRHPVIASNMGPFCILIFMLSCGFILTRDDVKKWWIWLYWISPLMYALNALAVNEFLGQIWNKSILGYKGPLGRLVLGSSSFLPETKWYWISIGALLGYVLLFNVLYTICLTFLTHAKEIINDEANSYHATRHSSAGNKGMVLPFVPLSITFEDIRYSVDTPEAFKAKGMTEGRLELLKDISGSFRQGVLTALMGVSGAGKTTLLDVLAGRKTSGYVQGSITISGYPKKQETFARISGYCEQNDIHSPNVTVYESLMFSAWLRLPVEIDSATRKMFVYEVMELVEILSLKDALVGLPGVSGLSSERRKRLTIAVELVANPSIIFMDEPTSGLDARAAAIVMRAIRNTVDTGRTVVCTIHQPSIEIFESFDELFLMKQGGEEIYVGPIGRQSCELIKYFEAIQGVSKIKDGYNPSTWMLEVTSTTQEQRTCVDFSQIYKNSELYRRNKNLIKELSAPPEGSSDLSFPTQYSQLFLTQWLACLWKQHLSYWRNPPYIVVRYLFTIVVALLFGTMFWGIGKKRQNQQTLFSIMGAMYSACMAMGVQNSSSVQPAIFVEXRTIFYRERASHMYSALSYALGQGXEWTCAKFLWYLFFMFFTLSYFTFYGMMMAGLTPNNAMSAVVSTAFYNIWNLFSGFLIPRIRIPVWWRWYYWMCPVAWTLNGLLTSQFGDVNDKFNNGVSVSDFIESYFGYKQDLLWVAAVAVVSFAILFAFLFGLSLRLFNFQKR

SEQ ID NO: 128077 - protein, 164 aa, Oryza sativa
  unsure (1)..(164): unsure at all Xaa locations
  Clone ID: PAT_MRT4530_30466C.1.pep
MAMGVQNSSSVQPAIXVRRTIFYRERASHMYSALSDALGQVAIEFPYIFLQTIIYWVLVYAMVGYEWTCAKFLWYLFFMFFTLSYFTFYGMMMAGLTPNNAMSAVVSTAFYNIWNLFSGFLIPRIRIPVWWRWYYWMCPVAWTLNGLLTSQFGDVNDKFNKGIL

SEQ ID NO: 128078 - protein, 109 aa, Oryza sativa
  Clone ID: PAT_MRT4530_30467C.1.pep
HRSSSQRTIQYYSVCEKSLQMELKYSSNADVRGHQNQISAHSKEMNINSASVNEFLVLKKEVNEFLGRPGDGEMLHLDWVGLHVHRFGETKLQLPATKTDHTQRMRAKG

SEQ ID NO: 128079 - protein, 504 aa, Oryza sativa
  unsure (1)..(504): unsure at all Xaa locations
  Clone ID: PAT_MRT4530_30468C.1.pep
WIWGYWMSPLMYAQNAISVNEFLGHSWNKVKKILMEXINSHYMNVWLKCSVLAVLQTIPGFREPLGKLVLESRGVFPEAKWYWIGVGALLGYVLLFNILYTICLTFLNRESEINYIWNARAYKFSFLXILNFMHSFTAAFDPRVRTKPQEMLQIKQHNLTNEVLEASSGGRAACNTIYAKEIINDEANSYHATRHSSAGNKGMVLPFVPLSITFEDIRYSVDTPEAFKAKGMTEGRLELLKDISGSFRQGVLTALMGVSGAGKTTLLDVLAGRKTSGYVQGSITISGYPKKQETFARISGYCEQNDIHSPNVTVYESLMFSAWLRLPVEIDSATRKMFVYEVMELVEILSLKDALVGLPGVSGLSSERRKRLTIAVELVANPSIIFMDEPTSGLDARAAAIVMRAIKNTVDTRKTLVCTIHQPSIEIFESFDELFLMKQGGEEIYVGPIGRQSCELNKYFXGLSRCQQDKRGYNPSTWMXEVTSTTQEQRTGTDIRDVCVEMVL

SEQ ID NO: 128080 - protein, 118 aa, Oryza sativa
  Clone ID: PAT_MRT4530_30469C.1.pep
CPPASFCHVAVCLFSRNITTGAPEVMVNFVTSCYKPELLEPLVNNITKIPEVVSIMNNVNTSVGNTSVGEEEYTLYGKPTITEMLRGLTFQISANSFFQTHTKQFQFMYQLFPRYAKI

SEQ ID NO: 128081 - protein, 167 aa, Oryza sativa
  unsure (1)..(167): unsure at all Xaa locations
  Clone ID: PAT_MRT4530_3046C.1.pep
NEKRKCRVREDICXFNCQGMGHFADKCPKPRNIAAGTSVHATPCNQKLAPQRMVIHASRSSPIARVATAPIPMSALPQGVNAQFQPQPPVDKTDASICVVPLEAPIQQLRNQVQDEEPECKKVIVCHNCSGEGXLLQKTVPDLHIFANLHEADIPIVLWSLEQTPYP

SEQ ID NO: 128082 - protein, 58 aa, Oryza sativa
  Clone ID: PAT_MRT4530_30470C.1.pep
MAALFFFFFYLNTSQFITSLFLHLYLLIIINSTLIVYITILNNAITTIKLLYNTHIRT

SEQ ID NO: 128083 - protein, 337 aa, Oryza sativa
  Clone ID: PAT_MRT4530_30471C.1.pep
MAVEENAHAINQSLWFLKMNSIRRFSGMRKPNAPSAIHKDKDESVVFFREMYKREKDRDINLLEPMQSVEFDAIQGGRTSKAPSGKTDFLIAVDEKHDYDWLKTPPATPLFPSIEMETNSSQMVFQKELPIHQQVKPSASRLSGKTEATKTSARSMFPAPNSSSEKSIFRVSTQSISNEKNQIERRSTSAAITSRKQKVVAAITPTAPTATCNATKKHSERCYASQGSSTNGLKRVTNPELPYCAPKNLITTPLTAKAWRSDLAFGVHDTAEIGRIRRQSCLPVTVMDGKQKGLPDKVKAVTVSNNRGRAGDATLIKGMRRTDGKKEQRPKHGNQAK

SEQ ID NO: 128084 - protein, 46 aa, Oryza sativa
  Clone ID: PAT_MRT4530_30472C.1.pep
PRLCGFSLSHRNVLVSCPVPFSCKLYAWGLKASTFFLFDEPPPFLF

SEQ ID NO: 128085 - protein, 621 aa, Oryza sativa
  Clone ID: PAT_MRT4530_30473C.1.pep
MPSVLVDRATNDMLIGPDWAMNLEICDTLNRDPGQAKDVVKSIKKRIAHRNAKVQLLALTLLETMIKNCGDIVHMQVAEKDILHEMVKIVKKRPDFHVKEKILTLIDTWQEVFGGRAGAVFPQRSNGSVPIFTPPQTQPLQNYPASLRSAQQEPPGSSVPDLPSLSLAEIQNARGIMDVLSEMLNALDPSNREGLRQEVIVDLVDQCRSYKQRVVELVNTTSNEELLSQGLSLNDDLQRVLAKHDAIAAGVAVRLEKTKSLQTKIDSSPPANPGTSKAPVQSSSGTASASNQSTLALPAPASSSSPKAPAAPVPVIDLLSGDDYIKPEPANSLALVPVTEYSAADQNVLALADMFEQNNANRSNNNLTNSFNTSAPNSNFPASQAYPAPVQPALPQHPVAYSNGVSSNAIVPYYDDQNGGLPPPPWEIQQSMDNPPQPTQLGQMPLQPGQPVGMHPQSPHSGQFGQGSFMSPQQMANGQLGGTQPRQSPQPQSAPNLQYGGMMMYPNSMQVNQGAGMYSQPMFGGQFYGMSHHHQMYAVQMAGYGFGQQPGAYYIPNAAYAYVSANELTQRMNAVSVQEGNSHGGAIASRPEDSLFGDLISIAKVKHNKPKPITPKDYQNK

SEQ ID NO: 128086 - protein, 133 aa, Oryza sativa
  Clone ID: PAT_MRT4530_30474C.1.pep
MDAGKAFCYGLRRAKLGPPEVHSRSDPVTAYAAALAASSDSSEFSVRGRVRPRTPEIVSSPRHTDETSGGGGLARDCRSTHAGTRREPRAGRHSRAGDLKLVQSTIELLPWSLASSPHGRGTGEVELLPVVAS

SEQ ID NO: 128087 - protein, 75 aa, Oryza sativa
  unsure (1)..(75): unsure at all Xaa locations
  Clone ID: PAT_MRT4530_30475C.1.pep
IVNTNYVHIYIHEIDLLKKKKKKKKKKKKKKKKKKKKKKKKKKRRXXKRDIKFKESGGGEGDKLQKHVKKQFYTT

SEQ ID NO: 128088 - protein, 130 aa, Oryza sativa
  unsure (1)..(130): unsure at all Xaa locations
  Clone ID: PAT_MRT4530_30476C.1.pep
MAEYTHKIFALLDLIALSASVTTAITTMHCFPPPLPMGTLDPRGQNIMKTCXMPSSTAMFMSQPMELLHQQCXMQLPRMMPHRHCDTSCQMMHNMXQVICAGLRQQQMMNMTTEMPYMRDMPHANLQLAS

SEQ ID NO: 128089 - protein, 252 aa, Oryza sativa
  Clone ID: PAT_MRT4530_30477C.1.pep
KSMSYFTCKPNSGLIVDRPVAGLGRTGRLLSHPQYSLTTHSVRFPKLQKQVYPRLVLVAASQKKLPPLCASSGKVNPEAENDPFMESLKKAMDDAKKPRPIQDLLKEQIAKLREQGSGGGGGNRNRRGGSGDSGGPEDESFKESLDELVQVILATVAFILVYIHIIRGEELYRLARDYTRYLVTGKRTARLKRAMQKWRNFSESFMQSEGSQEDQYERAATSKPTWWQQPQKFVHLMEELCRGNWRPHAQES

SEQ ID NO: 128090 - protein, 80 aa, Oryza sativa
  Clone ID: PAT_MRT4530_30478C.1.pep
VFPRRGRLRWLRSSPRSRQKCPPTRQPPTTPRRRPPLRRSAPPSPHRPPPPPPRRRPRPRLHDRVRADDPHRHYVNGQLH

SEQ ID NO: 128091 - protein, 259 aa, Oryza sativa
  Clone ID: PAT_MRT4530_30479C.1.pep
MGTPEFPNLGKHCSVGDCNQIDFLPFTCDRCDHHRSYTSHQCPNANQKDVTVLICPLCAKGVRLNPNEDPNITWDTHVNSDCDPSNYQKVTKKKKCPVPGCRETLTFSNTIRCKDCTKEHCLKHRFGPDHKCPGPRKPESTFPFGNMLRRSQKAESCSNSNSSSTSSSWWSSSLLTAATSFKSSAEAGMQKLSTATTQAIQKAKDGISTSSSNSVVRVTRADTGGKLANQKSGDGIQAGNQCPKSGNKDNRKVLVSVLD

SEQ ID NO: 128092 - protein, 1129 aa, Oryza sativa
  unsure (1)..(1129): unsure at all Xaa locations
  Clone ID: PAT_MRT4530_3047C.1.pep
MASKKGKRVRVVEKDAEAPTQESESAYPDSDLHVSHIFGGSTAYSSKREYKKVEREVCSTWQGAAPKMKWSEQKIEFSEEDHPKTAVILGRYPIVVEPTIRNIKVARVLIDDRSSINLLFASALDAMGIPRSELTPTDQPFHGITPQSSSKPLGKITLPVTFDQANNFRTEQITFDVAEFDTAYNAIIGRTALAKFMAASHYAYQVLKMPGPKGTITIQGYTKLAVQCDKRSLDLVEHTPSPPATTEPPKKPSDMPGVPREVIEHKLMVRPDAKPVKQKPRRFALDRKQAIREELDKLLKAGFIREVLHPEWLANPVMVRKANEKWRICVDFTDLNKACPKDHFPLPRIDQLVDSTMPFGLITAGNTFQRTVQGALSDQLGNNVEAYVDDIVVKTKTSNSLIDDLRETFDYLRRYRLMLNPEKCTFGVPSGKLLGFLVSGRGIEANPEKIKAIENMKSPTRLKEEAEEAFIALKLYLSNPPVFVAPQPNEELFIYIAATPYSVRTVIVVEREKVQRPVYYVNEALHDAKTRYPQIQKLLYAVIMTSRKLRHYFQAHKVTVVSSFPLGEVVRNKDVVSRIAKWIVELSQFDIHFVPRTAIKSQVLADFVADWTIPDNRSDNQIDNETWTMAFDGALNSQGAGAGFILTSPSGDQFKHAIHLNFRATNNTAEYQALLVGIRVAAALGVRQLIVKGDSELVANQVHKDYKCSSPELSKYLAEVRKLEKRFDGIEVRHVYRKDNIEPDDLARRASRREPLEPGTFLDVLTRPSVKEATGTDSPVAPNIGSGATEAERAVADIETTDNWRTPLIKFIGSEELPEDDVEAEKISRKAKVYCMIGNDLYKKAPNGVLLKCVSSDDGRHLLLDIHEGICRSHAAGQTLVGKAFRQGFFWPTGLKDACDMXGLPHGIITDNGXQFISADFQDYCIRLGVKICFASVSHPQSNGQVERANGIVLQGIKTHVYDRLMSHDKKWVEELPSILWAVRTTPTTSNKETPFFLIYGSEAMLPTELRHQSTRVQKYSDEYQEEQRYDDVNLLEEHRERVAVRAASYQQALRRYHEKRIQARTLSIGDYVLRRVQSQAGRNKLSPKWEGPYTITQVLRPGAFKIASGDGRELANSWNIDQLRKFYV

SEQ ID NO: 128093 - protein, 64 aa, Oryza sativa
  Clone ID: PAT_MRT4530_30480C.1.pep
MAEQGRALRHGNAMAELGCKQLRRTGWEIPRDSMSTVTSMGGALELGLGMVMAMIGDIDGEVSS

SEQ ID NO: 128094 - protein, 129 aa, Oryza sativa
  unsure (1)..(129): unsure at all Xaa locations
  Clone ID: PAT_MRT4530_30481C.1.pep
HRPATSSAAHWCFRLHGWLIVPPLLDVHVFTDRLAFVATDWCPRLHSWSIMRXLLGVYVFTDRLAFVATDWCPRLHGWPIRSPLLGVYIFTDRLPRMXANWCFCLHGWPRRRHFDWCHCLYHHQHLRQL

SEQ ID NO: 128095 - protein, 34 aa, Oryza sativa
  Clone ID: PAT_MRT4530_30482C.1.pep
KIYCKLIDIFIHENTNQPVFRLRRILTAGRLDRL

SEQ ID NO: 128096 - protein, 272 aa, Oryza sativa
  unsure (1)..(272): unsure at all Xaa locations
  Clone ID: PAT_MRT4530_30483C.1.pep
WPFILFERFRRSFLWKGEDLDHSNSGDSLINWQTVCKPKVLGGAGLLELEHFSRALHLRWLWLNWKEEEKPWVGMNLPCDESGNRLFQAATTIXVVNGAKTRFWHDSWLQNRFPKDIAPRCFSLAKRKQRSVQLELTDNKWLASFRQFTSVEEIHELVQLGGLIQLASLSQEPDDITWNWTDYGSYTAKSAYLYQFEGSFAKLDFLSLWKAPAEPKMRFFGWLVLHQKTLTAQNILRRHWPCTWICRLCTCSFEDTNHLLNECIFTRQTWSL

SEQ ID NO: 128097 - protein, 121 aa, Oryza sativa
  Clone ID: PAT_MRT4530_30484C.1.pep
MEMKPLVVALLAVVVAAMAVAAVQDDDDDVPFTDKDLESEESMWSLYQRWSRVHGLTSRDLAEKQGRFEAFKANAMHVNEFNKKEGMTYKLALNRFADMTLQEFGAKSAGAKVRCLVASLA

SEQ ID NO: 128098 - protein, 146 aa, Oryza sativa
  Clone ID: PAT_MRT4530_30485C.1.pep
TPLAPSASPCSIAPRPPLQDRKPPPSRHLHHQPEPPSPLLTLAASCCRSQPPQATPPPPSVPPCQAAPQQPPLHPCPPLGHRFSAQPEPLPPMTPSTTSCRRLRPPHAAPQLPSPSRAPGEPRHPLPRNPCRQSSTRHLSRCYAAS

SEQ ID NO: 128099 - protein, 453 aa, Oryza sativa
  Clone ID: PAT_MRT4530_30486C.1.pep
MEAARGDGGGAEGGDGQMAVVQQSLAVVGRAGDRVFVWVSFQDESENMLAHSTETNKKGQEYSTLLDPKFAPVLLFVDYNLDDTHDEVNSEDEDYSIEDEDEELDHEDDNSFDEDISDNDKDDDKLGEAANDICKGDYNENNEDAGTEESDDTDDQEEDVTIFFYSIARKELLCKRGDIFNCHSYWRTPQGWLLMVHLESHETFLWSPFTDQRINLPLDEDSFLTNNEVVCLLSHKPTYPNCVVLVVNCRNTSFWYCYPQGHTWFKHEYQSSMITTHENRRNVILTMKDLTAVGGRFCTYLSKEKAIVTLEFLPNPTFTTTPVKDASDPIYWYTTFTNCLLESCGELFMLSFKHPVVCAQKVVQIEVHKLDLSRRIWVKVNTIGNKAFLVECIGFGSSLTAEDVGLKRNCIYFVRPNDKGLYVYDMERGTTVMHNPGADLPDNMTLQIVVPPF

SEQ ID NO: 128100 - protein, 153 aa, Oryza sativa
  Clone ID: PAT_MRT4530_30487C.1.pep
MDSSEVSGASGTSWTDEETLLLLEALEIFGGKWTEIAEHVATKTKAQCMLHFLQMQIEDRFHGDEDINQNIQENTEQASAEKGAAEIPDKMEVEEKAEGKDTAGEKTPEKAEGNSVEAQTEDGNAIENKDANNSGGTDSVKSLNTDEPKKSSD

SEQ ID NO: 128101 - protein, 261 aa, Oryza sativa
  Clone ID: PAT_MRT4530_30488C.1.pep
MAAGAEAAAESMFLPFLAMFAAIYLVGYLVVFRRWGGAQRAEASSCFASLFHGTPAAALALRAVLSNPRGCCVGVAGDLAAPNTRADELALDFSTAYFAVDLAHYLVLLPGERLFVAHHLATLYVLATCRAAARRGACALLVMEVLAEATSLAQNLWTLAGMRRAGSPAAAAAHARLSLPFYAAYTAMRAVLGPAWFVRMVRFYYASDGGGGAGGEALPAWARASWTVVIGAGIVVSVLWVSNLWLEFFRENKRKESSKEQ

SEQ ID NO: 128102 - protein, 51 aa, Oryza sativa
  Clone ID: PAT_MRT4530_30489C.1.pep
KNCSDALKDARAGSLKHDLLPQTFNQLCSPDLLLLTQKTSLGGGGRFANER

SEQ ID NO: 128103 - protein, 218 aa, Oryza sativa
  unsure (1)..(218): unsure at all Xaa locations
  Clone ID: PAT_MRT4530_3048C.1.pep
ENGAFSPPTVPTPTSGSARASPCQRVSLLAEKEKPEARAQSWPGLGRSERQGARAACGSAGSGSRKASPRRSNNNCSSESLRSSRTTRSSAVSAPRAACLSVDSTVNSASNQVAQVLLTLPYSFSQLGMLSGLLLQVFYGLMGSWTAYLISVLYVEYRARKEKEGVSFKNHVIQWFEVLDGLLGPYWKAXGLAFNCTFLLFGSVIQLIACASNIYYIN

SEQ ID NO: 128104 - protein, 440 aa, Oryza sativa
  unsure (1)..(440): unsure at all Xaa locations
  Clone ID: PAT_MRT4530_30490C.1.pep
MAVPNAILFAVVILTLSSFAKAQQPATPPRRNPPRAPPPPLPPPPQTIPPPPPVSATPPPEPTPPGAPPRAPPPQRVPPPSPVSEEPTPAPAPAPTPINVSPTPSRAPPRASPPQRVPPPPSVSEEPTSAPGQAPTPTNVTPTPSRAPAPQRVPPPPPVNEEPTAEPSPAPTPVNLTPTPSRAPPRAPPPQRVPPPSPVSEEPTPAPAPAPTPVTVTPTPSRAPPRAPPPQRIPSPPPVNEQPTPAPAPAPTPINLTPTPSRAPPHAPPPQRVPPPTPVSEEPTPMPAPAPTPSRTPPRVPPPHSVPPPPTQTMPPPPPATPSQPPISQPPLLSIFLRRCNRRPSAPPLVGSSPPPXPSRRPPCPPVKTPSPPSFPLSCVRRCPPHAWRRLRRHRCFSHHPPPLLAPVAVAGNHPPPPHRHHRAADLKPSRAWPVPPPPP

SEQ ID NO: 128105 - protein, 504 aa, Oryza sativa
  unsure (1)..(504): unsure at all Xaa locations
  Clone ID: PAT_MRT4530_30491C.1.pep
LIDYNPPPPSPPPPTPRPNQPATPPRRNPPRAPPPPLPPPPQTIPPPPPVSATPPPEPTPPGAPPRAPPPQRVPPPSPVSEEPTPAPAPAPTPINVSPTPSRAPPRASPPQRVPPPPSVSEEPTSAPGQAPTPTNVTPTPSRAPAPQRVPPPPPVNEEPTAEPSPAPTPVNLTPTPSRAPPRAPPPQRVPPPSPVSEEPTPAPAPAPTPVTVTPTPSRAPPRAPPPQRIPSPPPVNEQPTPAPAPAPTPINLTPTPSRAPPHAPPPQRVPPPTPVSEEPTPMPAPAPTPSRTPPRVPPPHSVPPPPTQTMPPPPPATPSQPPISQPPPPSQPPPTLPLPPHPCPHAPPSRRPRRPPPSPPPLPSSPPXPAPCTHPSPPSPLLRPPXSPLEPPQNQXPPRLASPPPKLPRPPHPHPIPPPPPWASSQPLTPLYFPPXCNRRPSAPPLVGSSPPPXPSRRPPCPPVKTPSPPSFPPSRAWPVPPPPPXPPPGGPRLPVPPPSPLCL

SEQ ID NO: 128106 - protein, 54 aa, Oryza sativa
  Clone ID: PAT_MRT4530_30492C.1.pep
VSQKKTIVKEKEETSSIHEEKEKAQKRKDACAEESSPRCCVVNFMNTGENSRFE

SEQ ID NO: 128107 - protein, 138 aa, Oryza sativa
  unsure (1)..(138): unsure at all Xaa locations
  Clone ID: PAT_MRT4530_30493C.1.pep
GVEKKADWSLFDDHXVLTKEWYINVLARIRINAFRIELVASSYENLLSSAVASVSCDAAVGNAVYMLPSFYNHDCDPNTHIVWLASADARLKALRNIEEGEELRICYIDASMDVDARQRILAEGFGFECRCQRCLSGD

SEQ ID NO: 128108 - protein, 117 aa, Oryza sativa
  Clone ID: PAT_MRT4530_30494C.1.pep
GKQRRRRLRGVEGEDPRRLRGNGGAARAPPPRLTAATPRRRRHQGQRRLAFRHLSLWWIRGGEDKNSPRPLVVVVVVVITRAGVGSPSRLWPTLRCYHCRRLLLHAADLEAVTPVPH

SEQ ID NO: 128109 - protein, 1154 aa, Oryza sativa
  Clone ID: PAT_MRT4530_30495C.1.pep
MDLLIAQINTDLRSSDALRQSSALLQALQQCAAGRDVSALARTVATEILSAPSSAVCKRLALDLLRALPLPPDLLDPLLLSSLRSDLSFPDPDVAASSIASFPSLPSHLLPSLLSSAHADIAAALSSSAESLRLAAVTSLSSLLPRDDLALMCSTNPSLMGHATTWWGRLAELALDPADAVAATAFEALARLFQELDARRMSRLAGDKLVDGEGALAVRAQWAAEAINFIWSRRNMLIARSMVMPVERFRVTVYPIVHAAKMVASGMVNTLRQIAKPGDTTIDDSVESSAEKLVGVSDIISHLLPFLSSLDPPLVFEVGINMLALADVPGGKPEWASAATTAILTLWDRQEFSSMRETIVRAVVTNLHLLDLGMQVSLFKRLLQMVRNLRAESDRMHALACICRTALCVDLFAKESVRRGQKPVPGTDVISLFEDANVKGDLNSITSKSLFREELVASLVESCFQLSLPLPEQKNSGTESRVIGALAYGTGYGALNWTEPALDVVEVCRPCVLWDCGGRTYAIDCYLKLLVRLCHIYDTRGGVKTIKAGASQDQILNETRLRNLQLQLIKDLREVHTPRISGRLIWAISEHFDLEGLDPLLADDPEDPLNIIISNMHKILFKIDSSTTTSSRIQDVQSVLICAQRLGSRNARAGQLLTKELEEFRASTSADSVTKHQSRYVLQIIKYLTNHPDNRWVGVGDATGDYPFSHHKLTVQFLEASAAQDRKLEGLVHKAIEELWRPNPTQLTLLQMKGIGALHKELPKTLSLTGSSDPCYIEAYHLADPTDGRITLHLKILNLTELELHRVDIRVGLSGALYYMDGFSRTVRHLRNLVSQDPVQSSVTVGVSHFERCSLWVQVLYYPFYGSGGSADYEGDYAEEDSQTVRQKRSLRPELGEPVVLRCQPYKIPLAELLLPYECSPVEYFRLWPSLPAMVECTGTYTYEGSGFKATAAQQYDSSPFLSGLKSISSKPFHQVCSHFIRTVAGFQLCYAAKTWFGGFVGMMIFGASEVSRNVDLGDDTATMICKFVVRASDESITREIQSDLQGWLDDITDGAVEYMPEEEVKSAAAERLKVSMERIALLKAAKPKVPPAKTKEEEEEEKKEQEDLDEFGNPKGPSTLSKLTAEEAEHRALQAAVLQEWHQLCKEKALKAQ

SEQ ID NO: 128110 - protein, 204 aa, Oryza sativa
  unsure (1)..(204): unsure at all Xaa locations
  Clone ID: PAT_MRT4530_30496C.1.pep
MNALLLTKNSVRNVCAEIAQDNLQDDVKKTMELFQKLSKSDPDFKFSVQLDEENKIKSLMWCSGRSRRMYSHFGDAVTFDTTHQTNFYDMTFGICWCFADNEDKESFEWAFSEFINLMGGPPPMTILTDQAPAMAAAIRKVYPHPQTVHRWCKWHVLKDTQTGIDQVYVNDKEFKNEFQKIVNEMMTIEEFNEGWNXLILRYNL

SEQ ID NO: 128111 - protein, 75 aa, Oryza sativa
  Clone ID: PAT_MRT4530_30497C.1.pep
LLLGTLLLTARPAEDETIDGLTNHQHYCEGRLHETYDSLLDDKDIQAIINVLATGWDRSLSAKADGHEQSGKRLC

SEQ ID NO: 128112 - protein, 149 aa, Oryza sativa
  Clone ID: PAT_MRT4530_30498C.1.pep
FFFFFHAQISSSRHRFRCQSHKNTRGITQEHKRNHTSMNHPRTQRGEESHKNTGEESHKSPLFPYPLRPRCRLFPPPSPPPPSGKADPSAAASIDDGADRGGAGGVRISGTVDGEEAVPPRRGRRRPRRLFYHTASAMRLLREGNRCAG

SEQ ID NO: 128113 - protein, 95 aa, Oryza sativa
  Clone ID: PAT_MRT4530_30499C.1.pep
KPNTAHSLLSSQCAIISIRYLRISMHCTALSPALSSPSPAAGHAANMAVLPESRRLSLLLMAACFLLQALSAHAITRHYKFNVRIYRHQTLPHDN

SEQ ID NO: 128114 - protein, 644 aa, Oryza sativa
  unsure (1)..(644): unsure at all Xaa locations
  Clone ID: PAT_MRT4530_3049C.1.pep
PSWQHDFATVPGRHRLITDRLAFAATDWGLRLHGWLVISSLLDVYVFTAGLPSLPXLVSPPARLAYFAAIDGRPRLRHRPAVSSTTDGWPIMPPLLGIYIFTTGLPSSPPTGISAYTVGWSHHHCWVSTSSSLACLHRCRLVSPSTRLVGHTTVVECLRLHHQHAFVATDCCSRLHGWLVTPPLLRVYVITTXPSPTGVFAYTVGWSHHRCWASITSPPACCRRRRLVSSPTRSGGHTAVVGRRCLHRPATLFADWCLRLYGWLVTPPLLGVYVFTAGLPSPPPTGVAACMAGLLCHRCWASMSSPSACLRCRRLVSSPAWLAYSAAIVGRLRLHQPTASYTTDWCFRLYGWLVTPPLLGIYVFTAGLPSPPPTDVSACTPGLLCCRCWXVYIFTNRPLRMTPTGAIVFTAGHVTATANRRHHIQRKLSTSAVDCCASSSSLTSVIVIAGLPSPPAMVSSLSWLAYFATVRGHLRFRYHSTSSSDFIFIIFGTGKLYCRYFASFATSPTTTSTXASTSRHASXNLTSCXSTTTSGSLIFKNSTRTSSTRIFIQAMATRRQATVFDSMFSCFPTNQRVGGYANTRLSKFDKLYVKMKQSTNQPTSSMESTSGVISFVFAPEQAFYFINSNYFTDSTSWTTSSTFL

SEQ ID NO: 128115 - protein, 140 aa, Oryza sativa
  unsure (1)..(140): unsure at all Xaa locations
  Clone ID: PAT_MRT4530_304C.1.pep
FFFLWGIQYSIGSFGAIIIPHIPPTLRCSFHHSPQPRFTTRGYTHVHTRGHDTXHTXRRSPPTHTHHQHISAKGSHTVGPYIIISGSVALICGATPRITAXSQCPQLTHNQGGVATVSGLWASPSRTLRVPVVSHRAHLG

SEQ ID NO: 128116 - protein, 122 aa, Oryza sativa
  unsure (1)..(122): unsure at all Xaa locations
  Clone ID: PAT_MRT4530_30500C.1.pep
LFPHPLRPRCRLFPPPLPSPPSGKADPSVAASIDDRADRGGAGGVRISGAVDGEEATPPRRGRRGGGRAASSTTPPPLCLFLGRXNRCAGAFPGTPPPPPSPPRRHLESLAAPPRADERRVR

SEQ ID NO: 128117 - protein, 92 aa, Oryza sativa
  Clone ID: PAT_MRT4530_30501C.1.pep
MRTDFTEGTVSGGVGKLRNRTEWAYFLPLISSRPPLLSPIPFSSALIPLIHMTTRRRMVAWPTAATEEAADGEKQNVEGGRLLPHASLSCDY

SEQ ID NO: 128118 - protein, 82 aa, Oryza sativa
  unsure (1)..(82): unsure at all Xaa locations
  Clone ID: PAT_MRT4530_30502C.1.pep
RRPRRPRXRERRXRPPPRRXRPEXXAAAPGGPLAPPRGNGGCSRSPSARSPRWRRPPVEPPPPRQPPPPGTPPRRGFPSASR

SEQ ID NO: 128119 - protein, 68 aa, Oryza sativa
  Clone ID: PAT_MRT4530_30503C.1.pep
MSRQMLPLYTSTARPLSLFSIVIEILKIEHNYRLGSFLLSGSPTKSSPGNHLTRLLHGRPVIPPFNRH

SEQ ID NO: 128120 - protein, 559 aa, Oryza sativa
  Clone ID: PAT_MRT4530_30504C.1.pep
MAAMYRPDPANPAARRPRLVVLLLVAFFALQLLVFLAFRGAPSPSSPDAAVDRVPVSARRDGEDSGCVGGLVYVYDLPPVFNEDLLALCEVLAPMYSLCPYLANDGLGFPAKGGNQSEFPPAELVGSWYSSDQFALEHIVHRRLLSHRCRTTDPARATAFFVPFYAGLAVGRHLWATNATDADRDRDCLALLSWLHAQPYYKRSNGWDHFIALGRITWDFRRSPDGGWGGSFLLMPGLANTTRLVIERDPWDAMDVGIPYPTSFHPRTAADVRAWQQYASSRSRPKLFAFAGAPRSAIKGDFRGLLLEECQAAGDACGALDCGEGRCIKQNELVMELFLGARFCLQPRGDSFTRRSLFDCMVGGAVPVLFWRRSAYRQYGWYVPVGNSQEEEWSVFIDRDELRAGNVTVRGVLAAIPEAKVREMRNRVVEMIPKLVYSAADKEGLGDGMKDAVDVMIDGMLRRAAEQRRSWRKVCELRVYDTVAASSSWWRRRRLASFPSLSIPRRASFSFLATTPTGSRRRGGVPGGGGWRRWRRLDPRDASTAGDLAEGDLEQPPPP

SEQ ID NO: 128121 - protein, 79 aa, Oryza sativa
  unsure (1)..(79): unsure at all Xaa locations
  Clone ID: PAT_MRT4530_30505C.1.pep
MVEDYEETIPXPLDQAWSSSSSEYYAAEGSSSDQGYYGEGSXSEEGYYGEQXNTNPGMTRVRLTRAXKYAAQHPSNVRV

SEQ ID NO: 128122 - protein, 55 aa, Oryza sativa
  Clone ID: PAT_MRT4530_30506C.1.pep
IAPLSDASGTPQRMCGQSYCHVVTRYFFQRLIAIHSAALVYGLMDTPGAGSKTTL

SEQ ID NO: 128123 - protein, 37 aa, Oryza sativa
  Clone ID: PAT_MRT4530_30507C.1.pep
PNPAAKILRLSYMHEAWLPQIWVEPIMVMLAANGYMC

SEQ ID NO: 128124 - protein, 50 aa, Oryza sativa
  Clone ID: PAT_MRT4530_30508C.1.pep
RHEASTPKFQREPHALFRDATTGRHGTRKRGESESEIEFEFYAQNPSKLP

SEQ ID NO: 128125 - protein, 129 aa, Oryza sativa
  unsure (1)..(129): unsure at all Xaa locations
  Clone ID: PAT_MRT4530_30509C.1.pep
GGFLQIGAGFGDPGGEFVGAGSCDCCGFTADCTAPYXSIRARYEGRYVCGLCTDTINEELGCASSSILPAEAVDHHAFVCDIGRVSTVPPSVDESVDGMFVAVLLLLRRRLGSLPSARWHRYRKREASR

SEQ ID NO: 128126 - protein, 236 aa, Oryza sativa
  unsure (1)..(236): unsure at all Xaa locations
  Clone ID: PAT_MRT4530_3050C.1.pep
SAEGEGARTGSTGVGPTRQPLGPRWTGSTRLAAAGAVGPARQPHPRPRAADGRXPTWQPRGAPEGGLARHGPKGGGAPRAPDGRRRRPXARRSGTRERGGKGEANGAVHGSPRXTRTAETTTGAEEGGGAVRDDEDDGAPTVGGRNGGADEVDEDAAKPMEVTPRREEVRSDDGGEPELGGDGGEKVRRREHDSDGESERRAAETEERSTRSDYIASGGREGGRRGRNRPRRSRLH

SEQ ID NO: 128127 - protein, 85 aa, Oryza sativa
  Clone ID: PAT_MRT4530_30510C.1.pep
VLAELERVAPHVRKVAGLLVLKAEYPPPGEIFLHIPPKSKPRASWSPMTTASALRHALLPAERRERRRRRRREDSRTAHASAHAS

SEQ ID NO: 128128 - protein, 102 aa, Oryza sativa
  Clone ID: PAT_MRT4530_30511C.1.pep
AGEPWSQAAGEPPPQGPLQARQAASSGPGPRDARRHPGFHHGPGQAPPCLAPIQSHHISRGPIAYMPWILRAPDRSSPLSFSPLLFSSSSSFFIFWIFPPLK

SEQ ID NO: 128129 - protein, 176 aa, Oryza sativa
  Clone ID: PAT_MRT4530_30512C.1.pep
GRRRVGTPQRGHCRPRRRLVHTQSSSHVYSIVSPIERRRRAALDGAHGDGVVAVVADLHRRSSPRRAKPPSLTASVLPSAAITSSVATSPRFRRRRAAPPPHIPACMVFAGEHVSSCHPRHPRLPVAAPHLALRHAAPATSKEREFSTTCTPYDMWGPCYFFIFSRIGMPKKKKKK

SEQ ID NO: 128130 - protein, 145 aa, Oryza sativa
  Clone ID: PAT_MRT4530_30513C.1.pep
SPAPLRPASARSVVENTVRRRHIGADGSVLDSYVGKRKIALPSKPPAPADDERRRSAYRIAAAEVRATADVPTLCRWEEANHWAVGGGQCAAVRLSRNRNRCAVALGVASAIGILCEERGYHLLTVVGREVIFTVSLLFFWSNAS

SEQ ID NO: 128131 - protein, 89 aa, Oryza sativa
  Clone ID: PAT_MRT4530_30514C.1.pep
FASYIYSLDRLIDIYDWVATRTPPCQDHASAVTVVSSVAYFDSVGTLDEAFRKCAAHLQEQSVCIAHEQRMQTAYTTRSRLDCFNQWKF

SEQ ID NO: 128132 - protein, 586 aa, Oryza sativa
  Clone ID: PAT_MRT4530_30515C.1.pep
MKPFAGMSLSSFARLLLLLIVLHHQPRLLEADNLNLTAGSTLRPPQYITSSSDDFAFGFRAIDAGLFLLAVWFNNDDDEHKAVVVWYATDPSSASAVTATAQSVFSVTLGQLLLADTTTGGGVGGNVWTSSNPGQPNGFLLVLLDSGNLQFLAAGDNSVVWESFRHPTDTLLPGQSMGAGAILRSKRLDADFSAGCFGLFVQADGNIVLYLINLAGGGNADSSKAYWATRTQQPGNTPDGNTTLFFASTGSIQYQIKNGSLYDLTPPVAISTAGGSYRRATLDLDGIVRVYIRPRSSANASWTVADLFPAVGCGMSTRALDGFCGPNSYCVSGDDGRLDCACPTGYSSVDTKLRYMGCRPLFAPQSCDVVSSTAEFGITKLPNTTWTASPYVMYERTAEERCADMCLSDCFCVAALFEPDATRCTKMASLTGSGQQGRNVMTKALIKVYHGMAKSLQPPDIAVKKLITSNEYSEREFLNEVQSIGRIHHRNLVRMVGYCKEREQRMLVFEFMPGGSLRSILFQTPRPPWSWRTEAALGIAKGIEYLHEGCTSPIIHCDIKPDNILLDDKNNPKITDFGIAKLLGDQ

SEQ ID NO: 128133 - protein, 669 aa, Oryza sativa
  Clone ID: PAT_MRT4530_30516C.1.pep
MKPFAGMSLSSFARLLLLLIVLHHQPRLLEADNLNLTAGSTLRPPQYITSSSDDFAFGFRAIDAGLFLLAVWFNNDDDEHKAVVVWYATDPSSASAVTATAQSVFSVTLGQLLLADTTTGGGVGGNVWTSSNPGQPNGFLLVLLDSGNLQFLAAGDNSVVWESFRHPTDTLLPGQSMGAGAILRSKRLDADFSAGCFGLFVQADGNIVLYLINLAGGGNADSSKAYWATRTQQPGNTPDGNTTLFFASTGSIQYQIKNGSLYDLTPPVAISTAGGSYRRATLDPDGIVRVYIRPRSSANASWTVADLFPAVGCGMSTRALDGFCGPNSYCVVSGADSRLDCACPSNYSFIDKNIRYEGCRPAFAPQSCDVVNSSAEFEITKLPNTTWTTSPYVIYERMAEEQCADICLRDCFCVAALFEPGATRCTKMALLAGSGRQERSVTQKALIKVRTSRSPPAPPSRGRVPLLPYIILGCLAFLIILAAATSLLLHWHMRRINNNDHDIVRHFTKKELHRATNGFQRLLGRGGFGEVYHGMAKSLQPPDIAVKKLITSNEYSEREFLNEVQSIGRIHHRNLVRMVGYCKEREQRMLVFEFMPGGSLRSILFQTPRPPWSWRTEAALGIAKGIEYLHEGCTSPIIHCDIKPDNILLDDKNNPKITDFGIAKLLGDQ

SEQ ID NO: 128134 - protein, 126 aa, Oryza sativa
  Clone ID: PAT_MRT4530_30517C.1.pep
RTAGASYYYYPSLCFSPERSRSRSPNPLPSSEDNGRSQDEGARGRRHRRVPRLVSGSRPRAGTGARLRRRPRGAPRGRLPRSRRVRLPLLLDRSPSICLGLIRFVVVVCVSPSSCGRRVGGICVCN

SEQ ID NO: 128135 - protein, 831 aa, Oryza sativa
  Clone ID: PAT_MRT4530_30518C.1.pep
MKPFAGISVSSLAPLLLLLVLHQPHQLEAENRNLTAGNSLRPPEYITSPSGDFAFGFRALDSGGPDSLLFLLAVWFNDNTAAADPVQQKAAVVWHATDPDGSGSAVTATTQSVFSVNFGQLSLANNGSRNIWTNVNPAQPNGFVLVLLDSGNLQFLTGGDNSVVWESFRHPTDTLLPGQSMGAGENLRSKRTDADFSAGRFGLFVQADGNIVLYIGGHADSSRAYWATRTQQPSNTQDGNTTLFFASTGSIYYQIKNGSLYDLTPPMASSTAGGSYRRATLDPDGVVRVYIRPRSSANASWTVADLFPAVGCGMSTRALDGFCGPNSYCVVSGADSRLDCACPSNYSFIDKNIRYEGCRPAFAPQSCDVVNSSAEFEITKLPNTTWTTSPYVIYERMAEEQCADICLRDCFCVAALFEPGATRCTKMALLAGSGRQERSVTQKALIKVRTSRSPPAPPSRGRVPLLPYIILGCLAFLIILAAATSLLLHWHMRRINNNDHDIVRHFTKKELHRATNGFQRLLGRGGFGEVYHGVAKSLHPPDIAVKKLVTSNEYSEREFANEVQSIGRIHHRNLVRMLGYCKEREQRMLVFEFMPGGSLRSFLFQTPRPPWSWRAEAALGIAKGIEYLHEGCTLPIIHCDIKPDNILLDDRNNPKITDFGIARLLGDQQMYTTVTNVRGTRGYIAPEWFHSERRIDTKVDVYSFGVVLLEMICCRRCQDPVTSRGEGGDDHDNSVVTLFGWASQLVNHGRVEVILHSDDDAVEDLERVERFVRVAFLCIETNPSLRPMMHQVVQMLEGVVEVHAMPHLPSSIDTLPSISKDSRTPRFFFSS

SEQ ID NO: 128136 - protein, 89 aa, Oryza sativa
  Clone ID: PAT_MRT4530_30519C.1.pep
NGLHTSRPRLTRPRKKPLESARCITFNGPRYPRFFKRRGSTPGASAEATPAPCLGLLMLAPTPQNRERTPCILRSWGKYLREAFGLDNP

SEQ ID NO: 128137 - protein, 555 aa, Oryza sativa
  unsure (1)..(555): unsure at all Xaa locations
  Clone ID: PAT_MRT4530_3051C.1.pep
MMVPAGDQAEEAIVADAGKEEAEVRAAMGVEQDGKFSMKNLLWHGGSAYDAWFSCASNQVAQVLLTLPYSFSQLGMLSGILFQLFYGLLGSWTAYLISILYVEYRTRKEREKVDFRNHVIQWFEVLDGLLGRHWRNVGLAFNCTFLLFGSVIQLIACASNIYYINDKLDKRTWTYIFGACCATTVFIPSFHNYRIWSFLGLVMTTYTAWYLAVASLIHGQVDGVKHSGPTKMVLYFTGATNILYTFGGHAVTVEIMHAMWRPQKFKAIYLMATLYVLTLTLPSAASVYWAFGDELLTHSNALALLPRTAFRDAAVVLMLIHQFITFGFACTPLYFVWEKLIGLHDCRSLFKRAAARLPVVVPIWFLAIIFPFFGPINSAVGSLLVSFTVYIIPALAHMITFRSAHARENAVEPPPRFVGRWSGXFIINAFVVAWVLVVGFGFGGWASMTNFVRQIDTFGLFTKCYQCPPPPLPPAGAAPNATWPPFPATPFNATTAGLAPAPAPSPAHFFGRHHRHHSHGLQRRNAARGPVTKGASFPAGVLPLCSRTAGQQHTW

SEQ ID NO: 128138 - protein, 84 aa, Oryza sativa
  unsure (1)..(84): unsure at all Xaa locations
  Clone ID: PAT_MRT4530_30520C.1.pep
MAITRILREPKDLHKDSPTSCRSCPVRXDMLHXHATMMGPSHRPFAGGGFMTNIHFQPDYTFKPPNVCFRTKVLHPNITSIGRI

SEQ ID NO: 128139 - protein, 73 aa, Oryza sativa
  Clone ID: PAT_MRT4530_30521C.1.pep
RTKHDGMRATPGHGLDGSTHDGSGTAAPVAHEGAPAWRPTPAGKRLLVFLGDRVKKRLEEVFEAGGGPRFTGH

SEQ ID NO: 128140 - protein, 194 aa, Oryza sativa
  unsure (1)..(194): unsure at all Xaa locations
  Clone ID: PAT_MRT4530_30522C.1.pep
HEAKGSQSSISPDLTRRRAASLVRHASASSSSRPARIDETSKAPPRAELSTPADDPPADFSVTEHINYDVVEQCVKNILSLXEPVEDDRRKRLSAIQELSNSIPKVAALRGAVSHPCGSFCSXLGSFAGLLVISVRLPGHSCSGILLAPSAVALGLCARHLWRVAGYVQFIPFARVPVLQYVSNTFGISCDISV

SEQ ID NO: 128141 - protein, 45 aa, Oryza sativa
  Clone ID: PAT_MRT4530_30523C.1.pep
YTDTMMKFASFETVVEMIYKYAIPAPKSECSKPLQLRVSFCSGYI

SEQ ID NO: 128142 - protein, 110 aa, Oryza sativa
  Clone ID: PAT_MRT4530_30524C.1.pep
GSLRVRNFRLSGSTNPNKATKHSGNTSNTTTKAQPPPGGLTTPYNGTHTTLTIDKGYYKLRRHIKLWEHPKAQSVAQSAAQTHSLFVGARICHKYTVGQWHKITRPKETG

SEQ ID NO: 128143 - protein, 102 aa, Oryza sativa
  Clone ID: PAT_MRT4530_30525C.1.pep
MPWKNLSYLPQASRIQARVGVMEFGWVLRRPMRLPDSPRHERGLPAALRGMGVKPEVWCAWLEGVMRRVLSRPLSGISCSGGWLGLLQRGVALTSGWLILIN

SEQ ID NO: 128144 - protein, 142 aa, Oryza sativa
  Clone ID: PAT_MRT4530_30526C.1.pep
MAGIWYDEAGGASHYGFSSPSEGQIEIGLAVYLGVEGVLLSKPASFTYARIAWISGPDRGAFCGAPAASRGGRVASDLLLSSLEAAVHYTSMNPSHSRCMHGVMGTSTLIGHSHQVDRSIIDPLSLHHGTYTAPFAFSTYYY

SEQ ID NO: 128145 - protein, 480 aa, Oryza sativa
  Clone ID: PAT_MRT4530_30527C.1.pep
MARAPPPLSSLPPPPRRPTVVLLLGLALAFCLAVLSIQSSFFTAPRLASRLDLDSDEVRALSGFQSRVQQCVARRGLGLTADIIDHCKLVLRFPKGTNSTWYNTQFKYFEPLEYNYDVCETILLWEQYRNMTTVLTREYLDVRPDGWLDYAAKRIAQLGADKCYNRTLCEELLSVLLPAKPPFHPRQFATCAVVGNSGDLLKTEFGQEIDAHDAVFRDNEAPVNKKYAKYVGLKRDFRLVVRGAARNMAPILKGSSDEVLIIKSLTHKEINAVIKELPNPVYLFQGIVLRRGAKGTGMKSIELALSMCDIIDMYGFTVDPNYTEWTRYFSPPRKGHNPLQGRAYYQLLECLGVIRIHSPMRAKRVEDWSDIPSREEIRTAHAAAFRLKRHETGQSDQMGPFSNCKVWGTVDPDYGPVSGTPDMSETRKSSNYKKWEVLPFDSLRMEAQEHHVQMGGVSLYKMDGNKLDDLVCVRHERSSS

SEQ ID NO: 128146 - protein, 73 aa, Oryza sativa
  Clone ID: PAT_MRT4530_30528C.1.pep
GYLLNQSEECSAMGTAVTILVPLATCTSHHAILNCSFVVELVTYTLNCSTIVFVVDTCFHFTMPSKSKSCLFC

SEQ ID NO: 128147 - protein, 221 aa, Oryza sativa
  unsure (1)..(221): unsure at all Xaa locations
  Clone ID: PAT_MRT4530_30529C.1.pep
GLGLTADIIDHCKLVLRFPKGTNSTWYNTQFKYFEPLEYNYDVCETILLWEQYRNMTTVLTREYLDVRPDGWLDYAAKRIAQLXSLXLLHICTILRNEVILIRILVNVLXKICSGADKCYNRTLCEELLSVLLPAKPPFHPRQFATCAVVGNSGDLLKTEFGQEIDAHDAVFRDNEAPVNKKYAKYVGLKRDFRLVVRGAARNMAPILKGSCNAVILVSSR

SEQ ID NO: 128148 - protein, 95 aa, Oryza sativa
  Clone ID: PAT_MRT4530_3052C.1.pep
LIPCLLLPPVHPPLICVSPDQGLTRGTGHTRSSYESVIAGSSVHCCELPLVSSGLRLAAPARRMATSKSEGCLVTSRNPRMRMQGHYGVQRHHQH

SEQ ID NO: 128149 - protein, 686 aa, Oryza sativa
  Clone ID: PAT_MRT4530_30530C.1.pep
MSGKLCFLASVLLSMSTVVDLAMAASGGVNIAVYWGQNGSEGTLGETCGTGLYAYVNLAFLSTFGAGRAPVLNLADHCDAPSGTCASLAADIASCQAAGVKVLLSIGGGALGYNLSSPSDARDLAAYLWDNFLGGGATGASRPLGDAVLDGVDFDIESPSRFYDDLARNLASLYTRAPRPPRGGKTYLLTAAPQCPYPDASLAAALATGLFDHVWVQFYNNPPCQYAAPGDASALRSAWAQWTAGLPAATVFLGLPASLDAADSGFVDADTLASQVLPVVEGAANYGGIMLWSRSYDKDSSFSVKLQAALQNRNKPTGAGASSHTKRRIYIIAGVFAGVLLLFLLLITYFLCHKKHHGQQPPVQELTTPPKAEPSQKKQRAQHLKRYSYSEVERMTKTFAHKIGQGNYGDVYKGNLRDGRQIVVKLLKNCRGNDKEFLNEVASIGTISHVNVIPLLGFCLQGTARALIYEYMPNGSLESYAFSNDDSIEENYSLWIYWEKLYEIAIGVARGLEFLHGSGNANIMHLKIKPRNILLDQELCPKISDFGVANLCLWKESKKSAQNARGRDSYDAPEVVSTKFGAVSSKSDVYSYGVMVLEMIRAKRRINVGADTTTKYFAQWLYDHLDQFCNSISDISDETRESVRRIIIVGLWCIQAAPANRPSMSRVVKMLESSSTKMDLPRKSIE

SEQ ID NO: 128150 - protein, 219 aa, Oryza sativa
  unsure (1)..(219): unsure at all Xaa locations
  Clone ID: PAT_MRT4530_30531C.1.pep
DFLIEVYFLAFTFKITSNTYIKILTTIFFLFASIPKRCGVRISYMKFIRFGYTVWRSCRHSYHVSXYLYMNRTTTFSQRTRNQARICLLLRIASSLVTRSQLCPTHWRARLLGEHASRTFVFDVLHREKAIIRFLKITSRDYLLFVQHGLSSSALRCCTLSLTPGTASSSPQEKMKGATEPAAEGEVGLGVGGGGGRRKGGGGLVTPASGGRRWVALVR

SEQ ID NO: 128151 - protein, 50 aa, Oryza sativa
  unsure (1)..(50): unsure at all Xaa locations
  Clone ID: PAT_MRT4530_30532C.1.pep
FFFFFFFFFFGHXQSXXFHHXGRXMLAKHLXXSTXASNXDNRVLXNXLKX

SEQ ID NO: 128152 - protein, 38 aa, Oryza sativa
  Clone ID: PAT_MRT4530_30533C.1.pep
MRKRNTLTGSEGPRQNLWRKWRTMIELEKEEEHIDDEL

SEQ ID NO: 128153 - protein, 203 aa, Oryza sativa
  unsure (1)..(203): unsure at all Xaa locations
  Clone ID: PAT_MRT4530_30534C.1.pep
MRNVDACGSMFHSEPDFVDDLLDCSSCYLAFVSVRPGPVMVXAGSNTVNTSGNVEVTQAMLLLSHGLMEQWSAEPADPRADVFGPYSSLSARSIRDAENFRHSLATLILRSGADGVPETDVSIIHGSTSEPQRTCRAPQLPANKIDRLIHKLEKNRNPASSPESAVVADVSGFVRDGRHPDRHRRRFVGVGHENEKTAARSRR

SEQ ID NO: 128154 - protein, 96 aa, Oryza sativa
  unsure (1)..(96): unsure at all Xaa locations
  Clone ID: PAT_MRT4530_30535C.1.pep
TLHSTHTYMDDYAECPPITVYSYMDDHAQCPPISRVIRKNIHYPILRXPYSTQIMLLTVAGKHSARQITMARNHALTMPLETCSGRDSAEEWRDKQ

SEQ ID NO: 128155 - protein, 331 aa, Oryza sativa
  Clone ID: PAT_MRT4530_30536C.1.pep
MAICSTDNELVELLWHNGGVVAQPQAAQARVVSSSGRGQSASVLTGDDTETAAWFPDTLDDALEKDLYTQLWRSVTGDAFPAAAAAGPSSHHAPPPDLPPPAARPPMRSGIGSSWTGDICSAFCGSNHIPETAAQRCRDAGAALPPERPRRSSTHDGAGTSSSGGSGSNFGASGLPSESASAHKRKGREDSDSRSEDAECEATEETKSSSRRYGSKRRTRAAEVHNLSERRRRDRINEKMRALQELIPHCNKTDMASILDEAIEYLKSPQMYIQIMWTTTRMEPVMVPCAHLFKPPIPLRRNLACMPAPLLRTICFWASSSTAKPDTESVS

SEQ ID NO: 128156 - protein, 156 aa, Oryza sativa
  Clone ID: PAT_MRT4530_30537C.1.pep
PRVRLDEAIEYLKSLQMQVQIMWMTTGMAPMMFPGAHQFMPPMAVGMNSACMPAAQGLSHMSRLPYMNHSMPNHIPLNSSPAMNPMNVANQMQNIQLREASNPFLHPDGWQTVPPQVSGPYASGPQVAQQNQIPKASASTVLPNSGAEQPPTSDGI

SEQ ID NO: 128157 - protein, 143 aa, Oryza sativa
  unsure (1)..(143): unsure at all Xaa locations
  Clone ID: PAT_MRT4530_30538C.1.pep
PNTETGPNSDSPPSRRRRRRWRASGVKLIDIAVNFTDGMFRGIYHGKQCHAXDIPAVLARARAAGVDRIIIRCFAACHSPFRFLFLAYGSDLVCLISRFLGLVRRKVTGGSLKESREALEIAETDGRLFCMEGGHPTRSREVE

SEQ ID NO: 128158 - protein, 82 aa, Oryza sativa
  Clone ID: PAT_MRT4530_30539C.1.pep
MGMEIGGIDGGGEWGNLPLDSIVKSHSPELGVAGNEVWRAPHLALPSPPSLIMDQLSKTFDWTEGLFDVVVHYIVLKHPSDL

SEQ ID NO: 128159 - protein, 1940 aa, Oryza sativa
  unsure (1)..(1940): unsure at all Xaa locations
  Clone ID: PAT_MRT4530_3053C.1.pep
SNQLDYDLVGIIVPQYPLYPVYGYPPSIVARQVGGLGAQGSTTMSSSFVDNSVNTNLNKGVPASTMLVWTQVGEIVFPVYTTVPISSGPSMTGSKNAVARTQDDSMSKDPPAEAENGTSTTSEPEKDPSAAKPCLSDKNHEPARMTSEVTRSWCPIHKTRKHTLQACWVFLNVHAEIHACKERGIQRTSPTRDVYCPIHKTKNHDLSSCKVFLSAMKTSPPKVQQSRIPLRDEDKEQGATLISDRFXGVIDIDPHEPSVLHLLEDYGSSXTSTPREVLAIDGTGTSARANAEAENQVTTPAQHIRAVNAILRETPYDPVQNDDLARWTERLRESVTNLSNAFEEAAAAAHPEWPPTGGADGENPEQRESPHRATPSPRGTGDLRDHLNGHREARRARDNENHSRHRVSSRRHDNEERGGRSSEDRDHDNRHDHDDRERRVLGDTSRGCRHNDDDDGDRRRDSNRRRRQDSREPGRRPRNRTPKPSDPSSSSSSSSSSSSDRHPRRTYDRRQPTAPSAGCRAFSRSLRDVRWPERFRPGAIEKYDGSTDPEEFLQVYSTVLYAAGADNNALANYLPTALKGSARSWLMHLPPYSISSWADLWQQFVANFQGAYKRHAIEDDLHALTQNPGESLRDYVRRFSECRNTIPEITDASVIRAFKLFKIVNQCAHADDALRRKNDKLKTGGEKKLAKDAPESSKKKNRKSGKRKAQAEVLTTEYADPPKRPDPQGSDMKKTWCPIHKSDKHSLEDCLVFKKSLAKHMALEKGKRVRVVEKDAEAATQESDSAYPDSDLHVLHIFGGSTTYSSKREYKKVEREVCSTWQGAAPKMKWSEQKIEFSEEDHPKTAVIPGRYPIVVEPTIQNIKVARVLIDGGSSINLLFGSTLDAMGIPRSELTPTDQPFHGITPQSSSKPLGKITLPVTFGQANNFRMKQITFDVAEFNTTYNAIIGRTALAKFMTASHYAYQVLKMSGPKGTITIQGNAKLAVQCDKRSLDMVEHTPSPLATAEPPNKPSDMPGVPREVIEHKLMVRPDAKPVKQKLRRFAPDRKQAIREELDKLLKAGFIKEVFHPEWLANPVMVRKANGKWRMCVDFTDLNKACPKDHFPLPRIDQLVDSTTGCELLSFLDAYSGYHQISMVKEDEEKTAFIIPFRVFCYVKMPFGLITAGNTFQRTVQGALSDQLGNNVEAYVDEIVVKTKTSDSLIDDLRETGIEANPEKIKAIENMKSPTRLKEVQKLTECMAALSRFVARMGERGQPFFAPLKKQDKFVWTQEAEEAFIALKRYLSNPPVLVAPQPNEELFLYIAATPYSVSIIIVVEREKVQQPVYYVSEALHDAKTRYPQIQKLLYAVIMTSRKLRHYFQAHRVTVVSSFPLGEVVRNKDVVGRIAKWVVELSQFDVHFVPRTSIKSQVLADFVADWTMPNNRSDNQIDNETWTMAFDGALNSQGAGTGFILTSSSGDQFKHAIHLNFRATNNTAEYEGILAGIRAAAALGVRRLVVKGDSELVANQVHKDYKCSRPELSKYLAEVRKLEKRFNGIEVRHVYCKDNIEPDDLARCASRREPLELGTFLDVLTRTSVKEASGEDSPVALSNSSGATEAERVIADIETTDDWRTPLIKFIGSEELPEDDAEAEKITHKAKIYCMIGYDLYKKALNGVLLKCVSSDDGRHLLLDIHEEICGSHAAGRTLVGKAFRQGFFWPTALKDACDMVQRCEACQFHRFGLPHRIITDNGSQFISADFQDHCIRLGVKICFASVSHPQSNGQVERANSIVLQGIKTRVYDRLMSHDKKWVEELPSVLWAVRTTPTTSNKETPFFLVYGSEAMLPTELRHQSTRVQKYSDEDQEEQRNDDVNLLEEHHERVAVRAAXSYQQALRCYHKKRIRARTLSIGDYVLRQVQSQAGRNKLSPKWEGPYTITQVLRPGAFKIADGDGRELANSWNI

SEQ ID NO: 128160 - protein, 126 aa, Oryza sativa
  unsure (1)..(126): unsure at all Xaa locations
  Clone ID: PAT_MRT4530_30540C.1.pep
AXETGDVLHPKNEYMDPYAADKIVSAGIKKVKIRSVFTCKCKVGVCARCYGMNMATAKKIDIGEAVGIIAAQSIGEPGTQLTMRTFHTGGVAGADITQGLPRVEELFEARKPKGLAIVSEIAGTAR

SEQ ID NO: 128161 - protein, 71 aa, Oryza sativa
  Clone ID: PAT_MRT4530_30541C.1.pep
RAVEYSERIVAYCGDVKDKLMKSAVYVGAPGKGILAATETNGTIGKRYARINAWNDEENRCSLDEMLFTTP

SEQ ID NO: 128162 - protein, 361 aa, Oryza sativa
  Clone ID: PAT_MRT4530_30542C.1.pep
MACLLLHGGLVCERQLKLVTLDPHVPRSCMGNQNLLPVRDSSTKTILEGAKVVISLSSYVDGTLMARSSGFFINWDEESKVCTVLTSARLICSKYSSMDQWLGSDEYSPDATVYAHLLDKDETTVPAALLHYDRHFNIALFKVDVDSCAKIPSFSSEVTCGQDIFALGRDDDLNLTINHGRVQFKGPSMFERHYYMYTGFTTGQSGIGGPIINFNGQVLGMTNVLGMGFIPSSVILHCLDMWKKFGYIPRLHIGMKLSAMKFLDPIHVEKISRKCNIDSGLIVKELEIELMQICEDHLDKGRGIGSSVDIQVGIFRMCKGSTCTISLRLNISNDVEVFARGKYIFSARDCTWVFDDVGTGL

SEQ ID NO: 128163 - protein, 103 aa, Oryza sativa
  Clone ID: PAT_MRT4530_30543C.1.pep
FFRQLALVIFSWCRCSPLYHMVLGFFRCLRALYVGPPMSVVFPGPRIGYLERAVPSLPGFCSVGIPFGAGGVCYWLGYPWSPEKLVACASKARLCVCLCGVAK

SEQ ID NO: 128164 - protein, 235 aa, Oryza sativa
  Clone ID: PAT_MRT4530_30544C.1.pep
MTTTDTTIAHIMDKQEDIKVKASKCWNPIRPPAVLLISNGRQISIRAPFSAREYLMESSRSRLSNGSSIITKFHPSQPQLKKQAPMLPDPTTSMSVNAATDSGLAHEHRHLHRRIWPRSQVPTLDPVAPASIDAAAGTAASRFSLRARPRGCTPLQACEATAPLRCASLHARGRLSSPPNVGPAAAGPRGRRASLPLLRARVSPPALVACAAVLSAFGLRTLGFWIGEMLFPASG

SEQ ID NO: 128165 - protein, 307 aa, Oryza sativa
  Clone ID: PAT_MRT4530_30545C.1.pep
MACLLLHGGLVCERQLKLVTLDPHVPRSCMGNQNLLPVRDSSTKTILEGAKVVISLSSYVDGTLMARSSGFFINWDEESKVCTVLTSARLICSKYSSMDQWLGSDEYSPDATVYAHLLDKDETTVPAALLHYDRHFNIALFKVDVDSCAKIPSFSSEVTCGQDIFALGRDDDLNLTINHGRVQFKGPSMFERHYYMYTGFTTGQSGIGGPIINFNGQVLGMTNVLGMGFIPSSVILHCLDMWKKFGYIPRLHIGMKLSAMKFLDPIHVEKISRKCNIDSGLIVKEVSYGSNAENRGVRAGDIIQSMN

SEQ ID NO: 128166 - protein, 133 aa, Oryza sativa
  unsure (1)..(133): unsure at all Xaa locations
  Clone ID: PAT_MRT4530_30546C.1.pep
LLHNTTGDGTGYYQGSLILERLCVDYGKKSKLGSTMYPXPHASTSVVEPYNSVLSTHCLLXHTDVAHLIDNEDIYDICRRSLDIERPTYTNLNRVVSHAISSLTAYLRFDGALNLYLNEFQTHLLPYPRIHFM

SEQ ID NO: 128167 - protein, 98 aa, Oryza sativa
  Clone ID: PAT_MRT4530_30547C.1.pep
FFFFFLEKVKQLCEFDIYFRRNSLTMNPGSCPGMACTRRSLQHQLGLQYLGFSSNLFEWPAGLKSSSQLGVTVTTIEAPKCTMHHTQQPPIFFLNPKS

SEQ ID NO: 128168 - protein, 64 aa, Oryza sativa
  Clone ID: PAT_MRT4530_30548C.1.pep
SVAGGPPRLPWEGLVPPASDWGKLHFNKIGGVCLFLFCFCLIYPSRVWLIFSYPPLFFCPSSLL

SEQ ID NO: 128169 - protein, 246 aa, Oryza sativa
  Clone ID: PAT_MRT4530_30549C.1.pep
MPLPSHFPSISFLLHLIPSLFSSSCVASDNDGGGRARDDDTVLSHQRPCRAGRMPAACSVTPSMCPRPPQHRPRCAGRMLLRVRRRCPRRDGRMPNIAATTPTPLRRKECSRSVKMGCVLKDVDDDGKGCHSAAPHMMMARGSRYAAACRRTMKMRCLCAQPRMRMTRGCGCFTSAALLLAHGAIHFSGVVAFAAAAPPSLPLSRLARISRACFPSMRLGTATTRSVVASMVAELCAALVLDLPSL

SEQ ID NO: 128170 - protein, 1551 aa, Oryza sativa
  Clone ID: PAT_MRT4530_3054C.1.pep
MSKNPPVETENGLPTTSKLGKDSDAAKSCPSDVNHGPTKMTSEAIRSWCPIHKTKKHTLQDCWVFINVRAEIRACKERGIQRISPTRDVYCPIHKTKNHDLSSCKVLLGAMKAPSPKSYVPARDNGKEQGATPASDRFVGVIDLDPHEPSVLHLLEDYGSSTTSAPREHIRAIQAILRETPYDPVLNDDLERWTEQLRESVTNLSNAFEEVATAAHQDQPPIGNPNGEDPERRESPRQATPPPRGTGDLRDQINGRREARRTRDDANRSRRHVSSRHHDRGDRQNEDRECNDRERRGPDNTGHGHRRNDDDEGDRRRDNSERQRQDSRDPGRHPRNRTPEPTDPSSSSSSVSSSSSDRHPRRSRDRRQPTAPSAGCRAFGRSLRDVRWPERLRPGAIEKYDGSTDPEEFLQVYSTVLYAAGADDNALANYLPTALKGSARSWLMHLPPYSISSWIDLWQQFVANFQGTYKRHAIEDDLHTLTQNSGESLREYVRRFNECRNTIPEITDAFVIRAFKSGVRDRYTTQELATRRITTTRRLFEIVERCAHVDDALRRKNNKPKTGGEKKPAVDASESSKKKNRKNGKRKAQAEVLAAEYANPPKRPDPQGSDTKKSWCPIHKTDRHSLEDCLVFKKSLEKHMAFEKGKRVCVVEKNEETPPHESDSAYPDSDLHVSHIFGGSTTYSSKREYKKVEREVCSTWQGAAPKMKCSINLLFASTLDAMGIPQSELTPTDQPFHGITPQSSSRPLGKITLPVTFGQANNFRTEHITFDVTEFDTAYNAIIGRTALAKLMAASHYAYQVLKMPGPKGTITIQGNAKLAVQCDKRSLDMVEQTPTPPTTFEPPKKEAEEAFIALKRYLSNPPVFVAPQPNEELFLYIAATPYSVSTVIVVEREKVQRLVYYFSEALHDAKTRYPQIQKLLYAVIMTSRKLRHYFQAHRVTVVSSFPLGEVVRNKEVVGRIAKWVVELSQFDIHFVPRTAIKSQVLADFMADWTMPNNKSDNQGDNETWTMAFDGALNSQGAGAGFILTSPSGDQFKHAIHLNFRATNNTTEYEGLLAGIRAAAALGAKRLIVKGDSKLIANQVHKDYKCSNPELSKYLSEVRKLERRFNGIEVRHVYSKDNVEPDDLARRASRRELLEPGTFLDVLTKPSVKEVSGEVGPNTPDISSEVTEAEHAVADIETTDDWRSPLIKFISSEELPEDDTEAEKIIRKAKIYCMVGNDLYKKASNGIFLKCVSTDDGRQLLLDIHEGICGSHAAGRTLVGKAFRQGFFWPTALKDACDMGGYRFLFVAIDKFTKWIEAVPTGEIKADNAIKFIRGIFCRYGLPHRIITHNGSQFISADFQDYCIGLGVQICFASVSHPQSNGQVERANDIVLQGIKTHVYDRLMSHDKKWVEELPSVLWAVRTTPTTSNKETPFFLVYNSEAMLPDELRHQSTRVQKHSDENQENQREIDLNLLEEHRERVAIRAASYQQALRRYHEKRIRARILSIGDYVLRRVQTQAGRNKLSLKWEGPYTITQVLRPGAFKIADGDVRELANSWNIDQLRKFYV

SEQ ID NO: 128171 - protein, 41 aa, Oryza sativa
  Clone ID: PAT_MRT4530_30550C.1.pep
MPNEARNVATLARSSGVATLHVKEAGDAGKITSIANKINHV

SEQ ID NO: 128172 - protein, 423 aa, Oryza sativa
  Clone ID: PAT_MRT4530_30551C.1.pep
MADRKKCKAAAVATTDGGGEDRISALPDEVLQRALSFLPSRDVVRTCVLSRRWRHQWKSVPALRIYAFDDCRDVQHLSDFVTNFLLRRNRLALHECDITCFDEGDGCEVFGENARQWIRYAVSCQVRVLRVSVEAHTRLFGAPLKAQRLKRLELFSVELGAFSLDFSSCRELEELELGGCIIKDKVKQILSESLRRLRIEGCDFFRNRTRISCPNLISLEITDFTLYTPVLMSMPSLASAFIRFGEHCADSCDCYYYGEFGPDYTGCHHSTVKGNGTVLLNGLSDAIQLELISGAGVFIFRRDFRCCPTFNKLKTLLLNEWCMAADSSALIYFLQHSPVLEKLTLQLRKSQRTMVKRGSTNKNQNEKFLVSKHLKLVEIKYCEDEMVQQVLHVLSACGIPSEKIIIQRISSWASGGAQDLRRL

SEQ ID NO: 128173 - protein, 257 aa, Oryza sativa
  Clone ID: PAT_MRT4530_30552C.1.pep
IRLEIRTYTKQLLLVLDFLHKNGIMHRDIKGANILVDNKGCIKLADFGASKQVVELATISGAKSMKGTPYWMAPEVILQTGHSFSADIWSVGCTVIEMATGKPPWSQQYQQEVAALFHIGTTKSHPPIPDHLSAAAKDLLLKCLQKEPILRSSASELLQHPFVTGEHMNSLPLSSNVTENFEASSPSCAPNDDESFLFRSTVNPLDSGNKQSWGMSNDDDMCVIDDKEDFSQSDSKYKSFMSTNNIEKFNPMSDPSD

SEQ ID NO: 128174 - protein, 89 aa, Oryza sativa
  unsure (1)..(89): unsure at all Xaa locations
  Clone ID: PAT_MRT4530_30553C.1.pep
RPDSRSTTRAPRVRSREPSSYLTVEYLGDYSRNNAQISASHXTVHENLKLDVIHYRMAMLPALECVYPEFLGRNCDKFGQADDAKACSE

SEQ ID NO: 128175 - protein, 70 aa, Oryza sativa
  Clone ID: PAT_MRT4530_30554C.1.pep
LFPTSLHHVHDVSRRAGERVAGTEVVVGVHHPVHHLVRRLAVLVHAILCKDFTYLTVNLTNELIQSSDSN

SEQ ID NO: 128176 - protein, 210 aa, Oryza sativa
  Clone ID: PAT_MRT4530_30555C.1.pep
MASRMGLAGNVRDRGKNVLRKVEEAKVCARGRSRDALYAACLHTACRMEGAPRTLKEFIAATPDAAATKRNLGKFIHAIKRLLGSNDEEAEAGQDQAGSKATNGCGGGGGAGAVVRASNYLLRYGSAVGMSGQEVSAAQRAASRLDESLDVRRNPQSIAAAIIYMAVQRAGGGGGRSKSVREVSAATGVSESTIKDAYKDLCQHAEVLFG

SEQ ID NO: 128177 - protein, 148 aa, Oryza sativa
  unsure (1)..(148): unsure at all Xaa locations
  Clone ID: PAT_MRT4530_30556C.1.pep
SADPVVPRWHRRGAYVAATRAGGMTRENERERANGSDSPEGVRRRRIAVAATGGEKRGKRRRGHEGLIPGGESIYAAKVKHSXHRIRRKHAVGGRRREXLPDSGGDAGESTLQRXGAVTRGRRHGSDLSGLGPGKRKKXERPESPSAS

SEQ ID NO: 128178 - protein, 431 aa, Oryza sativa
  unsure (1)..(431): unsure at all Xaa locations
  Clone ID: PAT_MRT4530_30557C.1.pep
RGRGIRLPSGGXGAAREKGAARPNLTGRPAREGGPRRARGRGGEREXWAGSISRGPEWDLLFGGSAHRFGERDAVHARGSQRTRXTAGPRAASRLAVDRARERGRRERLTRVGSTRSRPRWHRRGAFMAATRAGERKTKAPAANRRRAAAVSPGCRATTRGDGVYTGMTRENERERANGLDSPEGVRRRQIAVAATGGEKRGKRRRGHEGLIPGGESIYTATVMHSXHRIRRKHAVGGRRREXLPDSGGDGGEPTVSDGSSRGGAREEMDRGGRTGRCTTVRXRGAVTMGRRHGSDLFGLRPRKRRKTMCPKSPSRVLCTHRLSRCLAMNGGGETEGRQWCGGGERNGEKEEGERATRQREEELCLHPLEASVRXWRGQVXDDGDDGGXVWSGTATRAAGXGQAWQMLTAAATRRSATTASARGKQRRAAI

SEQ ID NO: 128179 - protein, 497 aa, Oryza sativa
  unsure (1)..(497): unsure at all Xaa locations
  Clone ID: PAT_MRT4530_30558C.1.pep
PGTYLWKKLGLSDLANSSESTKGKRKPRLGPNITGATWELGRNPKTHRSRLAPGRTLRQRGPHHLLQQXGGDYLYRARVITQPGVSHFTHVVALVLCSDEIPRKRSLSARAGNRTPASRLAVDRAREXGPEGAADQGRLDPVAAEVAPTWCLHGSHAGRREEDEGAGREXTAGGGGFSGMPCDDEGRRGVHRNDEGEREGASQRLGFAGGSSSAADCGGGNRRREKGETATRSRGADSRRXEHLHGYGNAFLAPDXEETRRGRPATRGGYRTRAATAASPRPRKPEGDDVPEVPFTRPLHAPALPMLGDERRKRDRGAGXXXXXXXXXXXXXXXXXXXXXXXXXXXXXXXXXXSLMERASARQAXSKRRRGGDAGGREKGKGGEKGGLARCHFGKRRRERGRRGRGRRSSASIPWKLACGVAGREIGREREREREREKDGPXRGNRPIEPEGGKIDFCGGIXLGRNWIRDLNSTMDRGFEIRNGTETDCKRRNNFRN

SEQ ID NO: 128180 - protein, 314 aa, Oryza sativa
  Clone ID: PAT_MRT4530_30559C.1.pep
MVRLKMTPRDDSYILEYWNKKLVALRRFLKGWWINVQRDARIKKWRKLCCAEEEGKLEQFAEKMKELTSNLKPRRTGVGNGSLTGNSTAVRPAADLRQSVRRFYFGQTAIHRIWGFASTDPECTITEAQLGGYKGTWYNNYNGRVKCNKLGGGRRERLAGSADPVVPRWLRRGAYVAATRAGWRTTKVPTVNGWRAAAVSPGRRATTRGDGVYTGMTRENEREQANGLDSPEGVRRRRIAAAATGGEKRGKRRRGHEGPIPGDESIYAATGTHPLRRIRRKRIEGGRQRETLPSSGGDGGEHTASDGSSRGSAS

SEQ ID NO: 128181 - protein, 288 aa, Oryza sativa
  unsure (1)..(288): unsure at all Xaa locations
  Clone ID: PAT_MRT4530_3055C.1.pep
VTSPTAAAARRSGRLGRRTLASERRREDANGGHQHVEDDAANTPVTKTAAEEQRTTTATRRKRRKPTGCRRRRSSDDLQRLRRGGRGRRRLGDDDGGLPERRRRLKRRRRTAGAAAVTAKLGHTALGLFRRREAKAKGATSRGDTGGPFKGARRRRRRPTATATAKESSAWRXETDPKRTRFHELPKRFSRRFQRRKGRGDPGDCFPSTNSTGEGKERPDXWKGNGGGGAXGLRATAAGGGRRXLTGGTHLSATXARTSGRLRTGPXWAEEREGXFGPTFGPKPKETF

SEQ ID NO: 128182 - protein, 84 aa, Oryza sativa
  Clone ID: PAT_MRT4530_30560C.1.pep
LNLVLCTVATRRRSQQRRHQLVGGTRRRRRRVAPPAGVAAVQLVVDDGDEEEASQSDLPAACLVPVLHYGLVHQWYQPFHFLIN

SEQ ID NO: 128183 - protein, 494 aa, Oryza sativa
  unsure (1)..(494): unsure at all Xaa locations
  Clone ID: PAT_MRT4530_30561C.1.pep
YRVGVQSCWAADRSRAHNCITKEKRKPKLGPNITGATWELGXNPKTHRSRLAPGRTPRQRDPLHLLQQLGGNYLYRARLFTQPGASHSTHVVALVLCSDEILRKRSLSAGAGNRTPASRPAVDRAHGEGGTEGAADRGRLDPVAAEVAPTWRLRGSHAGRREEDEGAGREWTVGGGGFSGTPCDDKGRWGVHRNDEGEREGASQRLGFAGGSSTAADCGGGNRWRGKGETATRSRGADSRWXEHLRGYGNPSLAPDXAELRPARPATRGAXRARAAMAASTQRAEEEGEXPGVPTRVLARTGSSGTRDGGGRRERQRDGNGAGXKTGKIGREKGREGTWVYRAAMSVWKPTLGGQGASWRSALAAKTATGRRGMTPAGEKREKGGEKGGLPXCLFEKRGRERGRXRRSPASFPWKHARGEAGLTGEREREMGREXRDGPRGIRPIEPKGGKIDFCGGIXLGRIIEIMVWIWIRDLNLTIDRGFEIWNGTETDCK

SEQ ID NO: 128184 - protein, 80 aa, Oryza sativa
  Clone ID: PAT_MRT4530_30562C.1.pep
HSNHTYEPLERSTFSFFFLFWTFQILFFNVNNFCFHCIFLGFSFFFFFFSPRIIHSFLAFLRDFYPPPLLLTPNTSPPQN

SEQ ID NO: 128185 - protein, 120 aa, Oryza sativa
  Clone ID: PAT_MRT4530_30563C.1.pep
MARTTPAVTEARENPGEAPALLLYGYKVIAAGVRLHLHCCCAARRSQGRSRKEMRLVRGARARQRGPSASPDGNQWPPPSLALLPHGGDVRLRLHCCCGGEIGGRQGRGAERGGGVAPMR

SEQ ID NO: 128186 - protein, 498 aa, Oryza sativa
  unsure (1)..(498): unsure at all Xaa locations
  Clone ID: PAT_MRT4530_30564C.1.pep
TYAVLDAKLSLKNSYNTTALQKGKRKPRLESNITGATWELGQNPKTHRSRLAPGRTPRQRGPHHLLRQXGDYLYRARVITQPGVSHFTHVAALVLCLDEIPRKRSLSARAGNRTPASRLTVDHAHGEGGTEGVADWVSRSGRAEVAPTWRLRGCHAGRLEEDEGAGREWTAGDGGFSGTPCDDEGRRGVHRNDEGEXEGASQRLGFAGGSSTAADCGGGNRRREKGETATRSXGLIPGGXEHLRSXGKAFLAPDXEETRRGRSATRGCYRTRAATPARPRAGEEEEDXAPGVPFRVLARTGSSGTRDDGGRXRETEGTAMARWSEGEWGRERKGGRLGLIXGNVGLGTDLGRSRSEXSSAVAAKTATEGMTPAEEEKREKGRKKGGLPXCRFGKRRRERGGXRGRGRRSSASVPWKLARGERGREGEGERGXREREGERDGPRGNRPTEPEGGKMDFCGGIELGRKIEIRXLDLAMDRGFEIRNGTETNCKRRNNFRN

SEQ ID NO: 128187 - protein, 202 aa, Oryza sativa
  Clone ID: PAT_MRT4530_30565C.1.pep
MAVTGQRGERCGGSWVVELGGIGQPTAPEEGEIEDDDDGGRRERPTGVGSTRSRPRWHRRGAFVVATWAGERKTKASAANGRRAAAVSPGRRATTRGDGVYTGMTRENERERANGLDSPEGVRRRRIAAAATGGEKRGKRRRGHEGLISGGESIYAATGIHPLRRIRRKHTEGDRRRDTLPSSGGDGGEHAASDGSSRGGAS

SEQ ID NO: 128188 - protein, 528 aa, Oryza sativa
  Clone ID: PAT_MRT4530_30566C.1.pep
MQPPEARASRASELRDSRYPSPPRHERGDERGGRREGRRARRPARKATSAATGASDERGKKKRKERGRGIRLLSGGEDAAREKGVARPNLTGRPAREGGPRRARGWGGERGSRWTGSISRGPEWDPLVGGLAHRFGERDAVHARGSRRTRCAAGPRAASRLAVDRAREQGRRERLTGSADPVVPRWHRRGAFVAATRAGERKMKVPAANGRRAAAVSPGRRATARGDGVYTGMTRENERERANGLDSPEGVRRRRIAVVATGGEKRGKRRRGHEGLIPGGESIYAATGIHPLRWIKRKRTEGGRRREALPSSGGDGGEHTASDGSSRGGAREEAERGGRTGRCTTVRAGAVTMPDGAGRDHSGLGPGKRKKRERPESPSRVLRTLQLSRCLAMNGGGETEGRQWRGGEERKREKKEGERATRQREEALCLRPLEASARWRRGRVDDDGDDGGPVWSGAATRAADAGQARQVLTAAATGRSATTACARGKQRTARRFGRRRREAAAKAEGARLGAAHAHARAAHGQSGG

SEQ ID NO: 128189 - protein, 96 aa, Oryza sativa
  unsure (1)..(96): unsure at all Xaa locations
  Clone ID: PAT_MRT4530_30567C.1.pep
XEFXGXVNRXYXPNNTXRPAKEIXXXAXLTAPGRGHDXRXGRGSWRPPAXSAXSXEVFRRNPXFKTEEEEYCDGXEGXGXAXDPPAXXXXQCRXGL

SEQ ID NO: 128190 - protein, 507 aa, Oryza sativa
  unsure (1)..(507): unsure at all Xaa locations
  Clone ID: PAT_MRT4530_30568C.1.pep
GHPGLADPISRRRFSKRRTQSPTAISQSKKEKKRKERGTGIRFXAGGLSAAREGLARPGLAIGPAGLRDGPRGSRGGEERGSGWAGFTLHGPGWDPLVGGSAHRFGEXGAVHARGLRRTRCXAGPRAASRLAVDRAREQGRRERPTEVGSTRSRLRWHRRGAYVAATRAGWRKTKAPAANGRRAAAVSPGRRATTRGDGVYTGMTRENERERANGLDSPEGARRQRIAAAATGGEGRGKRRRRDGRSIRASXSIYATPGIRPLRRIRRKRTEGGXGDGGGHAASDGSSRGGAREEMDRGGRTGRCTTETRRGAVTRGRRHGSDLSGLGPGKRRKXERPESPXRVLRTLRLSRCLAMNGGGETEGRQWRGGGERNGRRNDGRAPXEGDEEEPCLLSLEARAGXRRGRVDDDGDDGRAVWSGAATRTAGXGQARQRVTAATTRRSATTARVRGKQWAARLGQRERRGRARLGAAHAHARAARGQSGERERGRDGEGGRDGPRGVRPIEP

SEQ ID NO: 128191 - protein, 36 aa, Oryza sativa
  Clone ID: PAT_MRT4530_30569C.1.pep
HFEIFEHIRGFNVTIVTSANTKDETLLLWSGFLVTK

SEQ ID NO: 128192 - protein, 101 aa, Oryza sativa
  Clone ID: PAT_MRT4530_3056C.1.pep
MDPLGIESCMVKLGYSAGKEKSLLHSIKFLRKRVVAHQDTTYLNYKGDKNDVGECKRLVELLVHKSKADYMIELVSHIRQLGWVMESPILRSKVFKAASIS

SEQ ID NO: 128193 - protein, 75 aa, Oryza sativa
  Clone ID: PAT_MRT4530_30570C.1.pep
NSKLSHQTRNFVYRQGPIWWQSEDFSSNIYRGSPCLVHGLATPSQLRPRQATCCIDGTCPWVFQTIGYRARILSL

SEQ ID NO: 128194 - protein, 145 aa, Oryza sativa
  Clone ID: PAT_MRT4530_30571C.1.pep
FTNFGGYPKGGGPKGSKRKTLKKKKEPFKKPGGGFLKIPNPPGGKNFPPPLFPPRRGKILRTPPQIFVGGVFFWPPPEKGGGGAPPPPIFLWCGRAPPPFFFPPPPPAGGVVGGGVPLPPPAGGAPPPPRGAPLFFFFFFPEGGG

SEQ ID NO: 128195 - protein, 94 aa, Oryza sativa
  Clone ID: PAT_MRT4530_30572C.1.pep
KDLSRDTRSQAARGKPDICLQDANGAEEEALRRVVEAERAATQAGETAVRLRSRAQRLMAKAELVAYKSVMALRIAEAARISDSSRDLVLTTLD

SEQ ID NO: 128196 - protein, 109 aa, Oryza sativa
  unsure (1)..(109): unsure at all Xaa locations
  Clone ID: PAT_MRT4530_30573C.1.pep
HSLLPALCSLLETTSHILIDCVFVRQVWHHVLSSLGWPDLAPSRGCTLXVWWPTSRNCLLKHLRKGFDFLVLLVSWQLWKEQNSRVFNSSISSVNILAVLEYALQEDRL

SEQ ID NO: 128197 - protein, 142 aa, Oryza sativa
  Clone ID: PAT_MRT4530_30574C.1.pep
MRIGRRPGRPQGVRVGRFINAAGTTGFPTGKRANTQACIINGSKLDDLVEDKLLPAQEIIGWRLAITELFPTPNTSEIIGLEPFFHHGFALATSDFYGIELIHVNLTLFSRLLSSSTFVKLSWDPPHFALFRHLFNLKPQPS

SEQ ID NO: 128198 - protein, 109 aa, Oryza sativa
  unsure (1)..(109): unsure at all Xaa locations
  Clone ID: PAT_MRT4530_30575C.1.pep
SSPQEFLEFLTKFQTASRXFSKRQMTWFRNEKIYQWVDASQPFDAIAQFICDAYHDRAARLVPDSLEMKRESCRHESRDLKTYRSENRVFRGDDDCCHVLDWITRTQRK

SEQ ID NO: 128199 - protein, 77 aa, Oryza sativa
  Clone ID: PAT_MRT4530_30576C.1.pep
MWRRQFVSLRPAKGGPVHRLSTSLHRLSSPVVAAPSGEDSLPFPFLPRFPVRRRHPHLPSPSVVAAAGEPSAAAALA

SEQ ID NO: 128200 - protein, 109 aa, Oryza sativa
  unsure (1)..(109): unsure at all Xaa locations
  Clone ID: PAT_MRT4530_30577C.1.pep
GRETPRAHGQLQHIVSLIRSKLGHARVGRHRRSPLPRRSRPPPLLLPAXPAPPERDGAGSRRGGCRPSSPPPWPLPAPPERAATGSRRGRAPAVEPAAAALLTPLPLSV

SEQ ID NO: 128201 - protein, 115 aa, Oryza sativa
  Clone ID: PAT_MRT4530_30578C.1.pep
HEARRRPERRTRDLRTNPARPPPLPGRFRPASSPASPPPLRSPYRELQAEHGRGRGGAPSSHCRPARSSRSPLLAPSAARKTSPPPPLSATTPQPPSAPTPRCPCRRSFVHAPPP

SEQ ID NO: 128202 - protein, 216 aa, Oryza sativa
  unsure (1)..(216): unsure at all Xaa locations
  Clone ID: PAT_MRT4530_30579C.1.pep
EGRQLEGSDHPCRIQRIRSSPPPHLCIPQPHAHRSPPHPATRAPSHLPPXPPXPHRCPNCRARDLRSNPARPPPLPGCCRPAPSPASPPPXPIPISRVASRAWERRGGAPSSRCRPAHSSRSPLLAPPSATPPPPRPGRRXPPPPPSATTPQPPSAPTPRCARRRSFVHALPPPLSLPPPPSASTPRYPCWRPAAPHRVNTGIRFLAIVSTQIWEL

SEQ ID NO: 128203 - protein, 1166 aa, Oryza sativa
  Clone ID: PAT_MRT4530_3057C.1.pep
MAAAHGEVPVEADPRALLFSPPPSPSPLVAGVVLAPCALASLSPPPLQPCAAVVPAVAVTREGRRRHRQVAAVLVRPFAAVGDRRSIVAVVKPKVAAASSSSPSPSVGRPPSPWSSVSSPCRPLPVGVLRLRPSAAVRRRVSAARAVFFAEPPPPSVTSSLASSSPSPMPCYKPEYLFGVEGFVQELRTMSFVIGFGTAPFYAQIRHDRHEEKCRVKVTMNSNSEDIPSAMFEAGGRNYIHACQEVARIAIGELRDSYSDQLADTEYRYHPRQPQGSDRGSYLETEGIENDATTRHLVEMLWAMDESRAETVLAAQDREDRNRGKICKLEDKVDRLEKELAALKGEAPPQKARIRLTARKRALFVPRYQLAPKIRVVEKEVAPANPPVIIISSDEEEEPKRNNSKFEWEKVSFASHQLHGPASEWWDHFRLNRTTAEPITWLEFTAAFRKTHIPSGVVSLKKKEFRSLTQGSRSVTEYLHEFNRLARYAPEDVRNDEERQEKFLGGLNDELSYPLMVGDYPDFQKLVDKAIRQEDKYNRMEQKKRRIAQFKTQQGNNQKPRLTLGPQSMPQGGSSSVVRPQRQFFNNNAGNNIRNQAPRPVAAPAQQQPAKREQGNKPVVCFNCGDPGHYADKCPKPRRVKVVPAQNNSAVPASKARVNHVATAEAQDAPDVILVREYPDVFPDDLPANELAEVKRQVDDLLQKGYIRPSSSPWGAPVIFVEKKDHTQRMCVDYRALNDVTIKNKYPLPRIDDLFDQLKGATVFSKIDLRSGYHQLRIKEEDIPKTAFTTRYGLFECTVMSFGLTNAPAFFMNLMNKVFMEYLDKFVVVFIDDILIYSRTKEEHEEHLRLALEKLREHQLYAKFSKCEFWLSEVKFLGHVISAGGVAVDPSNVESVTNWKQPKTVSEIRSFLGLAGYYRRFIENFSKIAKPMTRLLQKDVKYKWSEESLEAKPTLIDQVREAQINDPDIQEIKKNMRRGKAIGFLEDEHGTDPRALLFSPPPSPSLLVAGVVLAPCALASLSPPPLQPCAVAVTREGRRRHRQVAAVLVRPFAAVGDRRSIVAVVKPKVAAASSSSPSPSVGRPPSPWSSVSSPCRPLPVGVLRLRPSAAVRRRVSAARAVFFAEPPPPSVTSSLASSSPSPVSRRGLVRSRPSDLDRINLGRPFA

SEQ ID NO: 128204 - protein, 73 aa, Oryza sativa
  Clone ID: PAT_MRT4530_30580C.1.pep
LRSLPKFHNSCAPGSSAGIVKGSHHLCVSPPPEKFGNFVDPIGGSPALVWVRSVPPLIPPFCVLLVSGPYVCL

SEQ ID NO: 128205 - protein, 218 aa, Oryza sativa
  unsure (1)..(218): unsure at all Xaa locations
  Clone ID: PAT_MRT4530_30581C.1.pep
MGKYMRKGKVSGEVAVMEVGGALLGVRTRSRTLALQRTTSSQKPPEKGEGDPGAGAGAGAEYLELRSRRLEKPPPHTPPAKEKETARRASAAAAAAVRMPAAPQAAEEFEAEVEVSFGXTFLTSTAXAMERSTRETTPCSLIRSSEMISTPGSTTKTNTSISSRRRMETSVCRYVPSSLEXEEFFAAAEQQQHQAFRERYNFCPVNDCPLPGRYEWTG

SEQ ID NO: 128206 - protein, 57 aa, Oryza sativa
  unsure (1)..(57): unsure at all Xaa locations
  Clone ID: PAT_MRT4530_30582C.1.pep
ALSLIGNDDYPNTGXMRAQVIPYRLYRPSAPSTLINXTLYFQLIWYPADTQSDSKFN

SEQ ID NO: 128207 - protein, 215 aa, Oryza sativa
  unsure (1)..(215): unsure at all Xaa locations
  Clone ID: PAT_MRT4530_30583C.1.pep
EQQDQGGXXPRTIRQQKRTNKMHIQKKKLDXXSTNXTSWKLXXXVRKGAEIXTGKLXGESHXNDXXTXXGLPCGTCKXRLTKTXXILFSDRSSXRVWHKNVENLACWTPVDFWVVRLSXXDLKPNFSNHGXVRLFETLEEAXELQTPKWAHPERWDTYXRQKNERREERETPVSQLTPCKQVKRATNQFDTNETWXFLEGERPQQTFVEKKRDYA

SEQ ID NO: 128208 - protein, 587 aa, Oryza sativa
  Clone ID: PAT_MRT4530_30584C.1.pep
MWRLRSRTAAAAAVIAASAASLADVAYADSGYSFFRRSSPPPPPPAAAAAAAASEDSGTEVAVELFELMRMQEKTRLAELEAEKVQYIIQQHLRDIERQQKEGEKFRESLQQQAQAEAQKLRYDDELARKRMQTEREAQRRQDAELVKMQEAAALRKEEVRRTTEKKILEKMLEDEKEKALLKKQNIQANAEAKGEALTREAKALEDYNRKMLLERINGDKEKWIAAINTTFSHIEGGFRMLLTDRSKLLMGVGGVTALAAGIYTTREGAKVTWGYINRILGQPSLIRESSMPKFPLSRFKALKSTSASLSGGAGFENVILHPSLKRRIEHLARATANTKSHDAPFRNMLFYGPPGTGKTLVAREMARKSGLDYAMMTGGDVAPLGSEAVTKIHQIFDWAKKSRKGMLLFIDEADAFLCERNSTHMSEAQRSALNALLFRTGDQSRDIVLVLATNRPSDLDAAITDRIDEVIEFPLPGEEERFQLLRLYLNHYMLKEDGKNSFWDSLLKKQRQKIQVKDISDDLLREAARKINGFSGREIAKLMASVQAAVYGRPDCVLDPQLLMEVVEYKVAEHHQRIKLASETST

SEQ ID NO: 128209 - protein, 152 aa, Oryza sativa
  unsure (1)..(152): unsure at all Xaa locations
  Clone ID: PAT_MRT4530_30585C.1.pep
XKTXXXDXKNXXKKXXXNNXGPSXKXXNQXXXXQKXXFXQNQTPXXXXKTXXGXXXGXXLXXXXARGPGKNPXXXYXXSPXSXRPXRQIRXQPXXFLXXXGKSPXAXKPXPXXPPNYXGKGPWDXXVKLIQXGKPXXWGLDLXGLPXXXXKX

SEQ ID NO: 128210 - protein, 90 aa, Oryza sativa
  Clone ID: PAT_MRT4530_30586C.1.pep
HPQFIQPHIYISIHSLITQLITTRSRGRHFTTSFITMGQLMADISILETCPLMQTCHHNSQWWAPSPTGISGGSPAQVTPHGKDQNPPCG

SEQ ID NO: 128211 - protein, 55 aa, Oryza sativa
  Clone ID: PAT_MRT4530_30587C.1.pep
HITKVPLAKISHSIQHNTSIIHCTVWHTSVHFHHGAFHINGPTSCVWDCLHKHHP

SEQ ID NO: 128212 - protein, 92 aa, Oryza sativa
  Clone ID: PAT_MRT4530_30588C.1.pep
RGGFIVCRSTLYATRLYCSTTCACISEYVQSSTVQQARRRPFWLLGRKASCADDSDSYLTHASIFVLCLIPLFQQQQNYHAQIGILFHRFVW

SEQ ID NO: 128213 - protein, 226 aa, Oryza sativa
  Clone ID: PAT_MRT4530_30589C.1.pep
MVVVSVARLPPILVSPIRFRTTATRRRLLPSSALRLTRPLSSSCSASPLAVVASMETPPENYRTNVGICLADPSLTKIFTASRIDIANTWQMPQGGIDAGEDPREAAFRELREETGVTSAEMVAEVPVWLTYDFPVDVKEKLNARWGGTNWKGQAQKWFLFRFTGKEDEVNLNGDGSERPEFCEWTWMTPQQVIEKAVEFKKPVYEAALKHFAPYLQSDPATTTSS

SEQ ID NO: 128214 - protein, 169 aa, Oryza sativa
  unsure (1)..(169): unsure at all Xaa locations
  Clone ID: PAT_MRT4530_3058C.1.pep
HASEQIGGSEHELAAKVDKYACSMISGSGSTLFEEMRLYYIVTFDGYNIYDLMTMISEAKSTKTTCTVLIHVKTKKGRGYSYSERVRDKHHRGDKLDTTTVKQDELLDKTLVHTYYYGEALIDYAYHDNRLMKMHADLWRATAMSYILXRCAMLGFDVFIIEQDCNTFG

SEQ ID NO: 128215 - protein, 71 aa, Oryza sativa
  Clone ID: PAT_MRT4530_30590C.1.pep
MGLALTLPTLAPTFLGIRFSIENYLVPQVAELNKAMRICTKLYAYSSPLVMRFDRLENAWPVTTCRTVSFR

SEQ ID NO: 128216 - protein, 42 aa, Oryza sativa
  Clone ID: PAT_MRT4530_30591C.1.pep
FCGGWSFRTGQNGRSYCGDRGHPNNATNRPSVLDPMVQVEIA

SEQ ID NO: 128217 - protein, 66 aa, Oryza sativa
  Clone ID: PAT_MRT4530_30592C.1.pep
RLNLIVCQHINIMLYAITHLDFSATKSSQSQVQPKLTAQHPMACNRSQCSHNSHSRPSSGTHVIIS

SEQ ID NO: 128218 - protein, 175 aa, Oryza sativa
  Clone ID: PAT_MRT4530_30593C.1.pep
MAEGVEEEGVAAATTHAGKEEGEDAARWGRRIDPFGAADRRERDRVNSVCRHALNAAASSSQRRPPSTVHHRSSRLAIVFANAQGPGYPKESSHIGSQEENAIFFPDSGRRRHFSLSHSLIKAGERRRRRPLPKPLSIAKTSPSQSSRSECMRIAMVLGWVIMVAQECYEITMEY

SEQ ID NO: 128219 - protein, 332 aa, Oryza sativa
  Clone ID: PAT_MRT4530_30594C.1.pep
MEAVEDKAMVGVGGAVAAGYSSSSWGLGTRACDSCGGEAARLYCRADGAFLCARCDARAHGAGSRHARVWLCEVCEHAPAAVTCRADAAALCAACDADIHSANPLARRHERLPVAPFFGPLADAPQPFPFSQAAADAAAAREEDADDDRSNEAEAASWLLPEPDDNSHEDSAAAADAFFADTGAYLGVDLDFARSMDGIKAIGVPVAPPELDLTAGSLFYPEHSMAHSLSSSEVAIVPDALSAGSAAPPMVVVVASKGKEREARLMRYREKRKNRRFDKTIRYASRKAYAETRPRIKGRFAKRTADADDDDEAPCSPAFSALAASDGVVPSF

SEQ ID NO: 128220 - protein, 90 aa, Oryza sativa
  Clone ID: PAT_MRT4530_30595C.1.pep
CPHLAPSPCIAPRAVDVASLEGVPFCCQQWSLSMVYSLCPLCSFFFLILRVLLRLTQIPCPPLQHPPGGAMDGSSSRYPPLFTFCSKIIP

SEQ ID NO: 128221 - protein, 139 aa, Oryza sativa
  unsure (1)..(139): unsure at all Xaa locations
  Clone ID: PAT_MRT4530_30596C.1.pep
GGEDGAAPSRFLFLVVGGRMRRGGWCRSREPPPPRRWWQRRSRLPPPPPRRRRQPPRHLRLQPRWAPPRRRAAXGAAPSRSFLLLVVGGGGRHRDAXNAAAPASRASAASSSATASSAAAAASRSPPACALRERSREEG

SEQ ID NO: 128222 - protein, 321 aa, Oryza sativa
  Clone ID: PAT_MRT4530_30597C.1.pep
MGENKWMGKRWEDMDTDVLVKIFKELNLVELSPVSQVCRLWHLACSDPLIWSTLDFGLLKSNYIQTRASPYIWVDDRSDKRLSRILRVAMSISYGNVSCLIFHYNLYMKDEHLHYSLDRSPHLKRLVMPAWNRITKFGICQAIQRWEELESLTMPTIGHPPYIMEEIARSCKNFAELKVMGSFDDLFASAIATHLPKLKVLSLRCSKVTMSALLWLLDNMANLEVLNISHCLLFEIVANGRRQVIHELDDQTLEKASRLREFHHCQSRSCLACQRMMADEGIMRWYRYEDWFWRRDEVSSLDLQDYGKLFDAECEALTAVE

SEQ ID NO: 128223 - protein, 160 aa, Oryza sativa
  unsure (1)..(160): unsure at all Xaa locations
  Clone ID: PAT_MRT4530_30598C.1.pep
MAAPDVXYRCFXXGLXWATDXRSLEXAFSTYXXILXSXIIXXXXTGKSPXFRFXXFSNEQXMXHXIQGINGKELHGXTXPXXRPIXPSRSRSRXGYXXXRXSXSYRXRXXRCCXRXXXYGNPLKALRXAXATXAXCXAXRXXYATPLPRKKNPLGPPWPI

SEQ ID NO: 128224 - protein, 134 aa, Oryza sativa
  Clone ID: PAT_MRT4530_30599C.1.pep
MQKCEENKQSGSSVALVFYGTTTIHHQRHLPSSQVPSSRNNGNHGSAASPSNPWPSGDGEKWLRRQKATDDDCDLLQAQPEARTSRQENKRKVREKLEKLREKALGPDDKNGAIRKKESLANLLIPPKLVEATI

SEQ ID NO: 128225 - protein, 371 aa, Oryza sativa
  unsure (1)..(371): unsure at all Xaa locations
  Clone ID: PAT_MRT4530_3059C.1.pep
SRVNKPGERXARTGSTGVGPTRHPHGPRWTGRTRLTPAGAVGPTRXPHPRARAADGRXPPGSRGARPKAASPARPTGGGAPAPRWSPPATNGAAEWRPREGREEGSEXGVLGSPRDDEDGGNDDRSGGRRRRGSDRRGRWCSDGRRXKRRGRRRXRGRGEAEGGDAETGGGPGRRRRRTGARRRRRRERTTARARIRRGESAASGGNGGAKHGERLYSVGRERGRPEGKESAAEISAAIDXAGELCGTXIRTNPRERERGKWGERGRESRGVISPSLWRAGTAGCGGFGGGGGARARAXRRARREVGDDRWAPPVSEGGGRARLSAARARGGGRWAAGRXREREGIGPSRPKRXRGGGKKTFRDFLFIKPF

SEQ ID NO: 128226 - protein, 54 aa, Oryza sativa
  Clone ID: PAT_MRT4530_305C.1.pep
HISDQKPINNDVKFKSSHCLNHTVTPHCIRIFFLRKSRGTAALQEQLTIFRDHN

SEQ ID NO: 128227 - protein, 170 aa, Oryza sativa
  unsure (1)..(170): unsure at all Xaa locations
  Clone ID: PAT_MRT4530_30600C.1.pep
MQKCEETKQSGSRPGLVFYGTTTIHHQRHLPSSQVPSSRNNGNHGSAASPSNPWPSGDGEKWLRRQKATDDDCDLLQAQPGXTVHESRLTSSLSRRDALSYMSSAFIATLLVAGPAEARTSRQENKRKVREKLEKLREKALGPDDKNGAIRKKESLANLLIPPKLVEATI

SEQ ID NO: 128228 - protein, 360 aa, Oryza sativa
  unsure (1)..(360): unsure at all Xaa locations
  Clone ID: PAT_MRT4530_30601C.1.pep
PSPIHFSHSTSLSSANYKARTRPGGAPNRPSPRTHLAKNPPKSSRSIANGGFLRSFCSVPARVRASLPDVRRVEEAHRAGAGPAHHNDVPQGRAPLRPHRRQPHLVRQLLRAAARGDHRLRLVAVHPAVAAAAAGAVRRQLVQDGAEVLRQLXARFPALSLGQHXCSTSRTPSASGSGRXDLVRLAARGSPSRAINVVLTADDVAVDGFCMSRCGTHGASPRSRAGRFAYVWVGNPATQCPGQCAWPYHQPVYGPQAAPLTPPNGDVGVDGMVISLASMIVGTVTNPFGNGFFQGDADAPLEAATACAGVYGKGAYPGYAGSLLVDPASGASYNANGAHGRKYLVPALVDPDTSACSTVG

SEQ ID NO: 128229 - protein, 62 aa, Oryza sativa
  Clone ID: PAT_MRT4530_30602C.1.pep
MAATLRLRLLAAAAAAAVMASSMVGIASVAEAPAPALAFGATARPDFARAFLCVARLDCLWW

SEQ ID NO: 128230 - protein, 37 aa, Oryza sativa
  Clone ID: PAT_MRT4530_30603C.1.pep
LRLKKTNHLEYYTAALFRNINRQSFCSESRCLLITSI

SEQ ID NO: 128231 - protein, 176 aa, Oryza sativa
  Clone ID: PAT_MRT4530_30604C.1.pep
MAKQKIVVKMPMDTERKKRKAFKAAVGMTGVTSASLDGDKLIVIGDGVDPIALTTILRRSLGHAELLSVSSGDDKKMGGGGGHGGMGMGFGGGHGGMGFGGGHGGKEGKEGGGKVVVDGVHHHHQQQLQQQHAMAPPMQPYPAAPAYYNAAAPSYPVYPSYAGYPQQEQDPGCSIM

SEQ ID NO: 128232 - protein, 449 aa, Oryza sativa
  Clone ID: PAT_MRT4530_30605C.1.pep
RPSHQSDEFERSTRNQMLERGTEILKGNAYISKIRSFLLKMGLESSDLETVCVKDRLLTNECIDKIVGFALSHQLKHSTIPDPSSDVRFTLSSESLKHGVVRLESVESNPKSSNIRKSLKDIATENEFEKRLLADVIPPDEIGVTFEDIGALESVKETLKELVMLPLQRPELFSRGQLMKPCKGILLFGPPGTGKTMLAKAVATEAGANFINISMSSISSKWFGEGEKFVKAVFSLASKIAPSVIFVDEVDGMLGRRENPGEHEAMRKMKNEFMVNWDGLRTKDKERVLVLAATNRPFDLDEAVVRRLPRRLMVNLPDASNRRKILSVILAKEDLADDVDLEAVASLTEGYSGSDLKNLCITAAHLPIKDILEKEKKEKALAEAENRPLPQSFSSNDVRALRLSDFKHAHEQVCASVSSDSTNMNELIQWNDLYGEGGSRKKTTLSYFM

SEQ ID NO: 128233 - protein, 153 aa, Oryza sativa
  Clone ID: PAT_MRT4530_30606C.1.pep
MERQRKRISCEILRWLVGGDTRQLFGWLFREVAWPQARTGTAVCGGDDAKRGGEPAGARRHARRQPRWPQRPGYAHRRRRGVLLLGNAVAVRLVKHLGAKVVVSVDRGCDRSDLTFAARRGRRRRETRERQTAAHGPGSGQRRETVSQGSPSP

SEQ ID NO: 128234 - protein, 275 aa, Oryza sativa
  unsure (1)..(275): unsure at all Xaa locations
  Clone ID: PAT_MRT4530_30607C.1.pep
EREPVDRAHLAWSRVGPACWXHGSSRGGSTRRALGFGGGTRCTRAARGGCGCGGPTRSLTDHGGPRARAGRRGAADQGXLDLVAAEVAPTWRLHGCHASRQEVEEGVGRNGRRTAAANGGENHGDTGESEHTGRXHGTRGDEPMARIRRGMLDGSGLLRRHPVARKGERVTGVRFLRTSGSTRPPESVPCAGLGEKAPREAGDERRYRARAATAASTXRAAARLRATPASYGGSTMAREPNGGSRGRAERGKGETEGRKEGRAMPIWEAARLGHA

SEQ ID NO: 128235 - protein, 1391 aa, Oryza sativa
  Clone ID: PAT_MRT4530_30608C.1.pep
MFPPKGSNPYGQQQSYGGQQSYGQIPGSSGFSSSAATGGADGSRFGARVGQGAAGQYGGPYASVYGTQQVGGLGGKGPASSSIPNLPEPSKFSSGSVGSSIARPNDDYMAVRGYGQKLDQYGSDYTLERRMYGDHSANLGRRDGLTDLDRRYPEHVSGGHQGSSMRHPQLLKPQLQSGSDIRQADYFAGRSAPIHQGSQDIGAYGRVEADHRNLSILGTAPYGGQQSASLLGGAPRTNIDSLSYGQGSSSSGYGMGLPPGRDYASGKGLLHPSSDSDYRDSILSRVHPGISMVDERAVDRVGYRRELDLRDEERRRDLLLEREKERDRERERELRDLRDRERERERERDRERLRERERERELERERERLRERRMKERERDRKHPADSRREHTPPRTPGDRRRSSSVRAEKPLRRPSPRRDAVHRHRSPVKEIKREYICKVLPFRLVDNERDYLSLTKRYPRLSIAPDFSKIVFNWTKESLNLSLHTPVSLEHGIHEVDDSTDEGSVITSGKTSSTKISEIIWNAKVLLMSGMSNSAFADITSLRSTDERVVHLNNILKFAVFKRDRSLFAIGGPWNAAIDGGDPVVDPSCLIQTAIRNAIRSSVPIIKSTNFTLDNWLSITAGVTVTNANILLQIHYNRVGKDGLFSHKEITVVFVPNLSECLPSVDLWKKNWTAYRKSRTEKEQLIMKKEKSPTDASKQKQGELGQGKSTDVDQKEDAGHNAAENMKVDNDMDLLGKDGKEKPAEHDGQNLGKVEEKNIDKVEEHIEKKGGGVEGNTSGEASVDHATEDKKPTKKKVIKKVVKVVRKKPTGETSAGKSSQEDKNIVPETASVAVEEQVQQKSEDAGKEAEGKKPGKKKVIRRIIKKKPSGSARDSTAPAETSKQAVEVQPEKNNEVLSGAVISEAKLEEASKAPAEDVSKQNKEQEQEEKGQSLPVDQKSNGDKIKQQEVLKQKDIKQDGKNDKAKDDKEKKSRDQKTDSKQKSLTDTKEKKKSDEPPKHPGFILQAKRSKDSKVRSTSLSLDGLLDYTANDLEESVFELSLFAESFSEMLQHKMGCVILSFLEKLYKRYVIKRNQRKRQREEDLKKEDKKTSEKRPKTNDETLSESGPSNQGESVEMIKAGKGTAHSAGQPNKDDETKMNAGHSAAAQDELVKEGKEKMSADHSTAPPKELIKEGEENMNTDNSAAVHVEPVADEKMEDEEPDYEEDPEEVELYEDDEEMDEAAAEELVEQNEDNLNDKAKQEVTTEEDGNKNTEERESENNANMLEKAASGEDKQSVVEKSASVEGKQSVSEKGDKAVGKEVKTTRSQKGDSTKDEVVDKELLQAFRYFDQNRAGYLKVDDLRCILHNLGKFLSNRDVKDLVQIALVESNSARDNRIIYTKLAKKVDL

SEQ ID NO: 128236 - protein, 459 aa, Oryza sativa
  Clone ID: PAT_MRT4530_30609C.1.pep
MGIGNGSPSDSRHVSHKEIRDETTPLLPIKEEEEGIHEFNGASFSGAVFNLSTTIVGAGIMALPASIKMLGIIPGILMIILVALLTEASIDMLVRCSHEGKITSYGWLMGETFGQWGRIALQASVVINNIGMMIVYMIIIGDVLSGTSSTGVHHRGILEGWFGAHLWNSRAIVLLATTLFVFAPLVSFKRLDSLRYTSALSVALAVVFVVITAGIAIIKLFNGTVAMPKLFPELDGLSSIWKLFTAVPVLVTAYICHYNVHSIDNELEDRTQTKPIVQTSLALCSSVYIATSFFAYLLFGEGTLADVLANFDSNLHIPFSSVFNDVVRVSYVVHIMLVFPIVFFALRLNLDGLLFPTARHISRDNRRFAIITGSLLAVIYLAAIFIPSIWDAFQFTGATAAVLIGFIFPAMIILRDPYGIATKRDKILALTMIVLAVLSNSVALYSDALNIIFHRKVEA

SEQ ID NO: 128237 - protein, 38 aa, Oryza sativa
  Clone ID: PAT_MRT4530_3060C.1.pep
DDDFVDLAYWITVSTSDLYLLLTSTTDTIAVYSTYSYY

SEQ ID NO: 128238 - protein, 57 aa, Oryza sativa
  Clone ID: PAT_MRT4530_30610C.1.pep
SLTSNWIDKPSIPNSECDNVQMGLRLISRKQPEPRRDPHEAKVVVGHLLTPQAKMYR

SEQ ID NO: 128239 - protein, 84 aa, Oryza sativa
  unsure (1)..(84): unsure at all Xaa locations
  Clone ID: PAT_MRT4530_30611C.1.pep
LEEKEFLLYDAIGQTCLCRGGGGGEXEXXXGKEGKNYGKKRLLQDNKREEAEPRYTLIKPKKAEMPTEDNRRPFKWMDYKTTKT

SEQ ID NO: 128240 - protein, 483 aa, Oryza sativa
  Clone ID: PAT_MRT4530_30612C.1.pep
MDSSILPALLIALFIPILLHLVTRFKYSSYNLPPGSLGFPFVGQSISFLRALRSNTDHQWYQGRIGKYGPVSKMWLFGSPAVLMAGPAANRFIFSNKDLLFTGTRSMNLLSGRNILMLSGEELKQVRGALQNFLSPEMVIRYVSKMDEEVRRHVKVNWVGHKTVKVLPLAKRLTLDIICSVIFGQEAGSVREALATDFPAMVRAALSIPVKIPFTRFSRGLSASQRIRKLLRGIARERETLLQQQQAHGASAADDFFTYMLALRAEGAHSLTVEDIVDNAIFLLIAGYETTSVLITFMLWHLDKEPEVLSKITEEQDEIARNKGPEDALTWDDVSRMKYTWKVAMETVRTIPPIFGSFRTATRDIEYQGYHIPKGWMVFTAQSVTHLDANIFPEPSNFDPARFENNSSIPPYCFVPFGGGPRMCPGNEFARTETLVTMHSLVTQFRWKLCCKEESYKKDPSPTPLLGLPVELEPRCLPENAHA

SEQ ID NO: 128241 - protein, 53 aa, Oryza sativa
  Clone ID: PAT_MRT4530_30613C.1.pep
MSLQSWLTLSIYRGNRPGNFELEFEIRWHNVDNLQVIKQWSRSLNSGQVILAT

SEQ ID NO: 128242 - protein, 342 aa, Oryza sativa
  Clone ID: PAT_MRT4530_30614C.1.pep
MADLADEDPPVLLDRASRATRGKRITKLLEDEVEQDEVFWNQDALKEDEEDDNYEEEQDAGDEFDSDFGEDESEPDDEPEKEVRERLPIKKRLIFPGKTMKKINAKKKKKVVPKLEDDSKTDKYSDQQSPSKQTDIPDELETGEKTIRKSTRTSVIVRQAEREAIRAEKEATMKVPVIKKKKEGEEKRMTQEEMLLEAAETEIINLRNLERVLAREEEVKKKAVVHKAVYEGPTIRFCSRDDPEKSICAVTGLPAKYRDPKTGLPYATKEAFKIIRESFLKEEADRKRPNLANMGELFESITGEYSTPKKRRIEARSPSISSDQRHGGRFRRIPALDLLDED

SEQ ID NO: 128243 - protein, 145 aa, Oryza sativa
  Clone ID: PAT_MRT4530_30615C.1.pep
LIDTLTPSIPRNSRKKIHPHPPVARSPPAPICSAAISPTGIAFLTDLLRFATVPRHRKPSPPSHLLALRFPTLTAVSPQVTVNRRRPRRSPSRRYHPVTVVLPSFSLHRIANGFPRRPGFAHAVRSSATSAKEFGMSLSPLICTY

SEQ ID NO: 128244 - protein, 493 aa, Oryza sativa
  Clone ID: PAT_MRT4530_30616C.1.pep
MSAGDDRLSALPDDLLIRVLHFAPAKEAASTSLLSRRFGALWRSSGAVNLAACVPDGRDAFVRAAEAALAAADRAVTRLTLHVEGDDECSTYNSLRVGDHDVLDAVVAHPAARRVEELRVAAVHRGQPDEHDDAVMDDDVFLYILRFSSLPSNTLRVLDLTRCHNFSPPPPPRTASAAVAFPRLTTLRLRHCTYSVKHLHGIVDAAPELATVHLEFVLLSSDRHRRFGPVTWNTGLRFPSATVLALIHCRGEEGAPGRSMEITALRLRSFTYKGEAVLFDLTSPPSPDTTTVVAADLHFTHGMGRCVDYSHFIHNFTNAKVLRLKANHLDDMAVAEVFPELEHLRLELDGAYSGWSMAAETAAATIASLLHCCPVLRQLELNFISDLPPDSCKNSKQVKHLFQKKCDADFGKSIDDFMRLIKFESNQRLDIRGLSDCSFACLKSSLRRVSLQFRLGEDSDCFGVRLIKFFAENAMFLEELHVLTAETEISEST

SEQ ID NO: 128245 - protein, 398 aa, Oryza sativa
  Clone ID: PAT_MRT4530_30617C.1.pep
MACVRSPLDWSSGLPRELLEIIAKKLPSGHDAASFRSVCSPWRAALPFARFAPLLMLPFDPTPTSPSPPEEKTVSFYSLVEEKTVSLPLPELHGKVVVGASRGWLALVDEAAAVSLLNPFTGSRVALPPADQRVAAASSRSVEMVGVGNDGGGRWVLRCSSGDVSPVTLDKMREVFFSEIVLSTTPGGDGCAAMAVLADSSEVAFCRVGDTAWTLIETNVECCVSAIVHCHGSFLAIGCLGEVSIINIAGDNDATPSPARPVSSLPEPAQMCHRSYLEVNGELHLVGVAIRAFHGEWPFGHHAVVYKCDLAAGETPVWSMVTDAGDMAMFMSKNFNSGFGGASVSKIKSNCIYLSEPTYGSDHSPELVDISTGMSEKIACPTMKGSEALCWIRPNLWT

SEQ ID NO: 128246 - protein, 197 aa, Oryza sativa
  unsure (1)..(197): unsure at all Xaa locations
  Clone ID: PAT_MRT4530_30618C.1.pep
MAAAGPSSSAPPRPGAGVATMAAGRRGHGDGDGAALGAAVGRSVSALCGSSDGRRRRQIWSPRLAGVNGDGLGRRRRRSADLAATREAXALVNAPAVNVVPVTPSSMMPATCASRCTSDPRHPGRIWTADVXAALASDGGGWTVVAGRGCPWRWRWRWWLTVVASDGGGCGSGGGGRPTTLKRPPGPTTFKRPPGPS

SEQ ID NO: 128247 - protein, 51 aa, Oryza sativa
  Clone ID: PAT_MRT4530_30619C.1.pep
MPHLRDGSRHATSMPHSGRYSSIDLANVCYAAEMETMPSSASASLARPSSA

SEQ ID NO: 128248 - protein, 700 aa, Oryza sativa
  Clone ID: PAT_MRT4530_3061C.1.pep
MARSGRERRDQEEEEAAVVSVERVFEGRVVPGWKEQVTLRALAVSALLGAMFSVIVMKLNLTTGIIPSLNVSAGLLGFFLLTSWTKLLDKAGVASVRPFTRQENTVVQTCVVACSGIAFSDADLCTGGTGGFGSYIFAMSDRISDQSGEARDEHNIKNPSLGWMIGFLFIVSFLGLFSVVPLRKIMIIDYKLIYPSGTATAHLINSFHTPQGAKLAKMQVKMLGKFFVMSFSWGFFQWFYTGGDGCGFMSFPTLGLEAYRNKFFFDFSATYVGVGMICPYLVNISVLLGGVMSWGIMWPLIEHKKGDWYPADLKPSSLRGIVGYRVFISISLILGDGLYNFLKVMTRTTTALVMQVRAMMSEPTLPVSGGGGGGGGQTPEETFDDKRRTELFLKDQIPNWLALSAYVVIAVVSIATVPRIFHQLRWYHVAVSYVVAPVLAFCNAYGCGLTDWSLATTYGKLAIFTVGAWADASDGGIIAGLAACGVMIGIVSTASDLTQDFKTGYMTLASPRSMFVSQVIGTAMGCVIAPSVFWLFYKAFHDIGMPGSEYPSPNALVYRNMAILGVQGLGSLPKHCLDLCIGFFVAAIAVNLARDLAAPKVARFLPLPMAMAIPFYLGPYFGIDMCIGSLIRFVWDRLDGARAKAFAPPVASGLICGDGIWTLPQSVLALAGVKPPICMKFLSRTTNIKVDAFIAKLPSS

SEQ ID NO: 128249 - protein, 322 aa, Oryza sativa
  Clone ID: PAT_MRT4530_30620C.1.pep
MAAVGPSSSAPPRPGAGVATMAAGRQGRGDRDGAATARSWARRSRCRLSAAPATASPDLVSPLGRGDRRRARSSLAPLRGPGRGVASGGDGGGCGGDEVGDDGGGLWRVPRRRPSSRTSPPRGRRGALVNAPAVNAVPVTPSSMMPATRVSVAVAVVMVADGGGWRWWWLWQWRWRLSTMEESGSGRAVDGGNNCGRALAPCDLAPPSSPSLQPCAAAVPVVVIAREDRHRGRQVAAVLVRPFAAAEDRQSTAVTVDPISAAVSSSSPAPSVALPPLFWSPDSSKPLVGIDHHIGREDAGTKVVVGIHKDRYASLDPQHLGV

SEQ ID NO: 128250 - protein, 260 aa, Oryza sativa
  unsure (1)..(260): unsure at all Xaa locations
  Clone ID: PAT_MRT4530_30621C.1.pep
PQVPSSTAAIATATATTIASRHRQPPSPPPPPRTPLSNHHRPAATVASQRCQTPTVQIRPGWRGSEVQREARVAGIMEEGVTGTAFTAGALTRAPRLPRGGEVLDEGRRRGTRHSXRRRRQLRRRHIRHHRRRXHPPARSAEWRQRRPSPSPVTPAKRGDQIWRXPSLEPRRADTVXRRAQLRAVAAPSLSPRPCRPAAIVATPAPGRGGAEEDGPTAAIPTCRPALPATSSGGGEARRREEEGRRRRLGFRPELPDRPT

SEQ ID NO: 128251 - protein, 89 aa, Oryza sativa
  Clone ID: PAT_MRT4530_30622C.1.pep
MARRAKTTPHRITVSFADDGDCEPMSTSGKASLSANQHTDALSLGELIRTQWKPYMCSSSKVSRRGQAMMMACRATSERVMYLVAIMNA

SEQ ID NO: 128252 - protein, 544 aa, Oryza sativa
  Clone ID: PAT_MRT4530_30623C.1.pep
MSEVGGYDSNHWVPLPPSPNLVSILNKATAARGDSGGAAAVGIDARWPQLHMAAVEARDPAGSGCPRTDPAAGRPPPHRIRSPPLSFHPSPHPAEGRGVGCGAAGGERGSGRRRRGVRREAGGTEAADNDNKEEEAVPPPILVSPSSQQRRCLLASHYPWGVVCMNFLTLSDRILQVKTTSWGFSGAPKEDATWIAATARSEPKQGFHPENMVGKGKGYAETTPPRRGTPPNGVAVRFGQGHRPQLFPPSTARPHPDSSFPTARPLPRLHIPPLTTTHPTTVASRHCQPPPPPRTPPSSHHRPAATVASQRRQTPAVQIRPRWRGSEVQREAQVAGIMEEGITGTAFTAGALTRAPCLPRGGEVLDEGRHRGTHRSRRQLRRRHIHHHRRRYHPPAGSAERRRRQPSPSPVTPAKRGDQIWGRIWSPRRPSLEPWRADTVASHRRAQLRAVTASSPSPRPRRPAAIVATPAPERGGAEEDGPATAIPTRRPALPATSSGGGEARRKEEEEGRRRRLGFRPLGWHLLLLVRLAEAAHRTVCNVYA

SEQ ID NO: 128253 - protein, 104 aa, Oryza sativa
  unsure (1)..(104): unsure at all Xaa locations
  Clone ID: PAT_MRT4530_30624C.1.pep
PSAKRSGRKGLPFGDGWDYLTGEGPGYXKLFKLSXTLAPGPIWXLNMGLSLMDKVVPVAMVPLEKNYWNILNFERGRANSKWGSVKAAWGHLDHFPVKYVALGM

SEQ ID NO: 128254 - protein, 540 aa, Oryza sativa
  Clone ID: PAT_MRT4530_30625C.1.pep
MEKAKLSSALFAGTHFDRKRFAGDFARFRQGPPAPDVASAAAPSPEKKRKRQSKAKAKKSKKRRAEGADSASDAVEGFSVFKGLAAKKDEDDSEKKVETGKSEDSEVVRRRKEVEREIERAAILRKKFDIHISGQNVPAPLENFEELVSRYGCDSYLVGNLSKLGFQEPTPIQRQAIPILLSGRECFACAPTGSGKTLAFLFPILMKIKPGSKEGVKAVILCPTRELAAQTTRECKKLAKGRKFYIKLMTKDLSKSGNFKDMHCDILISTPLRLDHAVQKRDLDLSRVEYLVLDESDKLFELGFVEVIDSVVKACSNPSIIRSLFSATLPDSIETLARTIMHDAVRVIVGRKNSASSLIKQKLIFAGTEKGKLLALRQSFAESLNPPVLIFVQSKERAKELYKELAFDDVRADVIHADLDEEQRQDAVDNLRAGKTWVLIATEVIARGMDFKGVNCVINYDFPESASAYIHRIGRSGRAGRSGEAITFFTEEDKPFLRNIANVLISSGCEVPSWIKALPKLKRKKHRVNRDPISTLPDED

SEQ ID NO: 128255 - protein, 250 aa, Oryza sativa
  unsure (1)..(250): unsure at all Xaa locations
  Clone ID: PAT_MRT4530_30626C.1.pep
RYHRRQPPPPLPQPPPSPAATVSHHHRHEHPCPATTVQPPXVAIQCRQTPAIQIRPGWHGSEVQREARVAGIMEEGVTGTAFTAGALTRAPRLPRGGEVLDKGRRRGTHRSPPPLSPTSSPPHSPPSPPLATPLPGPRSGAGDDRARHRSPRPSGETRSGDAVARRWSRGEPTPWSAPPPRPXSAPSPRRPCRHDLAVPPPSSPRPRRGEVEPRRMAPPPPSQRVARLCRRRAPAAAKHGGGRRRGGGGG

SEQ ID NO: 128256 - protein, 473 aa, Oryza sativa
  Clone ID: PAT_MRT4530_30627C.1.pep
MTTTGSTPPRKNRSNVTGGEGGSLEEYAWRAAGEAAAAKKATRAWGVSVSLRSHFSSLVLLLLLLLVALAVSATTKNGDPAETPHAPPLPPPASIKLPSSSSSGGGECDLFSGRWVYDEAAYPLYRESACRVMSEQSACEKYGRTDLRYQHWRWQPHGCDLPRFDAEKFLGKLRNKRLVFVGDSLNRNQWASMLCLIDTGAPELHTSINSSRSLTTFKIHEYNASVDFYWSPLLVESNSDHPLRHRVADRTVRAASINKHAAHWTNADVLVFNSYLWWQRPAMKVLWGSFDNPAAVVAAAAEEGDEYAVSKVIDSLRAYELAVRTWADWMEFHVDRARTQLFFMTMSPTHLRSDEWEDAAAAAAGGNHGCYGETEPIAAEEYRGTSGTDMAFARAVEAEARRLGERSVAVRLINVTRLSERRKDAHPSVHRRYWDPVTDEQRRNPSSYADCIHWCLPGVPDVWNQLLYAHIVS

SEQ ID NO: 128257 - protein, 668 aa, Oryza sativa
  unsure (1)..(668): unsure at all Xaa locations
  Clone ID: PAT_MRT4530_30628C.1.pep
KSQKQQQRRSNQAYLHQNLLPPSPLLSTRRXPEPPHRLTPPPPPPRGVPFHRVAFRPSPAERFMRGSRMNPGDRRTRSTMSIVIVMSLCCFFYILGAWQKSGTGRGDSIALRVTKETDCTILPNLHFETHHSLGGVNPLVMTDKVFEPCHIRYSDYTPCQDQNRAMNFPRENMNYRERHCPTETKKLRCLIPAPKGYVTPFPWPKSRDYVPYANAPYKNLTVEKAVQNWVQFEGDVFRFPGGGTMFPNGANAYIDELASVIPFTDGTIRTALDTGCGVASWGAYLMDRNVLTMSFAPRDSHEAQVQFALERGVPAVIGVLGTIKLPYPSGSFDMAHCSRCLISWKSNDAMYMFEVDRVLRPGGYWILSGPPINWKTNHQAWKRSKEDLEAEQNVIEKIAEMLCWGKIHEKGDTVIWRKKADSNECHNKDDHPSKMCKIQDADDVWYKKMEGCITPFPEEAQLRKFPERLFAAPPRILQGRTPGVTEEIFEEDNKLWKKYVSTYKRINKLIGSLRYRNIMDMNAGLGSFAAIIDSPISWVMNVVPTISEKNTLGIIYERGLIGIYHDWCEAFSTYPRTYDLIHANGLFSLYQNKCNMEDILLEMDRILRPEGAVILRDNVEVLNKVRRTVMGMRWKSKLLDHEDGPHIPEKILVSVKKYWVGNEEENSS

SEQ ID NO: 128258 - protein, 107 aa, Oryza sativa
  unsure (1)..(107): unsure at all Xaa locations
  Clone ID: PAT_MRT4530_30629C.1.pep
PRSFCGXARCSWXXXSGGASXCPXXPGPXLLXRLWXXLXLXXXLXLGFPLXCVAVXCAPWVXXXSXXPLLFXXXXVFXXSSXGAGXFXSXPLLXPSXXFCLXPVXSP

SEQ ID NO: 128259 - protein, 87 aa, Oryza sativa
  unsure (1)..(87): unsure at all Xaa locations
  Clone ID: PAT_MRT4530_3062C.1.pep
PRVRASSRSREAXLSRHPPLXVXVRRMMETLPAPXPTQIPRSTAIRPPCATPFSRXHWQTTCAXILXTTTTTNDKAYGVPWVNXDRS

SEQ ID NO: 128260 - protein, 393 aa, Oryza sativa
  Clone ID: PAT_MRT4530_30630C.1.pep
METFGWAGGGQLMHHDDIYLPRSVGCGRPFELDDAFLGACFGAQLQCDGGVGGGDGGGCLQGTSGFGAVAGDPLGLLCSGDVFASVAEGAGGAHDDGLLDAALAFSRNQLGGAACDGSDGGAVSNGAMLSSYSGTTGGNISSGESNNYSGGGGGYDAEVVSPTSTMSAATQSLHPKRKLYDDHHHPAGIAAAAAAPPLAPCPRPTTGAVAAKRRASTSATSITFGHQPHHHHAGATTAGYEPDMEAMAQVKEMIYRAAAMRPVHLGTEAAADKPRRKNVRISSDPQTVAARLRRERVSDRLRVLQKLVPGGNKMDTASMLDEAASYLKFLKSQVQKLETLGTTTTTSKLPQQYYSGNINSSNNHHGFLGFAANNNTISAGYANSNAGNATKLL

SEQ ID NO: 128261 - protein, 112 aa, Oryza sativa
  unsure (1)..(112): unsure at all Xaa locations
  Clone ID: PAT_MRT4530_30631C.1.pep
FPLPPSGNKFCAGPGDLKIFYLNIFTRYDSSSQRKGNPVNLRPGGARANQRADLGKEKKPLCXASFGALAFDXXRARARVNGGGRGKGRRPCPGSAGKERGRRGGGPVRASY

SEQ ID NO: 128262 - protein, 238 aa, Oryza sativa
  unsure (1)..(238): unsure at all Xaa locations
  Clone ID: PAT_MRT4530_30632C.1.pep
PANNCSDAAPAPWRRRTTRTCRCGRTGGSPRRAGSAARARPSPPRGSPRRSSSRTRRSTSSGACRWCSRTWRPRRPLRRRGGAPWTGRRGSRPPPRRRSPRTGXGRSRRGRSTWPGAGCRGGRSPAGRRRGSAPGTPRSRRWASRRRGRRGRGRTRRAVWRRRRGGRRRPPRSRRGGRGIEGSPARRRGGRGGRRRPRPPRWWWRRRPWRRERESRIARGGLGFRENRKRGIRAATSC

SEQ ID NO: 128263 - protein, 513 aa, Oryza sativa
  unsure (1)..(513): unsure at all Xaa locations
  Clone ID: PAT_MRT4530_30633C.1.pep
MEKIIAELIESKEIQVSDIPYSSPAVMVRKKDGSWRLCVDYRQLNAQTVKNKFPMPIIEDLLDELNGAKVFSKLDLRSGYHQIRMATQDIPKTAFRTHLGHYEYQVMPFGLTNAPTTFQSLMNQVLAPFLRKYVLVFFDDILIYSKDWAEHKEHIRQVMKVLEENKLVVKLKKCAFGLPSVTYLGHIISQDGVATDPKKVEKIATYPTPKSVTDLRKFLGMTGYYRRFIKNYGIVCRPLHDMLKKEGFQWEREQTEAFETLKTHMCTSPVLSLPDFTKEFVIEADACGNGIGAVLMQSGRPLAYFSKTLGPKAAAQSIYEKEAMAILEALKKWRHYVLGSRLIIKTDQQSLKFMMNQRLVEGIQHKLLLKLMEYDYSIEYKAGKENLVADALSRIPPAEQCQAITTVIPEWVRDIQRSYEGDVQAHKILSLIGTEGDTDGSYSQEAGLLRYKGRIYVGENTEIREELIRSYHSSAFGGHSGMRATYHRIKSLFYWPGLKKXVEGFIRECPICQ

SEQ ID NO: 128264 - protein, 174 aa, Oryza sativa
  unsure (1)..(174): unsure at all Xaa locations
  Clone ID: PAT_MRT4530_30634C.1.pep
NFKLFLQIWKSWAPGKCXFFLLWLVAHDRCWTADHLTRHGLPHPARCPLCDQEEETINHLLISSXCIFAHVFWFNLLQKVGLQTLSLQRDIASFDDWXASVEVRVDGKVRKGIISIVVLGSXTLWKHWNHCVFDGASPNLDEALLLAREELYDWGLAGAKDILALTAPLKEVPI

SEQ ID NO: 128265 - protein, 1976 aa, Oryza sativa
  unsure (1)..(1976): unsure at all Xaa locations
  Clone ID: PAT_MRT4530_30635C.1.pep
MAEQAKAPDLSPSVSGDDGEPNPRRRARTPPPPPRQSPKQGEVLERVERSAASPIAGDGGERRDGDRRLLVYGDGSTPQGALQAAGALLRHPPVVPDPESPAQRWLDDVAKLVMTARQRLDAGGRSSATKASGAATTGSASSRQRARRAAAAVRRSAATPSSTPSTREDLRGEQDARASIKRRRNDRSAAHATEGASSSRVSPRHGRGNQPSVPPVGGVGCRAFVASLRNVRWPPRFRPTIAEKYDGSVNPAEFLQVYTTGIEAAGGDDRVMANFFPMALKGQARGWLMNLPPASVHSWEDLCQQFTMNFQGTYPRTGEEADLHAVQRRDDESLRSYIQRFCQVRNTIPCIPAHAVIYAFRGGVRHNRMLEKIASKEPQTTAELFQLADRVARKEEAWTWNPSGSGVAASAAPGSAAQAGRRDRRRKKRSVRSDDEGHVLAVEGASRATRKGRPASDKKKEASVPSRERPTGKWCAVHNTSLHDLADCRAVKSLAERTRKWEEERRQERREGKSPAVPSGRRRSEAKQKAPAEDIDDGDDDLGFQEPGATIATVDGGACAHVSRRSLKAMKRELLAAAPTHEATRRARWSEVALTFDQTDHPPCVARGGQIAMVVSPTVCNVKLGRVLIDGGAALNPLGHIDLPVTFGGPANFRTERVNFDVADLSLPYNAVLGRPVLVKFMAAVHYAYLQMKMPGPDGPISVHGDLRVALACMEQRADRLAVVSKPEGGDERLGTSAPAAPRQRIATSDEVPEDALVSFLRANADVFAWRPADMPGVPREVIEHRLAVRPSARPVRQKVRRQAPERQAFIREEVARLLEAGFIREVIHPEWLANPVVVPKANGKLRMCIDYTDLNKACPKDPYPLPRIDQIVDSTAGCDLLCFLDAYSGYHQIRMAREDEEKTAFITPVGTYCYTSMPFGLKNAGPTFQRATRISLGSQLGRNVEAYVDDLVVKTRNQETLLSDLAETFENLRSARIKLNPDKXEANPEKIRAIKRMRPPXKLRDVQCVTGCMAALSRFISRLGEKALPLFKLLKRSGPFTWTEEAERALTQLKAYLSSPPVLVAPEPNEPLLLYLAATPQVVSAALVVERDEDDPHSAHPHPVLTWPGSEQGGEAPEPNGGLRPLTTGVSPLPARQMVLGAPDPQEGPEATAGRLHLSPSDPEANSVPIRPGSEQGEEAPEPDGGLRPLTTRVGPLPACPTTPGAPDPQDGPEATVGRPPLSSSDPEVIGTEDECAPRGHLDEERPGDMALSEGDRPHRRVQRPVYFVSEALRDAKTRYPQAQKMLYAILMASRKLRHYFQAHRVTVVTSYPLGQILHNREGTGRVVKWAIELSEFDLRFEPRHAIKSQALADFVAEWTPAPETVSVSEASSDPLQLPHAVHWVMQFDGSLSLQGAGAGVTLTSPNGDVLKYLVRLDFRATNNMAEYEGLLAGLRVAAGLGIHRLLVLGDSQLVVNQVCKEYRCSDPQMDAYVRQVRRMERHFDGIELRHVPRRDNMIADELSRLASSRAQTPPGAFEERLTQPSARPDPLGETGVPDRPPRPVGVQASGPEGSAPSSLRLIACISEIQAYLTDKTLPEDREGSERVQRISKRYVLVEGTLYRRAANGILLKCIPQEQGVELLADIHEGECGAHSASRTLVGKAFRQGFYWPTALNDAVDLVRRCRACQFHAKQIHQPAQALQIIPLSWPFAVWGLDILGPFRRAPGGFEYLYVAIDKFTKWPEAYPVIKIDKHSALKFIKGITARFGVPNRIITDNGTQFTSELFGDYCEDMGIKLCFASPAHPRSNGQVERANAEILKGLKTKTFNILKKHGDSWIEELPAVLWANRTTPSRATGETPFFLVYGAEAVLPSELTLRSPRATMYCEADQDQLRRDDLDYLEERRRRAALRAARYQQSLRRYHQRHVRAQSLCVDDLVLRRVQTRAGLSKLSPMWEGPYRVIGVPRPGSIRLATGDGTELPNPWNIEHLRRFYP

SEQ ID NO: 128266 - protein, 1965 aa, Oryza sativa
  Clone ID: PAT_MRT4530_30636C.1.pep
MAEQAKAPDLSPSVSGDDGEPNPRRRARTPPPPPRQSPKQGEVLERVERSAASPIAGDGGERRDGDRRLLVYGDGSTPQGALQAAGALLRHPPVVPDPESPAQRWLDDVAKLVMTARQRLDAGGRSSATKASGAATTGSASSRQRARRAAAAVRRSAATPSSTPSTREDLRGEQDARASIKRRRNDRSAAHATEGASSSRVSPRHGRGNQPSVPPVGGVGCRAFVASLRNVRWPPRFRPTIAEKYDGSVNPAEFLQVYTTGIEAAGGDDRVMANFFPMALKGQARGWLMNLPPASVHSWEDLCQQFTMNFQGTYPRTGEEADLHAVQRRDDESLRSYIQRFCQVRNTIPCIPAHAVIYAFRGGVRHNRMLEKIASKEPQTTAELFQLADRVARKEEAWTWNPSGSGVAASAAPGSAAQAGRRDRRRKKRSVRSDDEGHVLAVEGASRATRKGRPASDKKKEASVPSRERPTGKWCAVHNTSLHDLADCRAVKSLAERTRKWEEERRQERREGKSPAVPSGRRRSEAKQKAPAEDIDDGDDDLGFQEPGATIATVDGGACAHVSRRSLKAMKRELLAAAPTHEATRRARWSEVALTFDQTDHPPCVARGGQIAMVVSPTVCNVKLGRVLIDGGAALNVLSPAAFDAIKAPGMMLRPLPYNAVLGRPVLVKFMAAVHYAYLQMKMPGPDGPISVHGDLRVALACMEQRADRLAVVSKPEGGDERLGTSAPAAPRQRIATSDEVPEDALVSFLRANADVFAWRPADMPGVPREVIEHRLAVRPSARPVRQKVRRQAPERQAFIREEVARLLEAGFIREVIHPEWLANPVVVPKANGKLRMCIDYTDLNKACPKDPYPLPRIDQIVDSTAGCDLLCFLDAYSGYHQIRMAREDEEKTAFITPVGTYCYTSMPFGLKNAGPTFQRATRISLGSQLGRNVEAYVDDLVVKTRNQETLLSDLAETFENLRSARIKLNPDKCVFGVPVGKLLGFLISARGIEANPEKIRAIKRMRPPEAERALTQLKAYLSSPPVLVAPEPNEPLLLYLAATPQVVSAALVVERDEDDPHSAHPHPVLTWPGSEQGGEAPEPNGGLRPLTTGVSPLPARQMVLGAPDPQEGPEATAGRLHLSPSDPEANSVPIRPGSEQGEEAPEPDGGLRPLTTRVGPLPACPTTPGAPDPQDGPEATVGRPPLSSSDPEVIGTEDECAPRGHLDEERPGDMALSEGDRPHRRVQRPVYFVSEALRDAKTRYPQAQKMLYAILMASRKLRHYFQAHRVTVVTSYPLGQILHNREGTGRVVKWAIELSEFDLRFEPRHAIKSQALADFVAEWTPAPETVSVSEASSDPLQLPHAVHWVMQFDGSLSLQGAGAGVTLTSPNGDVLKYLVRLDFRATNNMAEYEGLLAGLRVAAGLGIHRLLVLGDSQLVVNQVCKEYRCSDPQMDAYVRQVRRMERHFDGIELRHVPRRDNMIADELSRLASSRAQTPPGAFEERLTQPSARPDPLGETGVPDRPPRPVGVQASGPEGSAPSSLRLIACISEIQAYLTDKTLPEDREGSERVQRISKRYVLVEGTLYRRAANGILLKCIPQEQGVELLADIHEGECGAHSASRTLVGKAFRQGFYWPTALNDAVDLVRRCRACQFHAKQIHQPAQALQIIPLSWPFAVWGLDILGPFRRAPGGFEYLYVAIDKFTKWPEAYPVIKIDKHSALKFIKGITARFGVPNRIITDNGTQFTSELFGDYCEDMGIKLCFASPAHPRSNGQVERANAEILKGLKTKTFNILKKHGDSWIEELPAVLWANRTTPSRATGETPFFLVYGAEAVLPSELTLRSPRATMYCEADQDQLRRDDLDYLEERRRRAALRAARYQQSLRRYHQRHVRAQSLCVDDLVLRRVQTRAGLSKLSPMWEGPYRVIGVPRPGSIRLATGDGTELPNPWNIEHLRRFYPLVLDPALGGPVRPAKIAKRGPEPSH

SEQ ID NO: 128267 - protein, 158 aa, Oryza sativa
  Clone ID: PAT_MRT4530_30637C.1.pep
MAGAGAGESLDLPVVDLASSDLAAAAKSVRKACVEYGFFYVVNHGAEGLAEKVFGESSKFFEQPLGEKMALLRNRNYLGYTPLGADKLDASSKFKGDINENYCIGPIRKEGYQNDANQWPSEENFPCWKETMKLYHETALATGKRILSLIALSLNLDV

SEQ ID NO: 128268 - protein, 77 aa, Oryza sativa
  Clone ID: PAT_MRT4530_30638C.1.pep
LSCRSNFTQCLQSAEIRGIGSVLAPWIHSIFSTGAQGSPVEGLKRATCNGLERFGTSLIIVTEIELSSSWIMENGTN

SEQ ID NO: 128269 - protein, 353 aa, Oryza sativa
  unsure (1)..(353): unsure at all Xaa locations
  Clone ID: PAT_MRT4530_30639C.1.pep
MRHISSLLQGLARSLSVGKERKAATATTGRRRRRRRRXVLRTSGTLWGEGSETFAAVCSRRGEKGINQDCSIVCEGFGCEEGSVLCGIFDGHGQWGHYVAKAVRESLPPALLRRWREAVTLAALIDGGEKRLCECRPDLWRQSYLAACAAVDAELRASRRLDAVHSGCTALSLVKHGDLLVVANVGDSRAVLATASPDDGGGARLAAVQLTVDFKPNLPQERERIMECNGRVQCLADEPGVHRVWRPDREGPGLAMSRAFGDYCVKDYGVISAPEVTHRRITAQDHFVILATDGVWDVVSNEEAVQIVASAPEREKAAKRLVEFAVRAWRRKRRGIAVDDCSAICLFFHSPPS

SEQ ID NO: 128270 - protein, 38 aa, Oryza sativa
  Clone ID: PAT_MRT4530_3063C.1.pep
FLGRGPFFFPNLFCLSLGVGPIQGVLSLSLCMIWGGFP

SEQ ID NO: 128271 - protein, 223 aa, Oryza sativa
  unsure (1)..(223): unsure at all Xaa locations
  Clone ID: PAT_MRT4530_30640C.1.pep
VASHPHLRFRRSSIAXXSARSHTHTRPHXTXSQPHXPQQRSSPSSTPRATTKHNSAXLQNTTQHTLINCXTPPHSRTPHHLLRATHNXIPTPRIPASFAPSLTXXPSPHSTASYATPHTTRPTTHAPTHTRNPTHRTRDATQSPSXNWVHTXTAPLSTLRFETXEPSXHHTTPHATHATRHHTHSPINLHPKVSTITTLETAHANISFLALGTRLEENSCTIR

SEQ ID NO: 128272 - protein, 171 aa, Oryza sativa
  Clone ID: PAT_MRT4530_30641C.1.pep
MRLAGGSHAGGAVSACATRMRTRLARLGQAWAGRLGRGRPGGGEEGEEARERKGGGGSRAEGRGGEDFGLDSAQRRKEIIFSVRLPAAGAVAACGAAVACSSVRRGGGDSDRGAQEAARQEAAPGRQPSRSRRCTAAACKSASAVPRRGPRQPAAARCRCGRAASCSPATA

SEQ ID NO: 128273 - protein, 52 aa, Oryza sativa
  Clone ID: PAT_MRT4530_30642C.1.pep
YSPPLSSPSCQPSLSPSPAAAAPAPPLAALPFPPISIRRRAPHITRIAKPPR

SEQ ID NO: 128274 - protein, 216 aa, Oryza sativa
  Clone ID: PAT_MRT4530_30643C.1.pep
MVSLPAVAVQWPASGKDPGVALERRQRRARQGQSGDGGVRARAGAAAAAEIEAAVEGWPSGGRKRATRNGRVLAILGLATLGPATALSTAALHAFSAGHDAPASAVLPPRPRTHKGCASRHRTHVGILSKMAASDGGFFCTCGDGVESGRSSAGGGGGGTADGRGQRAEPADNDATTWELGGICVEHSPAGCRGNRQGSTDEGCAHASAHASAHAS

SEQ ID NO: 128275 - protein, 122 aa, Oryza sativa
  unsure (1)..(122): unsure at all Xaa locations
  Clone ID: PAT_MRT4530_30644C.1.pep
ISLKEVGYPSNPPDCLIWPFDKKNLFSTKSMYRLMKFGGVVDKDMQEIXGSKVPLKIKHFLFLAGRGRIPCADLLFSRNWKGGDRVLLRERERVELNVWLEKLKQKMKELRPGDVLPDNALV

SEQ ID NO: 128276 - protein, 106 aa, Oryza sativa
  Clone ID: PAT_MRT4530_30645C.1.pep
MGRRYTKKSSLMIPLLLIILVVAAASTTVARSAWVGDYASNHGCGETAAAELCDPRDPAANRACDDACHYNGCRGGRCILLYRGHLDGGDGGGGGRRGIGRGCHCR

SEQ ID NO: 128277 - protein, 181 aa, Oryza sativa
  Clone ID: PAT_MRT4530_30646C.1.pep
MLQGCYGGLIMGVFLLRRNLNNQNFELLSKLKEMLSGVDLNKSSDCLIWPFDKKKLFSTKSMYRLMKFGGVVDKDMQEIWGSKVPLKIKHFLFLAGRERIPCADLLVSRKWKGVVYRSIALANRWKVLLRERERVELNVWLEKLNQKMKELRLGDVLPDFRASWVLASPVCFVSFWLSFYF

SEQ ID NO: 128278 - protein, 546 aa, Oryza sativa
  unsure (1)..(546): unsure at all Xaa locations
  Clone ID: PAT_MRT4530_30647C.1.pep
VTRTGGGRPSALTRNGFPSSMATPGVTGAVVXDSAVVLAKFLERAVKSVRLALRDARALELGVGCGLAGCVATLFGVHVLLTALPDRLKLLAXSPVLKIAXQALYCGKRTISTSLISGVDFLGRLHIVVLNIHLLVTADGGGNLTVFVVFNYVVVSSRTLLLSTAATSIHNTVCTRGLDDGDGSRQGAAPSPRRPPPVPVQIGRKGKRGEERRERGEYYLLACRLLAQCVVYGLHCWQVLLVRYSQVLLSYSSNNTEKAIWAVFSSTLTLRDERDKRALDLAVSYPFSTRTNHHVPLLVAAAAGQVRSPYPIHAMTKLAAVFVWVQYLGRQGRKVIIMLLLSVWSKHGLEHHWRDVNHASTNGYGSPFAKSSHPRMMMIFCLLCVPVKTFGYDHAYSRCNHRDAAARPLEHVALQLADRSRSRSAPLTPVWPCPGAFSTPTVASYRAPHLLERQTATPHAKALKAPAAFGHYPAPYSDGRTDGVTAAEMTKIEHTGKAPRRIVDMGREPEMEEARENGGVGGSVLPLASLISPTGNEVLVPFMLCF

SEQ ID NO: 128279 - protein, 62 aa, Oryza sativa
  Clone ID: PAT_MRT4530_30648C.1.pep
MDSLEGGGILGKQSESAILATLGPKCETLPPASRRLQPPSIANGGEGRRTTGPSHPLQHFKP

SEQ ID NO: 128280 - protein, 660 aa, Oryza sativa
  Clone ID: PAT_MRT4530_30649C.1.pep
MAAARLRLLSAGLLSPAVSRARHSSSLQGLRALSTLSTTLGSGAGEDEIERIRREFEDAKRNYLSIPVAIKDMAKMNPQGIYVNKNVKLDDLQVYGFDYDYTLSHYSEHLQCLIYDLAKKHLVNELKYPESCLKYEYDHGFPIRGLYYDRLKGCLLKLDFFGSIEPDGCFFGRHKLSLSEIKELYGTRHIGRDQARQLVGLMDVFCFSEACLLADIVQHFVDARLEFDASYVYEDVNQSIQHVHRSGLIHRKILSEPQKYLIKNDEHFDGNSWRELFDVVIAQANKPTFYNSDHPFRVYDTQKDTLAFTAVDKFLPNEVYYHGCLKSFLQITKWRGPEVIYFGDHLLSDLRGPAKAGWRTAAVIRELEDEIEIQNGDSYRFQQVALTSLTLQAKLSIIHDLLGKVHATVVSTEKGQVYRALLDELNAERRQCRSAMRDLFNSSFGATFLTDTGRESSFAYHIHQYADIYTSKLENFLSYAPESWLHPPHDIKIMPHNAKVAYISSHMWSQRVCSVARSSFYPFPMENRNTHYGFCVRPESMNCHATASVNVRWYAKKLVHAILWGHDSFLILIHPYSHTPDRSASVAILLLAGAGLSLSREKVEKVETKPVERKGSSSSSPTAEEDDDGAASVSVVIPQYQAWYPQVSGMVPRYQSVLRY

SEQ ID NO: 128281 - protein, 815 aa, Oryza sativa
  unsure (1)..(815): unsure at all Xaa locations
  Clone ID: PAT_MRT4530_3064C.1.pep
LGAYVFTDRLAXPPPTGVLACTVGLLCRRCWALTSSPXPARLHRRRLVSSPARLAYYAAVVGRLRLHRXRLAFVAADWCLRLHGWPIMPPLLGVYVFTXTGLPSSPPTGVHACTAGLLCRRCWASTSSPXPACLRRRRLVFPPARLAYYAAVVGRLRLHRPXAFVAADWCPRLHGWPIMPPLLGVYVFTAGLPPSPPTGVIAYTVGRSHHRSWASMSSPTGWPSSAADWCFRLHGWPIMLPLLGVYVFTXGLPSPPPTGVSACTAGXLCRRCWASTSSPXPACLHRCRLVFPLTRLAYYAAVSGHLRFHRXTAFVAADWCLHXIDGRLCSHXMDQSEHHHRXPSSPPTGVFAYTVGWSQHRCQASTFSPTGXPRPPPTGVSACTLAYYATVVGRLRLHXPACLHRRRLVFPPARWPIMPPLMGVYDSTXRPASIAADWCFRLHAGXIMPPLMGVYVFTDRLAFAAADWCLRLHGWPIMPPLLGAYVFTDRLAFAAADWCPRLHGWPIMPPLLGAYVFTDRLAFAAADWCPRLHGWPIMPPLLGAYVFTDRLAFAAADWCPRLHGWPIMPPLLGAYVFTDRLAASAADWCHRLNGWPVITPTDATFFTAGYIAVTTNRHQYRQHKLPTFAMAADWFLHFHGCMILPVLIGLIFFTDGRLVCCXLVPSPLRLVYTATTTDGHHRLPLPTGYADADXCFYLHNCASSLPVCFCCRRLVFTSSRRXNFVIMVERLHLYYLRHWQTLLLLLRKFYYFTNHDVFVNLDISACNAMIFYYNQXLFNIQDFYLDTFSTYLQSSNDYSTTRSYNSGLYVQLFPN

SEQ ID NO: 128282 - protein, 67 aa, Oryza sativa
  Clone ID: PAT_MRT4530_30650C.1.pep
SVTVFFMQIMCKRIENKQYQDLKRFKWIQNSRNKKNFFASWNILLLLLIQPLIFSFVHQNPVTNMSH

SEQ ID NO: 128283 - protein, 60 aa, Oryza sativa
  Clone ID: PAT_MRT4530_30651C.1.pep
LVVFDKKEIHKSLYIYEILRITITLLENNLSQAFQPEVERPDSFWPFANIAFIVLWASIN

SEQ ID NO: 128284 - protein, 160 aa, Oryza sativa
  unsure (1)..(160): unsure at all Xaa locations
  Clone ID: PAT_MRT4530_30652C.1.pep
GQRGNPKKKRGPKKKGGEKKKTPLKGFPRAKKKKKKGGPQKTPGENPPRGQKNRAPKGGGEKKENPSPPKKKGTPLEKIPFGPKRSPPPGGTPPPDPRSSPWNEPKGPLGXPQVLGAPPPCFKTPFLETPGVKKKPPPGVGVLGHRVKVKGCPPPKCPPK

SEQ ID NO: 128285 - protein, 1238 aa, Oryza sativa
  Clone ID: PAT_MRT4530_30653C.1.pep
MAQEYQTMPSSAHDKRYSGLSNGGDKEQLPSQGVCVTLSCLTVGKSEVPLTTRFDGNAMQVDGLLKNVSPTTKIVVKPNEELKSPFLVKRHLFLKRPDPIILDELYSLTTKVTDEESRQSVWVSGNLPINLKLVDIQETIKPEGVMGINCMDLAVRIMSRQDAEIFKNTKCLGWRHYVDSNWKQYINDPNNLRNEYSRLSTMYDPSGSHLVLIPVSSDGHWTLYAFNMHDKKLCILDSRRDTSEGGDQDPVKRHEKIRKEVCHALNETMDVDFNFLSWKHEFPKVPRQQNSCDCGFFVFNFMRLWDGHRLIRWFSTETKELRKNFLAYILSSLDDHSVLPTNVSELIKKLPGETMMNVELLEAARAGNANAFCELVIDPARSINHEPFRSASCSCLLFRSTSSGSYCLCFECTSSRNSDQEKSPNKHNALTRSDAPSTFTRDTRDMLHAIQGVTVEGDGVLHIAASFGVLEPVKTVLEAQNGAFATALLQAENNKGDRPLHCAATTGSIVTVKLIVDEAEKIMRAQSDTFAWFLRAKNLDGQTCLHEAVRHGHEDVVKYLVSKDADLGDVPLPLVQIVDNEGTSPLYLATTLRRDSIVKVLTEAAPSGMPRAASYSGPAGKTALHAAVLFSEELSRTLVNWNHSLIKIRDESGSTPLHYLADGKYTTEPSCISVTELLLKKDPSSGYCEDSEGSLPIHIAAANGTLGIIDQLIKLCPGCESSCNASGQTILHIAVQTESHDVVRFVCSNEMFKMVLNMKDYDGNTALHLAVQKGHNKTFGILMGCKNVSLSIRNRNGYTPLDHAVLNKTSGLTYATYWPGHQRWVCNSLLAAGADFGTFRADHLSSKIPEQAKADREAFSDTLSKSAAVMATCAALLFNAALNIFLNVQAIYHNNNTSTNNNNATQGSDQLKQIQKVKKLSGDSLSISACAILLFAIAGFPILPGVIGRTFALILGLGVLIGSSMISLQALAARLDLAKVYGTGIGAFCVIFSLLCVTLCTNLLRKIVQHARPLWDRCGARGFFRSILNVRRAQNYSAIPLLQVVNLKTVEEITEWELRGGKGNGSTRIWRDEPFFFLNGEVEGKRMYTNGLMGGEQWGSSRLMGFLGPNAVLLRGINAEVFVVGLYRLARLDLAKVYGTGIGAFCVIFSLLCVTLCTNLLRKIVQHARPLWARCGAHGFFCSILNVRRAQNYSAIPLLQVVISVPRNGCFVLLCADGLRSALVNGEDRDYAQRGVEV

SEQ ID NO: 128286 - protein, 90 aa, Oryza sativa
  unsure (1)..(90): unsure at all Xaa locations
  Clone ID: PAT_MRT4530_30654C.1.pep
IAATGRSPLPQLCKPSPCAIMFASTGSYLSPRAGGKFMPRRXNIVIFTEAQISLKTPGTPXLLSLLIMLRSERMGIIVHGTVDTVKYVGF

SEQ ID NO: 128287 - protein, 161 aa, Oryza sativa
  unsure (1)..(161): unsure at all Xaa locations
  Clone ID: PAT_MRT4530_30655C.1.pep
MARSFSRSLSLSKGRFAAASSSLLPSSHLVSFRSQSSDRRGDLYEIDTSAASQSPSDPLIQKLEDAVHRIFVRRAQPDWLPFVPGASYWVPPPGSGSQSHGIAQLVVKLANPLTHEESLSTNSSHGWPSSDYFLKGSYGSFSLWXFMGXSWDWNLNMLLML

SEQ ID NO: 128288 - protein, 178 aa, Oryza sativa
  Clone ID: PAT_MRT4530_30656C.1.pep
MRNCSPVSTSRELSLRRAAAKPEAGMELCAVFFSSVFSLLLLLLLSAANDVVVSAATSPPLKFGINYGQIANNLPHPTQVSGLLQSLSVNRVKLYDADPAVLAAFAGTGVEFIVGNEDLHNLTDARKARAWVAQHVQPFLPATRITCVTVGNEVLSGQDTAAMQSLLPGMQSVHQALL

SEQ ID NO: 128289 - protein, 176 aa, Oryza sativa
  unsure (1)..(176): unsure at all Xaa locations
  Clone ID: PAT_MRT4530_30657C.1.pep
FGDIFLFTGIDDLVRRLPIDKAPEQDGFNGCFIKECWPIIAQDFYRLVSHFHDKNVDLQCINSSFITLVPKKVNPEGVNDFTPISLMSISLKILTKLMANGLXGVIKKIIREKRYXFCGFVKGRTIHDYLACSFEYIHQCQQSKMKWEILILKLDFEKAFDTIEHATILVKVFCMV

SEQ ID NO: 128290 - protein, 356 aa, Oryza sativa
  Clone ID: PAT_MRT4530_30658C.1.pep
MERLISKSVAARIPLPGGGSPSRRLAVAGLGGGGGVEPWAGRLRAQPRLGPIAARPHDGVSAPPREAAPAAAVGPPWKLLWSLLPKASRAALFLLVALVTGTLQSSIPYPAHASVQSITKTGGLFTSEILSSGWAGFIAGCLHTLSGPDHLVALAPLSIGRSRLESGLVGALWGCGHDAGQVIFGLLFLLLKDRLHIEILRTWGTRVVGLTLLIIGGMGIREATEVQESSLALEGVDCNITSSEPLQTPAAPRKKKVGFATFATGVVHGLQPDALLMVLPSLALPSRFAGAAFLGMFLMGTVFSMGSYTAFVGSCSEALKEKVPRITEKLTWAASLVAICMGIALLVGQFFGFSLY

SEQ ID NO: 128291 - protein, 76 aa, Oryza sativa
  Clone ID: PAT_MRT4530_30659C.1.pep
MEMEDIEDVLGPSRLTGGGAPPGLRLPLTVVAMKPKHLRSSRVTQTRPQPEAWILRMQLARREWGVDDDSDEKATQ

SEQ ID NO: 128292 - protein, 632 aa, Oryza sativa
  unsure (1)..(632): unsure at all Xaa locations
  Clone ID: PAT_MRT4530_3065C.1.pep
NTQQPNHPIIPKDAGHGLEASQLSGRSAASPLRRLVLATAIADSNNDFTVGHHRXWASSSTPPVCLRRRRLVSPPIRSVGHTTVDGHRHLHRRPASVAADWCPRLYGRLVTPPLXWASSSTPPACLRRRRLVSPPIRSVGHTTVHGRPRLHRRPASVAADWCLRLHGWPIMPPLLGVYDFTAGLPPSPPTGVPAYTVGWSHHRSWASTTSPPACLRRRRVVPPPTRLAYYAAAVGRLRLHRPAASSAADWCLCLHGWLIMPPLLGVYDFIAGLPLSPQSGASAYTAGLLCCRCWMPTSSPLAHLRCRRLVFPLTRLTYYAAISGHLRFHRRPPXVAADWCLHCYXWTTLFPXIGHFCHHQGEYYKAKIQIQICIKGIHGFXAYLLRSRNGSVRTSPPARLDRRRLVFPPARLAFMPPLLGVYVFTDRLAFAAADWCFRLHGWPIMPPLLGAYVFTDRLAFAAADRCPRLHGWPLCRRCWASTSSPTGLPSPPPTGVSACTAGLXYAAVVGRLRLHRPACLRRRRLVSPPARLAFMPPLLGVYVFTDRXPSPPPTGVSACTAGLYAAVVGRLRLHRPACLRRRRLVFPPARLAFMPPLLGVYVFTDRXASSAADWCFRLHGWPSKQPPTKLKP

SEQ ID NO: 128293 - protein, 1299 aa, Oryza sativa
  Clone ID: PAT_MRT4530_30660C.1.pep
MVVQNGWAYATGQLMQRALAQESRVKDNKKLVRSYDKKPNVNVIDYPEASDSEEEGDHDIYVAEWSWTNKNKPFVCSNLMPTPRKDRQSEVQSAIDEGRLKFTDGSKMKLDHDPFLVNTINFNDKKKYEKQGGERVHNKGKRPRSPPREQFGHSPRRSHSPPYHHPQDMSWGSYPMQPPGYPYPYYMPWGATPPMFNHMPPMQFNQGWGGSRRPIHERLSSPNNGRFYGRNRANEERREGKRIKVEARTSEVITIKVGSHDVPIPSGDGIGVSSNKKSEAETSSSQSAGLTKPSGRSDRSHAAGLTGPSGRSDRRPDSGPTDASGQSDRSPSVDLTGASGRSDRWSTAGLTGLQRRFNRRIAKGDVRASSFSNKIIRGHYLPPGTEPNPRWMPKDLTATQKRRLQRLRAQEIREKKAEEQRDKRFNELRPPPVWRHKSIEKEKPVDVEEKEKQSVDKSESSPKEDMDINMVCMLPMEFCAMDEAEVAQLSLGPKDAVFEKPDESNRHMKPLYLKGHVDGKPVSRMLVDGGATVNLMPYSLFKKLGREDDELKKTNMILNGFNGEPTEAKGIFSAELTVGNKTLPTAFFIVDVQGIELLKEYVDCFAWEYHEMPGLSRELVEHRLPIKPGFRPYKQPPRRFNPLLYDRVKEEIDRLLKVGFIRPCRYAEWVSSIVPVEKKGSATPKDEYPMPIADMMINDASGHKVISFLDGNAGYNKIFMAEEDMYKTAFRCPGFVGLFEWVVMTFGLKNAGATYQRAMNLIFHDLLGIILEIYIDDIVVKSDVDHHIDIAYEGEVGLVEVIPWKIYFDGSSCKEGQGIGVVLFSPNSMCYEASVRLEYYCTNNQAEYNALLFGLQVMEMVGAKYVEAFGDSELMVQQVAGVYKCLDRSLNRYLDSCLDIIANFDNFAIRHIARHDNSRANNLAQQASGYNVKKGLFLILEEPVLDFKSLCEIGKTGDQGRSDRHCSASLTGDQGQSDRPHAAGLTGDSERSERPCVASLTGSGQSAGGHVSINIVAELTVNSDICAQEAEGDWRILLIRYLKNPTLKVDRKILRQAFKYTLLDEDLYRRNIDGVLLKCLDEDQSKVAMGEANGQAESSNKTLLKLVKKKIEEHPKRWHEVLSEALWAHRISKHGATKVTPFELVYGQEAILPVEVNLGSLRYIKQNDLSSEDYKTLMGDNLDEVIDKRLKALEEIEKEKKRVAKAYNKRVKAKLFQVGDLVWKTILPLGTRSKEFDGPMPLAPEYVRRLIGPSKPIRSLMTRNAAAWEFGLVPVQVQNAFSFEALCFDKIIGPNESVD

SEQ ID NO: 128294 - protein, 1662 aa, Oryza sativa
  Clone ID: PAT_MRT4530_30661C.1.pep
MTKPSSKTEVEPSHVIPVTLDDFEGEDRKAMEEYINELTREALMRATTRTRQGVIIKPGPRPKLAPDVVSNNEVSQSIDQQIANTIDSSMANFKDRLDMMFKEKVDGFLRSRLGSFMDDYTLKDKAYTTADQPPVDPIGSKTDGAVFTAGPTSQMAGPTGYYPVGPTGQMAGPTGYYPTGQTGPQAGPTAQPDAGQTAPWTGQTGAIVPIQGIDPMTNASYLYHFRTFDSPVSTTTTSPQIPPHIPNVYNDVSRGYPPDTRQGQYNHIASQTQPIRPPNPPPNPQGPNNMENMICDIMRTKFGIETRNRARAYKRPYPDYYDNVQFPRNYRVPEFTKFSGEDGKPTWEHVGQFLAQCGEANSDTFKLRLFSLSLSGNAFTWFTSLPANSIHTWAQLEEQFHDYFYTGETELRLCDLTSVKQKYNESVVDYIKRFRDVRNRCYTLSITDRDLAGLAFNGLVAPLREKLDGQQFLDVSQLMQRALAQESRVKDDKKFVRPFDKKPNVNVVDYSDVSDSEEEGDHDIYVAEWSWTNKNKPFVCSNLMPTPRKDRQSEVKYSFDVAKCDKIFDYLLQEKQIRLPKGHVIPSQEELKRRAYCKWHDSHSHSTNDCNVFQRQVQSAIDEGRLKFTDGSKMKLDHDPFPVNTINFNDKKVLIRSEQAESTKGKEVVIGKPRPKMMVPKKPEVGVWKENKSGASTSKAPRKTKVTFNMLLEKYEKQGEKREGKRVKIEERTSEVITIKIGSHDVPIPFGDGVGKSPNKKSEAGTSSSQSAGLTRPSGRSDRGHVAGLIGPSSRSDRRPDDGLTDASGRSDRAPHVGLTDASGRSDRWSAAGQTGLQRRFDERAAKGDVRASSSSNKVNRGYYLPPGTEPNPGWMPKDLTATQKRRLQRLRAQKLREKKAEEQRDKRFNELRPPPVWRPKSIEKAKPIDVEKKEEQSVDEGESSPKEDMDINMVCMLPMEFCAMDEAEVAQFSLGPKDAVFEKPDESNRHMKPLYLKGHVDGKPVSRMLVDGGAAVNLMPYSLFKKLGREDDELKKTKMILNGFNGEPTEARGIFSAELTVGNKTLPTAFFIVDVQDFDEVEKLGQGFTSADPLEEVDIGDGTKPRPTFLNKNMKADYKVKDGMEGHIADLRLAFERMRRYGLKMNPLKCAFGVSAGKFLGFMVHERGVEIDPKKIEKIRDFKAPRCKKEVQKLLDKVNYLRRFISNLAGKIDAFVPILRLKKEADFTWGTKQQDAFEELKRYLSTPPVVRAPKAGKPFRLYIASEDKVIGAVLTQEEDGKEYIITYLSRRLLDAETRHIARHDNSRANDLAQQASGYNVKKGLFLILEEPVLDFKSLCEIGKIGDQGRSDRRCTAGLTGDQGRSDRPHAAGLTGDPERSDRPCVAGLTGVGQKAGGHASINLEAELIENSDICAQNAEEDWRIPLIQYLKDPTLKGHRFVLVATDYFTKWAEAVPLKNMTHTEANGQAESSNKTLLKLVKKKIEEHPKRWHEVLSEALWAHRISKHGATKVTPFELVYGQEAVLPVEVNLDSLRYIKQDDLSSEDYKTLMGDNLDEVIDKRLKALDEIEKEKKRVAKAYNKRVKAKLFQVGDLVWKTILPSGTRSKEFGKWSPSWEGPYRICGIVRGNAYFLETLQGERFQRAITGKYLKKYFPSVWQDA

SEQ ID NO: 128295 - protein, 381 aa, Oryza sativa
  Clone ID: PAT_MRT4530_30662C.1.pep
MAASAAAAAAVSQALRDRDVLDAVGTSAAALSLAGSSFIVLCYLLFRELRKFSFKLVYFLAVSVSGSDLELLGFGGFWVREASLVICVTALGCDLELGSAKWGSEGSAVFISPPIEKYWGFTPEPCEDVYVIDPYFNVASDVPISIHVGNCWEITFRATVFLDWKYSWGPSNAFYCFAHDYSAHFFCVASFLWTTTIAFTLHRTVVKHKTDVEEFGSIFHLYVLHLVTFYLPLWGAILYNGYTYFQVNRMINNATRMAVGISDRSIQSDVRADKKAFNRWGYYPLILIGSWAFATINRVHDFANPGHKIFWLSILDVGFAGLMGLFNSIAYGLNSSVRRAIAERLDMYLPERFKRSLPTLTRFKSQQENELTSLIVDASNT

SEQ ID NO: 128296 - protein, 917 aa, Oryza sativa
  unsure (1)..(917): unsure at all Xaa locations
  Clone ID: PAT_MRT4530_30663C.1.pep
MWYTSDQSKTIRIAVPAVMEILGVTAGLTRPPGRSNRSHAAGLTEPLGRSDRRPDSGPTEASGRSDRVPNVGLTGASGRRIAKGDLRTSSSSNKVNRGHYLPPGTEPNPRWMPKDLTATQKRRLQRLRAQELREKKAEEHRDKRFNKLRPPPIWRPKSIEKARPIDVEEKEEQSVAKSESSPKEDMDNNMPLYLKGHVDGKPVSMMLVDGGAAVNLMPYSLFKKLGREDDELKKRFSMASTASLEWLQKRVQEYRSTKNDIGETVEDFDEVEKLGQGFTSADPLEEVDIGDGTKPRPTFVNKNMRADYKVKIIELLKEYVDCFAWEYHEMPGLSRELVEHRLPIKPGFRPYKQPPRHFNLLLYDRVKEEIDRLLKAGFIRPCRYAEWVSSIVPVEKKGSGKIRVCIDFRDLNKATPKDEYPMPIADMMINDASGHKGIILEIYIDDIVVKSDSMKGHIADLRLAFERMRRYGLKMNPLKCAFGVSAGKFLGFMVHERGVEIDPKKIEKIRDFKALTCKKEVQKLLGKVNYLRRFISNLAGKIDAFVPILRLKKEADFTWGAKQQEAFEELKRYLSTPPVVLAPKARKPFRLYIASEDKVIGAVLTQEEDGEEYIITYLSRRLLDAETRHIARRDNSRANDLAQQASGYNVKKGLFLILEEPVLDFKFLCEIGKTRDHGRSDRRCTVGLTGDQGRSDRPYAAGLTGDPERSDRPYVAGYXEDWRIPLIQYXKDSTLKVDRKIRRQAFKYTLLDGDLYRRNIDGVLLKCLDEDQSKVAMGEGHRFVLVATDYFTKWAEAMPLKNMTHTEANGQAESSNKTLLKLVKKKIEEYLKRWHEVLSEALWTHRISKHGATKVTPFELVYGQEAVLLVEVNLGSLRYIKQDDLSSEDYNMLMGDNLDEVIDKRLCHDRKSPNRRS

SEQ ID NO: 128297 - protein, 123 aa, Oryza sativa
  Clone ID: PAT_MRT4530_30664C.1.pep
MADKQMASLIIKANLECEKCCKKIQKVLNKLKDKEKIINIVYENSNNRVIISGHFKPEELAHKLRCKACGVIKDIEFGKLAEAKKEEKKPDQAKKEEKKQPEEKNLRRESEEEKRREKNRGSK

SEQ ID NO: 128298 - protein, 67 aa, Oryza sativa
  Clone ID: PAT_MRT4530_30665C.1.pep
PQMQNSVHMHWQLIHSNCTPVHINQNTIIWIKNSDTIYLTYYLHCPWLNSCLVLPAFSGEGDRDGVP

SEQ ID NO: 128299 - protein, 1899 aa, Oryza sativa
  Clone ID: PAT_MRT4530_30666C.1.pep
MTKPPSKTEVEPSNMIPVTLDDFEGEDHQLDATFEGKFDEFLRVKFGPLLADHMVKNKASSTANQPPIGQTEGTVYTAGPTGQTAGQTGYYPGSQTGTQAGPTAPLDAGQIGHWAGQTSAIIPIQGIDPMTNASYLYHLRTFDSPVSTATSSPQVPPHVPNAYNDVARGYPPDTRQGQYNNIAPQTQPIRPPNPPPNQQGPNNMEDIISDIMRNRFGIKTRNRARTYKKPYPDYYDNVPFPRNYRVPEFAKFNGEDGKTTWEHVGQFLAQCGEANSDTFKLRLFSLSLSGNAFTWFTSLPAKSIHTWAQLEEKFHDYFYTGETELRLCDLTSVKQKYNESVIDYIKRFRDVRNRCYTLNITDRDLAGLAFNGLIAPLRERLDGQEFLDVSQLMQRALAQESRVKDNKKFARPFDKKPNVNVVDYPEASDSEEEGDHDIYVAEWSWTNKNKPFVCSNLMPTPRKIGKQAESIKGKEVVIGEPRPKMIVPKKPEVGVWKENKSGASTSKAPRKTKVTFDMLLEKYERQGGEKIRNRGKRPRSPPRERFGHSPRRSHSPSYHHPQDMSWGPYPMPPPGYPYPYFMPWGATPPMYNYMPPMQFNQGWGGPRRPIHERLSSPNNSRFYGKNRANEEKREGKRVKMEERTSEVITIKVGSHDVPIPSGDGVGVSPNKKSEAGTSSSQSAGLTRPSGWSDRGHTAGRSDHAPHVGLTGASGRSDRWSTAGLTGLQRRFDERAAIGDVRASSSSNKINRGHYLPPGTEPNPRWMPKDLTATQKRRLQRLRAQELREKKAEEQRDKRFNELRPPLVWRPKSIEKEKPIDVEEKEEQSVNKGESSPKEDMDINMVCMLSMVFYAMDKAEVAQLSLGPKDVVFEKPDESNRHMKPLYLKGHVDGKPVSRMLVDGGAAVNLMPYSLFKKLEREDDELKKTNMILNGFNGEPTEAKGIFSAELTVGNKTLPTAFFIVDVQEANLEWLQKRVQEYRSTKNDIGETVEDFEEIEKLGKGFTSADPLEEVDIGDGTKPRPTFVNKNMRADYKVKVIELLKEYVDCFAWEYHEMPGLSRELVEHRLPIKPGFRPYKQPPRRFNHLLYDRVKKEIDRLLKAGFIRPCRYAEWVSSIVPVEKKGSGKIRVCIDFRDLNKATPKDEYPMPIADMMINDASGHKVISFLDGNAGYNQIFMAEEDMYKTAFRCPGFVGLFEWVLMTFGLKNAGATYQRAMNLIFHDLLGIILEIYIDDIVVKSDGMEGHIADLRLAFERMRRYGLKMNPLKCAFGVSAGKFLGFMVHERGVEIDPKKIEKIRDFKAPTCKKEVQKLLGKVNYLRRFISNLAGKIDAFVPILRLKKEADFTWGEKQQEAFEELKRYLSTPPVVRALKAGKPFRLYIASEDKVIGAVLTQEEDGKEYIITYLSRRLLDAETRSILSGRIGKWAYALIEYDLAYEPLKSMKGQIVCDFIVDHHIDIAHEGEVCLVEVIPWKIYFDGSSCKEGQGIGVVLFSPNGMCYEASVRLEYYCTNNQAEYNALLFGLQVMEMVGAKHVEAFGDSELVVQQVAGVYKCLDGSLNRYLDSCLDIIANFDNFAIRHIARHNNSRANDLAQQASGYNVKKGLFLILEEPVLDFKSLCEISKTGDQGWSDRHCTAGLIGDQGRSDRGCEACQRFGNVQLAPAAVLNPIIKPWPFRGWALDFIGQIYPLSSKGHRFVLVTTDYFTKWAEAVLLKNMTHTEEHPKRWHEVLSEALRAHRISKLGATKVTPFELVYGQEAVLPVEVNLGSLRYIKQDDLSSEDYKTLMGDNLDEVIDKRLKALEEIEKEKKRVAKAYNKRVKAKLFQVGDLVWKTILPLGTRSKEFGKWSPSWEGPYRVCGIVRGNAYFLETLQGEHFQRAINGKYLKKYFPSVWQDA

SEQ ID NO: 128300 - protein, 294 aa, Oryza sativa
  Clone ID: PAT_MRT4530_30667C.1.pep
MPKWIPKGMDPNSACRVVVRVVAYVEYMDNGSQDYHVSSSYKWVVDKDTQVRLTMFLPEMLPQKRFPQNRHAISFIGSLREVELEDYVSPYYSVAMFRTACSTTVPPMPDKSLWDKVDTGFKMWPPILKRSAGRPRTRKFIGVEEGGSGKKRRRCKRCHGFGHLQKTCNEPVYDPDASPPAPPKPKRVRKKKSKPEQVPTCGNNTMPPTAIADSADQATSTAAPAADQAHAAAADQALAGATAAADQAPAQVAMQVDDSPGPVTRSRSVASPVHASPFKANKRKAVVTRTAKKL

SEQ ID NO: 128301 - protein, 613 aa, Oryza sativa
  unsure (1)..(613): unsure at all Xaa locations
  Clone ID: PAT_MRT4530_30668C.1.pep
MTKPPSSKVEVEPAYVIPITLDDFEGEDRKSMEEYIKELTQEALMRASTRTRQGVIIKPRPRPRLAPNXYYPGGQTGTQAGLTAPLDIGXTGPWTGXYPPDTRQGQYNHIASQTQPIRPPNTPPNQHRPDNMEEIISGIIMDKFRIETRNRAKVYQKSYPDYYDNVLFAXNYRVPEFTKFSGEDXEPHESWVKDNKKIVRPYEKRPNVNMIDYLEASDSEDKGDHDMYVAEWSWTNKNKPFVCSNLMPTPRKDRQSEVQSAIDEGRLKFTDGSKMKLDHDPFPVNIINFNDKKVLIRPEQAESTKEKGIIIGESRPKMIVPKKPEVGVLKENKSEASTSKAPRKTKVTLDMLLEKYEKQGGERACNNGKRPRSPPRERFGHSPRWLHSPPYHHSQDIPWGPYPMPPLGYPYPYYMPWGATPPMFNHMPPIQFNQRWGGPRRPIHEHLSSPNNGWFYGKSRASEERREGKRIKVEARTSESAGLTGPSSRSDRSHTAGLTGPSGRSDCRPDNGPTDASGRSDRPPNVGLTGASGRSDRWSTSGLTGLHRRFDKRFANGDVRASSSSIRPNRGYYLPPGTDPKPSCHAQKFSPNLQTILCIKSLSRTSQGTQNDK

SEQ ID NO: 128302 - protein, 40 aa, Oryza sativa
  Clone ID: PAT_MRT4530_30669C.1.pep
RLYSESKICIGSPPFNWSTGTRTGCNHKRLPCLARTLHMK

SEQ ID NO: 128303 - protein, 942 aa, Oryza sativa
  unsure (1)..(942): unsure at all Xaa locations
  Clone ID: PAT_MRT4530_3066C.1.pep
RRLPPPPAIVXIYAAAVGRRHDHRFLWRCLCXWCAYAGVSLTGSVLVIYDFTTGQPPSPPTGVPAYTVGWSHHRXWASSSTLPACLRRRRLVSSPIRLVGHTTVHGRPRLHRPXAFIAADWCLRLHGWPIMPPLLGVYDFTTSLPPSPPTGVIAYTVGWSHHRXWASSSTLPACLRRRRLVSSPIRLVGHTTVHGRPRLHRPXAFAAADWCFRLHGWPIMPPLLXVYDFTTGLPPPPPTGVSACTAGLLCRSCWCSTTSPPARRRRRRLVSSPIRSVGHTTVDGHRHLHRRPASVAADWCPRLYGRLVTPPFMGVHVFTDRLXPSPTGVSACTAGLLCRRCWMSTSSPLAHLRCRRLVFPLTRLAYYAAVSGHLRFHRRPPSSPPTGVFIVIDGRLCSHIGHFCHHQGEYYKAKFFLFLCLTTPIGLPLSSEIQIQICIKGIHGFKLISYAPGMDQSEHHHRLASTAADWCFRLHGWPTMLPLLGVYVFTDRPPRPLPTGVSACTAGLYAAVVGRLRLHRPACLRRRRLVFLPARLAFMPPLLGVYVFTDRLXPRRRRLVFPPARLAFMPPLLGVYIFTDRLAFAAADWCFRLHGWPLXPPLLGVYVFTDRXPSPPPTGVSACTAGLYAAVXWASTSSPTGLPSPPPTGVSACTAGLYAAVVGRLRLYRPACLRRCRLVFPPARLAFMPPLLGVYVFTDRTPRPPPTGASACTAGLYAAVVGRLRLHRPAAASAADWCHRLHGWPVITPTDAIFFTAGYIAVTTNRHQYLQHKLPTFAMAADWFLHFHGCMILPVLIGLTIFIAGLPSPLHLVYTATTTDGHHRLPPPTRXLPVCFCCRRLVFTSSRQHNFVIMVERLHLYYLRHWQTLLLLLHKFCYITNHDVVVNLDISACDAVLFNYNKWLSNIHDFYLDIFNTYLQSSDDYSTTRSYNSRLYVQLFPN

SEQ ID NO: 128304 - protein, 78 aa, Oryza sativa
  Clone ID: PAT_MRT4530_30670C.1.pep
SDCFHLEPFADGARFEVPLLYLGTAVFGELLTMSREEFGFAGDDGRITLPCDASVMEYVLCLLRRDASEEVERAFLSS

SEQ ID NO: 128305 - protein, 42 aa, Oryza sativa
  Clone ID: PAT_MRT4530_30671C.1.pep
VVSAVNRHSMLTSTIPDLCGGHLVPGYEMVVLTFFVLLSISE

SEQ ID NO: 128306 - protein, 627 aa, Oryza sativa
  Clone ID: PAT_MRT4530_30672C.1.pep
MNPLKCAFGVSVGKFLRFMVHERGVEIDPKKIEKIRDFKAPTCKKEVEKLLSKVNYLRRFISNLAVDHHIDVAYEGEVCLVEVIPWKIYFDGSSCKEGQGIGVVLFSPNGMCYEASVCLEYYYTNNQAEYNALLFGLQVMEMVGVGDQRRSDRRCMAGLTGDQGRSDRPHSAGLTGDLERSDRPCVAGLTGFGQNAGGHASIDLEAELIKNSGICAQDTEEDWRIPLIQYLKDPTLKVDRKIRRQVFKYTLLDEDLYRRNIDGVLLKCLDEDQSKVAMGEVHEGICGTHQSAHKMNWLLRRAGFYWPRMIDDCFKYYRGCEACQQFGNVQLAPAAVLNPIIKPWPFRGWALDFIGQIYSSSSKGHRFVLVATDYFTKWAEAVPLKNMTHTEVIDFILKHIIHRFGIPQTLTTDQGASFMSKEVKSFTKSYGIKLLSSSPYYAQANGQAESSNKTLLKLVKKKIEEHPKRWHEVLSEALWAHRISKHGATKVTPFELVYGQEAVLPVEVNLGSLRYIKQDDLSSEDYKTLMGDNLDEVIDKRLKALEEIEKEKKRVAKAYNKRVKAKLFQVGDLVWKTISPLGTRSKEFGKWSPSWEGPYRICGIVRGNAYFRVSFGFYPELDVEEDL

SEQ ID NO: 128307 - protein, 1802 aa, Oryza sativa
  unsure (1)..(1802): unsure at all Xaa locations
  Clone ID: PAT_MRT4530_30673C.1.pep
MKKPSSKMEVEPSNVMPVTLDDFEGEDRKAMEEYINELTREALMRATTRTRQGVIIKPGPRPKLAPDVVSNDEVSQSIQQQIASTIDSSMANFKDRLDVMFKDKVDGFLRSRLGSFMDDYTLKDKAYTTVDQSPIDPMVSKTDGTAFTVGPTGPDGRSDRNIAVGPTGQTAGQTGYYPSGQTGSQAGPTAHHDAGQTGPWAGQTGAIVPIQGIDPMTNASYLYHFRTFDPPVSTATSNPQVPPHIPNAYNDVSRGYPPDTRQGQYNHIAPQTQPIRPPNPPPNPQGPNNMEDMISDIMRNRFGIETRNRARAYKKPYPNYYNNVPFPRNYRVPEFAKNLVVRMRFRDVRNRCYTLNITDRDLAGLAFNGLVAPLREKLDGQQFLDISQLMQRALAQESRVKDNKKFARPFDKKPNVNVVDYPEASDSEEEGDHDIYVAQWSWTNKNKPFVCSNLKPTPRKIDKVQSAIDEGRLKFTDGSKMKLDHDPFPVNTINFNDKKVLIRPEQAESTKGKEVVIGEPRPKMVVPKKLEVGVWKENRSGASTSKAPRKTKVTFDMLLEKYEKQGGEKIRNKGKRLRSPRRERFVHSPRRSHSPSYHRPQDMSWGSYPMPPPGYPYPYFMPWGATPPMYNHMPPMQFNQGWGGPRRPIHERLTSPNNSRFYGKNRANEEKREGKRVKVEERTSEVITIKVGSHDVPIPSGDGVGESPNKKSEAGASFSQSAGLTRPPGRSDRSHAAGWSDRVPNVGLTGASGRLDRWSTAGLTGLQRQFDRRIAKGGVEASSSPNKVNRGHYLPPGTEPNPRWMPKDLTATQKRRLQRLRAQELREKKAEEQRDKRFNELRPPLVWRPKSIEKAKPIDVEEKEEQSVDKSESSPKEDMDINMVCMLPMEFCAMDEAEVAQFSLGPKDAVFEKPDESNRHMKPLYLKGHVDGRPVSRMLVDGGAAVNLIPYSLFKKLEREDDELKKTNMILNGFNGEPTEARGIFSAELTVGNKTLPTAFFIVDVQVKEEIDRLLKAGFIRPCRYVEWVSSIVLVEKKESGKIRVCIDFRDLNKATPKDEYPMPIADMMINDASGHKVISFLDGNAGYNQIFMAEEDMYKTAFSCPGFVGLFVLVVMTFGLKNAGATYQRAMNLIFHDLLGIILEIYIDDIVVKSDGMEGHIADLRLAFERMRRYGLKMNPLKCAFGVSAGKFLGFMVHERGVEIDPKKIEKIRDFKAPSCKKEVQKLLGKVNYLRRFISNLAGKIDAFVPILRLKKEADFTWGAKQQEAFEELKRYLSTPPVVRAPKAGKPFRLYIASEDKVIGAVLTQEEDGKEYIITYLSRRLLDVETSTCIVTCQADVIKHMLQRPILSGRIGKWAYALIEYDLAYEPLKSIRGQIVCDFIIDHHIDVAYEGEKSRCLILNLCAKLAKLETRGSLTGDQGRSDRPYAAGLTGDPERSDRLCVAGLTGFGQSAGGHASIDLEAELIENSDICAQDTEEDWRIPLIQYLKDPTLKVDRKIRWQAFKYTLLDGVLYRRNIDGVLLKCLDEDQSKVAMGEVHEGICGTHQSAHKMNWLLRRAGFYWPKMIDDCFKYYRDCEACQRFGNVQLAPAAVLNPIIKPWPFRGWALDFISQIYPSSSKGHRFMLVATDYFTKWAEAVPLKNMTHTEANGQAESSNKTLLKLVKKKIEEHPKRWHEVNLGSLRYIKQDDLSSEDYKMLMGDNLDEVIDKRLKALEEIEKEKKRVAKAYNKRVKAKLFQVGDLVWKTILPLGTRSKEFGKXSPSWEGPYRVCGIVRGNTYFLETLQGERFQRAINGKYL

SEQ ID NO: 128308 - protein, 334 aa, Oryza sativa
  Clone ID: PAT_MRT4530_30674C.1.pep
MVHERGVEIDPKKIEKIRDFKAPTCKKEVQKLLGKVNYLRRFISNLVGKIDAFVPILRLKKEADFTWGAKQQEAFEELKRYLSTPPVVRVPKAGKPFRLYIASEDKVIGAVLTQEEDGKEYIITYLSRRLLDAETRGCEACQRFGNVQLAPAAVLNPIIKPWPFRGWALDFIGQIYPSSSKGHRFVLVATDYFTKWAEAVPLKNMTHTEANGQAESSNKTLLKLVKKKIEEHPKRWHEVLSEALWAHRISKHGATKVTPFELVYGQEAVLPVETLMGDNLDEVIDRRLKALEEIEKEKKRVAKAYNKRVKAKLFQVGNLVWKTILPLGTRSKEF

SEQ ID NO: 128309 - protein, 65 aa, Oryza sativa
  unsure (1)..(65): unsure at all Xaa locations
  Clone ID: PAT_MRT4530_30675C.1.pep
RCXSXFCXFFFSCLXGFXRVXGXFLXVXCLSLCVXXXXRSWPCSNHFSPSXKKKKKKKKKKKKKK

SEQ ID NO: 128310 - protein, 64 aa, Oryza sativa
  Clone ID: PAT_MRT4530_30676C.1.pep
AASGQRGCAAPRGTQPPPQGRPGERKRAGVENPPTQTTDRSPPHQNGGDGAGGGGVAGQEPKLG

SEQ ID NO: 128311 - protein, 68 aa, Oryza sativa
  Clone ID: PAT_MRT4530_30677C.1.pep
VGRLGKLGIPFSIMGEIITGKGALGKLKIKTGVPIKKIKPFVLLKVVFFFMAAINPGTGKFVSDDDKK

SEQ ID NO: 128312 - protein, 1598 aa, Oryza sativa
  unsure (1)..(1598): unsure at all Xaa locations
  Clone ID: PAT_MRT4530_30678C.1.pep
MTKPPSKTEVEPSNVMPVTLDDFEGEDRKAMEEYINELTREALMRATTRTRQGVIIKPGPRPKLAPDVVSNDEVSQSIQQQIASTIDSSMANFKDRFDVMFKDKVDGFLRSRLGSFMDDYTLKDKAYTTVDQPPIDTMGSKTDGTAFTVGPTGPDSQSDRDIAVGSTGQTAGQTGYYPSGQTGFQAGPTAHHDAGQTGPWAGQTGAIVPIQGIDPMTNANYLYHFRTFDPPVSTATXNRARAYKKPYPDYYDNVPFPRNYRVPEFAKFSVAPLREKLDGQQFFDVSQLMQRALAQESRVKDNKKFARPFDKRPNVNVVDYPEASDNEEEGDHDIYVVEWSWTNKNKPFVCSNLMPTPRKDRQSEVKYSFDVAKCDKIFDYLLQEKQIRLPKGHVIPLQEELKRRAYCKWHDSHSHSTNDCNVFRRQVQLAIDEGRLKFTDGSKMKLDHDPFPVNTINFNDKKVLIRPEQAESTKGKEVVIGEPRSKMVVPKKAEVGVWKENKSGASTSKAPRKTKLTFNMLLEKYERQGGEKIRNKGKRPRSPPRERFGHSPRRSHSPSYHHPQDMSWGPYSMPPPEKREGKRVKVEERTSEVITIKVGSHDVPIPSGDGVGKSPSKKSEAGTSSSQTTGLTRPSGQSDRGHVAEPNPRWMPEDLTATQKRRLQRLRAQELREKKAEEQRDKRFNELLPPPIWRPKSIEKAKPIDVEEKEEQSVDKSESSPKKDMDINMVCMLPMEFCAMDEAEVAQFSLGPKDAVFEKPDESNRHMKPLYLKGYVDGKPVSRMLVDGGAAVNLMPYSLFKKLGCEDDELKKTNMILNGFNGEPTEARGIFSAELTVGNKTLPTAFFIVDVQVSKEDNLEWLQKRVQEYRSTKNDIGETVEDFDEVEKLGQGFTSADPLEEVDIGDGTKPRLTFVDKNMRADYKVKIIELLKEYVDCFAWKYHEMPGLSLGFQHNPGEKKGSGKIRVCIDFRDLNKATPKDEYPMPIADMMINDASGHKVISFLDGNAGYNQIFMAEEDMYKTAFRWPGFVGLFEWVVMTFGLKNAGATYQRAMNLIFHDLLGIILEIYIDDIVVKSDGMEGHIADLRLAFERMRRYGLKMNPLKCAFGVSAGKFLGFMVHERGVEIDPKKIEKIRDFKAPTCKKEVQKLLGKLNYLRRFISNLAGKIDAFVPILRLKKEADFTWGAKQQEAFEELKRYLSTPPVVRAPKAGMPFRLYIASEDKVIGAVLMQEEDGKEYIITYLSRRLLDAETRHIARRDNSRANDLAQQASGYNVKKGLFLILEEPVLDFKSSCEIGKTGDQGRSDRRCMAGLTGDQGRSDRLYAAGLTGDPERGCEACQWFGNVQLAPAAVLNPIIKPWPFRGWALDFIGQIYPSSSKGHRFVLVATDYFTKWAEAVPLKNMTHTEANGQAESSNKTLLMLVKKKIEEHPKRWHEVFSEALWAHRISKHGATKVTPFELVYGQEAVLPVEVNLGSLRYIKQDDLSSEDYKMLMGDNLDEVIDKRLKALEDIEKEKKRVAKAYNKRVKAKLFQVGDLVWKTILPLGTRSKEFGKWSPSWEGPYRVCGIVRGNAYFLETLQGERFQRAINGKYLKKYF

SEQ ID NO: 128313 - protein, 228 aa, Oryza sativa
  Clone ID: PAT_MRT4530_30679C.1.pep
MAFGDGMAKGVALWGRATAPQPMGWWWAAGGAREIEIGRRRGDRNALTYDNNGMPIQANGRVQKIADPFDYGAGFVNPVMAADPGLIYDITASDYLKFFNCMGGLGSGDNCTTAKGSLTDLNLPSIAIPNLRTFQAMTRTVTNVGQVNAVYKAFFQAPAGVEMAVEPPVLVFNKNRRVQSFRVTFKATRKVQGDYRFGSLAWHDGGSHWVRIPIAVRIVIEEIYSKIS

SEQ ID NO: 128314 - protein, 45 aa, Oryza sativa
  Clone ID: PAT_MRT4530_3067C.1.pep
IYELEISALYNVRLVQSVHITCIIKKELKHNSSTMKLLSEIYGRL

SEQ ID NO: 128315 - protein, 212 aa, Oryza sativa
  Clone ID: PAT_MRT4530_30680C.1.pep
MPHPNIAASCSPSCLLLAVAVTFFSATASISHGAAHHARRVPAPPAACVARERDALLAFKQRVTARDPASAISSWRRGEAAADCCQWDGVECDSRTGRVIGLDLANREFDGRTGVLDDQVSLVGDISRSLLSLEHLSDLQLGWNFLEGRTGRLPDFLGSFKRLESLGLTGIPFSGTVPPKLEIVLYWDNFSTLEIVFSHKGIHNVLRNQEKI

SEQ ID NO: 128316 - protein, 53 aa, Oryza sativa
  Clone ID: PAT_MRT4530_30681C.1.pep
MSSTPEALPFALVTHEDVYGHHRLGFPSGSGLLCCWAAGLWESEKLKKVLGAA

SEQ ID NO: 128317 - protein, 109 aa, Oryza sativa
  Clone ID: PAT_MRT4530_30682C.1.pep
MARRRILPLLLVLLLTVAVATSSASAYGADDGVTVMRRVLDTAAPAPAPGPAPGGAMANTTTSGYISYDALFADRVPCSLRGASYYNCHPGAEANPYTRGCSAITQCRG

SEQ ID NO: 128318 - protein, 394 aa, Oryza sativa
  Clone ID: PAT_MRT4530_30683C.1.pep
MAAAAASTVPQSSSTSSTPQNTISTHSTELVRGSHEFTVAGYSLQKRKGAGHSIRSGSFEVGGYSWAIRFYPAGSTKEEERHVSVYLELRSTVVEKVTARFSFHVHGASASSLHMRGSFDDYTPTSKSWGYPKFMEIETVESEYLINDCLTLLCDVEVVKTVKTGATISCFITVPPPAICRDLELLVGSKEGSDVTLQLEQSEYDAHRAVLAARSPVFSAQFFGPMADEDAAAAGSRRNVRIHDIKPAVFEAVLHFVYTDTLPPATTSWSASHRDKRPKLSDVAAASCSEEEVRVMIGERLAAADRFDLERMRLLCEDALWETIDVANAAATLRLADRHHCPQLKELCMEYIASAGVLAAVMTTEGFRELKLDCPSLLIEILENFGKRSEADEE

SEQ ID NO: 128319 - protein, 198 aa, Oryza sativa
  Clone ID: PAT_MRT4530_30684C.1.pep
MARMGGGRGQAARMTPRRSVDRLTVEFIDTNSSNHINRLINLRELVVVDGGDLTICFLHYVPPQSRDGQRPEDSLELYCPDAAPHLAHASIAFRVGQQEGNDGLLPLLERFKRDAALSALEIRTAGGGAVVDAAGGIHLGASVVLEDERMEVGLGMGRRLASRAVAASVSLAATAPSQTAAQSTPPVHAHRPFSRCPR

SEQ ID NO: 128320 - protein, 230 aa, Oryza sativa
  Clone ID: PAT_MRT4530_30685C.1.pep
MELATAAMGSLLSRLAELLSLEENQLQEGVRNRVRQFSRGLKTMDTTLRLVANIPRDHQLDEQVRLWAHDVRMLSYDLEDVVDTVLISLRVGSDPEQADLEMLMRLVAKMNDQLFNGSVEYGQMFSDAVAKQRLRYVATKHGAGNYTAVGHPTHDPYTKAMSTKLVGIDGPRDEVIEMLSMGDQSKLKIVSVFGFGGLGKTTLVKVIYDKLACLQVDSRGSPGTELEFAL

SEQ ID NO: 128321 - protein, 416 aa, Oryza sativa
  Clone ID: PAT_MRT4530_30686C.1.pep
MFTVYFSQKLSSLAKLFIQLQQSNPNPNPFEAEIVLVQSVGMAQWLQMQIANQIGIAGNYEFPFPTSFLWQQYRVLFPELPTENIFERETVTWRLIRLIPDYLSLPEFQSLQHYLTKDSRQYQLKLYQLAKKVADLFDQYLVYRPHWLVHWENDRLEIVQDEILTHANLKVKNTKDIWQNLSWQAILWRALINDIKLDCDESVFVTSHRAYLQEQYFNKLDNLTEIEKSKLPKRVFIFGISSLPATQLAVLKKLSEHCQIHLFFLNPSAEYWGDNVEDRVLEKLALKQKMTAKELEALFVQKNNQLLSMWGKQGRDFLAQILEQEPDQILDVFDACEGDSNLIKLKNAILSFDNPQQLLLASQDDSVQFHSCHSIMREVEVLHNRLLQMFAQDPTLAAKDIIVMSADINQYAPYIE

SEQ ID NO: 128322 - protein, 171 aa, Oryza sativa
  unsure (1)..(171): unsure at all Xaa locations
  Clone ID: PAT_MRT4530_30687C.1.pep
RHQRGGGADRRGPHVSGSRGERGAGKWGPRVSGSRLPVHRTDGPDRPRGRSDGRRRRRGAGFRRPTRGGGGGERGGIRNSNPGHLGRGRERERGGVGAGGAAHARAWPTXPGGGGDVGTAAVSAVVATWGGQPEEGDDPDRWGPPVGVPGREGGAAWAGPQGGGRARRRGL

SEQ ID NO: 128323 - protein, 327 aa, Oryza sativa
  Clone ID: PAT_MRT4530_30688C.1.pep
MASVCSAAAVSLDGAVAGATTTTAIEDIPGDVLSLVLRRLDDGASLAALGCACSAFRELAADAETWRGLCLATWPSLRDVDGLDECGGVTGGGGYRALFADAFPLPAEARGLVPSSASLLPARLVSAVDLHHGEVCLMSRVVETDASSEWFLGSPFRVDALVQEGFSAPAPITPAELTLSWILIDPATGRAVNASSRRPVSVDREWLAGETVARFTGVLGGGVVALDAAVTCDDRHGHVREVSLRAEDGDGGGVSGRGVLAAVAAAMEGARHGRGAEAAAWRRYEAFARGRAARKVKKARRDGAVDFFCSGVAAAAFVGVLSTLTLR

SEQ ID NO: 128324 - protein, 302 aa, Oryza sativa
  unsure (1)..(302): unsure at all Xaa locations
  Clone ID: PAT_MRT4530_30689C.1.pep
MSATQGERGAPASGAPGSAAQGCRSTGPTAQIAPGADRMGGGDPARLGSRPADRPRRWRWRRRARARVAGDGNRRRXAAARPGAARREREGNKGGGMPHQEWPAWRRTTXERRRRATGGQRQRADELRDALREAKREIRGRGVDHGERKPWPKAAVEVVLTGVQGDAGSGDGPRWRRGGRGNXTWPVGAGFRRPTRGGGGRERGGIRNSNPSHLGRGREWDRGGMGAGGAAHARAWPTWPGGGGDVGAAAVSAVVATWGGRPEEGDDPDRWGPPVGVPGREGREAWAGPQEGGRARRRGGLG

SEQ ID NO: 128325 - protein, 63 aa, Oryza sativa
  Clone ID: PAT_MRT4530_3068C.1.pep
MAQKYSCTDDHGDLWSVNPSSLGKERRRQQPRPQEHGSTTARNGSGDNDLNILGAWICRYRLL

SEQ ID NO: 128326 - protein, 37 aa, Oryza sativa
  Clone ID: PAT_MRT4530_30690C.1.pep
MVDHRRTVDEPPVLALPSPPGDRIRRQGGRGYRIRRA

SEQ ID NO: 128327 - protein, 152 aa, Oryza sativa
  unsure (1)..(152): unsure at all Xaa locations
  Clone ID: PAT_MRT4530_30691C.1.pep
LDASAKERESRTWPVGAGFRRPTRGGGGGEIGGIRNSNPGHLGRGRERERGGVGAGGTAHARAWPTXPGGGGDVGTAAVSAVVATWGGQPEEGDDPDRWGPPVGVPGREGGAAWAGPQGGGRARRRGGLGRRPKKRKRREKKKKRRKRFSLG

SEQ ID NO: 128328 - protein, 40 aa, Oryza sativa
  unsure (1)..(40): unsure at all Xaa locations
  Clone ID: PAT_MRT4530_30692C.1.pep
SQRVSLNSXXLLKITWLIIGCLHKLSIHTDTEPGTPSDYT

SEQ ID NO: 128329 - protein, 169 aa, Oryza sativa
  Clone ID: PAT_MRT4530_30693C.1.pep
RRLAAVGVAEAAAAGGSTARERWGARGSSARWGKREREWRWSLNRGGESQTWPVGAGFRRPTRGGGGRERGGIRNSNPSHLGRGREWDRGGMGAGGAAHARAWPTWPGGGGDVGAAAVSAVVATWGGRPEEGDDPDRWGPPVGVPGREGREAWAGPQEGGRARRRGGLG

SEQ ID NO: 128330 - protein, 75 aa, Oryza sativa
  Clone ID: PAT_MRT4530_30694C.1.pep
INVTTIHDIGYMLLEFGEIRTVPLHRVFRQKSPLASTACGEETRGRMEELSLSTPLIFKEVLLLLSVSLTAIMSI

SEQ ID NO: 128331 - protein, 376 aa, Oryza sativa
  unsure (1)..(376): unsure at all Xaa locations
  Clone ID: PAT_MRT4530_30695C.1.pep
RRGPHVSGARXVGLPWTGTTRMVHRRSTGSTARIGPGPIGQYGGDLARLGSAQSRPAGHGKGAGARARVAGDGNRRRGQRQRTAPRXAASAGGGGARGNGEGKERGGSPHRRGWXYRRRGAMEGGRQAADRVRDDLKNKKEKIREGERGHRRRERWPKAADMAALTVARREWRSGGEPRRRRGGRGGPWPREPDGGDGAVWRRAXRRLAAAGVAGAAAADGCTARERWRAREREEELGRGRXGRDSSADVGXGGGERGGIWNSNPGHLRRGRERERGGVGXGRRGTCAGVTDVARRRRGRGRGGGFGGGGXRGAGGRRKGTTPTGGAHLSASRGREGGAAWAGPQGGGRARWQGGLGRRPKKRKRREKKKKRRKRF

SEQ ID NO: 128332 - protein, 729 aa, Oryza sativa
  Clone ID: PAT_MRT4530_30696C.1.pep
MCWAVRPPVEGRSDRRCVNGLTGRSEFDPVSSGFEPSHVIPVTLDDFEGEDRKTVEEYINELTREALMRLTTRTRQGVIIKPGPRPKLAPDVARAALTAGPTGPDGRSDRDTAVGPTGQMAGRTGYYPVGPTGQMAGQTGYYPTGQTGSQAGPTAQYDASQTGPWAEKREGKRTMVEERTSEVITIKVGSHDVLIPSGDGVGKSPSKKSEAGTSSSQSTGLTRPSGRSDRGHVAGLTGISGQSDRRLDSGPTDASGRSDRAPSVGLTGTFGRSDRWSATGLTGLQRRFDGRAAKGDVRASSSSSKVNRGYYLPSGTEPNPMWMPKDLTATQKRRLQRLRAHELREKKAEEQRDKRFNELRPPPVWRPKSIEKAKPIDVEKKEEQSVDESESSPKEDMDINMVCMLPMEFCAMDEAEVAQLSLGPKDAVFEKPDESNRHMKPLYLKGHVDGKPVSRMLVDGGAAVNLMSYSLFKKLGREDDELKKTNVILNGFNGEPTEARGIFSAELTVGNKTLPTAFFIVDVQDGNAGYNQIFMAEEDMYKTAFRCLGFVGLFEWVVMTFGLKNAADLRLAFERMRRYGLKMNPLKCAFGVSAGKFLGFMVHERGVEIDPKKIEKIRDFKAPTCKTEVQKLLGKVNYLRRHIARRDNSRANDLAQQASGYNVKKGLFLILEEPVLDFRSLCEIGRIGDQGRSDRHCTAGLTGDQGRSDRPHAASLTGIPEWSDRPCVA

SEQ ID NO: 128333 - protein, 511 aa, Oryza sativa
  Clone ID: PAT_MRT4530_30697C.1.pep
MLLHILGSSTLAPARPSPLRQSGAGTGAATVRCASSSSNPSPSSSSSAAAAAGKQVAKVHSYGALDYERRAALRWSSLYRRIAVGHGGRPVGRTLGAWDEGERRLDKWELCRIARELRKFRRFNLALQVYDWMTERRDRFSLSSSDMAIQLDLIAKVRGVSHAEEYFEELPDPLKDKRTYGSLLNVYAQAMMKEKTESTFEQMRKKGFATDTLPFNVLMNFYVDAEEAEKVSILIDEMMERNVAFDVCTYNIWIKSCAAMQDADAMEQVFNQMIRDETVVANWTTYTTLASMHIKLGNSEKAEESLKEAEKRTTGREKKCFHYLMTLYSHLGKKEEVYRVWNWYKATFPTIHNLGYQEVLSALVRLGDIEGAELLYEEWASKSSSFDPKTMNILLAWYAREGFVTKAEQTLNRFVEKGGNPKPNTWEILGTAYLKDGQSSEALSCLEKATAVASPSKWRPRPTNVESLLANFKEKNDAESADRLMNVLRSRRCEENEEYKSLINTYAFQDT

SEQ ID NO: 128334 - protein, 1572 aa, Oryza sativa
  Clone ID: PAT_MRT4530_30698C.1.pep
MDPINGNDKKAEKYWGDVATEYNKTTPQNRWRSPKQAKERWHKLNTRTDLFQGCWLKAKRTYTSGYSDQMWIDMAHKFNEADNKKLGWFVLIDVWYACRDQPKWNAYNDALKRDLKGSRLITDVEETPRPIGQKAAKRAARESKGKSNDISDAEEIYKLDQVQSDIHTRRMKMMEMQEKLSSRQFSLSLSIFVGLHRTPYADTARVRHLFVDRVGWRLHITARRLGVAIVLVDLSQKVTNTIFGDSAREVLWPEYINELTREALMRASTRTRQGVIIKPGPRPKLAPGSVSNDEVSQSIQQQIESTIDSSMIIFKDQLDATFEGKFDEFLRVKFGPLLADHMVKNKASSTANQPPIGQTEGTVYTAGPTGQTAGQTGYYPGSQTGTQAGPTAPLDAGQIGHWAGQTSAIIPIQGIDPMTNASYLYHLRTFDSPVSTATSSPQVPPHVPNAYNDVARGYPPDTRQGQYNNIAPQTQPIRPPNPPPNQQGPNNMEDIISDIMRNRFGIKTRNRARTYKKPYPDYYDNVPFPRNYRVPEFAKFNGEDGKTTWEHVGQFLAQCGEANSDTFKLRLFSLSLSGNAFTWFTSLPAKSIHTWAQLEEKFHDYFYTGETELRLCDLTSVKQKYNESVIDYIKRFRDVRNRCYTLNITDRDLAGLAFNGLIAPLRERLDGQEFLDVSQLMQRALAQESRVKDNKKFARPFDKKPNVNVVDYPEASDSEEEGDHDIYVAEWSWTNKNKPFVCSNLMPTPRKIGKVQSAIDEGRLKFTNGSKMKLDDDPFPVNTINFNDKKVLIRPEQAESTKGKEVVIGEPRPKMIVPKKPEVGVWKENKSGASTSKAPRKTKVTFDMLLEKYERQGGEKIRNRGKRPRSPPRERFGHSPRRSHSPSYHHPQDMSWGPYPKPPPGYPYPYFKPWGATPPMYNYMPPMQFNQGWGGPRRPIHERLSSPNNSRFYGKNRANEEKREGKRVKMEERTSEVITIKVGSHDVPIPSGDGVGVSPNKKSEAGTSSSQSAGLTRPSGWSDRGHTAGRSDHAPHVGLTGASGRSDRWSTAGLTGLQRRFDERAAIGDVRASSSSNKINRGHYLPPGTEPNPRWMPKDLTATQKRRLQRLRAQELREKKAEEQRDKRFNELRPPLVWRPKSIEKEKPIDVEEKEEQSVNKGESSPKEDMDINMVCMLSMVFYAMDKAEVAQLSLGPKDVVFEKPDESNRHMKPLYLKGHVDGKPVSRMLVDGGAAVNLMPYSLFKKLEREDDELKKTNMILNGFNGEPTEAKGIFSAELTVGNKTLPTAFFIVDVQEANLEWLQKRVQEYRSTKNDIGETVEDFEEIEKLGKGFTSADPLEEVDIGDGTKPRPTFVNKNMRADYKVKVIELLKEYVDCFAWEYHEMPGLSRELVEHRLPIKPGFRPYKQPPRRFNHLLYDRVKKEIDRLLKAGFIRPCRYAEWVSSIVPVEKKGSGKIRVCIDFRDLNKATPKDEYPMPIADMMINDASGHKVISFLDGNAGYNQIFMAEEDMYKTAFRCPGFVGLFEWVLMTFGLKNAGATYQRAMNLIFHDLLGIILEIYIDDIVVKSD

SEQ ID NO: 128335 - protein, 1489 aa, Oryza sativa
  Clone ID: PAT_MRT4530_30699C.1.pep
MTKPPSKTEVEPSNMIPVTLDDFEGEDRKAMEEYINELTREALMRASTRTRQGVIIKPGPRPKLAPDLVSNGEITQSIQQQVASTIDSSIIAFKDKLDATFEGKFDEFLRVKFGPLMADYMSKDKASTTANQPPIDQTGSRTDGAAHTVGPTGPDDRSDRDLAVGPTGQTAGQTGYYPRGQTRTQAGLTAPLDASQTGPWAGQTDAIIPIQGIDLMTNASYLYHLRTFDPSVSTAANNPQVPPHVPNAYNDVARGYPPDTRQGQYNHIAPQTQPIRPPNPPPNQHGPNNMEDIISEIIRNRFGIETRNRARVYKKPYPDYYDNVSFPRNYRVPEFTKFSGEDETELRLCDLISVKQKYNEPVIDYIKRFRDVRNRCYSLNITDRDLAGLAFNGLIAPLRERLDGQQFLDVSQLMQRALAQESRVKDNKKLLRSYDKKPNVMIDYPEASDSEEEGDHDIYVAEWSWTNKNKPFVCSNLMLTPRKDRQSEVKYSFDVAKCDKIFDYLLQEKQIRLPKGHVIPSQEELKRRAYCKWHDSHSHSTNDCNVFRRQVQSAIDEGRLKFTDGSKMKLDHDPFPVNTINFNDKKVLIRPEQAESTKGKGVVIGEPRPKMIVPKKPEIGVWKENKSEASTSKAPRKTKVTFDMLLEKYEKQGDMSWGSYSMPPPGYPYPYYIPWGATPPMFNHMPPMQFNQGWGGPRRPIHERLSSPHNGRFYGRNRANEEKREGKRIKVEARTSEVITIKVGFHDVPIPSRDDVGESSSKRSEAGTSSSQSAGLTRPSGRSDRSHTAGLTGPSGRSDHRPDSGPTDASGRSNRAPNVGLTGASGQFDRWYTSGLTGLQRRFDRRFAKGDIGFIVFKQEMREKKAEEQRDKRFNELRPPPFCAMDEAGVAQFSLGPKDAVFEKPDESNRHMKPLYLKGHVDGKPVSRMLVDGGAAVNLMSYSLLKKLRREDDELKKTNMILNGFNGKPTEAKGIFSAELTVGNKMLPTAFFIVDVQEWLQKRVQEYRSTKNDIGETIEDFDEVEKLGQGFTSADPLKEVKIIELLKEYVDCFAWEYHEMPGLSRELVEHRLPIKPGFRPYKQPPRRFNPLLYDRVKEEIDRLLKAGFIRPCRYTEWVSSIVPVEKKGSGKIRVCIDFRDLNKATPKDEYLMPIADMMINDASGHKVISFLDGIILEIYIDDIVVKSDRMEGHIADLRLAFERMRRYGLKMNPLKCAFGVSAGKFLGFMVHERGVEIDPKKIEKIRDFKAPTCKKEVQKLLGKGRSDRHCVAGLTGDQGRSDRPHAAGLTGDPERSDRPCMEAEEDWRIPLIRYLKDPTLKVDRKIRRQAFKYTLLDEDLYRRNIDGVLLKCLDEDQSKVTMGEGHRFVLVATDYFTKWAEAVPLKNMTHTEANGQAESSNKTLLKLVKKKIEEYPKKWHEMLSEALWAHRIFKHGATKVTPFELVYGQEAVLPVEVNLGSLRYIKQDDLSSEDYKTLMGDNLDEVIDK

SEQ ID NO: 128336 - protein, 401 aa, Oryza sativa
  unsure (1)..(401): unsure at all Xaa locations
  Clone ID: PAT_MRT4530_3069C.1.pep
MAYYAAVFGRLRLHRRPASVTADWCPRLYGWLVTSPLLGVYVFTDRLPRRRRLMLPPARLAYYAVVVGKLRLHRPATTSPPTGVSTYTDGLLRHRWWASSLSPSTAYVATDWIQIQICIKGIHGFKLISYASGMDQPEHYHRLAAVAADWCPRLYGWVVTPPLLGIIVFTDRPPRPPPTGVLAYTVGWSHHRCWASLSSLTGRLVRRQLVSSPIRLVGYTADVGHLRLHRPAALSAADWCFRLDGWPIMPPMLGVYVFTDRPPRPSPTDVSAYTAGLLCHRLWASTSSPTGHLVRRRLVFPPARQAYYAADAGRLRLHRPACXAAVDWCLCLRGWPIMSPLLGVYVFTDRXPSPPPTGVSACTAGLLCRRLLGVYVFTVRLAFAAADXCLRLHGWPIVPPL

SEQ ID NO: 128337 - protein, 45 aa, Oryza sativa
  Clone ID: PAT_MRT4530_306C.1.pep
ASTRKPNVAATFIDEGMAWDLAGLLMPNKEAAGRPTSSATRAVRH

SEQ ID NO: 128338 - protein, 116 aa, Oryza sativa
  Clone ID: PAT_MRT4530_30700C.1.pep
MPADSDGESDPEKPLAKDTVITVTVNDDDDAFPLLPPGSCCPQARLATSEQKMKMGYISGFSHKTHNHKFNSNKNRNPMRKPKTAKRLASLSRGSRVSGQNSVLVPMPDGYPIDLA

SEQ ID NO: 128339 - protein, 1966 aa, Oryza sativa
  unsure (1)..(1966): unsure at all Xaa locations
  Clone ID: PAT_MRT4530_30701C.1.pep
MTKPPSKTEVEPSNMILVTLDDFEGEDRKTMEEYINELTREALMRASTRTRQGVIIKPGSHPKLAPDLVSNEEVTQSIQQQVASTIDSSMTVFKDKLDATFEGKFDEFLRFKFGPLMANYMSKDKASTTANQAPIDQTSSGTDGAAHTTGPTGPDGRSDRXLRHRSDRPNGRSDRVLPRRSDRDSGRSDRASGCRTFDPPVSTAANSSQVXPPHVPNAYNDVAMGNSARVYKKPYPDYYDNVPFPRNYRVPEFTKFSGEDGRTTWEHVGQFLAQCGEANSDTFKLRLFSLSLSGIAFTWFTSLPANSIHTWAQLEERFHDYFYTGETELRLCDLTSVKQKYNELVIDYIKRFRDVRNRCYSLNITDRDLAGLAFNGLIAPLRERLDGQQFLDVSQLMQRALAQESRVKDNKKIGRPYEKKPIVNLVDYPEASDSEDEGDHDIYVAEWSWTNKNKPFVCSNLMPIPRKDRQSEVQLAIDEGRLKFTDGSKMKLDHDPFLVNTINFNDKKVLIRPERAESTKGKGVIIGEPRPKMIVPKKPEVGVWKENKSEGSTSKTPRKTKVTLDMLLEKYEKQGGWGGPRRPIHERLSLPNNGRFYGKNRANEERREGKRIKVEARTSEVITIKVGSHDVPIPSGDEVGESSSKKSEAGRSNRRHDDGPTDASGRSDRPLNVGLTGASGRSDRWSTSGLTGLQRRFDRRFAKGDVRASSSSTKPNRGHYLPPGTEPKPRWMPKDLTATQRRRLQRLRAQEIREKKAEEQRDKRFNELRPPPVWRRKTIEKGEPVIVEKKEEQSVAKDESSPKVDMDINMVCMLPMEFCAMDEAEVAQFSLGPKDTVFEKPDESNRHMKPLYLKGHIDGKPVSRMLVDGGAAVNLMPYLLFKKLGRGDDELKKTNMILNGFNGEPTEAKGIFSAELTVGNKTLPTAFFIVDVQEANLEWLQKRVQEYRSTKNDIGETVEDFDEVEKLGQGFTSVDPLEEVDIGDGTKPMPTFVNKNMRADYKVKIIELLKEYVNCFAWEYHEMPGLSRELVEHWLPIKPAFRPYKQPPRRFNPLLYDRIKEEIDRLLKAGFIRPCRYAEWVSSIVPVEKKGNGKIRVCIDFRDLNKATPKDEYPMPIADMMINDASGHKVISFLDGNAGYNQIFMAEDDMYKTAFRCPGFVGLFEWVVMTFGLKNAGATYQRAMNLIFHDLLGIILEIYIDDIVVKSDGIEGHIADLRLAFERMRRYGLKMNPLKCAFGVSAGKFLGFMVHERGLEIDPKKIEKIRDLKVPTCKKEVQKLLASKIDAFVPILHLKKEADFTWGAKQQEAFEELKRYLSTPPVVRVPKAGKPFRLYIASEDKVIGAVLTQEEDGKEYIITYLSRRLLDAETRPILSGRIGKWAYALIEYDLAYEPLKYMKGQIVCDFIVDHHVDIAYEEEICLVEVIPWRIYFDGSSCKEGQGIGVVLFSTNGMCYEASVHLEYYCTNNQAEYNALLFGLQVMEIVGAKYVEAFGDSELVVQQVAGVYKCLDGWYLDSCLDIIANFDNFAIKHIARHDNCRANNLAQQASGYNVKKGLFLILEEPVLDFKSLCEIGKTGNQGQSNRHCMAGLTGDQGRSDRPHAVGLTGDPERSDRPCMAGLTGSGQSAGGHVSINLEAELIVNSDVCAQETEEDWRIPLIRYLKNPTLKVDRKIRRQAFKYTLLDEDLYRRNIDGVLLKCLDEDQSKVAMGEVHEGICETHQSAHKMNWLLRRAGFYWPRMIDDCFKYYRGCEVCQRFGNVQLAPAAVLNPIIKPWPFRGWALDFIGQIYLSSSRGHRFVLVATDYFTKWAEAVPLKNMTHTEANGQAESSNKTLLKLVKNKIEEHPKRWHEVLSEALWAHRKSKHGTTKVTPFEFVYGQEAVLPVEALEEIEKEKKRVAKAYNKRVKAKLFQVGDLVWKTILPLGTRSKEFDTSRGAFSASNQREILEEILPERLARRLRMYYGR

SEQ ID NO: 128340 - protein, 609 aa, Oryza sativa
  Clone ID: PAT_MRT4530_30702C.1.pep
MEPKGEQQRHSMQEAMENLKINGSTKTSNVNLPATKGASSSDAISCISSGDAASTVKESEMNQEASVGDQGMYYYGYYYPASFGGYDENGYFVGYNGLEVHPTVVQGDNGSYLCYLPGYENGYTYSPIVPGVIAGVDGQYISKEPYYSTISMQDPSTPGIFAQPVAYGPELVPAYTWDPSFALLDGVQGRPVGVHQTNYPARPKYSSNKLPSSKASRNTKSASDTIKGSSSALDTMSTSANGYPSSKTANKASGASISKGYPLSSKFAVHTNQGKDNLYQSKDIGMKESGRSWNSTEKLKARSKLNGYGDCDISDNLTDNSKNSLSPQGGHYGLSSAGGGNDVTPSPVAMSRDAYNLPDFVTKYDQALFFVIKSYSEDDIHKSIKYNVWASTPNGNKRLDNAFKLAQERVAEKGTKCPMFLFFSVNASGQFCGVAEMVGPVDFNRNMNFWQQDKWNGFFPVKWHIIKDVPNPQFRHIILENNENKPVTNSRDTQEVKFPQGSEMLNIFKNFSCKTSILDDFDFYENRQKVMQDRRGKPLATTLDHPMLKVEKPEETKRPSQFVSTVDLDTAKPDEVVFDKIATELDTAKLSEEQINKVEVEIGTTNSSE

SEQ ID NO: 128341 - protein, 1371 aa, Oryza sativa
  unsure (1)..(1371): unsure at all Xaa locations
  Clone ID: PAT_MRT4530_30703C.1.pep
MTKPPSTKSEVEPSNIMPISLEDLDGEACKAMEEYIKAITREALMRSCTRTCQGVVLKPGPLLKPNFNVGVDPMTNNGLLYHIPVHDSPVSIVNPQVPPHIPNVYNDPTRGYPPDTRYGKYNYIALQPQPIRPPNPPPNQHRPENMEELIAGIIRDKFGIEVRNRAKVYQKPYPDYYDNIPYPRGYRVPEFTKFSGEDSRTTWEHVANSIHTWPQLEQRFHDYFYTGETELRLSDLTLVRQKYNEHVLDYAKRFRDVRNRCYSLNITDRDLVDFAFNGLIALIKEKLEGQQFLDVSQLMQKALAQKGWVKDSKKFVRPFEKKPNVNLIDYLETSDSDDEGDHDMYVAKLSWTNKNKPFVCSNLMPTPRKDRQSEIKYSFDVAKCDKIFDYLLQEKQIRLPKDHVQSAIDDRRLKFTDGFKMKLDHDSFPVNTINFNDKKVLILPEQAESTKGKGVVIGEPRPKMMVPKNPKVGVWKENRSEALSSKAPKKTKVTFDMLLDKYERQAGEKARNKGKRPRSPPRERFGYSPRRSESPTYHRSQDMSWGPYPMPPPGYSFPCYMPWGXTPPMFNHMPPMQYNQGWGRPRRPARERLFSPNNSRFYAKNRINEGKREGKRAKVETRTSELESLQATNPKLGPXIAVGRSDHALWLTGPTSRSDRQPQAGLTGVSGRSDQKSAPGLTALQRRFDRRFAKGSSRASSSSNKINRGHYLPPGTEPKPRWMPKDLTATQKRRLQRLRAQELKEREAEEQRNRRFNELRPPRTKVWRRKSIEAEESVVVQKEKGEQSIAKYNSSPKEDMKVNMVCMLPMEFCAMDEAEVAQFLLGPKDAVFEKPDESNRHMKPLYLKGHIDGKPITRMLVDGGAAVNLMPYSLFKKLGRGDNELKKTNMIFNDFNGEPTEAKDIFSVELTVENKTLPTAFFIVDVQDNYNVILGRCWIHANCCVPSTLHQYLIQWDSDDFDEVEKLGQGFTSADPLEEVDIGDGTKPRPTFVNKNMRADYKVKIIELLKEYVDCFAWKFHEMPGLNHDLVEHWLPIKPGFRPYKQPSRRFNPLLYDRVKEEIDRLLKAGFIRPCRYVEWVSSIVPVEKKGSGKIRVCIDFRDLNKATPKDKYPMPIADMMINDASGHKGHMADLRLAFEIVHRYGLKMNPLKCAFVVSAGKLLEFMVHERRVEIDPKKIENIHDFKAPTCKKEVQKLLGKGRRFVLVATGYFTKWAEAVPLKNMTHTEANGQAESSNKTLLKLVKKKIEEHPKKWHEVLSKALWAHRISKHGATKVTPFELVYGQEVVLPVEVNLGSLRYIRQDDLSSEDYKTLMGDNLDEVIDKRLKALEEIQKEKKRVAKAYNKRVKAKLFQVGDLVWKTILPLGTRS

SEQ ID NO: 128342 - protein, 741 aa, Oryza sativa
  Clone ID: PAT_MRT4530_30704C.1.pep
MANFGLTATMELRWISASGNRLPGFILLLRTQWSRWRRKAAAKAAASCGWRRRKGRNLLVRVGKRLPAGFGTKEPKARVELDFAEPREVAALTDDGRGDGARRLERRPERFRDVGNRCYSLNITDRDLVGLAFNGLIAPLRERLDGQQFLDVSQLMQRALAQESRVKDNKKIVRPYEKKPNVNVIDYPEASDSEDEGDHDMYAAEWNRANEERREGKRIKVEARTSEVITIKVGSHDVPIPSGDEVGESSSKKSEAGWFDRRTDNGPTDASGRSDRPPNVAEVAQFSLGPKDAVFEKPDESNRHMKHLYLKGHIDGKLVSRMLVDGGAAVNLMPYSLFKKLRHGDDELKKTNMILNGFNGEPTEAKGIFSAELTVGNKTLPTAFFIVDVQDFDEVEKLGQGFTSADPLEAVDIGDGTKPRPTFVNKNMRVDYKVKIIELLKEYVDCFAWEYHEMPGLSRELLEHRLPIKPVDHHVDIAYEEEICLVEVIPWRIYFDGSSCKEESVLDFKSLCDIGKTEDQERSDRHYTAGLTGDQGRSDRPHAVGQTSDPERSNRPGVTPRNSRIEFQAECALKSPSRTGRGILDGTDEAYSSEKPPSDTYSYSGRPSQGPPRSITPTLAWMRQLEESYTTSPAVAQAGLWADVIKGGGADRRVPLVSGSKGGRCTVDRDHAGGPPPVHGTDGPDRPLSRSGGGDRGSRRARLGIKAGRPARASGDGTRPTAMATGGTGGGGGGQRRRRMT

SEQ ID NO: 128343 - protein, 73 aa, Oryza sativa
  Clone ID: PAT_MRT4530_30705C.1.pep
YPTHASAADVAYNLIWNAYLGGHRAGVHCPFGDDAAVDGIDFFIDQCGANHYDDLARLLNGYNKYYDDLALQV

SEQ ID NO: 128344 - protein, 1138 aa, Oryza sativa
  Clone ID: PAT_MRT4530_30706C.1.pep
MFNHMPPMQFNQGWGGSRRPIHERLSSPNNGRFYGRNRANEERREGKRIKVEARTSEVITIKVGSHDVPIPSGDGIGVSSNKKSEAETSSSQSAGLTKPSGRSDRSHAAGLTGPSGRSDRRPDSGPTDASGQSDRSPSVDLTGASAEVAQLSLGPKDAVFEKPDESNRHMKPLYLKGHVDGKPVSRMLVDGGATVNLMPYSLFKKLGREDDELKKTNMILNGFNGEPTEAKGIFSAELTVGNKTLPTAFFIVDVQDIIANFDNFAIRHIARHDNSRANNLAQQASGYNVKKGLFLILEEPVLDFKSLCEIGKTGDQGRSDRHCSASLTGDQGQSDRPHAAGLTGDSERSERPSFKYTLLDEDLYRRNIDGVLLKCLDEDQSKVAMGEANGQAESSNKTLLKLVKKKIEEHPKRWHEVLSEALWAHRISKHGATKVTPFELVYGQEAILPVEVNLGSLRYIKQNDLSSEDYKTLMGDNLDEVIDKRLKALEEIEKEKKRVAKAYNKRVKAKLFQVGDLVWKTILPLGTRSKEFASNQREIFEEILPERLARRLGGTMAAAIQDGGGAINMIPVTLDDFEGEDRKAMEEYINELTREALMRASTRTRQGVIIKPGPRPKLAPDLVSNDEVSQSIQQQVASTIDSSMIAFKDNVCLHQIMAGFMAGTGPMKKGGKESASRMLVDGGATVNLMPYSLFKKLGREDDELKKTNMILNGFNGEPTEAKGIFSAELTVGNKTLPTAFFIVDVQDIIANFDNFAIRHIARHDNSRANNLAQQASGYNVKKGLFLILEEPVLDFKSLCEIGKTGDQGRSDRHCSASLTGDQGQSDRPHAAGLTGDSERSERPCVASLTGSGQSAGGHVSINIVAELTVNSDICAQEAEGDWRILLIRYLKNPTLKVDRKILRQAFKYTLLDEDLYRRNIDGVLLKCLDEDQSKVAMGEANGQAESSNKTLLKLVKKKIEEHPKRWHEVLSEALWAHRISKHGATKVTPFELVYGQEAILPVEVNLGSLRYIKQNDLSSEDYKTLMGDNLDEVIDKRLKALEEIEKEKKRVAKAYNKRVKAKLFQVGDLVWKTILPLGTRSKEFASNQREIFEEILPERLARRLGGTMADRRLRAGQTGGMFRVSFGFYLKLDVEEGL

SEQ ID NO: 128345 - protein, 1533 aa, Oryza sativa
  Clone ID: PAT_MRT4530_30707C.1.pep
MGLGARRRREARRAGWERENSYMVRCVADRFPGLTDVFLDHGLYIAAGASAAAAERSRYSRAAGAASKKQRKPAAEARSAELRRRLGAGATRADAGCHGFTRFRREKKRTWAAGGGNLAPSVEGRSDRRCVAGLTGRSESDCVSSGFERQLNFDFAMTKPPSKTEVEPSNVIPITLDDFEGEDRKSMEEYIKEITQEALMRACTRTRQGVIIKPRPRPKLASDLVSNEEVTQSIQQQVASTIDSSMTVFKDKLDATFEGKFDEFLRFKFGPLMADYMSKDKASTTANQAPIDQGGTNGAAHAAGPTGPDGWSDRDFAFGPTGQAAGPTGYYPGGQTGTQAGLTAPLDVGQTGPWTGQTGAIIPIQGIDPMTNASYLYHLRTFDAPVSTAANSPQVPPHVPNAYNDVARGDKFGIETRNRARVYKKLYPDYYDNVPFPRNYRVPEFTKFSGEDGSTTWEHVQSAIDEGRLKFTDGSKMKLDHDPFPVNTINFNDKKVLIRPEQAKSTKRKGVVIGEPRPKMIVPKKPEVGVWKENKSEVSTSKAPRKTKVTFDMLLEKYEQQGGERARNKGKRPRSPPRERFGHSPRRSHSPPYHHPQDMSWGSYSMPPSGYPYPYYMPWGATPPMFNHMPPMQFNQGWGGPRKPIHERLFSPNNGRFYGRNRANEERKEGKRIKVEARTSEVFTIKVGSHDVPILSGDEVGESSSKKSEDGTSSSQSAGLTRPSGRSDRSHADGLTGPSGRSDRRPDSSPTDASSWSDRAPNVGSKDAVFEKPDESNRHMKPLYLKGHVDGKPVSRMLVDGGAAVNLMPYSLFKKLGREDDELKKTNMILNSFNGKPTEAKGIFSAELTMGNKTLLTAFFIVDAGFIRPCRYAEWVSSIVPVEKKGSEIYIDDIVVKSDGMEGRIADLKLAFERMRRYGLKINSLKCAFGVSAGKFLGFMVHERGVEIDPKKIEKIRDFKAPKCKKEVQKLLGKVNYLRRLISNLAGKIDAFVPILRLKKEADFTWGAKQQDAFEELKRHIARHDNSRANDLAQQASGYNVKKGLFLILEEPVLDFKSLCEIGKTGDQERSDRHCTAGLTGDQGRSDRPHAVGQTGDPERGCEACQRFGNVQLAPAAVLNPIIKPWPFRGWALDFIGQIYLPSSKGHRFVLVATDYFTKWAEAVPLKNMTHTEANGQAESSNKTLLKLVKKKIEEHPKRQDDLSSEDYKTLMGDNLDEVIDKRLKALEEIEKEKKRVAKAYNKMVKAKLFQVGDLVWKTILPLGTRSREFGKWSPSWEGPYRVCGIVQGNAYFLETLQGERFQRAINGKYLKKYFPNLRLQKGFRASEETLAPTERSAIERVAPRPRPLVTSRHPWKCFPQIRPPNSRQQIKEHAHQNSGNKSRNTNRGNKITACRSAPRRFGKIANIAATQIKVDAKLRRSSLMPPPLPLIPEAAALLCIDAPTDGEEGETARRLGSLLTRRPGMRGERRRRRAGAGGGRRGAGGGAMGELVELGEVRASQSLMPLSLAFARLGEGKKRSKAAQRSDAAWLS

SEQ ID NO: 128346 - protein, 58 aa, Oryza sativa
  Clone ID: PAT_MRT4530_30708C.1.pep
GVDKIVQKIKATENQTGCIKNLTPFIKKKKQKNARAFKVCGTNSKAPTFIRARFGIRV

SEQ ID NO: 128347 - protein, 166 aa, Oryza sativa
  unsure (1)..(166): unsure at all Xaa locations
  Clone ID: PAT_MRT4530_30709C.1.pep
FFLIAACLGSLGHSSNAAGNQEKLSSAMVNHSNTNGDTENEELTKHLLEIEQPKDCEEQEPEVAPAAQAVEKLEAGTADFLVDLEGKRSIKVLGSNTFLGLGIVTFAGVSYSLFSPAFNLATNDQWHTLXEGVPHMVVYTAFFYFSLACFAIGIALNIWFLYHPMV

SEQ ID NO: 128348 - protein, 696 aa, Oryza sativa
  unsure (1)..(696): unsure at all Xaa locations
  Clone ID: PAT_MRT4530_3070C.1.pep
SHHRCWASTTSPTGXPPSLPTGVFACTAGLLCRRCWVSTSSPTGRLVDPPPIGVSAYTVRWSHHRCWASTSSPTGCLVCCRLVFLPVRLAYYAAVVRRLRLHQPTASSIRRRLVSPPTRLDGHTTVVGRLRLHRPNASXSAADWCFRLPAASSAADWRFCLHGWPIMPLLLGVYVFTDRXASSAANWCFCLHSWPIMPPLLGVYVFTDRXASSAADWCFCLHGXPIMPPLLGVYVFTDRSPHXLPPTSVSAYTVGWSHHRCWASTSSSTGFPSPPPIGVSTYTVSWSHHYSWASMSSPTGLPSPPPTGVPAFMADLLCRRRWASTTSPTGLPSPPPTGVPTFMADLICRHRWASTTSPPACLRRRRLVSPPSRLTYYAAVVGRLRLHRRPASVAADWCPRLCGWRAPPPLMGLVIYITGLLPLSPTGVFLVIDGRLCSYIVAFGPIPTTRGLTGXDREWISQNITTGLPSPPPTGVSACTAGLLCRCCRASTSSPSACLRRSRLVSPLARLVYYAAVVGRLRLHXRLAFATADWCLRLHGWLIMPPLLGVYXSPTGHLSILPPFKDVFIFVIILLLPSPTGYAAVDWVEQLHLNYLRNRQALLPQLRKFCYFTNHNVHKIFDISACTSRFDTALFHYNKWFFNFQEFYTSTSSALTSLPLLMDDYVFASGGPLGGMSTYDHQIRLREATDAAVGRV

SEQ ID NO: 128349 - protein, 1224 aa, Oryza sativa
  Clone ID: PAT_MRT4530_30710C.1.pep
MTKPPSSKAEVELANVIPIIFDDFEGEDRKSMEEYIKEITQEALMRACTRTRQGVIIKPKPRPKPTYDVVSNEEVTQFIQQHIASTIDSSMITLNNKLNASIQNHVEGFLRTRFGPLVADFMFKDKASTSASQATIDQISSITNGAKTQQHGEGWAAHTASLTGPGGRLDRDVAVGQTGQTAGQTGYYPGGQTGTQAGLTAPLDVGQTGSWAGQTGTIIPIQGVDPMTNNAYLYHLRTFDSPVSTATTCPQILLHVPNAYNDVSRGYPPDTRQGQYNYIAPQPQPIRPPNPPPNQHRPDNMEELISGIIRDKFRIEARNRAKVYQKPYPDYYDNIPYPRGYRVPEFTKFNGEDSRTTWEHVERLDVGQQFLDVSQLVQKALAQESRVKDSKKFVRPYEKKPNVNSIDYHEASDSEGEGDHDICEVKPGHPCIVAEGRRNTVAAVDSTSPPSRSRRRPSSIAVRHHVQSAINEGRLKFTDGSKMKLDHDPFPVNIINFDDKKVLIRPEQAESTKGKGMVIGEPRPKMMVPKNPEVGVCKENRSEASTSRVPKKTKNRANGEKREGKRVKVKTRTSEVITIKVGSHDVPIPSGDEVGESSSNKSEAEVGRGDDELKKTNMILNGFNGEPTEAEGIFSAELTVGNKTYQPLSSSSMCKVKVIELLMEYVDWFAWEYHEMPGLSRDLVEHRLPIKPSFRPYKQLPRRFNPLLYDRVKEEIDRLLKAGFIRPCRYAEWVSSIVPVDKKGSGKIRVCINFRDLNKASPKDEYPMPIADMMMNDASGHKVICFLDDNAGYNQIFMAEEDMYRTAFTCPGFVGLFEWVVMTFRLKNAGATYQRAMNLIFHDLLGIILEIYINDIVVKSDGMEGHIADLRLAFERMRRYGLKMNPHKCALGVSVGRFLGFMVHERGVEIDPKKIEKIRYFKAPTCKNEVQKLLGKGAKQQEVFEELKKYLSTPLVVRAPKAGKPFRLYIASEDKVIGAVLTQAEDGKGYIITYLSQRLLDAETRHIARHDNSRANDLAQQASGYNVKKGLFLVLEEPVLDFKSLCEIGKTSDQGRSDRHCTAGLTGHMPPETEEDWRIPLIRYMNDPTRKGHRFVLVATDYFTKWAKAVPLKNMTHTEANGQVESSNKTLLKLVKKKIEEHPKKWHEVLSEALWVHRISKHGATKVTPFELVYGQEAVLPIEINLGSLCYIKQNDLSSEDYKTLMGDNFDEIIDKRLKALEEI

SEQ ID NO: 128350 - protein, 305 aa, Oryza sativa
  Clone ID: PAT_MRT4530_30711C.1.pep
MNPLKCAFGVSAGKFLGFMVHERGVEIDPKKIEKSRDFKAPTCKKEVQKLLDKVIGAVLTQEEDGKEYIITYLSRRLLDAETRFVLVATDYFTKWAEAMPLKNMTHMEANGQAESSNKTLLKLVKKKIEEYPKRWHEVLFEALWAHRISKHGATKVTPFELVYGQEAVLPVEVNLGSLRNVKKDDLSSEDYKTLMGDNLDEVIDKRLKALEEIEKEKKRVAKAYNKRVKAKLFQVGDLVWKTIFPLGTRSKEFGKWSPSWEGPYRVCGIVRGNAYFLETLQGERFQRAINGKYLKKYFPSVWQDA

SEQ ID NO: 128351 - protein, 61 aa, Oryza sativa
  Clone ID: PAT_MRT4530_30712C.1.pep
LNLIKGPKVVGNHRSWSYHTGANIGGAKLSIFFNPTPRAWAPGKPLLNRSWGQSDTPLSFS

SEQ ID NO: 128352 - protein, 29 aa, Oryza sativa
  Clone ID: PAT_MRT4530_30713C.1.pep
PEVDVWSCGVILYALLCGTLPFDDENIPN

SEQ ID NO: 128353 - protein, 82 aa, Oryza sativa
  Clone ID: PAT_MRT4530_30714C.1.pep
LFKLGDGYMEFHHTLVSTSVCMFNTFSNKIIFKRKVLRMYLEDYNNAVCKARMGNSKSSTKQPYREQLLNEKNKKNRNKKQK

SEQ ID NO: 128354 - protein, 68 aa, Oryza sativa
  unsure (1)..(68): unsure at all Xaa locations
  Clone ID: PAT_MRT4530_30715C.1.pep
IDSDTRQLLKSKDIKIWTFSIFTAVSSFANCGFTPSXLLVTPQVLAGNTILSPLLRLSIWILRKSVKL

SEQ ID NO: 128355 - protein, 129 aa, Oryza sativa
  Clone ID: PAT_MRT4530_30716C.1.pep
TLYIPHKGNGRGKNRVKRMQAHIFQTAGPSSSGPNQNIIAASAPMLNGESFESFVVTDQVKFLMSMMYIIINTANRFVDYSNIILLVYPCPILLPPLFCLCLAETLPAEPDPLEISSPSGRVGRPGIHP

SEQ ID NO: 128356 - protein, 131 aa, Oryza sativa
  unsure (1)..(131): unsure at all Xaa locations
  Clone ID: PAT_MRT4530_30717C.1.pep
VSRERREREDAGREEGDDRAGGTHRSGTXSSARARARHGREGAARLGPGGXAQEERRGRRPGGEREEEGVGRGEGEEAQEKEGEEERERNRGRKRGLWPRAEREKERGVFGPNLAQREEGDLFLVFLFSKL

SEQ ID NO: 128357 - protein, 112 aa, Oryza sativa
  Clone ID: PAT_MRT4530_30718C.1.pep
MEIVAAGRRRCGHRRPVLATGIFAGRLGSGATNRSTLTASGRGQRALHVCAVELAVQPRVGRVEDVAPATARRPCVSQTHCTRWIASSPPFMTTTAGRRPQETLYRKTPKLS

SEQ ID NO: 128358 - protein, 404 aa, Oryza sativa
  Clone ID: PAT_MRT4530_30719C.1.pep
MAGSNQEHEAESWPPAIYHQMPAILEYLEDHRVVVVSAAPGSGKSSVLPRCLAESGYGPVLCAQPRHLAAFVAMAKVGEEWDSDIEFTTTRQLLDRFSSPAPVLAGYGAVVIDEAHDRTLGTDVLLGMVKAALATGTTMGGRCKVVVCTAGGPADGMLSAFFGGAPVVSIPRAAHQVEVRYSRGPVLDMAAAVADEVAAIHASQPPGDVLAFLPENADIIGVHARLLGLPVPGLAVRYVHDNLPAELIDIMLINSPVPDGRRRVVLATDVAETAVLVHGITYVVDTGLVSEQPPVRISKEAAAARAAIAGFSGPGRCHRLYQPEEYDDLDEHTIPHIRQDGAAVRFALMVKRHAADGIPGFEIFDPALEPAVLKNVFGQLVNGGYLDKLGNLSDKGEREAYDED

SEQ ID NO: 128359 - protein, 168 aa, Oryza sativa
  Clone ID: PAT_MRT4530_3071C.1.pep
TGYGGIMSEDAKNDKVIPWRSTEDKPHLEVGLKCVCHNVHLILSHTAATRFKGLCSLHNVRNLSLYPFKSNAFYMLKNQASQKTFPIRRGSCGAWCAARRLFEPARALVRVPTSPAVGRRSSRFRPRVQLRAPLLCLLRSVTCLYALVLLLLAVPCVFFSRSLVCLLV

SEQ ID NO: 128360 - protein, 60 aa, Oryza sativa
  unsure (1)..(60): unsure at all Xaa locations
  Clone ID: PAT_MRT4530_30720C.1.pep
FXFFFFFFFFFFFFFLPLIFDXKFGNFRXQAIXKRXLXFFXQGXTPXLRINHICQDVSKR

SEQ ID NO: 128361 - protein, 49 aa, Oryza sativa
  Clone ID: PAT_MRT4530_30721C.1.pep
MTAATGAERGVDAGDPHIQGLRNWEMSKHDQGQGGSGAPCFERGNHQVH

SEQ ID NO: 128362 - protein, 93 aa, Oryza sativa
  Clone ID: PAT_MRT4530_30722C.1.pep
IPGLQAGRDLFGMFKGLKQTVVNGMVATKPPPVEEETDTEFLAHKARFQDLQQQLTTTSQQAEALVKARDDLRTTTAHLGMTLIKLAKFEREQ

SEQ ID NO: 128363 - protein, 85 aa, Oryza sativa
  Clone ID: PAT_MRT4530_30723C.1.pep
LSYCKSHPPSDLVKVSLKQTTWIQINHLTKDDSSIFTENDSSYLYKVKKKIHHLQQKEFLLYIVQIYYAEEHYYIVQFIYFGVIY

SEQ ID NO: 128364 - protein, 108 aa, Oryza sativa
  Clone ID: PAT_MRT4530_30724C.1.pep
MGCPSGPNTLVFISEVIKVISKYCASIGHHPVDLQFFLNDLPEQLDNLVTKDQDQEADTLPQYYVVGLPRSYYTRVLPDKSVHLFHSSYSLHWLSPIMKIVYISGHSH

SEQ ID NO: 128365 - protein, 365 aa, Oryza sativa
  Clone ID: PAT_MRT4530_30725C.1.pep
METYLGMTGGDGENSYAKNSKIQAKALLATKPMIEEAIQEVYTALLPKTILVADMGCPSGPNTLVFISEVIKVISKYCASIGHHPVDLQFFLNDLPGNDFNYLFKSLDQEADTLPQYYVVGLPRSYYTRVLPDKSVHLFHSSYSLHWLSPVITSEPQNEGNVYIAVTTPEEVIKLYQEQFEKEFLNFLELRSEELISGGKMVLTFLGRKNDNIFDEDKNILYELISQALQSLVIEGLVEKEMLDSFNIPLYGPSVNEVRTAIMQQKLFSINHIKILESSWDPQDDEFEGHTVLDPVESGVNVAKSIRAVMERLFATHFGESIMPLLFSRFASNVTKYIEKNTTRKSIFSNVGVLFSQADMTHRVK

SEQ ID NO: 128366 - protein, 163 aa, Oryza sativa
  unsure (1)..(163): unsure at all Xaa locations
  Clone ID: PAT_MRT4530_30726C.1.pep
PTRPEQFMRSHVSRLLRNDLLAVLAELLRQDHVLLSMKIYSVVRKEIWYRPDMYFYRDMLYMLARNKKIEETRQVWADLKSEDVLFDQHTYGDIVRAFCDAGLIDLAMEFYEDMRSSPDPPLSLPFRVILKGLVPYPDLREKIKQDXLELFPDMIVYDPPDSL

SEQ ID NO: 128367 - protein, 67 aa, Oryza sativa
  unsure (1)..(67): unsure at all Xaa locations
  Clone ID: PAT_MRT4530_30727C.1.pep
MDKSSKMMAEEEELVLAVVAAQEARNIKASVXAALESTDTVVQPTTFLPFDRLRSAGPVIVGMPSSS

SEQ ID NO: 128368 - protein, 55 aa, Oryza sativa
  unsure (1)..(55): unsure at all Xaa locations
  Clone ID: PAT_MRT4530_30728C.1.pep
MSRTLLGCCVDRDLYLVFHFSGRGSISANLHDEKAPAMWWAXVDCFAASGRGTSR

SEQ ID NO: 128369 - protein, 1204 aa, Oryza sativa
  Clone ID: PAT_MRT4530_30729C.1.pep
MTKPPSKTEVEPSNVMLVTLDGFEGEDRKAMEEYINELTWEALMRATTRTRQGVIIKPGPHPKLAPDVVSNDEVSQSIQQQIASTIDSSMANFKDRLDVMFKDKVDGFLRSRLGSFMDDYTLKDKAYTTADQPPIGQTGSKTDGTAFTAGPTGPDSRSDRDTAVGPTGQMTGQTGYYPIGPTGQMAGQTGYYPTGQTGPQAGPTAQHDAGQTGPWANQTSAIVPIQGIDPMINASYLYHFRTFDPPVSTATTSPQIPPHIPNIYNDVSRGYPPDTRQGQYNHIAPQTQPIRPPNPPPNPQGPNNMEDMISDIMRNRFGIETRNRARAYKKPYPHYYDNVLFPRNYRVPEFAKFSGEDVAPLREKLDGQQFLDVSQLMQRALAQESRVKDNKKFDRPFDKKPNVNIVDYSDASDSEEEGDHDIYVAEWSWTNKNKPFVCSNLMPTPRKDRQSEASLELLQKRVQEYRSTKNNIGETVEDFDEVEKLGQGFTSADPLEEVDIGDGTKPRPTFVNKNMKADYKVKVIELLKEYVDCFAWEYHEMPGLSRELVEHRLPIKPGFRPYKQPPRHFNPLLYDRVKEEIDRLLKAGFIRPCRYAEWVSSIVPVEKKGSGKIRVCIDFRDLNKATPKDEYPMPIADMMINDASGHKVISFLDGNAGYNQIFMTEEDMYKTAFRCPRFVGLFEWVVMTFGLKNAGATYQRAMNLIFHDLLGIILEIYIDDIVVKSDDMEGHIADLRLAFERMRRYGLKMNPLKCAFGVSAGKFLGFMVHERGVEIDPKKIEKIRDFKAPTCKRPILSGRIGKWAYALIEYDLTYEPLKTIKGQIVCDFIVDHHIDVAYEGEQASGYNVKKGLFMILEEPVLDFKSLCEIGKIGDQGRSDRHCTAGLTGDQGRSDRPHAVGLTGDPEQSDRLCVAGLTGIEQSAGGHASIDLEAELCENSDICAQDIEEDWRIPLIQYLKDPTLKVDRKIRRQAFKYTLLDGDLYRRNIDGVLLKCLDEDQSKVAMGEANGQAESSNKTLLKLVKKKIEEHPKRWHKVLSEALWAHRISKYGSTKETPFELVYGQEAVLPVEVNLGSLRYIKQDDLSSEDYKTLMGDNLDEVIDKRLEALEETEKEKKRVAKAYNKRVKAKLFQVGDLVWKTILPLGTRSKEFGKWSPSWEGPYRVCSIVRGNAYFLETLQGEHFQRAINGKYLKKYFPSVWQAA

SEQ ID NO: 128370 - protein, 386 aa, Oryza sativa
  unsure (1)..(386): unsure at all Xaa locations
  Clone ID: PAT_MRT4530_3072C.1.pep
MLVMDSRRLSFPVDRPRVHSAGLSSPPPLLITTTTSPXPACLCRRRLVSSPIWLVGHTTVVGRLRLHRRPASVAADWCLRLYGWLVTPPFMGVHVFXTGLPLSPPTGVFAYMVGWSHHRCWASTTSPPACLRRRRLVSSPIRLVGHTTVHGRPRLHHRPASVAADWCLRLHGWPIMPPLLGVYVFTTGLPPSPPIGASAYTAGLLCRRCWASTTSPPACLRRRRLVSSPIRLVGHTTVHGRPRLHHRPASVAADWCLRLHGWPIMPPLLGVYDFTAGLPPSPPIGASAYTAGLLCRRCWASMTSPPACLRRRRVVPPPTRLAYYAAAVGRLRLHRRPASVAAEWCLRLHGWPIMPPLLDVYVLTVGLPSLPSTGVSAYTADLLCRH

SEQ ID NO: 128371 - protein, 85 aa, Oryza sativa
  unsure (1)..(85): unsure at all Xaa locations
  Clone ID: PAT_MRT4530_30730C.1.pep
GGGGFFFFWARTRKIIYRTLSPAILVSKHFIIQYWVGSLSRGMQHSNGVIGGGGXXSQLSLVLAGGENAALLGLNPAHRRQLRPR

SEQ ID NO: 128372 - protein, 1266 aa, Oryza sativa
  Clone ID: PAT_MRT4530_30731C.1.pep
MEEAAGAEGGGGAARVDGDGGAPAVGDRNIEVDEVGEDAAKPKEAAPRWEAFRGDDGGGPELGGDAGLTRPSGRSDCSHTAGLTGTTGQSDRQPDGGPTNASGRFDRAPNVGLTGASGWSDRWSTSGLTGLQRRFDRRIVNGDVRASSSSSKVNRGHYLPLGTEPNPRWMPKDFTATQKRRLQRLRAQEMREKKAEEQRDKRFNELRPPLVWRHKSIEKEKPVVVEEKEEQSVDKGESSPKEDMYINMVCMLPMEFCAMDEAEVAQFSLGPKDAVFEKPDESNRHMKPLYLKGYVDGKPVSRMLVDGGAAMNLMPYLLFKKLGREDDELKKTNMILNGFNGEPTEAKGIFSAELTVRNKTLPTAFFIVDVQDFDEVEKLGQGFTSADPLEEVDIGDGTKPRPTFVNKNMRADYKVKIIELLKEYVDCFACEYHEMPGLSRELVEHRLPIKPGFRPYKQPPRRFNPLLYDRVKEEIDRLLKAGFIRPCRYAKWVSSIVPVEKKGSGKIRVCIDFRDLNKATPKDEYPMPIADMMINDASGHKVISFLDGNAGYNQIFMAEEDMYKTAFRCPGFVGIILEIYIDDIVVKSDGMEGHIADLRLAFERMRRYGLKMNPLKCAFGVSAEKFLGFMVHERGVEIDPKKIEKIRDFKAPTYKEVQKLLGKVNYLRSRFYLGAKQQEVFEELKRYLSTTPVVRAPKAGKPFRLYIASEDKVISAVLTQEEDGKEYIITYLSRRLLDAETSQIVCDFIVDHHVDIAYEEEICLVEVIPWKIYFDGSSCKEGQGIGVVLFSPNGMFYEASVRLEYYCTNNQAEYNALLFGLQVMEMAEAKYVEAFGDSELVVQQVAGVYKCLDRSLNRYLDSCLDIIANFDNFAIKHIARRDNSRANDLAQKASGYNMKKGLFLILEELVLAFKSLCEIGKTEDQGRSDRHCVASLTGDQGRSDRPMPPEAEEDWRIPLIRYLKDPTLKVDRKIRWQAFKYILLVKDLYRRNIDGVLVKCLDEDQSKVAMERGCEACQRFGNVQLAPAAVLSPIIKPWPFRGWALDFIGQIYPSSSKGHRFVLVATDYFTKWAEAVPLKNMTHTEANGQAEPSNKTLLKLVKKKIEEHPKRWHEVLSEALWAHRISKHGATKVTPFELVYGQEAVLPVEVNLGSLRCVKQDDLSSEDYKTLMGDNLDEVIDKRLKALEEIEKEKKRVAKAYNKRVKAKLFQVGDLVWKTILPLGTRVCGIVRGNAYFLETLQGECFQRAIDGKYLKKYFPSVWQDA

SEQ ID NO: 128373 - protein, 42 aa, Oryza sativa
  Clone ID: PAT_MRT4530_30732C.1.pep
IHISWAGIMGIPTPCGPMLAGPTGEPDLGADPCELGRNARAN

SEQ ID NO: 128374 - protein, 280 aa, Oryza sativa
  Clone ID: PAT_MRT4530_30733C.1.pep
MGEVHEGIYGTHQSAYKMNWLLRRAGFYWPRLIEDYFKYYRGCEACQRFGNIQLAPAAVLNPIIKPWPFRGRSGALKNMTHTEANGQAESSNKTLLKQVKKKIEEHPRKWHEVLSEALWAHRISKHGTTEVTPFALVYGQEVVLPVEVNLGSLRYIQQDNLSSEDYKTLMGDNLDEVIDKRLKALEEIEKEKKRVAKAYNKRDHHKALGVAIVLVNLSQKVANSSISPGSIPSYRISTGNIAPRRRTHERRENRESELGSGFGCPKPGRCKIWKCCPPRR

SEQ ID NO: 128375 - protein, 193 aa, Oryza sativa
  Clone ID: PAT_MRT4530_30734C.1.pep
MPSSFLSPLLSPSPILSSSFPRGDAAAMAVDKDKEFKIDWKRVGITSSFGFAFVGPVGHYWYEYLDRFILRRYQPKTFKFVASKVAADGLLFGPVDLLLFFSYVGLASGRSVEQVKDDVKRDFIPALVLGGTIWPAVQIANFRFIPVRYQLLYVNLFCLLDSCFLSWIDQQGDAPWKQWFTSFQKIEGQKGKV

SEQ ID NO: 128376 - protein, 1584 aa, Oryza sativa
  Clone ID: PAT_MRT4530_30735C.1.pep
MTKPPSKTEVEPSNVMPVTLDDFEGEDRKAMEEYINELTREALMRATTRTRQGMIIKPGPRPKLTPDVVSNDEVSQSIQQQIASTIDSSMANFKDRLDVMFKDKVDGFLRSRLDSFMDDYTLKDKAYTTVDQPPIDPMGSKTDGTAFTVGPTGPDGRSDRNIAVDLTVQTAGYPPDTMQGQYNHIAPQTHPIRPPNPPPNPQGPNNMEDMISDIMRNRFGIETRNHARAYKKPYPDYYDNVSFPRNYRVPEFAKFSGEDGKTTWEHVGQFLVQCSEANSDTFKLRLFSLSLSGNAFTWFTSLPANSIHTWAQLEEQFHDYFYTGETELRLCDLTSVKQKYNEYVIDYIKRFRDVRNRCYTLNITDRDLAGLAFNGLVAPLRKKLDGQQFLDVSQLMQRALAQESRAKDNKKFARPFDKKPNVNVVDYPEASDSEEEGDHDIYVAEWSWNNKNKPFVCSNLMPTPRKDRQSEVKYSFDVAKCDKIFDYLLQEKQIRLPKGHVIPSQEELKRRAYCKWHDSHSHSTNDCNVFRRQVQSAIDEGRLKFTDGSKMKLDHDPFPVNTINFNDKKVLIRPEQAESTKGKEVVIGEPRSKMMVPKKPEVGVWKENKSGASTYKAPRKTKVTFDMLLEKYERQGGEKIRNKGKRPRSPPRERFGHSPRRSHSPSYHHPQDMSWGPYPMPPPGYSYPYFMPWGATPPMYHHMPPMQFNQGWGGPRRTIHERLSSPNNSRFYDGVGKSPSKKSEAGTSSSQTVGLTRPSGRSDRGHVAGLTGPSGRSDRRPDSGPTDASGWSDRVPHVGLTGATGRSNRWSTAGLTGLQRRFDERIVKSDVRASSFSSKVNRGHYLPPGTEPNPRWMPKDLTATQKRRLQRLRTQELREKKAEDQRDKRFNELRPPPIWRPKSIEKAKPIDVQEKEEQSVDKSDLSPKEDMYINMVYMLPMEFCAMDEAEVAQFSLGPKDTVFEKLDESNHHMKPLYLKGHVDGKPVSRMLVDGGAAVNLMPYSLFKKLGCEDDELKKTNMILNGFNGEPTEARGIFSAELTVGNKTLPTAFFIVNVQEWLQKRVQEYRSTKNDIGETVEDFDEVEKLGQGFTSADPLEEVDIGDGTKPRPTFVNKNIRADYKVKIIKLLKEYVDCFAWEYHEMPGLSHLRLAFERMRRYSLKMNPLKCAFGVSAGKFLGFMVHERGVEIDPKKIEKIHDFKVLTCKKEVQKLLVGKIDAFVPILRLKKEADFTWGAKQQEAFEELKRYLSTPPIVRAPKAGKPFRLYIASEDKVIGAVLTQEEDGKEYIITYLSRRLLDAETRHIARRDNSRANDLAQQASGYNVKKGLFLILEEPDTEEDWRIPLIQYLKDLTLKVDRKIRRQAFKYTLLDGDLYRRNIDGILLKCLDEDQSKVAMGEGHRFVLVATDYFTKWAEAVPLKNMTHTEANGQAESSNKTLLKLVKKKIEEHPKRSHEVLSEALWAHRIYKHGATKVTPFELVYDQEAVLPVEVNLGSLRYIKQDDLSSEDYKMLMGDNLDEVIDKRLKALEEIEKEKKRVAKAYNKRVKAKLFQVGDLVWKTILPLGTRSKEFGKWSPSWEGPY

SEQ ID NO: 128377 - protein, 714 aa, Oryza sativa
  Clone ID: PAT_MRT4530_30736C.1.pep
MAPYEALYGHKCRTPLLWDQVGESQVFGTDILREAEAKVRTIRENLKVAQSRQKSYADNRRRDLEFVVDDFVYLRVTPLRGVHRFQTKGKLAPRFVGPFRIIARRGEVAYQLELPASLGNVHDVFHVSQLKKCLRVSSEQADSEQIEVRKDLTHVERPVKILGAMERRTRNRVIRFCKVQWSNHAEEEATWEREDELKTAHPVLFATFERMRRNGLKMNPLKCAFSVSAGKILGFMVQERGVEIDPKKIEKFRDFKEPTCKKEVQKLLAQQASGYNVKKGLFLILEEPVLDFKSLCEIGKTGDQGRSDRHCTAGLTGDQGRSDRPHAAGLTGDPERSDRPCVAGLTGSGQNAGGHISINLEAELSVNSDICAQGTEEDWRIPLIRYLKDPTLKGHRFMLVATDYFTKWAEAVSLKNMTHMEANGQAESSNKTLLKLVKKKIEEHPKRWHEVLSEALWAHRISKHGATKVTPFELVYGQEAILPVEINLGSLSYIKQDDLSSEDCKTLMGDNLDEVIDKRLKALEEIEKEKKRVAKAYNKRVKAKLFQVGDLVWKIIMPLGTRSKEFASNQREILEEILPERLARHLGGTMAGGRGERYSLPDLHAASLPGAVDRLLLQGSADQPLHREGSIAAPGIRRPAAGPPPPPPLLLDAAEGRPPPPLPSRQIRDTGSGTQGRLHLLSRWIQRMGGHRRRRRRDTGPPPLPAASPPAGRK

SEQ ID NO: 128378 - protein, 604 aa, Oryza sativa
  Clone ID: PAT_MRT4530_30737C.1.pep
MPKRVADEIAALPEPRGPLRRPCADLSRRVRLLAPLLDHLPASSSSSSSTPLADALGAARDLLRKTRDGSKIDQAMRGDAFLDEFAGVNRQIHLALDALPYNTFHMPQEVQEQVALVHSQFQRASTRTDPPDTQLSMDLAWALTDNPSDPALLTRISHKLQLHTMADMKNESIALHNMVISTAGEPDGCVDQMSSLLKKLKDCVVTEDHANDALTTRSASIKHRSPIIPDEFRCPISLELMQDPVIVSSGQTYERSCIQKWLDSGHKTCPKTQQPLSHTSLTPNFVLKSLISQWCEANGIELPKNKQNSRDKKAAKSSDYDHAGLVSLMNRLRSGNQDEQRAAAGEIRLLAKRNVNNRICIAEAGAIPLLVNLLSSSDPRTQEHAVTALLNLSIHENNKASIVDSHAIPKIVEVLKTGSMETRENAAATLFSLSVVDENKVTIGAAGAIPPLINLLCDGSPRGKKDAATAIFNLCIYQGNKVRAVKAGIVIHLMNFLVDPTGGMIDEALSLLSILAGNPEGKIVIARSEPIPPLVEVIKTGSPRNRENAAAILWLLCSADTEQTLAAKAAGVEDALKELSETGTDRAKRKASSILELMHQANEA

SEQ ID NO: 128379 - protein, 1875 aa, Oryza sativa
  Clone ID: PAT_MRT4530_30738C.1.pep
MGQANSALQVISDNPRALRDKLRAASGSCPPANYRDGAVVLENAVLLSILAELGASTPTPVRPQVYGRSDRQGPSPSLILSSLRFPYSERHVSCFLLFLSRVGHGEGPVEDRGGWRLYITARRLGVAIMLVDLSKKLPTRFLATPLGKRSVHRQLNFDFAMTKPPSKTEVEPSNMIPVTLDDFEGEDRKAMEEYINELTREALMRASTRTRQGVIIKPGPHPKLAPDLVSNDEVTQSIQQQVASTIDSSMIGFKDKLDATFEGKFDEFLRFKFGPLMADYMSKDKAFTTANQPPIDQMGSRTDGAAHTVGPTGPDGRSDRDLAVGPTGQTAGPTGYYPGGQTGTQAGPIAPLDAGPIGPWAGQTEFPNLPSLVVKMRFRDVRNRCYSLNITDRDLAGLAFTGLIAPLRERLDGQQFLDVSQLMQRALAQESRVRDNKKLVRPYDKKPNVNVIDYPEASDSEEEGDHDIYVAEWSWTNKNKPFVCSNLMPTPRKDRQSEVQSAIDEGRLKFTDGSKMKLDHDPFPVNTINFNNKKVLIRPEQAESTKGKGVVIGEPRPKMIVPKKPEVGVWKENKSGASTSKAPRKTKVTFDMLLEKYEKQGGEKARNKGKRPRSPPRERFGHSPRRSHLPSYHHPQDISWGSYPMPPPGYPYPYFMPWGAAPPMFNHMPPMQFNQGWGGPRRPIHECLSSPNNGRFYDKNRANEEKREGKRVKVEARTSEVITIKVGSHDVPIPFGDEVGESSSKKSEAGTSSSQSAGLTWPSGRSDRSHVAGLTGPSGRSDRRPDNGPTDSLDRFDRAPNVGLTGPSGWSDRWSTSSLTRLQRRFDRRFAKGDVGASSSSSKVNRGHYLPPGTEPNPRWMPKDLTATQNRRLQRLRAQEMREKKAEQQRDNRFNELRPPPVWKRKSIEKEKPVVVEEKEEQSVDKGETSPKEDMDINMVCMLPMEFCAMDEAEVAQFSLGPKDAVFEKPDESNRHMKPLYLKGHVDGKPVSRMLVDGGAAVNLMPYSLFKKLGREDDELKKTNMILNGFNGEPTEAKGIFSTELTVGNKTLPTAFFIVDVQEWLQKRVQEYRSTKNDIGETIEDFDEVEKLGQGFTSADPLEEVDIGDGTKPRPTFVNKNMRADYKVKIIELLKEYVDCFAWEYHEMPGLSRELVEHRLPIKPGFRPYKQPPRRFNPLLYDRVKEEIDRLLKAGFIRPCRYAEWVSSIVPVEKKGSGKIRVCIDFRDLNKATPKDEYPMPIAGMMINDASGHKVISFLGSNAGYNQIFMAEGDMYKTAFKCPGFVGLFEWIVMTFGLKNAGATYQRAMNLIFHDLLGIILEIYIDDTVVKSDGMEGHIADLRLAFERMRRYGLKMNPLKCAFGVSAGKFLGFMAHERGVEIDPKKIEKIRDFKAPTCKKEVQKLLGKMPILLGGKQQEAFEELKRYLSTPPVVRAPKARKPFRLYIASEDKVIGAVLTQEKDGKEYIITYLSRCLLDAETMPILSGRIGKWAYALIEYDLAYEPLKSMKGQIEIEEDWRIPFIRYLKDPTLKVDRKIRQQAFKYTLLNGDLYRRNIDGVLLKCLHEDQSKVAMGEGHRFVLVATDYFTKWAEAVPLKNMTHTEANGQAESSNKTLLKLVKKKIEEYPKRWHEVNLGSLRYIKQEDLSSEDYKTLMGDNLDEVIDKRSKALEEIEKEKKRMAKAYNKRVKAKLFQVGDLVWKTILPLGTRSKEFVANSPQGSADQPPARPPRPRQGLHRRQAHHGAFTDGELDLVIGDGGDGRHGMEVPVFDGEGRRYGLTCGYSDYTMCYRLFGAAGEFGRFRANNREVRDVAVGKDKLMKVFTFRSPALRPVEVDLDDGHPDGALGMIVLFYDLDAKEAVKNELLDTDTLTVN

SEQ ID NO: 128380 - protein, 818 aa, Oryza sativa
  unsure (1)..(818): unsure at all Xaa locations
  Clone ID: PAT_MRT4530_30739C.1.pep
MNNIFIFNNIISSLRLIEXPFKGRSFTWSNMQSNHLLEQLDWVFTSNDWTLKYPNIVVYTMPRAISDHVPFVIKIESSIPKSNVFRFENYWVQIEGFFDHVAQVXSVDPSFXYSAKRITFKLKRLTKGLLIWSNGFSKLLQLIKSCNKVLDFLDLIEEVRALSLMEWNFREIVKKQXLKLFSVXEEYWKKRCTNRWIQLGEXETKFFHAMATERFKNNLIAQINDNGSVVSAHHDKASLFSDTFQSRMGVSTXSAMSFDQYDLIPRNDNLDSMVDHFFTLEMDDLVKSLPIDKAPGPDGFNGCFIKNCWPIIAQDYYRLDAHFHAELVDLQCINSSYIILVPKKVNLECVNDFRPISRMSITLKFLTKLMADRLQGVIKKIVHENQYGFIKERTIQDYLAGSFEYIHQCQQSKREILILKLDFXKAFDTIEHSTILKIMKHXGFPTKWLNWVKMVFESASSSILLNGIPGKFLRCKRGVRQGDPLSPLLFVIGAELLQDVLSRAMSLGLLSKPINGQGGGDFPGVQHADYTLIFLKASQRELLCLKALLHTFNQDTGLKINYHKSNIYPLNVLDEKLENXGSVPFTSLGFPKGSTRPRVVDMAAVVDRVERRLTAIASSLPYGXHVTLINSVLSAIPTYCMCSLKLPKTIIEAIDTARRNLWKGSNVLVKRKSLAAXDEVCRPKDKGGLGVLNLYIXNVALLLKHLHKFYTAQDLPWVRLIWASCYRTKVPHMVFNKGSFWWRYIIQLADIYRAISQCTIQSGTSVLFWDDLWNGEIKKLKYRDLFSQTTLRWESVNHFLNLQLEDYFNLPLDDQAYR

SEQ ID NO: 128381 - protein, 791 aa, Oryza sativa
  unsure (1)..(791): unsure at all Xaa locations
  Clone ID: PAT_MRT4530_3073C.1.pep
LRGTIEAIDAGHGLEASQLSGRSAASPLRRLVLATAIADSNNDFTAGLPPSPPTGVIAYTVGRSHHRSWASMSSPTGWPSPPPTGVSACTAGLLCRRCWASTTSPPACLRRRRVVPPPIRSVGHTTVDGHRHLHRRPASVAADWCPRLYGRLVTPPLMGIVIYTAGLPPSPPSGASAYTAGLLCRRCWASTTSPPACLRRRRVVPPPTRLAYYAAAVGRLRLHRRPASVAAEWCLRLHGWPIMPPLLDVYILTAGLPPSPPXWCLRLHGWPIMPPLLGVYDFTXRPASVAAEWSLRLHGWSIMPPLLGVYDFTAGLPPSPPTGVFIVIDGRLCSHIGHFCHHQGEYYKAKIQIQICIKGIHGFRLISYAPGMXSVRTSPTGLPSPLPTGVSACTAGXLCRHCWASTSSPXPACLRRRRLVFPPARLAFMPPLLGVYVFTDRXASSAADWCFRLHGXLLCRRCWASTSSPTGLPSPPPTGASACTAGLYAAVVGRLRLHRPACLRRCRLVLPPARLAFMPPLLGVYVFTDRLAFAAADWCFRLHGWPLCRRCWASTSSPTGRRIRRXLVSPPARLACYNAXLMLSSSRLATSLSLLIGISIFNTSCLRXHGCRLVFPPARWPIMPPLMGVYVFTDRLAFAAADWCLRLHGWPXLCRRCWASTTPPPACLHRRRLVFPPARXAYYAIVDGRLRLHRPACLRRRRLVSPSARLAYYAVVVGRLRLHHRPASIAADWCFRLHGWPXLCRRCWASTSSSAGRLVRHRLMFPPARXWPIMPPLLGIYILIAGRLVCC

SEQ ID NO: 128382 - protein, 1465 aa, Oryza sativa
  Clone ID: PAT_MRT4530_30740C.1.pep
MTKPLSKTEVEPSNVIPVALEDFEGEDRKAMEEYINELTREALMRASTRTRQGVTIKPGPRPKLAPDVTLKDKASTTANQPPIDQTGGKTDGTAFTTGPTGPDGRNRARTYKKPYPDYYDNVPFPRNYRVPEFAKFSSEDVAPLRERLDGQQFLDVSQLMQKALAQESRVKDNRKLARPFDKKPNVNVVDYPEASDSEEEGDHDIYVAEWSWTNKNKPFVCSNLMPTPRKDRQSKVKYSFDVAKCEKIFDYLLQEKQIRLPKGHVIPSQEELKCRAYCKWHDSHSHSTNDCNVFRRQVQSAIDEGRLKFTDGSKMKLDHDPFSVNTINFNDKKVLIQPEQAKSAKGKEVIIGEPRSKMIVPKKPEVGVWKENRSGASTSKAPRKTKVTFDMLLEKYEKQGEKREGKRVKVEERTSEVITIKVGSHDVPIPTGDGIGMSPNRKSEAGTSSSQSAGLTRPSGRSDRGRAAGLTGPLGRSDRRLDSGPTGTSGWSNRAPSVGLTGASGRSDRWSTTGLTGLQRRFDRRIAKGDVETSSSSNKVNRGHYLPPGIELNPRWMPRDLTATQKRRLQRLWTQELREKEAEEQRDKRFNELRPPLFCAMDEAEVAQFSLGPKDAVFEKPDESNRHMKPLYLKGHVDGKPVSRMLVDGGAAVNLMPYSLFKKLRCEDDELKKTNMILNGFNGEPTEVKGIFSAELTVGNKTLPTAFFIVDVQEYRSTKNDIGETVEDFDEVEKLGQGFTSADPLEEVDISDGTKPRPTFVNKNMRADYKVKIIELLKEYVDCFAWEYHEMPGLSRELVEHRLPIKPGFRPYKQPPRCFNPVLYDRVKEEIDRLLKAGFIRPCRYAEWVSSIVPVEKKGSGKIRVCIDFRDLNKATPKDEYPMPIADIMINDASGHKVISFLDGNAGYNQIFMAEEDMYKTAFRCPGFVGLFEWVVMTFGLKNAGATYQRTMNLIFHDLLGIILEIYINDIVVKSDGMKGHIADLRLGFERMRQYGLKMNPLKCAFGVSAGKFLGFMVHERGVEIDPKKIEKIRDFKAPTCKKEVQKLLGKVNYLRRFISNLAGKIDAFVPILRLKKEADFTWGAKQQEAFEELKRYLSTPPVVRAPKAGKPFRLYIASEDKVIGAVLTQEEDGKEYIITYLSRRLLDAETRHIVRRDNSRANDLAQQASGYNVKRRLFLILEEPVLDFKSLCEIGKIGDQGRSDQRCTAGLTGDQGRSDRPHAAGLTGDPERSDRPCMVGDRFMLVATDYFTKWAEAVPLKNMTHTEANGQAKSSNNTLLKLVKKKIEEYPKRWHEVLFEALWAHRISKHGATKVTPFELVYGQEAVLPVEVNLGSLRYVKRDDLSSEDYKMLMGDNLDKVIDKRLKALEEIEKEKKRVAKAYNKRVKAKLFQVGDLVWKIILPLGTRSKEFGKWSPSWEGPYRVCGIVRGNVYFLEILQGERFQRTINGKYLKKYFPSVWQDA

SEQ ID NO: 128383 - protein, 980 aa, Oryza sativa
  Clone ID: PAT_MRT4530_30741C.1.pep
MMVPKNPVFGVWKENRSEVSTSKAPKKTKVTFDMLLEKYEKQGGERARNKGKRPRLPPRERFGHSSRRSQSPPYHHSLDMSWGPYPMPPPGYPYPYYMPWGTTPPMFNHMPPMQFNQGWGGPRRPIHERLSSPNNGRFYGKNRVKEEKREGKRVKAGLTADLISVGPAHLAGLTGAFGRSDRWSKSSLTGIQRRFDRRFASSSVRASSSSNRLNRGHYLPPRTEPKPRWMPKDLMATQRRRLQRLRAQEIREKKAEEQRDRSPKDAVFEKPDKSNRHMKPLYLKGHVDGKQVSRMLVDGGAAVNLMPYSLFKKLGREDDELKKTNMILNGFNGEPTEAKGIFSAEFTVGNKTLPTAFFIVDVKEANLELLQKRVQEYRSTKNDIGETIEDFDEVEKLGKGFTSANPLEEVDIGDGIKPRPTFINKNLRADYKVKIIELLKEYVDCFAWEYHEIPGLSRELVEHRLPIKPGFRPYKQPPRRFNPLLYDRVKEEIDRLLKDGFIRPRCYAEWVSSIVPVEKKGSCKIRVCKDFRDLNKATPKDEYPMPIADMMINGVSGHKVISFLDGNAGYNQIFMAEEDMYKTAFRCPGFVGLLEWVVMTFGSKNVGATYQRAMNLIFHDLLGIILEIYIDDIVVKSNGMEGHIADLRLAFERMRRSGLKMNPLKCAFADFTWGAKQQEAFKGLKKYLSTSKNVRTPKTVKPFRLCIASKDKVIGAVLTQEEDGKEYIITYLSRRLLDAETRYIARHDNSRANDLSQQASCYNVKKGLFLVLEESVLDFKPVTTGNNPTGVPDVRALILVPGGKNLGGGGTEPQERGGAPGGGDGGGRARRTRGCPTMRPASSSPPTRAPSPAPKTTTTRITCSLMNLVVFLSDGICWDCFEFVDDAVDLDEAAAGDLVDLVPPHLPPHLHRLAVPAIRRVSVRHQHVVAGVRIGVGGAPPHHPLGALNFAMRAACGEQRAPDERVRVYWHCRDELLCLV

SEQ ID NO: 128384 - protein, 398 aa, Oryza sativa
  Clone ID: PAT_MRT4530_30742C.1.pep
PAGALALFLVSFLSLRSLRPTAAPSLSDAQSFSPNPAAAASEVYHSPAVFSAGYAEMERSFRVFVYPDGDPGTFYQTPRKLTGKYASEGYFFQNIRESRFRTDDLEKAYLFFVPISPHKMRGKVPSSLLLVTYAWLILHIRSYDRSILFLDLYWWCPLCSSFRGHWGVGADHFFVTCHDVGVRAFEGLPFIIKNSIRVVCSPSYNAGYIPHKDVALPQILQPFALPAGGNDIENRTILGFWAGHRNSKIRVILARIWENDTELAISNNRINRAIGNLVYQKHFFRTKFCVCPGGSQVNSARISDSIHYGCMPVILSDYYDLRFSGILNWRKFAVVLKESDVYELKSILKSLSQKEFVSLHKSLVQVQKHFEWHSPPVPYDAFHMIMYELWLRHHVIKY

SEQ ID NO: 128385 - protein, 2004 aa, Oryza sativa
  Clone ID: PAT_MRT4530_30743C.1.pep
METATGAEEGGGAARVDGVDGAPAVGDRNGEVDEVGEDAAKPKEAAPRWEVVRGDDGGGPELGGDGGERERRRELDSGGGRGRQLMQRALAQECRVKDNKKFARPFNKKPNVNVVDYSDASDSEEEGDHDIYVAEWSWTNKNKPFVCSNLMPTPRKDRQSEVKYSFDVAKCDKIFDYLLQEKQIRLPKGHVIPSQEELKRRAYCKWHDSHSHSTNDCNVFQRQVQSAIDEGRLKFTDGSKMKLDHDPFPVNTINFNNKKVLIRPEQAESTKGKEVVIGEPRPKMMVPKKPEVGVWKENKGEASTSKAPRKTKVTFDMLLEKYEKQGGERNHDKWKRPRSPPKGRFGHSLRRLRSPPYFHPQDMSLGSYPMPPPGYSYPYFMSWGATPPMYNHMPPMQFNQGWGRPRRPIHERLSSPNKSQFYGKNRVNEEKREGKRTKVEERTSERRFDERATKGDVRVSSSSSKVNRGHYLPPGTEPNPRWMPKDLTATQKRRLQRLRTQELREKKAKEQRDKKFNELRPPPARGIVSAELTVGNKTLPTAFFIVDVQEYRSTKNDIGETVRDFDEVEKLGQGFTSADPLEEVDIGDGIKPRPTFVNKNMKADYKVKVIELLKEYVDCFAWEYHEMPGLSRELVEPRLPIKPGFRPYKQPPRRFNPLLYDRVKEEIDRLLKAGFIRPCRYAEWVSSIVPVEKKGSGKIRVCIDFRDLNKATPKDEYPMPIADMMINDASGHKVISFLDGNAGYNQIFVAEEDMYKTAFRCPGFVGLFEWVVMTFRLKNAGAIYQRAMNLIFHDLLGIILEIYIDDIIVKSDGMEGHIADLRLAFERMRRYGLKMNPLKCAFGVSAGRFLGFMVHERGVEIDPKKIEKIHDFKAPTCKKEVQKLLGKVNYLRRFISNLAGKIDAFFSILRLKKEADFTWGAKQQEAFEELKKYLSTPPVVRAPKAGKPFRLYIASEDKVIGPVLTQEEDGKEYIITYLSRRLLDAETRPILNGRIGKWAYALIEYDLTYESLKIIKGQIVCDFIVDHHIDVAYEGESKWLGATSRGYNVKRGLFLILEEPVLDFKFLCEIGKVGDQRRSDRRCTAGLTGDQGRSDRPHAAGLTGVPERSDRPCVAGLTGSRQGAGGHVSSNFEAELIVNSDVCAQDTEEDWRIPLIQYLKDPTHKVDRKIRRQAFKYTLLDGDLYRRNIDGVLLKCLDEDQSKVAKGEVHEGICGTRQSDHKMNWLLRRAGFYWPRMIDDCFKYYRGCEACQRFGNVQLAPAAVLNHIIKPWPFRGWALDFIGQIYPSSSKGHRFVLVATDYFTKWAEAVSLKNMTHTEANGQAESSNKTLLKLVKKKIEEHLKRWHEVNLGSLRYIKQDDLSSEDYKTLMGDNLDEVIDKRLKALEEIEKEKKRVAKAYNKRVKAKLFQVGDLVWKTILPLGTRSKEFGIILEIYIDDIVVKSDGMEGHMVDLRLAFERMRRYGLKMNPLKCAFGVSAGKFLGFMVHERGAEIDPKMIEKIRDFKAPTCKIDAFVPILRLKKEADFTWEAKQQEAFEELKRYLSTPPVVRAPKAGKPFRLYIASEDKVIGAVLTQEEDGKEYIITYLSRRLLDAETRHIARRDNSRANDLAQQAFGYNVKKGLFMILEESILDFKSLCEIGRIGDQGRSDRHCTAGLTGDLGRSDRPHAAGLTGVPERSDRPCVAGLTGVQQSAGGHASIDLESELFDNSDVCAQDTEEDWRIPLIQYLKDRTLKVDRKIRRQALKYTLLDGDLYRRNIDGVLLKCLDEDQSKVAMGEGHRFVLVATDYFTKWAEAVPLKNMTHTEANGQAESTNKTLLKLVKKKIEEHPKRWHDVLSEALWAHRISKHGATKVTPFELVYGREAVLPVEVNLGSLHYIKQDDLSSEYYKMLMGDNLDEVIDKRLKALEEIEKEKKRVAKAYKKRVKAKLFQVGDLVWKTILPLGTRSKEFGKRSPSWEGPYRVCGIVRGNAYFLETLQGERFQRAINGKYLKKYFPSVWQDA

SEQ ID NO: 128386 - protein, 68 aa, Oryza sativa
  Clone ID: PAT_MRT4530_30744C.1.pep
RRHLPGMPSSPRSRAAPPLCRPTALPSWDAAAAPKPRGCRSTAPAKPPSLRCAMPPPPPSLCAPFAKD

SEQ ID NO: 128387 - protein, 310 aa, Oryza sativa
  Clone ID: PAT_MRT4530_30745C.1.pep
MDDQGEKLYREIWTGNQGKRGKKLPTRFFVTPLGKSAQRHLSFDVAITKPPSTKAEVEPSNVIPITLKELDEGALKAMEEHLKAYTQEMLMKTCTRTRQGVVLKPGWLPKPNFDVHRLENIEELISGIIRDKFGIEAGNPAKVYQKPPPDYYDNILYPHGYRVPKFTKFSGEDSRTTWEHVEQRFYDYFYKGETELRLSDLTSVRQKYNESVIDYGKGFRDVRNRCYSLNITDRDLADLAFNGLIAPIKERLVGQQFLDVSQLMEKAPAQESRIKDSKKFVRSYVNLIDYPEASDSNNEGDHDMYVAEWS

SEQ ID NO: 128388 - protein, 61 aa, Oryza sativa
  unsure (1)..(61): unsure at all Xaa locations
  Clone ID: PAT_MRT4530_30746C.1.pep
FFFFFFFFFFFFKKKLHFIIYLIERITVNFGMRLLPNHXLTNLHPRGLFXMQQRCPCIFLP

SEQ ID NO: 128389 - protein, 536 aa, Oryza sativa
  unsure (1)..(536): unsure at all Xaa locations
  Clone ID: PAT_MRT4530_30747C.1.pep
MGSTDLGCSGDESWDVGFLLEIRSFSTADPGARHGRRRRRCGGASALSARPQGKITRLNALLHAVIEIEVNSDALQQPARADTEHASGHSYCGPLHGVPILKDNIVKRDRLNTTAGSFALLGSVVCRDAGVTAGLRAAAAAAIILSKANPVPNGWSARRCTSSNHLTVMDSLAEFVPANQRQLIILQLATHRKIIFASTRSCSMDMIYLQDMIALGGDEAHSLVVKVPHPRARAADCRAPRGSRSARPKTATSARPAGDGAPAPLWSPAAAIGTAERRPREGREXGGNEAAVHGSPKVDGDDGKGDRSGGRRRRGSGGRGRRRSGGRRARXRGWTGRRRCGEAGGGDAGAGDGPGEREEAAGGRRRRRRERATARARFRRGEGAAKGGNGRRRCGEGLNGVGRGRGRPGKEGNRPGGPAAINGAGEICGGKSGRXMRERERGKWGERGRGSRGVIPPTXMHAGTAGCGGFGGGGGAXARAERREVGDDGWAPPASEGGGRARPSAARAXGAEWAAGERREGEGDGPXRPKRGKGDF

SEQ ID NO: 128390 - protein, 75 aa, Oryza sativa
  Clone ID: PAT_MRT4530_30748C.1.pep
SVPTMAPSSKGSGGGSGSHNYRKSFCVRAERHIAAQKAGPHTREGAHLTNVVSSRTCHYQPLCLHEKLSSVGILD

SEQ ID NO: 128391 - protein, 40 aa, Oryza sativa
  Clone ID: PAT_MRT4530_30749C.1.pep
YCKRGSMQTLAWQGAYVVRSVYAKFALSSVDLYIGSRCGF

SEQ ID NO: 128392 - protein, 1379 aa, Oryza sativa
  unsure (1)..(1379): unsure at all Xaa locations
  Clone ID: PAT_MRT4530_3074C.1.pep
CFDSWRASVYDFTAGLPPSPPTGVLAYTVGWSHHRSWASTTSPPACLRRRRLVPPPTRLAYYAAAVGRLRLHHRPASVAADWCPSLYGRGVSACTAGLLCRRCWASTTSPPACLRRRRLVSSPIRSVGHTTVDGHRHLHRRPASVAADWCPRLYGRLVTPPLMGIVIFTAGLPPSPPIGASAYTAGLLCRRCWASTTSPPACLRRRRVVPPPTRLAYYAAAVGRLRLHRRLASVAAEWCLRLHGWPIMPPLLGVYDFTTGLPPSPPTGVPAYTVGCGASAYTAGLLCRRCWASTTSPPACLRRRRLVPPLTRLAYYAAAVGRLRLHRRPASIAADWCFRLHGWPLMPPLLGVYVFTDRLVFAAADWCFRLHGWPLMLPLLGVYVFTDRPPRPPPTGASACTAGLYAAVVGRLRLHRPAASTAADWCFRLHGWPIMLPLLGVYVFTDRPPHPPLTGVTACTAGLLCRRCWASTTPPPACLHRRRLVFPPARLAFMPPLLGVYVFTDRLAFAAADWCFRLHGWPLCRRCWASTSSPTGLPSSLPTGVSACTAGLYAAVVGRLRLHRPACLRRCRLVFPPARLAFMPPLLGVYVFTDRLAFPAANXVSRLHGWPLCRRCWASTSSPTACLRRCRLVFPPARLAXYAAVVGRLRLHRPACLHRCRLVFPPARLAXYAAVVGRLRLHRPACLRRCRLVFPPARLAFMPPLLGVYVFTDRLAFAAADWCFRLHGWPLCRRCWASTSSPTGRLVRRRLVLPPARLAYYAAVVGRLRLHRPACLRRHRLVSPSARLAYYAAVVGRLRLHXRLAFAAADWCFRLHGWPLCRRCWASTSSPXPACLRRRRLVFPPARLAFMPPLLGVYVFTDRXASSAADWCFRLHGWPIMLPLLGVYVFTDRXPSPLPTGVSACTAGLYAAVVGRLRLHRPACLRRCRLVFPPARLAFMPPLLGVYVFTDRLAFAAADWCFRLHGWPLCRRCWASTSSPTGRLVRRRLVLPPARLAYYAAVVGRLRLHRPACLRRHRLVSPSARLAYYAAVVGRLRLHRPACLRRCRLVFPPARLAFMPPLLGVYVFTDRLAFAAADWCFRLHGWPLCRRCWASTSSPTGRLVRRRLVLPPARLAYYAAVVGRLRLHRPACLRRHRLVSPSARLAYYAVVVGRLRLHHRLASTAADWCFRLHGWPLCRRCWASTTPPPACLHRRRLVFPPARWPIMPPLMGVCVFTDRLAFAAADWCFRLHGWPIMTGRLVHRRLLPLLMNIIVFRRRLVMLSPTSAFIFTTARLHYQFTSSRQCNFVIMVERLHLYYLRHWQTLLLLLRKFCYFTNHDVFVSLDISACDAMLFYYNKRLSNIQDFYLDIFNTYLQSSNDYSTTRSYNSRLYVQLFPN

SEQ ID NO: 128393 - protein, 71 aa, Oryza sativa
  Clone ID: PAT_MRT4530_30750C.1.pep
GGRQGGSGATAGGSGAAEGGGQSDGRRQAEQRGGGWKRSVGGAVGGATAGARHRVEHRGSGRRRGLPARHC

SEQ ID NO: 128394 - protein, 141 aa, Oryza sativa
  Clone ID: PAT_MRT4530_30751C.1.pep
APVCVPLLYIMLRMWSNWRAVASVSSSHGEETGSSVAAAPGKWCPGDGKYWKVGSVSVASSPPEKKYSSGLLETTSVLPGKPAEAAGGGAGAVKPASKFLTRRRPPMGCLKVIFFLLNGGFLPCLCYCHGLLINEAKLAGK

SEQ ID NO: 128395 - protein, 64 aa, Oryza sativa
  Clone ID: PAT_MRT4530_30752C.1.pep
MDLTISWNQTLVMSLYLWKVKERRIGHVATHFYPPDFKLQLSINGFRAKYNSSIATATTKYTFN

SEQ ID NO: 128396 - protein, 99 aa, Oryza sativa
  Clone ID: PAT_MRT4530_30753C.1.pep
GTTTTGVAARRRRRGTVGLPGARGGRAVALRRRGELEAGAAEWQWRRRRWRRRPRRSRSSAVERERYRDRDRGRERQRRLSLKRCGGGVCGGGGEDRQV

SEQ ID NO: 128397 - protein, 522 aa, Oryza sativa
  Clone ID: PAT_MRT4530_30754C.1.pep
MVHPDDGRRSEIVMDAAGRSCEVDEDYISGLPDDLLHNILLRLRSTAAAARTSVLSRRWLRVWAHLPDLEHGNFRAPAAAVDSVLDSIDAAMAASQALAIDSLCITVEKENRTRQLPLAAIPAHRVIAWLRFASRRREESGRGGEEKTMEALPIDLLAMERATSIVLDLGHRFRLRLMMIPPPVAGGSGAFTKLTALTIITAAVESRDLEALVSSHCPRLERLSIIGVKLLGGGGAASSFSIRSDSLTSLYIHLRDSSLEEVVAPRLEKLHASGDTGFHVAAPMLAEVSWQDVHRAYLSNGVRRRPLKIAGAARSLRRLCITSPCSVGYLLQRFDAVDWLDLTLAVPQGVEAYRTFMDDMDNLPKCETLVVALIAQFHGFVPSMLHLLRRCSHVKKLVVMIIEHRDPPPLSPSSFCSTACPCRSPDIYKTDGIALDCLEEVEIRPIGSAPVGVVAEFVDQIFRLDAAMLKKVVYQQSPFRPDQEGYEKVRSMYLSNPRIEFRQLASTTQSKDVTVLCSVNQS

SEQ ID NO: 128398 - protein, 118 aa, Oryza sativa
  unsure (1)..(118): unsure at all Xaa locations
  Clone ID: PAT_MRT4530_30755C.1.pep
QRSSRSSASPIRLSPSPRSMSRTRPSSAASRSSPPFALQPPTPSWRPSTPPSAKTLTPPRRSPSPASTLTPPRRSPSPASRRMXRISSSPKLQGWHSNVPGFSHDAPANLRTSLPDHP

SEQ ID NO: 128399 - protein, 498 aa, Oryza sativa
  Clone ID: PAT_MRT4530_30756C.1.pep
MASMAALLVVVFLAGCHVGVVVAQGRSTAAAHGIGVNYGRVADDIPPPARSVEPLRAVGAGSVKIYDANSSVLRALAGTRMRVSIMVPNEIIPGLAASAAAADRWVAENLVPYYPETRVKYLLVGNELLSDYSIANSTWPRIVPAMENLHVSLRRRRISSVKISTTLAMDALTSGSFPRPPSAAAFRPDIAGDVVRPLLRFLNGTNSYYFVDAYPYFVWAGNNDTVPLEYALFQGGGGGGRYVDPGTGLTYTNMLDEMLDAVVHAMAKLGYGGVKLGIAETGWPNGGDYEQIGCNAHNAAIYNRNLAARMARSPGTPARPGAKMPVFVFSLYNEDLKPGPGTERHWGLYYANGTAVYPVDLAGARPLRSYPLLPPPENDAPYKGPVWCVLAGRRGEKLNETAVGDALAYACGQGNGTCDAIQPGGECFRPNTTAAHASYAFNSYWQQLRKTGATCYFNNLAEETTKDPSKPEKYLENFTPFLLRFRLIHANAIYDFHL

SEQ ID NO: 128400 - protein, 397 aa, Oryza sativa
  Clone ID: PAT_MRT4530_30757C.1.pep
MPPSPSTRRSPSRETFLRRVNSFGNALPAKPKDEDLTLFADMQKIENDNFLLEPSEDFDESISKLSYFPDVKLGVNIPTRRESHDLLDVDGDKNDYEWLLTPPETPLFRSLDDEEEQSAGQDSRGRTKSKPIRISGSSTVDNTQRSSRSSASPIRLSPSPRSMSRTRPSSAASRSSPPFALQPPTPSWRPSTPPSAKTLTPPRRSPSPASTLTPPRRSPSPASRRMSTGSTPALNRTRGPSPVKTNRISSSPKLQGWHSNVPGFSHDAPANLRTSLPDHPLSHSRGGSPSPPISGRDMGSRGRRQSLSPTPSRRASSSHSIERDRLSSYSKASATSSGEDDLDSMQSLPVAYSTSPAVKKSLSMMKTRTIASSKKPSTTFSTSSVPKRSFDSAVWLM

SEQ ID NO: 128401 - protein, 48 aa, Oryza sativa
  Clone ID: PAT_MRT4530_30758C.1.pep
ALPAASRIDPEIKQNFNSSCWFCLHLAIDGHLLVMNFIVRGVKSVVVR

SEQ ID NO: 128402 - protein, 58 aa, Oryza sativa
  Clone ID: PAT_MRT4530_30759C.1.pep
LGWQADVANGGGMGGDGGRVFCSKALAALCWGSKGPECKKASLGRPFCRRPLAALWPG

SEQ ID NO: 128403 - protein, 74 aa, Oryza sativa
  Clone ID: PAT_MRT4530_3075C.1.pep
GRVGGHMARRRRRTHMRSAVYALRPGHHALEEILDCIGPCVDGWHSTGGSHSLTRRDLLLEIADLAHKPDIFVS

SEQ ID NO: 128404 - protein, 81 aa, Oryza sativa
  Clone ID: PAT_MRT4530_30760C.1.pep
LARCRRHYYAAVKRHRRRPTLTPPPPPRARHAAAPRRRAATPCRRDATPPPGPHATAAARRRRAGPRHPDAAAAPPRQFSW

SEQ ID NO: 128405 - protein, 89 aa, Oryza sativa
  unsure (1)..(89): unsure at all Xaa locations
  Clone ID: PAT_MRT4530_30761C.1.pep
MNLDWDSTQELVDFRVASTVSVDIIXPNTYVKRTSTTTACRMGTDLAIMLINNVAPLYSGSFCKSSRRRQIYAAKGDCNIYRGAGKYLR

SEQ ID NO: 128406 - protein, 133 aa, Oryza sativa
  Clone ID: PAT_MRT4530_30762C.1.pep
RGLSFIFYYFFLVEHFFFFFRGRKKARQQFNRGKNKKKTEEKTTTNHKRGEQSMAKQGSSTMPKQLRRALPTHGSQPPKNTKTQYYSQSCSATLGSKAQSRPTKSRMAGLWEGSPAVQRKANRKASIKSLSSP

SEQ ID NO: 128407 - protein, 751 aa, Oryza sativa
  Clone ID: PAT_MRT4530_30763C.1.pep
MTKPPSTKAEVEPVNVIPVALEELDEGARKALDEHLKAYTQDLLMKACARTRQGVIFKPGSLPKHTFDMVSAEEVSQSIQQQIAHTIDSSMVTLNNKLDASIETRCEEFMRTKFGPLMADFMFKDKASTSASQAPIDQISSKTDGVKTQQTDEGWSAHTAGLTGLDGRLDRDFAAGQTGQTGYYPGGQIGPQTGLTAPLDAGQFGAWTGQTGAIIPIQGVDPMTNNMFLYHIPAPNPPISTIGPQVQPHIPNAYNDPTRGYTPDTRHGQYNYIAPQPQPIKPPNPPPNQNRPDNMEELISGIIKDKFGIKARNHTKVYQKPYPDYYDNIPYPRGYRVPEFTKFSGEDNEGRLKFTDGSKMKLDHDPFPVNTINFNNKKVLIGQGVVIGEPRPKMMVPKNPEVGVWKENRSEVSSSKAPKRTKFYAKNRANEEKREGKRVKVEIRTSEVITIKVGSHDEPIPSGDEVGESSSNKSNAGTSSSQAAGLTRPSGRSDRSPKAGLTGPSGRFDRQPNVGFDGYQKRRLQHLWAQELREREAEEQRDRRFNELRPLPTKMWRHKSIEIEEPVVVQKEKEEQSVAKDESSPKEDMDVNMVCMLPMEFYAIDEAEVAQFSLGPKDAVFEKPDESNRHMKPLYFKGHIDGKPVSRMLVDGGAAMNFMPYSLFKKLGHGDDELKKTNIILNGFNGEPTEAKDIFSVELTVGNKTLPTAFFIVDVQEANLEWLQKRVQEYRSTKNDISETIEDFDEVEKLG

SEQ ID NO: 128408 - protein, 308 aa, Oryza sativa
  unsure (1)..(308): unsure at all Xaa locations
  Clone ID: PAT_MRT4530_30764C.1.pep
MKARAIRGCSVTTCTLVSCVAATTSGATPGHVNPGGQGYRERRARDRADASARGEELSPSPSEEKRCERREEKRRGGALLCSLLVFLYSPTGRRAPPPHPPELAVSRNRRGWGSLLHSKLAAREGFRRPAASIPSPPGQLGNWNPDFIQLNYLPPQMAAAHKLGFREEDALRFLFGEDLLAMHHSAAASSFDRSQPEVQVFRDVFSPSPPLLHVAETSSLLPTAAAAAPAPPPPPAPAPXPPPPARAAASTRARGGRRRRHRSQTFSRPRATWEWEWEWEWRPRVGRRIAGLRCLLARRRQLSKCNRR

SEQ ID NO: 128409 - protein, 41 aa, Oryza sativa
  Clone ID: PAT_MRT4530_30765C.1.pep
IGKTQRADGMNNNGTEHCRLHGGPRMIEENLPDHYQIVLYT

SEQ ID NO: 128410 - protein, 827 aa, Oryza sativa
  Clone ID: PAT_MRT4530_30766C.1.pep
MTKSPPSKSEVDPSNVMPVTRESLDEEARKAFDEHMKKYADELLKTCTKTRQGTIFKPDLVSSSTIDKMTGQTEYYSGGQTGTQAGLTAPLDAGQTGPWTGQTGAIVPIQGESRVKDNKKFVRPYEKKPNVNAIDYSEASDSEDEGRLKFTDGSKMKLDHDPFPVNTINFNDKKVLIRPEQAESTKGKEVIIGEPRPKMIVPKKPEVGLWKENGSEASTSKAPRKTKATLDMLLEKYEKQGDERARNKGKRPRSPPRERFGHSPRRSQSPPYHHSQHMSWGPYPMPPPGYPYLYYMPWGATPPMFNHMPPMQFNQRWGGPRRPIHERLSSPNNSRFYGKNQVNEEKREGKRVKVEARTSEVITIKVGSHDVPIPSGDGVGESSSNKSETGTSSSQSAGLTGPSGWSDRSSTDGLTGPSGRSDRRPQVGLTGPSGRSDHRPHVGLTGASGRSDRWSTSEEKEEQSVVKDESSPKEDMDINMVCMLPMEFCAMDEAEVAQFSLGPKDAVFKKPDESNRHMKLLYLKGYVDGKPVFRMLVDGGAAVNLMPYSLFKKLGREDDELKKTNLILNGFNADLRLAFERMRRYGLKMNPLKCAFSVSADHHVDIAYEEEVCLFEVIPWKIYFDGSSCKEGQGIGANGQAELSNKTLLKIVKKKIEEHPKRWHEVLSEALWAYRISKHGATKVTPFELVYGQEAVLPVEVNLGSLRYIKQDDLSSEDYKILMGDNLDEVIDKRLKALEEIEKEKKRVAKAYRKRVKAKLFQVGDLVWKTILPLASNQREILEEMLPERLAKCLGGAMAGDFISGQISACGDVLFRQPICRAISRVH

SEQ ID NO: 128411 - protein, 111 aa, Oryza sativa
  Clone ID: PAT_MRT4530_30767C.1.pep
DQGWSDRPHAVGLTGDPEWSDRFVLVATDYFTKWAEAVPLKNTTHTEANGQAESSNKTLLKLVKKKIEEHPKSEDYKTLMGDNLDEVIDKRLKALEEIEKEKRVAKAYNKR

SEQ ID NO: 128412 - protein, 504 aa, Oryza sativa
  Clone ID: PAT_MRT4530_30768C.1.pep
MLHPMELLPRPSNQRVAIAGEDRISELPDDVLVSILEKLGNTRQAVATSVLSRRWLHLPWWIRRPFLSIFQFLPRSARAGGEDGFKNLQQRDLDRAIPPFVRAAMAFLASPTATHCLALRFLLTDEEDDELVYAVRHLLLAAGAAADAGGGGARCSSVQLDVRATADTTEAQMRDGARRRLLLTGLVARPRGLLITKLRLERLWLTAADVAAVLGACARLVHLTLHGCRAGRGEGAALAIDGAPELRELVVRGCGYRRVELRRAPKLVRLTLESWSSTTTTAPLRLAAAPCLREISLVNSCTRRSSQRFRLSELLASATNLDCLSLNFRNEEIWIQPEDSNRFVAAFGRLTTLSLCRIFDECDLLWTLYLLKAAPSLRKFSIGVQKHSCQYGGSEVKQRQILFPEKRNMFWIDFNFQHYHLAQLEICGFEANDKYMIFTRLIMEQAKNLKVVILSDEKTCDECDFQDDGTSSTGSSYPKNKEEKRLIQKQLTEGISSPVRVLVL

SEQ ID NO: 128413 - protein, 950 aa, Oryza sativa
  unsure (1)..(950): unsure at all Xaa locations
  Clone ID: PAT_MRT4530_30769C.1.pep
MTKPPSSKAEVEPSNVIPITLEELDREARKSMEEYLKEVTHEALMRACTRTRQSVIVKPGPRIKPNFNVLNASIENHVEGFLRTKFSPLMADFMFKDKASTSASQAPIDQISSKTDGAKTQQTGEGWTAHIAGLIGLDGRSDRDFAAGQTGQMAGQTGGYPPDTRQGQYNYIAPQPQPIRPPNPPPNQHRPDNMEELISGIIMDKFGIEARNRAKVYQKPYPDXPYPRGYRVPGFTKFSGEDSRTTWEHRFXDLAFNGLIAPIKERLDGQQFLDVSQLMQKALAQESRVKDSKIFVRPYEEKPNVNSIDYPEASDSDGESDHDMYVVECSWTNKNKPFVCSNLILTPRKYRQSEVQSAIDEGRLKFTDGSKMKLNHDPFPVNTINFDDKKFYGKNRANEEKREGKRVKVETRTSEVITIKVGSHDAPIPSGDEVGESSSNKSEAGTSSSQSAGTKDVVFEKPDESNRHMKPLYLKGHIDGKPVSRMLVDGGAAMNLMPYSLFEKLGRGDDELKKINMILNGFNGEPTEAKGIFSVELTVGNKALPTAFFIVDVQENDIGEAIEDFDEVEKLGQGFTSADPLEEVGIGDGTKPRPTFVNKNMRADYKVKIIELLKEYVDCFAWEYHEMPGLSRELVEHRLPIKPGFRPYKQPPRRLTPLLYDRVKEEIDRLLKAGFIMPCRYVEWVSSIVPVEKKGGGKIRVCIDFRDLNKATPKDEYPMPIANMMINDALDQGRSDRDCTAGLTGDQGRSDRPHAAGLTGRARPCLDDDQSKVAMGEVDEGICGTHQSAHKMNWLLRRAGFYWSRMIEDCFKYYMGCKACQWFGNVQLAPATVFNPIIKPWPFRGWALDFIGQIYPSSSKGHRFVLVATDYFTKWAETVPLKNMTHMKANGQAESSNKTLLKLVKKKIEEHPKKWHDVLSEALWAHRISKHGATKVTPFELVYGLAFARS

SEQ ID NO: 128414 - protein, 1167 aa, Oryza sativa
  Clone ID: PAT_MRT4530_3076C.1.pep
MMSTSAGLSAAPSTSPSVAPSSKYAEHLTNLVAVPSLSHDHQYFLGPIGNLDPSEFIIVETNRIPFRLANPNLSHWKNTFKSWPSIEKSTPEKSWPLWFEWVSASKQAHWDEIGISQALALTTANLAKDEPLMAAAIYFWSNTLNAFLFNQGPMTPTLLDIIMITGLDVTSSANPMSLNTKSTFEFKTKSIRISFVSLHVSPAVSIAANWCPRLRDWMVTPPLLGIYVFTDRPPRPPPTGVSAYTAGLLCRCCWASMTSPSACLRRRRLVSPPVRLAYYATAVRRLRLHRRPASVAADWCPRLYGWLVTPPFMGIHVFTDWLALATADWIQIQICTIGIHGFKLISYASGIGQSEHHHRLAFAAADWCLRLHDWPIMLPLLGVYVFTAGLPSLPPTGVSAYTAGLLCRRLLGVYVFTERLAFATANWCLRLHGWPIIPPFVGRLRLYRGLAITAADWCLCLHGWPIMPPLLGVYVFTDRPPRPPLTGVFVYTTLLSLLCKLCYFTNYDVFKSLDILSLGLHKYQTQNSTSFMSRQFPLGKILLSYQYQILNNASAKIAVGSMVGAGGPWWFLQTWLNLVAMKAVNRPSVIEVEFPRLEPITDDDGEERTHCRCMSYGEYASTPADSGAKLSAELLKDWFCSFYEGFQRDARVWFPYEDSMNFDLPADFRFEDINSEKFDKSREVFSAAISPCILPVGIYQGRNIQVSYEFYHPMSSARQFGMGQLPIGLYFADKIQCRGDISSALMMDRLLNIPGPQLGSIENIEFARFRSKAFDKWWGEWKLHLFHQSASMYMTYLFPDAIPQTTESSPPRKSNSGKDIEYAPGLIPNGGQLREPVDAGRKRKTKTSAIDPSVLAPKKKAKKKKSKLADDLPAVDPSIEQALDEEELREDVDQAAAEMSDPEDKTPSASPKQTPPTPTAPAHFRRKKKTAVKKKSATIASKPAPPVLTDLFSFDIKDYLDEEEEDTTSKASATLSDDVKRNLEDISHQLGSSLNSLVADCASIRARFKEIQPLIPDDLANVITLAAYLEQHQFKLKKGKQRLVDRRERKDIETTIQANRQLVHEVKSKLDQLSEGPIKSNIDRLEARKIELLALLQECNAELSLEQQKLANLPKAIEEQKLRLKSAIRNIADMTKSLKVIPGTDAQDAQAIEEVKQIRQRAISAIQ

SEQ ID NO: 128415 - protein, 1859 aa, Oryza sativa
  Clone ID: PAT_MRT4530_30770C.1.pep
MTKPPSKTEVEPSNVIPVTLEDSEGEDRKAMEEYINELTREALMRASTRTRQGVIIKPGPRPKLAPDLVSNDEVTQSIQQQVASTIDSSMIAFKDKLDATFEGKFDEFLRVKFGPLMADYMSKDKASTTANQPPIDQTGSKTDGAAHTAGLTGPDGRSNHDLAVGLTGQTADQNGTIIPIQGIDPMTNASYLYHLRTFDPPISTAANNLQVPPHVPNAYNDVARGYPPDTRQGQYNHIAEQTQPIRPPNPPPNQHGLNNMEDIISEIIRNRFGIETGYCARVYKKPYPDYYDNVPFPRNYRVPEFTKFSGEDSKTTWEHRFRDVRNRCYTLNITNRDLADLAFNGLIAPLRERLDGQQFLDVSQLMQRALAQESRVKDNKKLVRSYDKKPNVNVIDYPEASDSEEEGDHDIYVAEWSWTNKNKPFVCSNLMPTPRKDRQSEVKYSFDVAKCDKIFDYLLQEKQIRLPKGHVIPSQEEFKRRAYCKWHDSHSHSTNDCNVFRRQVQSAIDEGRLKFTDGSKMKLDHDPFSVNTINFNDKKVLIRPEQAESTKGKGVVIGEPRPKMIVTKKPEVSVWKENKSGASTSKAPRKTKVTFGMLLEKYEKQGGERVHNKGKRPRSPPRERFGHSPRRSHSPPYHHPQDMSWGSYRMSPPGYPYPYFMPWGATPQIFNHMPPMQFNQGWGGPRRPIHERFSSPNNRRFYGKNRANNEKREGKRVKVEARTSEVITIKVGSHDVPIPSGDGVGVSSNKKSEAKTNSSQSAGLTRPSGRSDRSHAAGLTGSSGQSDRRPDSGPTDASGRSDRASSVGLTGMSGRSDRWSTSGLIRLQRRFDRGIAKGDMKASSSSNKINRGHYLPPRTEPNPRWMPKDLTATQKRRLQRLRAQEIREKKAEEQRDKRFNELRPPLVWRRKSIEKEKPVVVEEREEQSVDKGESSPKEDMDINMVCMLPMEFCAMDEAEVAQFSLGPKDAVFEKPDESNRHMKPLYLKGHVGGKPVSTMLVDRGAAVNLMPYSLFKKLGREDDELKKTNMILNGFNGEPTEAKGIFSAKFTVGNKTLPTAFFIVDVQADYKVKIIELLKEYVDCFAWEYHEMPGLSRELVEHRLPIKPGFRPYKQPPRRFNPLLYDRVKEEIDRLLKAGFIRPCRYVEWVSSRVLVEKKGSGKIGVCIYFRDLNKATPKDEYPMPIADMMINDASGHKVISFLDGNAGYNQIFMAEEDMYKMAFRCPGFVGLFEWVVMTFGLKNAGATYQRTMNLIFHDLLGIILEIYIDDIVVKSDGMEGHMADLRLAFERMRRYGLKMNPLKCAFGVSAGKFLGFMVYERGVEIDPKKIEKIRDFKAPTCKKEAQKLLGKVNYLRRSRCYLGAKQQEAFEELKRYLSTPPVVRAPKAGKPFRLYIASEDKVIGAVLTQEEDGKEYIITYLSRRLLDAKTRPILSGRIGKWAYVLIEYDLAYEPLKSMKGQIVCGFIVDHHTDIAYEGEVCLVEVIPWKIYFDGSSCKEGQGIGVVFFSPNGMCYEASVRLEYYCTNKQVEYNALLFGLQVMVMVGAKYMEAFGDSELVVQQVTGVYKCLDGSLNRYLNSCLDIIANFDNFSIRYIVRHDNSRANDLAQQASGYNVKKGLFLILEEPVLDFKSLCEIGKTGDQGWSDRHCTAGLTGNQGRSDRPHAAGLTGDPERSDRPCVVGLTGSGQNAGGHVSINLEAELTVNSDICAQGTEEYWRIPLIRYLKDPTQNSIFEDGVLLKCLDEDQSKVAMGEANGQAESSNKTLLKLVKKKIEEHPKRWHEMLSEALWAHRISKHGATKVTPFELVYGQEAVLPVEVNLGSLRYIKQDDLSNEDYKTLMGDNLDEVIDNRLKALE

SEQ ID NO: 128416 - protein, 1315 aa, Oryza sativa
  unsure (1)..(1315): unsure at all Xaa locations
  Clone ID: PAT_MRT4530_30771C.1.pep
MATELFAPHRLDAAAPRRLRQEKVRELVAHVARLAAGEGGKPAVVDVGRVAFATSLNLLSRTIFSRDLTSLDDHGGSKGFQEAVARIMEAGGRPNVSDFFPVLAAADLQGWRRRLARLFARLHRVFDAEVDARLREHDAGEARKGDFLDVLLGIAARRDDAAELDRDTLRSLFTDLFCAGSDTSSSTVEWAMAELMQNPKSMSRVCDELSQVIGLGRNIKESEIGQLPYLQAVVKETFRLHPPAPLLLPRQAEMTMKIAGYTIPKGTRIFVNVWAMGRDKDIWPEPEKFIPERFLGSKIDFKGVHFELIPFGAGRRICPGMPLANRMAGLTGRSDRRPDSGPTNTSGWSDRAPSVGLTGASGRSDRWSTTGMTGLQRRFDRRVAKGDERASSSSNRVNRGHYLPPGTEPNPRWMPKDLMATQKRRLQRLRAQELREKKAEEQRDKRFNELRPPPVWRPKSIKKAKPIGVEEKEEQSVHKSESSPKEDMYINMVCMLPMEFCAMDEAEVAQFSLGPKDAVFEIPDESNRHMKPLYLKGHVDGKPVSRMLVDGGAAVSLMPYSLFKKLGHEDDELKKTNMILNGFNGEPTEAKGIFLAELTVGNKTLPTAFFIVDVQEANLEWLQKRVQEYRSTKNDIGETIEDFDEVEKLGQGFTSADPLEEVDIGDGTKPVNKNMRADYKVKIIELLKEYVDCFAWEYHEMPGLSLKEEIDWLLKAGFIRPCRYAEWVSGIVPVEKKGSGKIRVCIDFRDLNKATTKDGYPMPIADMMINDASGHKVISFLDSNAGYNQIFLVEEDMYKTAFRCPGFVGLFEWVVMTFGLKNAGATYQRAMNLIFHDLLGIILEIYINDIVVKSDGMEGHIADLRLAFERMRRYGLKMNPLKCAFGVSAGKFLGFMVHERGVEIDPKKIEKIRDFKAPTCKKEVQKLLVMEMVGAKYMEAFGDSELVVQQVVGVYKCLDRSLNRHIASRDNSRVNDLAQQASGYNVKKGLFLIIEEPVLDIKSLCEIGKTGDQGWSDRHCTAGLTGDQGRSDRLHAAGLTGDPERSDRPCVAGLTGSGLDARGHVAINLEAELTVNSDICAQEAEEDWRIPLIRYLKDPTLKVDRKIRRQAFKYTLLDGNLYRRNIDGVLLKCLDEDQSKVAMGERMRGLSTVRQXWALDFIGQIYPSSLKGHMFVLVATDYFTKWAEAVPLRNMTHTXDYKTLMGDNLDEVIDKRLKALEEIEKEKKRVAKAYNKRVKAKLFQVEDLVWKTILPLGTRSKEFGKWSPSWEGPYRVCGIVRGNPYFLETLQGERFQRAINGKYLKKYFPSVWQDA

SEQ ID NO: 128417 - protein, 114 aa, Oryza sativa
  unsure (1)..(114): unsure at all Xaa locations
  Clone ID: PAT_MRT4530_30772C.1.pep
MAMGGGLRRVARRRRRRRSRGNGEGQWAGVGSCRWWWIRLQGAAGEGEDSGAGAPRRRHLEERREGGEGGRGKGLAGAXDPFRLAGEVGDGAVGRGSREDEGVVAACDLNRPGR

SEQ ID NO: 128418 - protein, 288 aa, Oryza sativa
  Clone ID: PAT_MRT4530_30773C.1.pep
ETEEDWRIHLIRYLKDPTLKVDRKIRRQAFKYTLLDEDLYRRNIDGVLLKCLDEDQSKVAMGEGHRFVLVATDYFTKWAEAVPLKNTTHTEANGQAESSNKTLLKLVKKKIEEHPKRWHEVLSEPFWAHRISKYGATKVTPFELVYGQEAILPVKTLMGDNLDEVIDKRLKALEEIEKEKRVAKAYNKRVKAKLFQVGDLVWKTILPLVTRSREFDEQQKQTKYKDAPPTAIDLFKECHCKSKMGFNEPVKNVIAVIEVIIDNPAQEGQDMIGLCRYGYGGTVVLLTD

SEQ ID NO: 128419 - protein, 52 aa, Oryza sativa
  Clone ID: PAT_MRT4530_30774C.1.pep
TPFLLQKQQLNFFCCSKNTNKPSSLNKNLRAILICFSKRGKSTHLLCNLKTP

SEQ ID NO: 128420 - protein, 1337 aa, Oryza sativa
  Clone ID: PAT_MRT4530_30775C.1.pep
MPPMYNHIPPMWEGPRMPIHERLSSPNKSRFYGKNRVNEEKREGKRTMVEERTSEVITIKVGSHDVLIPSGDGVGKSPSKKSEAGTSSSQSTGLTRPSGRSDRGHVAGLTGISGQSDRRLDSGPTDASGRSDRAPSVGLTGTFGRSDRWSATGLTGLQRRFDGRAAKGDVRASSSSSKVNRGYYLPSGTEPNPMWMPKDLTATQKRRLQRLRAHELREKKAEEQRDKRFNELRPPPVWRPKSIEKAKPIDVEKKEEQSVDESESSPKEDMDINMVCMLPMEFCAMDEAEVAQLSLGPKDAVFEKPDESNRHMKPLYLKGHVDGKPVSRMLVDGGAAVNLMSYSLFKKLGREDDELKKTNVILNGFNGEPTEARGIFSAELTVGNKTLPTAFFIVDVQEASLEWLQKRVQEYRSTKVDIGETVEDFDEVEKLGQGFTSAYPLEEVDIGDGTKPRPSFVNKNMRADYKVRIIELLKEYVDCFAWEYHEMPGLSRELVEHRLPIKPGFRPYKQPPCRFNPLLYDRVKEEIDRLLKAGFIRPCRYAEWVSSIVPVEKKGSGKIRVCIDFRDLNKATPKDEYPMPIADMMINDASGHKVISFLDGNAGYNQIFMAEEDMYKTAFRCLGFVGLFEWVVMTFGLKNAGATYQRAMNLIFHDLLGIILEIYIDDIVVKSDGMEGHTADLRLAFERMRRYGLKMNPLKCAFGVSAGKFLGFMVHERGVEIDPKKIEKIRDFKAPTCKTEVQKLLGKVNYLRRFISNLAGKIDAFVPILRLKKEADFTWGAKQQEAFEELKRYLSTPPVVRAPKAGKPFRLYIASEDKVIGTVLTQEEDGKEYIITYLSRHLLDAETRHIARRDNSRANDLAQQASGYNVKKGLFLILEEPVLDFRSLCEIGRIGDQGRSDRHCTAGLTGDQGRSDRPHAASLTGIPEWSDRPCVAGLTGVGQKAGGHASMDLEAELIENSDICAQDTEEDWGIPLIQYLKDPTLKVDRKIRRQAFKYTLLDGDLYRQNIDGVLLKCLDEDKSKVAMGEVHEGICGTHQSAHKMNWLLRRAGFYWPKMIDDCFKYYRGCEACQRFGNVQLAPAAVLNPIIKPWPFRGWALDFIGQIYPSSSKGHRFVLVATDYFTKWAEAVPLKNMTLTEANGQAESSNKTLLKLVKKKIEEHPKRWHVVLSEALWAHRISKHGATKVTPFELVYGQEAVLPVEVNLGSLRYIKQDDLSSEDYKTLMGDNLDEVIDKRLKALEEIEKEKKRVAKAYNKRVKAKLFQVGDLVWKTILPLGTRSKEFGKWSPSWEGPYRVCGIVRVNAYFLETLQGERFQRAINGKYLKKYFPSVCQDA

SEQ ID NO: 128421 - protein, 1837 aa, Oryza sativa
  unsure (1)..(1837): unsure at all Xaa locations
  Clone ID: PAT_MRT4530_30776C.1.pep
MTKPSSKTEVEPSNVMPVILDDFEGEDRKAVEEYINELTREALMRLTTRTRQGVIIKPGPRPKLARDVVSNDEVSQSINQQIASTIDLSMANFKDTLDVMFKEKVDWFLRSRLGAFMDDYTLKDKAYTTVDQSPIDPMGSKTSGMVFTTGQTGYYPTGQTGSQAGPTAQHDARQTGPWAGQTGAIVPIQGIHPMTNASYLYHFRTFDPPVSTATTNPQVPPHIPNIYNDVSRGYLPDTRQGQYNHIAPQTQPIRPPNLPPNPQGPNNMEDMISDIMRNGFGIETRNRARAYKKPYLDYYDNVPFPRNYRVPEFAKFSGEDGKTTWEHVGQFLAQCGEANSDTFKLRLFSLSLSGNAFTWFTSLPANSIHTWAQLEEQFHDYFYTGETELRLCDLTSVKQKYNESVVDYIKRFRDVRNRCYTLNITDRDLAGLAFNGLVAPLREKLDGQQFLDVSXLMQRALAQESRVKDNKKFARPFDKXPNVNVIDYPEASDSEKEGDHDIYVAEWSWTNKNKPFVCSNLMPTPRKDRQSEVKYSFEVAKYKIFDYLLQEKQIRLPKGHVIPSQEELKRRAYCKWHDSHSHSTNDCNLFRRQVQSAIDEGRLKFTDGSKMKLDHDPFPVNTINFNDKKVLIRPEQAESTKGKEVVIGEPRPKMMVPKKPEKCEKQGGERDHNKGKRPRSPPRERFGHSPRRSRSPPYFHPQDMSWGSYPMPPPGYPYPYFMPWGATPPMYNHMPPMQFNQGWGGPRRPIHERLSSPNKSRFYGKNRVNEEKREGKRTKVEERTSEVITIKIGSHDVPIPSGDGVGKSPSKKSEAGRSDRRPDDSLTDASGRSNRVPHVGLTDASGRSDRWSTAGLTELQRRFDERAAKGDVRASSSPSKVNRGHYLPPRTEPNPRXMPKDLTATQKRRLQRLRAQELREKRTEEQRDKRFNELRPPPKKIEQSVDKSESSPKEDMDINMVCMLPMEFCAMDEAEVAQFSLGPKDAVFEKPDESNRHMKPLYLKGHVDGKPVSRMLVDGXPYSLFKKLGREDDELKKTNMILNGFNGEPTEARGIFSAELTVGNKTLPTAFFIVDVQGNYNVILGRCWIHANCCVPSTLHQCLIQWDGDDVEIVQADTSAEVAMADATFEWRHGNIQCLSGRDLSKASFEWLQKRVQEYQSTKNDIGETVEDFDEVEKLGQGFASADPLEEVDIGDGTKPRPTFVNKKMKADYKVKIIELLKEYVNSFAWEYHEMPGLSRELVEHRIPIKPGFMPYKQPPRRFNPLLYDRVKEEIDRLLKAGDLNKATPKDEYPMPIADMMINDASGHKVISFLDGNAGYNQIFMAEEDMYKTAFRCPGFVGLFEWVVMTFGLKNTGATYQRAMNLIFHDLLGIILEIYIDDIVVKSDGMEGHIADLRLAFERMRRYSLKMNPLKCAFGVSAGKFLGFMVHERGVEIDHKKIEKIRDFKAPTCKKEVQXLLGKVNYLRRFISNLEGLAFKYTFXDENLYLRNIDGVLLKCLDEDQSKVAMGEVHEGICGTHQSAHKMNWLLKRAGFYWPRMIDDCFKYYRGCEACQRFGNGHRFVLVATDYFTKWAEAVPLKNMTHTEVIDFIFRHIVHRFGIPQTLTTDQGVSFMSREVNSFTESYGIKLLSSSPYYAQANGQAESSNKTLLKLVKKKIEEHPKRWHEVLSEALWAHRISKHGATKVTPFELVYGQEAVLPVEVNLVSLRYIKQDDLXKYXQKTLEDTTLEDATDTALAPMTTINKKSGCDTKAYNKRVNAKLFQVGDLVCKTILPLGTRSKEFGKWSPDWEGPYRVCGIVRGNAYFLETLQGERFQXAINGKYLKKYFPSVWQDA

SEQ ID NO: 128422 - protein, 1127 aa, Oryza sativa
  Clone ID: PAT_MRT4530_30777C.1.pep
MTKPPSTKAEVDPSNVLPVMMESLDEEARMAFDEHMKKYADELLKTCSKTRHGVVFKPDLVSSSTFDKVSIEELSQSLQQQVAHTIDASMVAFNNKLEASFENNCEKTFGPPVSTAASNPQVPPHVPNAYNDVSRGYPPDTRQGQYNHIAPQHQPIRPPNPPPNQHRPDNIEHLISGIIRDKFRIEARNRAKVYQKPYLDYYDNVPYPRNYRVPEFTKFSGEDSRTTWEHRFRDVRNRCYSLNITDRDLADLAFNGLITPIKERLDGQQFIDVSQLMQKALAQESRVKDNKKSVRPYEKKPNVNSIDYFEASDSDDEGDHDIYVAEWTWTNKNKPFVCSNLMPTPRKDRQSEIKYRFDVAKCDKIFDYLLQEKQIRLPKGHIVRVQSAIDEGQLKFTDGSKMKLDHDPFSVNTINFNDKKVLIRPEQAESTKGKGVIIGEPRPKMIVPKKLEVGVWKENRSEASTSKAPRKTKVTLDMLLEKYEKQGEKREGKRVKVEARTSEVITIKVGSHDMPIPSGDGVGKSSSNKSEIGTSSSQLAGLTRPSGRSDRSSADRSDRAIRPFCAMDEAEVAQFSLGPKDAVFEKPDESNRHMKPLYLKGHVDGKPVSRMLVDGGVAVNLMPYSLFKKLGREDNELKKTNMVLNGFNGEPMEAKGIFSVELTVGNNTLPTAFFIVDVQEANLEWLQKRVQEYRSTKNDIGETIEDFDEVEKLGQGFTSADPLEEIDIGDGTKPRPNFVNKNMRADYKVKIIELLKEYVDCFGWEYHEMPGLSLKEEIDRLLKAGFIRPCRYAEWVSSIVLVEKKGSGKIRVCIDFRDLNKATPKDVYPMPIADMMINDASGHKVISFLDGNAGYNQIFMAEEDMYKTAFRCPGFVGLFEWVVMTFRLKNTGALYQRAMNLIFHDLLGIILEIYIDDIVVKSDGMKGHIADLRLAFERMRRYGLKMNPLKCAFGVSAGRFLGFMVHERGVEIDPKKIEKIRDFKAPTCKKEVQKLLGKVNYLRRFISNLAGKIDAFVPILRLKKEADFTWGAKQQEAFEGLKKYLSTPPVVRAPKAGKPFWLYIASEDKVIGAVLPQEEDGKEYIITYFSCHLLDAETRANDLAQQASGYNVKKGLFLILEEPVLDF

SEQ ID NO: 128423 - protein, 218 aa, Oryza sativa
  unsure (1)..(218): unsure at all Xaa locations
  Clone ID: PAT_MRT4530_30778C.1.pep
VKVNQLSSIKTQLPYSYYSLPFCRPATIVDSAENLGEVLRGDRIENSLYVFEMREPRLCQIVCKTALTHQEAKDFREKIDDEYRINMILDNLPLVVPIRSLLDDHDAPTSYQLGVHVGIKGQYAGSNEEKHFIYNHLSFLVKYHRDENTDLARIVGFEVKPFSTKHEYDGEWKENETRLKTCDPHSRRLVVDSDSPQEVEAGKEIIFTYDVNXEESDI

SEQ ID NO: 128424 - protein, 483 aa, Oryza sativa
  Clone ID: PAT_MRT4530_30779C.1.pep
MEDGDGEEGTAKRAKLSAGDGGGGGGEDRLSALPDDLLVQILLRVGTSAAARTSVLSRRWRSLWYLLPELDFVSTADARAIRAALAYHGAPPLRLLLVSAVGATAGSVAEWLPLAARRLSGYLGLLNVVPKTKRDEGEGAAAGEVLELPCFASAANLALDLGFIAVAMPRSGVFSRLTLLSLDNVRFHRPCDLGDAVSSPRSPFLKRLTIQNAHGLSNLSIHSESLLQIRLGGLKGLKQLNVVAPALGALYVISCFSDPLAMSQPVADISAPQLETLHWEDAFDPSSVRFGNMANVKCLGTHFYLAFGQEDFGHNGDCLRLLQRFQFDALDRLSLTLAYMSELNDLENEYLMEEMTMLPDIMFLGLTVLASGHAIGPSVFHVLRMSTSIRRLELATDIYSSNPQARAACSSSCTCDLPPNWKTEELKLAFLHEVEINNFRGTEHQIALVKQLFGWAAMLKDMTINFCHSITESMARKKLEFGS

SEQ ID NO: 128425 - protein, 573 aa, Oryza sativa
  unsure (1)..(573): unsure at all Xaa locations
  Clone ID: PAT_MRT4530_3077C.1.pep
TPPFTGVHVFTDRLAFAAADWCFRLHGWPIMPQLLGIYDFTAGLPPSPPTGVLAYTVGRPHHRSWASTSSPTGXLRRRRLVSLPTRLAXKPPLVGIFAFTDRPPRPPLTGVSACMAGXLCRRCWASTTSPTGXPRPLPTGVSACTVGXYAAVVKRLRLHRPAASSAADWCFRLHGWPLCRRCWASTSSPTGRLVRCRLVFPPARLAYYAAVVGRLRLHRPAASSVADWCFRLHGWPIMPPLSGVYVFTDRPPRPPPTGVSACTAGLXYAAVVGRLRLHRPAAFTDXAASSATDWCFRLHGWPIMPPLLSVYIFTDRXIVRLHGWPXLCRRCWASTSSPTGLPSPPPTGVSACTTGLXYAAVVGRLRLQRPAAXVTPTSAIVFTASHVAATANKRHHLQRKLSTSAANWFLHFHGCMILPVLIGLIVFMPSPLRLVYTATTTDGHHRLLSPTGYAAADWCFYLHNCASSLPVCFCCRRLVFTSSRQCNFVVMVERLHLYYLRHRQTLLLLLRKFCYFNNLDISACDAVLFYYNKXLSNIQDFYLDIFNTYLQSSNDYSTTRSYSSRLYVQLFPN

SEQ ID NO: 128426 - protein, 659 aa, Oryza sativa
  Clone ID: PAT_MRT4530_30780C.1.pep
MATREVPLLLLLVVVMVLAGAGAARGFYLPGVAPRDFRKKDQLAVKVNQLSSIKTQLPYSYYSLPFCRPATIVDSAENLGEVLRGDRIENSLYVFEMREPRLCQIVCKTALTHQEAKDFREKIDDEYRINMILDNLPLVVPIRSLLDDHDAPTSYQLGVHVGIKGQYAGSNEEKHFIYNHLSFLVKYHRDENTDLARIVGFELSDDHTNISLVCTSDDLRSTKHEYDGEWKENETRLKTCDPHSRRLVVDSDSPQEVEAGKEIIFTYDVNFEESDIKWASRWDSYLLMTDDQIHWFSIVNSLMIVLFLSGMLAMIMLRTLYRDISKYNQLETQEEAQEETGWKLVHGDVFRPPARAGTLCVFVGTGVQFLGMLLVTLLFAILGLLSPSNRGGLMTAMLLVWAFMGVLAGYAAARLYRGFRGSEWKAVAMRTALAFPGAAFAVFFVLNALIWGERSSGAVPFTTMTALVLLWFGISVPLVFVGSYLGFKRPAATEDYPVRTNKIPRPIPEQPWYMNPAMSVLIGGILPFGAVFIELFFILTSIWLHQFYYIFGFLFLVFAILVVTCAEIAVVLCYFQLCSEDYEWWWRSYLTAGSSALYLFLYAAFYFFTKLDITKVVSGVLYFGYMLIASAAFFVLTGTIGFYACFWFTRLIYSSVKID

SEQ ID NO: 128427 - protein, 190 aa, Oryza sativa
  Clone ID: PAT_MRT4530_30781C.1.pep
HEKKNQDDYLRDCPQDGDREAIAISKFMQNLKHLVIRFSKLSVVGLNAISGGCKELEVLDLYGCANLTLRGIQQATSNMKNLKELENPNFYIPRSSFHMVTEGKKLLEIQVPRKLGHEVKFPKRMAIAHKGGSTGGGSTGGTTGGASNVNSGPADTRPRKNAAAMPAPATTTSILALAFSFAIAVSAFSF

SEQ ID NO: 128428 - protein, 58 aa, Oryza sativa
  Clone ID: PAT_MRT4530_30782C.1.pep
IPPKLPKGVIFTAPSPHHFRNKKIYPPFHLSVSSTWGNKKRGMGHPAVFGGRRGPFGL

SEQ ID NO: 128429 - protein, 66 aa, Oryza sativa
  Clone ID: PAT_MRT4530_30783C.1.pep
YGDEGSSSEQGYYGQGSSEQGYYGEQQQQPGMTRVRLPRARQYAAQLLYMCRVEPQQCSIFTAAHN

SEQ ID NO: 128430 - protein, 140 aa, Oryza sativa
  Clone ID: PAT_MRT4530_30784C.1.pep
MAGRRESSSSPTALLLLLLLLFLHHLALLKRHSALVLSQLQLASPSLLLLTSHLSSAHLLSSQLSSAQRERERAAGTGAAEATEAGKDDDDGDGDGGGWVGVVVSVLRGDAPADAADALLHNAGSRRRLRSMAPRAADLT

SEQ ID NO: 128431 - protein, 219 aa, Oryza sativa
  Clone ID: PAT_MRT4530_30785C.1.pep
MDTEDTSSASSSSVSPPSSPGGGHHHRLPPKRRAGRKKFRETRHPVYRGVRARAGGSRWVCEVREPQAQARIWLGTYPTPEMAARAHDVAAIALRGERGAELNFPDSPSTLPRARTASPEDIRLAAAQAAELYRRPPPPLALPEDPQEGTSGGGATATSGRPAAVFVDEDAIFDMPGLIDDMARGMMLTPPAIGRSLDDWAAIDDDDDHYHMDYKLWMD

SEQ ID NO: 128432 - protein, 113 aa, Oryza sativa
  Clone ID: PAT_MRT4530_30786C.1.pep
GRKLKPSFSPWRKTRVLYSSSVYPCFPRYARDIGQNLSLQVLVFCWLGPPRLKYNPPVGASGWGFRLILCQTLGFLVFLKNKKKEKKKKKKKKKKKKKKKKKKKKKKKKKFAA

SEQ ID NO: 128433 - protein, 114 aa, Oryza sativa
  Clone ID: PAT_MRT4530_30787C.1.pep
MVIPPPARAPAITKFLKPYVLKMHFTNNFVSAQVIHTPSATVACSASSQEKLLRPSMESTRDVAAAAKIGKLLGERLLFRGIPAVSVSMSRDQTYHGKVRAVMDSLRAAGVKLL

SEQ ID NO: 128434 - protein, 52 aa, Oryza sativa
  Clone ID: PAT_MRT4530_30788C.1.pep
HPRYPVSVTDHSMWHGMQYSDLPSKLAPYGVSVGHRSDVSALYLSSAFFNTA

SEQ ID NO: 128435 - protein, 186 aa, Oryza sativa
  unsure (1)..(186): unsure at all Xaa locations
  Clone ID: PAT_MRT4530_30789C.1.pep
MDTGRSSQLTERVRRMPASSNSGRPPLRVLFDVPEPWAAKELCRLRIVCRPWRSLTSDPLFMKTHVAHHRETFFLASFKDDKTHIHIMDFAGNVIKQIGIPAGHKVLCTRLDLVCVATNKNSCHVLNPVTGDVYNLPKSPAEEHTYHVNLRKPFTSFAFGHVASTGEYKXLRMFNRPGFTDLGIPQ

SEQ ID NO: 128436 - protein, 1199 aa, Oryza sativa
  unsure (1)..(1199): unsure at all Xaa locations
  Clone ID: PAT_MRT4530_3078C.1.pep
MFRQLARQQQRLHHRPASVAADWCHRLYGWSVTPPFMGVHVFTDRLAFAAADWCFRLHGWSIMPPLLGVYDFTTGLPPSPPTGVLAYTVXVGHTTVDGHRHLHRRPASVAADWCPRLHGRLVTPPLMGIVIYTAGLPPSPPTGVPAYTVGWSHHRXWASSSTPPACLRRRRLVSPPTRSVGHTTVDGHRHLHRRPASVAADWCPRLHGRLVTPPLMGIVIYTAGLPPSPPSGASAYTAGLLCRCCWASTTSPPACLRRRRVVPPPTRLAYYAAAVGRLRLHRRPASVAADWCLRLHGWPIWLVGXHHRFWASTSSPPACLRRRRLVPPPTRLAYYAAAVGRLRLRRRXWCLRLYGWLVTPPLLGVYVFTTGLPPSPPTGASAYTAGLLFRCCWASTSSPPACLRRRRVDPPSTRLAYYAAAVGRLRLHRRPASVAAEWCLRLHGWPIMPPLLGVYDFTAGLPPSPPSGASAYTAGLLCRRCWASTTSPPACLRRRRVVPPPTRLAYYAAAVGRLRLHRRPASVAAEWCLRLHGWPIMPLLLGVYDFTAGLPPSPPSGASAYTAGLLCRCCWASTTSPPACLRRRRVVPPPTRLAYYAAAVGRLRLHRRPASAATDWCFRLYGWWTSPPLMGFIIYTTGLVSLAPTGVFVTIDGLLYSHIGYFCCHRGXYDKAKIQIQICIKGIHGFKLISYAPGMDQSEHHHRLTSTAADXCFRLHGWPIMPPLLGVYVFTDRLAFAAADWCFRLHGWPIMPPLLGVYVFTDRXPSPPPTGVSACTAGLYAAVVGRLRLHRPACXAAADWCFRLHGWPLCRRCWASTSSPTGRLDRRRLVFPLARLAXMPPLLGVYVFTDQPPRPPPIGVFRLHGWPIMPPLLGVYVFTDQPPRPPPIGVSACTAGLLCCRCWASTSSPTGLPSPPPTGVSACTAGLXYAAVVGRLRLHRPACLRRRRLVFPPARLAFMPPLLGVYVFTDRPPHPPLTGVTACTAGLLXRQLMLSSSRLXYIAVTTNRHQYLQHKLPTFAMAADWFLHFHGCMILPVLIGXYHLHRRSSRLLLXLVPSPLHLVYTATTTDGHHRLPPPTRVMPPPTGAFIFTTARLHYRFTSSWQHNFVIMVERLHLYYLRNQQTLLLLLHKFCYITNHDVVVNLDISACDAVLFYYNKWLSNIQDFYLDIFNTYLQSSNDYSTTRSYNSRLYVQLFPN

SEQ ID NO: 128437 - protein, 119 aa, Oryza sativa
  Clone ID: PAT_MRT4530_30790C.1.pep
FTGQQPIFRQRIQIERQRSDLEMDDLPDCQDTLIASFQSSRVRKNGKTSPLPTQGCLLHRYRPDQWSNGGDDQGGAAWMPRAVGCGVGDELHSWPRGRRAQQKWRRCPDAAAAAGDLWG

SEQ ID NO: 128438 - protein, 93 aa, Oryza sativa
  Clone ID: PAT_MRT4530_30791C.1.pep
PPPQSHPPGGLKNPRAQSRGPRETQPGTKPPRPNGGGPRGKPPGGSPPGPQGPFSGGGGTPGPGGAHHGGAGPPGKAPHPGGGAAGPGAQGGG

SEQ ID NO: 128439 - protein, 39 aa, Oryza sativa
  Clone ID: PAT_MRT4530_30792C.1.pep
SDLINLPPPPPPPPPDRIGPAPPPPPPPPPPQIGEDGRT

SEQ ID NO: 128440 - protein, 100 aa, Oryza sativa
  Clone ID: PAT_MRT4530_30793C.1.pep
RTQIPPCLASHTSHARAGQLTLFPYSRGASTSRGGRKDEEPWQGGWDEAPCGRRGGVENKVDGPELVPNERGDHAEASVVANAHRHLASNGILYKQDPVT

SEQ ID NO: 128441 - protein, 102 aa, Oryza sativa
  Clone ID: PAT_MRT4530_30794C.1.pep
MAAPWWDSEYKDRSSLEYRVYVGNLPYSVDEQTLMDYFADYGAISAEIAWDSEMGRPRGFGFVNFEDNESVNAAIHGMNGQDIGGRNVTVARAQTRPRRWRA

SEQ ID NO: 128442 - protein, 1908 aa, Oryza sativa
  Clone ID: PAT_MRT4530_30795C.1.pep
MTKPPSKTEVEPSNVIPVTLEDIEGEDRKAMEEYINELTREALMRASTRTPQGVIIKPGPRPKLAPDLVSNDEVTQSIQQQVASTIDSSMIAFKDKLDATFEGKFDKFLRVKFGPLMADYMSKDKASTTANQPPIDQTGSKTDGTAHTAGLTGPDDRSDQDLAVGPTGQTAGQTGYYPGGQTGTQASPTAPLDASQTGPWAGQTGAIVPIQGIDPMTNVGYLYHLRTFDPPVSSATSSPQVPPHVPNAYNDVARGYPPDTRQGQYNHIAPQTQPIRPPNPPPNQHGPNNMEDIISEIIRNRFGIETRNRARVYKKPYPDYYDNVPFPRNYRVPEFTKFSGEDSETTWEHVGQFLAQCGEANSDTFKLRLFSLSLSGNAFTWFTSLPANSIHTCAQLEEKFHDYFYTGETELRLCDLTSVKEKYNEPVIDYIKRFRDVRNRCYTLNITDRDLAGLAFNGLIAPLRERLDGQQFLDVSQLMQRALAQESRVKDNKKLVRSYDKKPNVNAIDYPEASDSEEEGYHDIYVAEWSCTNKNKPFVCSNLMPTPRKDRQSEVQSAIDEGRLKFTDGSKMKLDHDPFPYEKEGGLRARNKGKRPRLPPRERFGHSPRQSHSPPYHHPQDMSWGSYPMPPPGYPYPYYMPWGATPPMFNHMPPMQFNQGWEGLRRPIHERLSSPNNGRFYGKNRADEERRKGKHIKVEARTSEVITIKVGSHDVPIPSGDGVGVSSNRKSEADTSSSQSASLTGPSGRGPTDASGWSDRAPSVGLTGASGRSDRWSTAGLTGLQCRFDRRIAKGDVRASSSSNKINRGHYLPPGTEPNPRWMPKDLMATRKRRLQRLGAHEIREKKAEEQRDKRFNEFRPPPVWRRKSIEKEKPVDVEEKEEQLVDKGESSPKEDMDINMVCMLSMEFCAMDEAEVAQFSLGPKDAVFEKPDESNHHMKPLYLKGHVDGKLVSRMLVDGGAAMNLMPYSLFKKLGREDDELKKTNMILNGFNGEPKEAKGIFSAELTVGNKTLPTVFFIVDVQEWLQKRVQEYWSTKNDIGEAVENFDEVEKLGQGFTSADPLEEVDIGDGTKPRPTFVNKNMRADYKVEIIELLKEYVDCFAWEYHEMPGLSLPVEKKGSGKNRVCIDFRDLNKATPKNEYPMPIADVMINDTSGHKVISFLDGNAGYNQIFMAEEDMYKTAFRCPGFVGLFEWVVMTFGLKNTGATYQRAMNLIFHDLLGIILEIYIDDIVVKSDGMEGHIADLRLAFERMRRYGLKMNPLKCAFGVSARKFLGFMVHERGVEIDPKKIEKIRDFKAPTCKKEVQKLLGKVNYLRRFISNLAGKIDAFVPVLRLKKKADFTWRAKQQEAFEELKRPILSGRIGKWAYALIEYDLAYEPLKSMKGQIVCDFIVDHHVDIAYEEKVCLVEVISWKIYFDGSSCKEGQGIGVVLFSPNGMCYEASVRLEYYCTNNQAEYNALLFGLQVMEMVGAKYVEAFGDSELVVQQVAGVYKCLDGSLNRYLDSCLDIIANFENFAIRYISRHDNSRANDLAQQASGYNVKKGLFLVLEEPVLDFKSLCEIGKTGDQGQSDRHCMAGLTSDQGRSDRPHAVGLTGNPERSDRPCVAGLTGSGQSAGGHVSINLEAELIVNSDVCAQETEEDWRIPLIQYLKDPTLKVDQKIRWQAFKYTLLDGDLYRRNIDGVLLKYLDEDQSKVAMGEGHRFVLVATNYFTKWAEAMPLKNMTHTEANGQAESSNKTLLKLVKKKIEEHPKRWHEVLSEELWAHRISKHGATKVTPFELVYGQEAVLPVEVNLGSLRYIKQDDLSSEDYKTLMGDNLDEVIDKRLKALEEIEKEKKRVAKAYNKRVKAKLFQVGDLVWKTILPLGTRSKEFGKWSPSWEGPYRVCGFVRGNAYFLETLQGERFQ

SEQ ID NO: 128443 - protein, 1084 aa, Oryza sativa
  unsure (1)..(1084): unsure at all Xaa locations
  Clone ID: PAT_MRT4530_30796C.1.pep
MDINMVCMLPMEFFAMDEAEVAHFSLGPKDAVFEKPDESNRHMKPLYLKGHIDGKPVSRMLVDGGATVNLMPYSLFKKLGHGDDELKKTNMILNGFNGEPTEAKGIFSAELTVGNKTLPTAFFIVDNDIGETIEDFDEVEKLGQGFISADPLEEVDIGDGTKPRLTFVNKNMRVDYKVKIIELLKEYVDCFAWEYHEMPGLSREHVEHRLPIKPGFRPYKQPPRRFNPLLYDRVKEEIDRLLKAGFIRPCRYTEWVSSIVPVEKKGSGKIRVCIDFRDLNKATPKDEYLMPIADMMINDASGHKVISFLDGIILEIYIDDIVVKSDRMEGHIADLRLAFERMRRYGLKMNPLKCAFGVSAGKFLGFMVHERGVEIDPKKIEKIRDFKSPTCKKEVQKLLGKVNYLRRFISNLAGKIDAFVPILRLRKEADFTWGAKQQEAFEGLKRYLSTPPVVRVPKARKPFRLYIASEDKVIGAVLTQEEDGKEYIFTYLSRRLLDAETRSILSGRIGKWAYALIEYDLSYEPLKSMRGQIVCDFIVDHHVDIAYEKKVCSVEVILWMIYFDGSSCKEGQGIGVVLFSPNGMCYEASVRLEYYCTNNQAEYDALLFGLQVMEMIGAKHVEAFSDSELIVQQVAGVYKCLDGSLNRYLDSCLDIIANFDNFAIRYIARHDNSRANDLAQQASGYNVKKGLFLVLEVSMLDFKSLCKIGKTGDQXGGLTGDQGRSDQPHAANLTGHPGRSDRPCTAGLTGSGQSTGGHATIDSKAELIVNSDICAQDTEEDWRIPFIRYLKDPTLKVDRKIWRQAFKYTLLDEDLYRRNKNGVLLKCLDEDQSKVAMGERHRFVLVATDYFTKWAKAVLLKNMTYMEVIDFILKHITHRFGIPQTLTTDQTESSNKTLLKLVKKNIEEHPKKWHEVLSEALXAHRISIHGATKITPFELVYGQEAVLPVEVNLGSLSYIKQDDLSSEDYKTLMGDNLDEVIDKRLKALEEIEKEKKRVAKAYHKRVKVKLFQVGDLVWKTVLPLGTRSREFDSRCSSKRQGGICLHPNLAPRIKIGKIAKVXKSTDFLRVGWSDRRVLAGQTAG

SEQ ID NO: 128444 - protein, 216 aa, Oryza sativa
  unsure (1)..(216): unsure at all Xaa locations
  Clone ID: PAT_MRT4530_30797C.1.pep
MKCSRVRLVLVMVSLQAMIAMLPDGAGAQNGDGSRCSKVRCGMGSCSESSDYVFGFACRCNPGWSRYHLGNLQFPFLPCVIPNCTINYSCQNGSSSPSPSPPPPPPPPPAMPSLTNLSIYDPCLLQYCGDGGSCERSSEFGHRCACHDGFQNLLNDTSYPCYRQCSLGSDCSGLGISMFNGSHXGTAPPAPVSFTVKKSGVLLHLLLVLVSSFMIG

SEQ ID NO: 128445 - protein, 2243 aa, Oryza sativa
  Clone ID: PAT_MRT4530_30798C.1.pep
MTKQSSSKTEVEPTNVIPITLDDFEGEDCKSMKEYIKEITQEALMRACTRTRQGMIIKPGPRPKLTLDLVSNEEVTQSIQQQVASTIDSSMIIFKNKLDATIEGRFDEFLRTKFGPLMADFMLKDKASTSASQAPIDQTSRRTDGAAQTAGPTGPDGRSDRILPRRLDRDSGRSDRASGRRSDRALDRTFDSPVSTVATNSQVPPHVPNAYNDVARGYPPDTRQGQYNHITPQTQPIRPPNPPPNQHRPDNMEEIISGIIRDKFGIEARNRAKVYQKPYPDYYDNVPFPRGYRVPEFTKFSGEDSRTTWEHRFRDVRNRCYSLNITDRDLAGLTFNGLIAPLRERLDGQQFLDVSQLMQKALAQESRVKDNKKFVRPYEKKPNVNLIDYPEASDSEGEGDHDMYVAEWSWTNKNKPFVCSNLMPTPRKDWQSEVQSAIDEGRLKFTDSSKMKLDHDPFPVNTINFNDKKMLIRPEQAESTKGKGVVIGEPRPKMIVPKKPENRANEEKREGKRITVEARTSEVITIKVGSHDVPIPSGDEVGESSSNKPKAGTSSSQSAGLTRPSGRSDRSHTAGLTGPSGQSDRRPNDGPTDAPGRSDSRHHVGPTGAPGRSDRWSKSGLTGLQHRFDGRFTKGSAGTSSSSSRPNRGHYLPPGTEPKPRRFNELRPPPVWRRKSVEKEEPIVVEKKEKQSVDKDESSLKEDMDINMVCMLPMEFCAVDEAEVAQFSLGPKDAVFEKPDESNRHMKPLYLKGHIDGKPVSRMLVDGGAAVNLMLYSLFKKMGRGVDELKKTNMILNGFNDEPTEAKGIFSVELTVGNKTLPTAFFIVDVQDFDKVEKLGQGFTSADPLKEVDIGNGTKPRPTFVNKNMRADYKVKIIKLLKEYVDCFAWKYHEMPGLSRELVEHRLPIKPGFRPYKQPPRHFNPLLYDRVKEEIDRLLKAGFIRPCRYAEWVSSIVSVEKKGSGKIRVCIDFRDLNKATPKDEYPMPIADMMINDASGHKNAGATYQRAMNLIFHDLLGIILEIYIDDIVVKSDGMEGHIADLRLAFERMRQYGLKMNPLKCAFGVSAGRFLGFMVHERGVEIYPKKIEKIRDFKAPICKKEVQKLLGMVNYLRRFIFNLAGKIDAFVPILHLKKEADFTWGAKQQEAFEELKRYLSTPPVVRAPKAGKPIRLYIASEDKVIGAVLTQEEDGKVYIITYLSRHLLDAETRPILSGRIGKWAYALIKYDLAYEPLKSMRGQIACDFIVDHHVDIAYEEDVCLVEVIPWKIYFDGSSCKEGQGIGVVLFSPNGMCYEASVRLEYYCTNNQAEYNALLFDLQVMEMVGAKYVEAFGDSELVVQQVAEVYKCLDGSLNRYLDSCLDIIANFDNFAIRHIARHDNSRANDLAQQASGYDVKKGLFLLFEEPMLDFKFLCEIGEIGDQGRSDRRCAAGLTGDQVQSDRPHAADLTGDPGRSDRPCMAGLTGSGQGAGGHATINLEAKLIVNSDICAQETEEDWRIPLIRYLKDPTLKVDWKIRRQAFKYTLLDEDLYRQNIDDVLLKCLDEDQSKVAMGEGHRFVLVAMDYFTKWAEVVPLKNMTHTEIIDFILKHIIHRFGIPQTLTMDQAKSSNKTLLKLIKKKIEEHPKRWHEVLSEALWAHRISKHGATKVTPFELVYGQEAILPVEVNLGSLRYIKQDDLSGEDYKTLMGDNLDEVIDKRLKALEEIENEKKRVAKAYNKRVKVKLFQVGDLVWKTILSLGTRFREFDSRYSSKRQRGMCLHPNLASKVKIGKVAKIWKSTGFLRVGRSTLPMPHVRSAAERDNGSGGDVTPGTPSPTHGARVRQRKRSSDAPSDVNKTNGANLLLNDQNKYKSMLIRTYSSLWMMAGFVFLIYMGHLYIWAMVVVIQIFMASELFNLLRKANEDRQLPGFRLLNWHFFFTAMLFAYGRFLSRQLVNTVTSDKLLYKLVSGLIKYQMFICYFLYIAGFVWFILTLKKKAYKYQFSQYAWTHMILLMLANFMGHFQWLTCPRKLKTEKLVQNNTIEQPITQKLTSKPSLPLVAAYGLQMVEGDAVGMGGIGQDVGGGGGLGDSGEWKKLVDAEGEYVQYGDSSGISAKKLAHSLDLSTGWLHCDPGSIFTPESYDLPGWIPWREVAIMPIQWHALALGLFASIIAPFGGFFASGFKRAFKFKDFGDSIPGHGGFTDRMDCQMVMAVFAYIYYQSFVMVQDLSVETIMEQILRNLTFEEQHDLYEQLGKLLTRGN

SEQ ID NO: 128446 - protein, 129 aa, Oryza sativa
  unsure (1)..(129): unsure at all Xaa locations
  Clone ID: PAT_MRT4530_30799C.1.pep
MASFASTAAPWGCVAGARRGGGGGGRCGVRASAALAVAAPAARTHYEVLGVGAGASRGEIKAAYRRLAREVHPDAGATGDEDFIRLHAAYATLADPDERARYXISISSRRRRRSGGXPASSFRRRTWXT

SEQ ID NO: 128447 - protein, 252 aa, Oryza sativa
  unsure (1)..(252): unsure at all Xaa locations
  Clone ID: PAT_MRT4530_3079C.1.pep
PVQGRRLKDIAPLVYAIAKKKNASLQQVSXPDQWLVDLGLPVTSGWTTELISQLVNVXGAVHSLQLTEYEKDKITWKLTSHGEYMTTSAYNAQLLGIKAXNFNAPIWKPXAPRKCKTFASXWLVIQNRVWTSDRLATRGXIENGSICPXCRRNQETAXHLLAECRYVKESXATLADWTTCEQIRPTLWQQASTLLKWWEATACSNEAPKKALQTLMLLVAXDIWNERNRRVFQHQELPVASLIAKIKEDAKT

SEQ ID NO: 128448 - protein, 132 aa, Oryza sativa
  Clone ID: PAT_MRT4530_307C.1.pep
MEGPLSATNCSTITANCHGNSTGFLTEALDARPTLLGGGALDPVAQELIHHARHGDAEGTVEAAASYSCSHQPPPVSSAAAPWNPFGPGGDTDDAGQDGIKEIVSGGVGVGTNGSFVFGGAAPATSQQAPVE

SEQ ID NO: 128449 - protein, 387 aa, Oryza sativa
  Clone ID: PAT_MRT4530_30800C.1.pep
MLPGVELARRRRVHYHGDGAAAGAGFGEHHHGHYNYFHQQHHRQAVASAEAGAGAGGEVSPAVAARIRLEEKLRGAAAAPSSSLSRQQNNQQEQQIQLPTEPRPTPKHSMTMLEAPSTRKAPRREMRRTLSKADLCAVCLDEVRERHQRVTRLPCSHKYHSECVLPWLAIQPDCPCCRTQAMIAMLPDGAGAQNGDGSRCSKVRCGMGSCSESSDYVFGFACRCNPGWSRYHLGNLQFPFLPCTINYSCQNGSSSPSPSPPPPPPPPPAMPSLTNLSIYDPCLLQYCGDGGSCERSSEFGHRCACHDGFQNLLNDTSYPCYRQCSLGSDCSGLGISMFNGSQPGTAPPAPFSFTVKKSGAAASSLLPAGGGVLLHLLLVLVSSFMIG

SEQ ID NO: 128450 - protein, 1936 aa, Oryza sativa
  Clone ID: PAT_MRT4530_30801C.1.pep
MMPVTLDKFEGEDRKAMEEYINELTREALMRASTRTRQGVTIKPGPRPKLAPDLVSNDEVTQSIQQQVASTIDSSMIAFKDKLDATFEDKFDEFLRVKFGPLMANYMSKNKASTTANQPPIDQTGSKTDEAAHAAGLTGPDGRSDQDLAVGPTGQTVGQTGTQASAGPTAPLDAGQTGPWAGHTGAIVPIQGIHPMTNAGYLYHLRTFDPPVSTAASSPQVPPHVPNAYNDVARGYPPDTRQGQYNHIAPQTQSIRPLNPPPSQHGPNNIEDIISEIIRNRFGIETRNRARVYKKPYPDYYDDVPFPRNFRVPEFTKFSGEDSKTTWEHVDQFLAQCGEVNSDTFKLRLFSLSLSGNAFTWFTSLPANSIHTWAQLEEKFHDYFYTGETELRLCDLTSVKQKYNESVIDYIKRFRDVRNRCYTLNITDRDLASLAFNGLIAPLRERLDGQQFLDVSQLMHRALAQESRVKDNKKLVRPYDKRPNVNVVDYPEASDSEEEGDHDIYVAEWSWTNKNKPFVCSNLMPTPRKDRQSEFKYSFDVAKCDKIFDYLLQEKQIRLPKGHVIPSQEELKRRAYYKWHDSHSHSINDCNVFRRQVQSAIDEGRLKFTDGSKMKLDHDPFSVNTINFNDKKVLIRLEQAESTKGKGVVIGEPRPKMIVPKKPEVGVWKENKNEASTSKAPRKTKVTFDMLLEKYEKQGGERARNKGKRPRSPPRERFGYSPRRSHSPPYHHPQDMSWGSYPMPPLGYPYPYYMPWGATPPMFNHMPLMQFNLGWGGPRRPIHEHLSSPNNGRFYGKNRANEERREGKRIKVEGRTSEVITIKEGSHDVPIPSGDGVGVSPNKKSEADTSSSQSAGRSDRTPSVGLTGTSGRSDRWSTAGLTGLQRRFDRRIAKDDVRASSSSNKINRGHYLPPGTEPNPRWMPKDLTSAQKRRLQCLRAQEIREKKAEEQRDKRFNELRPPPVWRRKSIENEKSVVVEEKEEQSVDKGESSPKEDMDINMVCMLPMDFCAMDEAEVAQFSLGPKDAVFEKPDESNRHMKPLYLKGHVDGKPVSRMLVDGGAAVNLMPYSLFKKLGREDDELKKTNMILNGFNGEPTEAKGIFSAELTVGNKTLPTAFFIVDVQEANLEWLQKRVQEYRSTKNDIGETVEDFDEVEKLGKGFTSADPLEEVDIGDGTKPRPTFVNKNMRADYKAGFIRPCRYAEWVSSIVPVEKKGSGKIRVCIDFRDLNKATPKDEYPMPIADMMVNDASGHKVISFLDGNAGYNQIFMAEEDMYKTAFRCPGFVGLFEWVVMTFGLKNASATYQRAMNLIFHDLLGIILEIYIDDIVVKSDGMEGHLANLRLAFERMRRYGLKMNPLKCAFEADFTWGAKQEEAFEELKRYLSTPPVVRAPKAGKPFRLYITSEDKVIGAVLMQEEDGKEYIITYLSSRLLDAETRPILSGRIGKWAYALIEYDLAYEPLKSMKGQIVCDFIVDHHVDIAYEEKVCLVEVIPWKIYFDGSSCKEGQGIGVVLFSPNGMCYEVSVRLEYYCTNNQAEYNALLFGLQVMEMVGAKYVEAFGDSELVVQQVAGVYKCLDGSLNRYLDSCLDIIANFDNFAIRHIVRHDNSRANDLAQQASGYNVKKGLFLVLEEPVLDFKSLCKIGKTGDQGRSDQLLAVGLTGDPEQSDQPCVAGLTGSGQSTGGHVSINLEAELIVNLDVCAQEAEQDWRIPLIRYLKDPTLKVDRKIRRQAFKYTLLDGDLYHRNIDGVLLKCLDGDQSKVATGEANGQAESSNKTLLKLVKKKIEEYPKRWHEEAVLPVEINLGSLRYIKKDDLSSEDYKTLMGDNLDEVIEKRLKALEEIEKEKKRVAKAYNNRVKAKLFQVGDLVWKTILPSGTRSKEFGKWSPSWEGPYRVYGIVRGNAYFLETLQGERFQRAINGKYLKKYFPSVWQDA

SEQ ID NO: 128451 - protein, 671 aa, Oryza sativa
  Clone ID: PAT_MRT4530_30802C.1.pep
MKKKKSSHLGGPTCHTPTLSWAPDVWWYIPGPVFTSIRFSSLPWPGSKRGAAMEKRRRLVVAGDGEGDGGEASGSAARGLVESLPEALLVEVVVRLELEAACSAASSCRALRAAAAAAFSAVTSLDLSMFPPTNAILNRILAGNGALRCLAVNCSLLDDSAVGAIAKGSLRELSLLKCSSFSSYLFVAVGERCKNLRSFVLEMAASDDDEHFGICRKSIAHIVKGCGYLENLSLKFFPLLGPGSVDFESLVPIPSTIKVLLLQPVSNWQAKRLFPISTSLKTSISNTLESLSLVLDIITDELVAFITGSLHNLVELCLEDNPMKEPDLHNDLTNVGLQALGLCHNLAHLSLTRGKQNCSSTFRRVTDFGIMMLADGCKQLKTIRLAGFSKVRDAGYAALLQSCKDLKKFEVSTGYLSDLTCLDLDEAAPKITEVRLLCCSLLTSETAISLSSCTKLEVLDLSGCRSIADSGLASISQLSKLTLLDLAGADITDAGLSALGNGRCPMSSLCLRGCKRISNNGIASLLCGSGTINKTLISLDIGNVPRISGRAVTLIAKNCEQISSLCLRNCLLINDSSLETLGSMRHNLGKSSLRMLDLSYCSRLSRNFLGLFEPPFFRGLRWLGVGKNMLERRGCSPTVAELLERKPGLTVCGNACEMGCRNQCHPDIRRQ

SEQ ID NO: 128452 - protein, 1491 aa, Oryza sativa
  unsure (1)..(1491): unsure at all Xaa locations
  Clone ID: PAT_MRT4530_30803C.1.pep
MTKPPSTKAEVEPVNVIPVALEELDEGARKALDEHLKAYTQDLLMKACARTRQGVIFKPGSLPKHTFDMVSAEEVSQSIQQQIAHTIDSSMVTLNNKLDASIETRCEEFMRTKFGPLMADFMFKDKASTSASQAPIDQISSKTDGAAGQTGQTGYYPGGQIGPQTGLTAPLDAGQFGAWTGQTGAIIPIQGVDPMTNNMFLYHIPAPNPPISTIGPQVQPHIPNAYNDPTRGYTPDTRHGQYNYIAPQPQPIKPPNPPPNQNRPDNMEELISGIIKDKFGIKARNHTKVYQKPYPDYYDNIPYPRGYRVPEFTKFSGEDSKTTXEHVGQFLAQCGEASSSDTFKLRLFSLSLSGTSFIWFTSFPANSIHTWTQVEQRFHDYFYTGETELRLSDLTSVRQKHNESVIDYVKRFSDVRNRCYSLNITDRDLADLAFNGLIAPIKERLDCQQFFYVSQLMQKALAQESRVKDSKKFXEPNVNLIDYPEASDSDDEGDHDMYVAEXHXTNKNKPFVCSNLMPTPRKDRQSKVKYSFDVAKCDMIFFYLLQEKQIRLPKGHVIPSQVELKRQAYCKWHDSHSHSTNDCNVFRRQVXSAIDEGRLKFTDGSKMKLDHDPFPVNTINFNNKKVLIGQGVVIGEPRPKMMVPKNPEKYEKQGGEKARNKRKRPRSPPRERFGHSPRQSESPTYHRSQNMSWGPYPMLPSGYPFPYYMPWGATPSMFNHMPPMQYNRGQLVXRLSLPNNGQFYAKNRANEEKREGKRVKVEIRTSEVITIKVGSHDEPIPSGDEVGESSSNKSPSGRSDRSPKAGLTGPSGRFDRQPNVGMTGASGWSDXWSTSGLTGLQRRFDRRFAKGSSGASSSSSKINRGHYLPPGTEPKPRWMPKDLTGXQKRRLQHLWAQELREREAEEQRDRRFNELRPLPEKEEQSVAKDESSPKEDMDVNMVCMLPMEFYAIDEAEVAQFSLGPKDAVFEKPDESNRHMKPLYFKGHIDGKPVSRMLVDGGAAMNFMPYSLFKKLGHGDDELKKTNIILNGFNGEPTEAKDIFSVELTVGNKTLPTAFFIVDVQGNYNVILGRCWIHAICCVPFTLHQCLIQWDGDDVEIVQADTSPEVAMANATFEWCYGNIQCLSGXDLSKANLEWLQKRVQEYRSTKNDISETIEDFDEVEKLGXGFTSADPLQEVDIGDETKPRPTFVNKNMRVDYKAKIIELLKEYVDCFAWKYHEMPGLNRDLVEHRLPIKPGFRPHKQPPRRFNPLLYDRVKEEIDRLLKAGDLNKATPKDEYPMPIADMMINDASGHNVISFLDGNASYNQIFMTEEDMYKTAFRCPGFVGIFEWVVITFGLKNAEATYQRATNLIFHDLLGIILEIYIDDIVVKSDGIVGHXDLRLAFERMRRYGLKMNPLKCAFGVSAGKFLGFMVHERGVEIDPKQIEKIRDFKAPTWKXEVQKLLGKVNYLRRFISNLAGLPFKYTLLDGDLYSRNIDGVLLKHFFSEW

SEQ ID NO: 128453 - protein, 349 aa, Oryza sativa
  Clone ID: PAT_MRT4530_30804C.1.pep
MGRRARCLCLLLLLLLVVGGGFHVANAQASPAPPQTGTRAVNRAVSTVITVVIGVFFVLVFVCVIVNQCCDCDSSAGAGAGQGQSSAARRRRGLDPAAVAAIPVVPYAEVRKHRSGGGGALECAVCLTVFDDGDDLRLLPQCSHAFHPDCIDPWLEGHVTCPLCRANLEKQPAPSPPAVEFSSSPAAAAAAAEESRTPEAAAVRVEEVAEASDEEETRRREEEAVELESLRAVRRAARMPRSNSTGHSLCALPAPRAPGPGDGGDHERFTVRLPPHVREEVLKSRRLRHATSLVLGIRGSSREGSSRGGGGSWHGARRWPSFLARTVSWARGGVGADTSAKETPCRDAV

SEQ ID NO: 128454 - protein, 831 aa, Oryza sativa
  Clone ID: PAT_MRT4530_30805C.1.pep
MSASKQAHWDEIGISQALALTIANLAKDEPLIAAATYFWSNTLNAFLFNQGPMTPTLLDIIMLTGLDVTSSANPMNLNTKSTFEFKTKSIGGWSGYIAAYMGKGPVTPREHVAFLLMWLEKFLFCGSSCGPTTNWQFIAEALESKKQFPLGKILLGYLYQMLNNASAKMIISSVVGAGGPWWLLQSWLNLVVMKVVNRPSVTEAEFPRLEPIVEDDGEERTHCRCMSYGEYASMPADAGAKLSAELLKDWFFSFYDGFQKDARVWFFYADSMDFELPADFRFEDINHEKFQQSREVFTTAISPCILPVGIHQGRNIQVSYEFYHPMSSARQLGMGQLPISLYFADKIQCRGDISSTLMMDRLLNIPRPPLGSIENIKLARFRSRALDRWWSEWKLHLFHQLASMYMIDLFPDAIPQTTESSPPRRSNSGKDIEYTPSLIPNGGGPSPSAIGYNAPKTSALLQGLIREPADAGKKRKTRSSAVDILAPALKKKTKPKKTTPADDLPVLDPSIEKVPDEEVIGDDVDQAAAEISDTERTPSASPKHTPSTPSAPVHFLSKKKTAVRKKSATSTPKPAAPVESGGRTPSAADSHHVEGEEQLAAPVIPVLADLFSFDIKDYLDETEQDITSKATALLPDDVKRTLKDISHRLEASLDNLVTNCGPIRERFTDIQALLPDELADALTPAVYLEQHQFKLEKARQRLADRRERKAIEATIQHNRQLVHVEKSKLDQLSEGPIKSNINRLEARKIDLMAQLQECNAELDLEHKKLADLPQAVEEQKAKLKSAIKNIADMTKSLKVIPGTDAQDAQAIEEVDQIRQRAISAIQGYLSQ

SEQ ID NO: 128455 - protein, 182 aa, Oryza sativa
  Clone ID: PAT_MRT4530_30806C.1.pep
MTKPPSTKAEVETVNVIPVALEELDEGARKALDEHLKAYTQDLLTNACARTHQGVTFKPGSLPKPTFDMGSAEEVSQSIQQQIAHTIDSSLVTLNNKLDASIETRCEEFMRTKFGPLMADFMFKDKASTSASQAPIDQIGSKTDRAKTQQTGYPRVTNHLNLAKAKPRWVLINKPASGADSR

SEQ ID NO: 128456 - protein, 289 aa, Oryza sativa
  Clone ID: PAT_MRT4530_30807C.1.pep
MVDKSIEWMDEDVQGCARRPCEGMRMGTRGSMAGMAACDKAGGEGKVRRRLEESEAAAAAAEGETGEEKGERFRAKNHGASSARANGNQEILRAVHPANGNLARQAKIVRPCHAPWIGGGRALTPASVRHSGSIGSAGRVYGWSMRGKERECMNEVEKAVIALAQSSPPTNIAASDISPLLIGASPLSVKSLAAANFLLRKLALIVAASSFASSPPLHLSSSTAANISSSTPEDTNGAMESFLTTTHGSHSLLSAILTGRTRTTGTYFDVLAVDPMVLAIIFDFKKENG

SEQ ID NO: 128457 - protein, 1179 aa, Oryza sativa
  Clone ID: PAT_MRT4530_30808C.1.pep
MSWHRVGALLLGAQSYRPVPEVPAVGGVGLVLLFMARMGWKLCHVFRPDTVVLKCGMVGLGWLGTSWDPGSGCQFGLNHRRPWVKAEKREGKRTKVEERTSEVITIKIGSHDVPIPSGDGVGKSPSKKSEAGTSSSQSASLTRPSGRSDRSHVAGLTGPSGRSDRRPDDGLTDASGRSGRSDRWPTAGLTGLRCRFDERAAKGDVGASSSSSKVNRGHYLPPRTEPNPRWMPKDLTATQKRRLQCLRAQELREKKAEEQRDKRFNELRPPPVWRPKSIEKAKPIDVEEKEEQSVDKDKSSPKEDMDINMVCMLPMEFCAMDEAEVAQFSLGPKDAVFEKPDESNRHMKPLYLKGHVDGKPVSRMLVDGGAAVNLMPYSLFKKLGHEDDELKKTNMILNGFNGEPMEARGIFSAELTVGNKTLPTAFFIVDVQEASLEWLQKRVQEYRSTKNDIGETVEDFDEVEKLGQGFTSADPLEEVDIGDGIKPRPTFVNKNMRADYKVKIIELLKEYVDCFAWEYHEMPGLSRELVEHRLPIKPGFRPYKQPPRRFNPLLYDRVKEEIDRLLKAGFIRPCRYAEWVSSIVPVEKKGSGKIRVCLDFRDLNKATPKDEYPMPIADMMINDALGHKVISFLDGNAGYNQIFMTEEDMYKTAFRCPGFVGLFEWVVMTFGLKSAGATYQRAMNLIFHDLLGIILEIYIDDIVVKSDGMEGHIADLILAFERMRRYGLKMNLLKCAFGVSAGKFLGFMVHERGVEIDPKKIEKIRDFKAPTCKKEVQKLLGKVNYLRRFISNLAGKIDAFVPILRLKKEADFTWGAKQQEAFEELKRYLSTPPVVRAPKAEKPFRLYIASEDKVIGAVLTQEEDGKEYIITYLSRRLLDAESRHIARHDNSRANDLAQQASGYNVKKGLFLILEEPVLDFKSLCEISKIGDQGGLTGVARPDTEEDWRIPLIQYLKDPTLKVDRKIRRQAFKYTLLDEDLYRRNVDGVLLKCLDEDQSKVAIGEGHRFVLVATDYFTKWAEAVPSRNMTHTEANGQAESSNKTLLKLVKKKIEEHPKRWHEVLSEALWAHRISKHGATKVTPFELVYGQEAILPVEVNLGSLRYIKQDDLSSEDYKTLMGDNLDEVVDKRLKALEEIEKEKKRVAKAYNKRVKAKLFQVGDLVWKTILPLGTRSKEFGK

SEQ ID NO: 128458 - protein, 1435 aa, Oryza sativa
  unsure (1)..(1435): unsure at all Xaa locations
  Clone ID: PAT_MRT4530_30809C.1.pep
VQSAIDEGRLKFIDGSKMKLDHDPFPMNTINFNDKKVLIRPEQAESTKGKGEVIGEPRPKMIVPKKPEVGVWKENNSEASTSKTPRKTKVTFDMLLGKYEKQGGEKARNKGKRPRSPPREQFGHSPRRSESPQYNCSQNMSWGPYPMPPSGYTYPYYMPWGATPPMFNHMPPIQFNQGWGGPRRTIHEHLSSPNNGWFYDEVGESSSNKPEAGTSSSQSAGLTRPSSRSDRNHTAGLTGPSGRSDCRPDDGPTDASGRSDRPPNVDMTGVSGRSDRWSTSGLTGLQRQFDRRFAKGNAGALSSSSKLNRGHYLPPGTELKPRWIPKYLTATQRRRLQRLRAQEIREQKAEEQRDRRFNELRPPPVWRRKSIEKEEPVVVEEKEEQSVAKDEPSTKEDMDINMVYMLPIEFCAMDEAEVAQFSLGPKDAVFEKPDESNCHMKPLYLKGHIDGKPLGRGDNELKKTNMILNGFNGEPKEAKGIFSVELTMGNKTLPTAFFIVDVQGANLEWLQKRVQEYRSTKNDIGETIEDFDEVEKLGQGFTSADPLEEVKIIELLKEYVDCFAWEYHEMPGLSRELVEHRLPIKPGFSPYKQPPRRFNPLLYDRVKEEIDQLLKAGFTRRCHYAEWVSSIVPVEKKGSGKIRVCMDFRDLNKATPKDEYPMPIADMMINDASGHKVISFLDGNAGNNQIFMTEQDIYKTTFRCPGFVGLFEWVVMTFGLKNAGATYQRAMNLIFHDLLGIILEVYIDDIVVKSDGMEEHIADLRLAFERMRRYGLKMNPLKCAFGLTAGKFLGFMVHERGVEIDPKKIEKIRDFKAPTCKKEVQKLLGKIDAFVPILRLKKEADFTWGAKQQEAFEELKRYLSTPPVVRAPKAGKPFRLYIASEDKVIGAVLTQEEDGKEYIITYFSRRLLDAETRPILSGRIGKWAYALIEYDLAYEPLKSVRGQNVCDFIVEHHVDIAYEEEVCLVEVIPWKIYFDGSSCKEGQGIGVVLFSPNGMCYEASVRLEYYCTNNQAKYNALLFGLQIMEMVGAKHVEAFGDSELVVQRVAGFYKCLDGSLNRYLDSCLDIIANFDNFTIRHIARHDNSRANDLAQQASGYNVKKGLFLVLEEPVLDFKSLCEIGEIGDQGRSDRRCAAGLTGDQVRYNRPHAAGLTGDPERSDRPLIRYLKDPTLKVDRKIRYLKDWRIPLIRYLKDPTLKVDRKIRWQALKCTLLDEDLYXRNIDGVLLKCLDEDQSKVAMGEGHRFVVVATDYFTKXAEAVPLKNMTYTEVIAFNLKHIIHRFGIPQTLTTDQAESSNKTLLKLVKKKIEEHPKRWHEVLSEALWAHRISKHGATKVTPFELVYCQEVVLPIEVNLGSLRYIKQDDLLSEDYKTFVXDLDDVIDKRLKALEEIDKEKKRVAXAYNKRVKAKLFQVGDLVWKTILPSGTRSREF

SEQ ID NO: 128459 - protein, 549 aa, Oryza sativa
  Clone ID: PAT_MRT4530_3080C.1.pep
MEFDEYEYLEKTVEPSAPSTNGSGEKDRAGSRRRSSGGGRDDEERGSKRSRSGEDRDRDRDRHRGGGGGREHRDRDDGKEKERSSRSRGKDAEKDRGKDGEKDRSKEAEKDRSRDRDRDRDSERDRRRERDSGRERRSSSRPERRRTEEEEMVRELQKERERSDRNRDYRDRDVRRRKDDGAEPEADPERDQRTVFAFQLSLKADERDVYEFFSRAGKVRDVRLIMDRNSRRSKGVGYIEFYDAMSVPMAIALTGQVLLGQQVMVKPSEAEKNLVQSNVASGGIASGGARKLYVGNLHSNITEDQLRQVFEPFGQVELVQLPFARLEDAKAAHSLNGHLDIAGRVIKVSAVTEQAGLQVGGATTGDLDDDEGGGLALNASSRAMLMRKLDRSGTATSITGGIGIPGVNTSVELPSASVTGAPLPTTSLIQPTIPAIGTVPGIQIPGTQSADIGSPTEFLLLKNMFDPAVETDPDFDLDIKDDVQDECSKFGAVNHIFVDKNTAGFVYLHFDSVAAATAAQRALHGRWFAGKMITATFMTAQQYKMKFPN

SEQ ID NO: 128460 - protein, 169 aa, Oryza sativa
  Clone ID: PAT_MRT4530_30810C.1.pep
MGNSKTPQPSKKSRIMLSDTDGHQLDNDEFSSESASNQMVLFNPETVAKGQDELGENHSPSLQKSANNPNRGMPSIGAFTVQCAKCFKWRLIPTKEKYEEIRECIIQEPFECERAREWRPDVTCNDPEDISQDGSRLWAIDKPNIALPPPGWERQIRIRGEGGTKFADV

SEQ ID NO: 128461 - protein, 1849 aa, Oryza sativa
  unsure (1)..(1849): unsure at all Xaa locations
  Clone ID: PAT_MRT4530_30811C.1.pep
MTKQSSSKVEVEPINVIPITLDDFEEEDRKSIEEYIKEITXEALMRACTRTRQGVIIKPGPRPKLTPDLVSNEEVTQSIQQQVVSTKDSSMIIFKNKLDATIKGRFDKFLRTKFGPLMADFMLKDKASTSASQVPIDQTSSGTDGAAQTAGQTGYYHGGQTGTQAGLTAPLDVGQTGPWTGQTGAIIPIQGIYPMTNASYLYHLRTFDPPISTAATNPQVPPHVPNAYNDVANGYPPDTRXGQYNHIAPQTHPIRPPNPPPNQHRPNNVEEIISGIIRDKFGIEARNRAKVYQKPYPDYYDNVPFPRGYRVPEFAKFSGEDIRTTXEHVGQFLAQCGEANSDTFKLRLFSLSLSGTAFTWFTSLPANYIHTWTQLEQRFHDYFYTGETELRLCDLTSVKQKYNEPVIDYIKRFRDVRNRCYSLNITDRDLAGLAFNGLISHLRERLDDQQFLDVSQLMQKALAQESRVKDNKKIVRPYKKKPNINLIDYPEASDSXDEGNHDMYIAEWSWTNXNKPFVCSNLMPTPRKDRQSEIKYSFDVAKCDKIFYYFLXDKQIRLPKDHIIPSQEELKRRAYCKWHDSHSHSTNDCNVFRRQVQSAINEGRLKFTDGSKMKLDHDPFPVNTINFNEKKVLIRPEQAESTKGKGVIIGESRPKMIVPKKPEKYEKQSGERTRNKGKRPRSPPRKRFGHSPRRSHSPPYHHSQDMSWGPYPMLPPGYLYPYYMPWGAALPMFNHMPPMXFNQGCGGPRRPIHECLSSPNNGQFYGKNRASEEKREGKRIKVEARTSKVITIKVGSHDVPIPSGDEVGESSSNKTEAGRSDRRPNDGLTDASSRSDRRPNVGLTDASXGASGRSDRWSTSGLTGLQRRFDRRFTRSKVGASSSSSKLNRGHYLPPGTEPKPRWMPKDLTATQRRRLQRLRAQEIREKKAEEQRDKRFNELXPPPEKEEQSVVKDESSPKEDMDINMVCMLPMEFCAMDEAEVAQFSLGPKDAVFEKPDESNRHMKPLYLKGHINGKPVSRILVDGGTAVNLMPYSLFKKLGRGDDELKKTNMILNGFNGEPTEAKGIFSVELTMGNKMLPTAFFIVDVQGNYNVILGRCWIHANCCVPSTLHQCLIXWDGDDVEIVQADTSAEVAMADATFEWRHGNIQCLSGMDLSKANLELLQKRVQEYRSTKNDIGETIKDFDEVEKLGQGFTSADPLEEVDIGDGTKPRPTFVNKNMRADYKVKIIELLKEYVDCFALEXHEMPGLSRELVERLLPIKPGFRPYKQPPRRFNPLLYDRVKEEIDRLLKAGDLNKATPKDEYPMPIADMMINDASGHKVISFLDGNAGYNQIFMAEEDMYKTAFRCPGFVGLFEWVVMTFGLKNAGATYQRAMNLIFHDLLGIILDIYIDDIVVKSDGMEGHIAYLRLAFERMRRYGLKMNPLKCAFGVSAGKFLGFMVHERGVEIDPKKIEKIRDFKSPTCKKEVQKLLGKVNYLRRFISNLAGQAFKYPLLDEDVYRRNIDGVLLKCLDEDQSKVAMAEVHEGICGTHQSAHKMNWLLRRAGFYWPRMIENCFKYYRRCEACQRFGNGHRFVLVATNYFTKWAEAVPLKNMTHTEVIDFILKHIIHRFDIPQTLTTDQGASFTSKEVKSFAESYGIKLLSSSPYYAQANGQAESSNKTLLKLVKKKIEEHPKRWHEVLSEALWAHRISKHGATKVTPFELVYGQEVVLPVEVNLGSLRYIKQDDLSSEDXKMLMGDNLDEVIDKRLKALEEIEKEKKRVAKAYNKRVKAKLFQVGDLVWKTILPLGTRSREFGKWSPSWEGPYRVCGIVRGNAYFLETLRGERFXRAINGKYLKKYFPSVWQDA

SEQ ID NO: 128462 - protein, 1381 aa, Oryza sativa
  unsure (1)..(1381): unsure at all Xaa locations
  Clone ID: PAT_MRT4530_30812C.1.pep
MISNRHYLPPGIEPKPRXMPKDLTATQKRRLQHLQAQELREREAEEERDRKFNKLRPPRTKVWRHKSIYGEKPVVVQKEKEEQSVAKENSSPKEDMDINMVCMLPMEFCAMDEAEVAQFSXILKTEKPDESNHHMKPLYLKGHIDGXPVSRMLVDGGAAVNLMPYSLFKKLGRGDDELKKTNMILNGFNGEPTEAKGIFSVELTVGNKTLPTAFFIVDVQGNYNVILGRCWIHANCCVPSTLHQCLIQRDGGDIEIVQADTLVEVAXMADATFEWCHGNIQCLSGRNLSSYDFISISDDKFVPIQKRVQEYRSTKNDIGETIEDFDEVEKLGQGFTSANPLEEVEIGXIYPRPTFVNKNMRADYKVKIIKQLKDYVDCFAWEYHEMPGLSRDLGEHRLPIKXGFRPYKQPPRRFNPLLYDRVKEEIDRLXLKAGFIRPYHYVEWVSSIVPVEKNWSGKIRVCIDFRDLNKATPKDEYPMPIADMMINDASGHKVISFLDGNAGYNQIFMVEEDMYKTAFRCPGFVGLFEWVVMTFGLKNAGATYQRAMNLIFHDLLGIILEIYIDDIVVKSDGMDGHIADLRLAFERMRRYSLKINPLKCVFGVSVGKFLGFMVHERGVEIDPKKIEKIRDFKALTCKKEVQKLLGKVNYLRRFISNLAGNIDAFVLILRLKKEVDFTWGAKQXEAFEELKKYLSTPPVVRAPKAGMPFRLYIASEDXVIDAVLTQEEDGKEYIITYLSRHLLDTETRYRHYLLSSTCIVACXADVIKHMLXRPILRGRIGKWXALIEYDLAYEPLKSMKGQIVVDFIVDHHVDIAYEEEVCLLXVIPWKIYFDGSSCKEGQGIGVVLFSPNGMCYEASVRLEYYCTNDQTEYNALLFGLQVMVMVGAKHVEAFGDSELVAQQVAGAYKCLDGSINRYLDQCLDIIANFDNFSIRHIARRDNSRANDLAQQASGYNVKRGVFLILEEPVLDFKPLCEIGKIRDQVRSDWHYMAGLTCEDWRVPLIKYLKDLTLKVDRKIWLQAFKYTLLDGDLYRRNIDGVLLKCLDDDQSKVAIGEVHEGFYWPRMIEDCFKYYRGCEACQRFGNVQLAPAAVLNPIIKPWPFRGXALDFIGQIYPSSSKGHRFVLVATDYFSMWAEAVPLKNMTHTEVIGFILKHIIHRFGIPQTLTMDQGASFMSKELKSFAESYGIKLLSSSPYYAQANGQAESSNKTLLKLVRKQIEEHPKKWHEVVSEALWAHRISKHGTTKVTPFESVYGQEAILPVEANLGSLRYIKQDDLSSEDYKTLMGDNLDEVIDKRLXRRVRAKLFQVGDLVWKTILPLGTRSREFGKWSPSWEGPYRVCGIVRGNAYFLETLQGERFQRAINGKYLKKYFLSVLQDA

SEQ ID NO: 128463 - protein, 77 aa, Oryza sativa
  Clone ID: PAT_MRT4530_30813C.1.pep
YVHLIKSHICMKHWRGQILKLSFLQWYKAAKGLFGRVPTSKFNFRSWVWSRVVELPKPSSTSLVHFVREFHPAPLSF

SEQ ID NO: 128464 - protein, 64 aa, Oryza sativa
  Clone ID: PAT_MRT4530_30814C.1.pep
ILPQIVHESESLERVMLSAGWSDIFRPHLQPLLHFFLILPTMYSCKGKKISATEKRCKEKKKKK

SEQ ID NO: 128465 - protein, 150 aa, Oryza sativa
  Clone ID: PAT_MRT4530_30815C.1.pep
VRGRRALYILGSIQADFPQSIVIHSAAYGDIATVDAQLVHLAQEINGILLTNDYNLSKVANLQKVQILNVIDLAQAVRPISLPGDSLELKIIKQGKEASQGVGYLQDGTMVVVQQGRPYVGSELQVIVTSALQASPGRMIFATPPSVLAS

SEQ ID NO: 128466 - protein, 51 aa, Oryza sativa
  Clone ID: PAT_MRT4530_30816C.1.pep
FDMVLRPFVAWAIWLGVLFSIYDVRLFLSLDVAVVGQWLTLLSTLGCIQSF

SEQ ID NO: 128467 - protein, 155 aa, Oryza sativa
  unsure (1)..(155): unsure at all Xaa locations
  Clone ID: PAT_MRT4530_30817C.1.pep
MGNFDYQGEKARVETNCIPSNRKREVGDKLDAEPAPLAVIGEGAVSKLEEEAFAVPSYPSSTTTAVGTLLVKLRELHGLDPKMNSTEESMPQGLHHQEFVVARAIFTSNSSLLSSVTANGGEIAWSSKPRGXGVSPRMELAVNFNCSTKRGESEL

SEQ ID NO: 128468 - protein, 42 aa, Oryza sativa
  Clone ID: PAT_MRT4530_30818C.1.pep
NAQNFESHFTCGGILPRSMKLHSTHIFFTYTIHNIPRFFLLR

SEQ ID NO: 128469 - protein, 161 aa, Oryza sativa
  unsure (1)..(161): unsure at all Xaa locations
  Clone ID: PAT_MRT4530_30819C.1.pep
GSGGPLRQPLGPRWTGCTRGSPAGSGGPTRQPHPMARGADGQAPRGGHTVRPEAATSARPAGGGXPAPLWPPAAAIGAAERRPREGKGKGKEAAVHGSPRSDDSDXGGGRSGGRRWCGSSRRGRRRSGGRRPKRRGGRGRRRCGEAGGDDAEVGDGPGEQL

SEQ ID NO: 128470 - protein, 164 aa, Oryza sativa
  Clone ID: PAT_MRT4530_3081C.1.pep
MSRARWRRGGREAEVEEDEAGRKGSGGGGGCGGCGGGGEEGERRWRRMKRARQRRAGEASLVRGGRRQPSQPCDRASPSSSLHKAGKRGPARPRPSTLWICLPLSSRSARLSIIIELGIEACCNCFLPICVAYDAVTRPIELEAAAGAIHPLSSWRDAAFFRLY

SEQ ID NO: 128471 - protein, 117 aa, Oryza sativa
  Clone ID: PAT_MRT4530_30820C.1.pep
MWLLASIQFKNLLLRLRPPGDNAINLSPFNYITIKANLLQLLTTSSLIHAQLSKALFAATASDFPARQHSIRLNLKYYLENFPSTLIEVFLSTSHCLQTSRKEQDKTHFLWQTTGKR

SEQ ID NO: 128472 - protein, 152 aa, Oryza sativa
  Clone ID: PAT_MRT4530_30821C.1.pep
MMPTPSEPLSPRSFALADTVLNAHHPHGASGDPTLIASVVTTTSTTARKAITALLAKHATIDASSSSKSSSFAADATPSELATSLAQALAPLASHLYLPASTSHMQFLGNCEHCAINLQVEFHNFHQGDLFVTDYCHKLKTMADNHGDVGEC

SEQ ID NO: 128473 - protein, 472 aa, Oryza sativa
  Clone ID: PAT_MRT4530_30822C.1.pep
MASDIGELLPPWTSPSKIELPFRVAAYITLYESSSFAFNALLRSPFLATAHCAHNTLAPIQSGVMRLIAAFPRRPAAGDAMLHLRQCLLPLLRAAAAAHPHTSAASSSSLHLSRRLFSTAAGPDTAPPFSVEEYLVATCGLTGAQALKASKKLSHLRSPAKPDAVLAVLSGVGLSRADLAAVVAADPMLLCARARNVARRLHSLRDRVGLSDADVARFLLAGGAMGLRKCDIAPRLEFWIGFVGSFDKLLPALKGNNGILMSDLDKVVKPNIALLQECGLSVCEIAKLSTLKWTVLSLSPERVKASVLCVEKLVVPRSSDRFKHVLKSACWISEDMLAMKMEFLRSTLGCSEDKLRAAVCISPHIFYLSDKNLCRKIDFLISEVGLEREFIVERPWVLGYSLEKRMVPRHSVMKILRTMGLMKDAVDFSSSLVYSEKKFVARYIDPYKQAAPTLADSYAAACAGKMPAHVHR

SEQ ID NO: 128474 - protein, 703 aa, Oryza sativa
  Clone ID: PAT_MRT4530_30823C.1.pep
MASSRVILALLLAAAAVMASSAQLDEKFYSNSCPSVEAVVRKEMVRALGAAPSLAGPLLRMHFHDCFVRGCDGSVLLDSAGNSTAEKDATPNQTLRGFGFVERVKAAVEKACPGTVSCADVLALMARDAVWLSKGPFWAVPLGRRDGRVSIANETDQLPPPTANFTELTQMFAAKNLDLKDLVVLSAGHTIGTSHCFSFTDRLYNFTGLDNAHDIDPTLELQYMARLRSKCTSLQDNTTLVEMDPGSFKTFDLGYFKNVAKRRGLFHSDGELLTNGFTRAYVQRHAGGGYKDEFFADFAASMVKMGGVEVLTGSQGEIRKKCNVYSLIVARNLPWLRSRLRRGARLGVETVCRLMSRELELLLFLLALRASGEVVAGSAEAAAAAAAWPALQVGFYHAKCPVAEDVVLGEMRMILEEDPTLAPSLLRMHYHDCFVQGCDGSIMLRSRSGKGERDATPNRSMRGYDAINRIKARLETVCPLTVSCADIIAMAARDAVYLSKGPWYDVETGRRDGDVSVAEYAENDLAPPDSNIVDVKTFFSVKSLNAKDIAVLFGCHSIGTSHCGAFQKRLYNFTGRMDQDPSLDAGYAAKLKKLCPPGHGHDHDHDGHGGAGGAAKVPMDPGSGFTFDLSYYRHVLATGGLFQSDGSLRDDPVTRGYVEKLANASSSEEYFADFAAAMVKMGRTDVLTGDLGAVRPTCDSLVD

SEQ ID NO: 128475 - protein, 328 aa, Oryza sativa
  unsure (1)..(328): unsure at all Xaa locations
  Clone ID: PAT_MRT4530_30824C.1.pep
MASSRVILALLLAAAAVMASSAQLDEKFYSNSCPSVEAVVRKEMVRALGAAPSLAGPLLRMHFHDCFVRGCDGSVLLDSAGNSTAEKDXATPNQTLRGFGFVERVKAAVXEKACPGTVSCADVLALMARDAGWLSKGPFWAVPLGRRDGRVSIANETDQLPPPTANFTELTQMFAAKNLDLKDLVVLSAGHTIGTSHCFSFTDRLYNFTGLDNAHDIDPTLELQYMARLRSKCTSLQDNTTLVEMDPGSFKTFDLGYFKNVAKRRGLFHSDGELLTNGFTRAYVQRHAGGGYKDEFFADFAASMVKMGGVEVLTGSQGEIRKKCNVVN

SEQ ID NO: 128476 - protein, 1072 aa, Oryza sativa
  Clone ID: PAT_MRT4530_30825C.1.pep
MAAMLDAFASSLARILAETAKEEVEALLGVPGEISRLEATLGDLRAVLSDAERARDRDAAVDRWVRELRDAMYDADDILDECQAAAGGEAATPVAMAGCCCCFRGVRVPALSCFRDPVRAREIGKRVRALNRRLDGIERRSSRFGFVSQTRIISSSPSPCCSRRADSGDGRRTALGLIRSDVVGEKIAEDTRMLADILVSKTTDLDDAGGGCNLIPTIAVTGAGGIGKTTLARMVFGDATVQESFDARIWLFVGRDADEVTMLRSAIAHAAGAASCEGLAVAGDKDLLERALQRAVTHRKVLLVMDDVWSDAAWNELLRVPLSHGAPGSRILVTTRNDGVAHRMKVRYLHRVDKLRRQDAWSLLKKQIVLNKSDEAELDELEDIGMQIVDRCDGLPLAIKMIGGLLLSKSRTRGAWMEVSRHSAWCKHEVNDEINKVVCLSYGELPSHLKQCFVYCSLFPRGEVIESRTIVRMWIAEGFVQDSTGSGLPEAVAAQYYKELVLRNLLDPSDGYYDQLGCTMHDVVRSFAQHVAKDEGLSINEMQKQTIGDALGTLKFRRLCISNKQVEWDALQRQVSLRTLILFRSIVTKHKNFLNNLSCLRVLHLEDANLIVLPDSICHLKHLRYLGLKGTYISALPNLIGNLRFLQHIDLCGCINVSELPESIVRLRKLRSLDIRHTMVSSVPRGFGKLENLVEMLGFPTDLDDSTHDWCSLEELGSLPNLSALHLEVLEKATLGQMAARSKLSSKQNLTQLELRCTSRISANGTVQGGISEEDCERIENVFEHLRPPPSIDRLTIAGYFGHRLPQWMATATAFRSLRRLVLEDYACCDRLPGGLGQLPYLDYLWIEHAPSIEHVSHDFILPPVGIAVDGNAPSTTTTTTKTEGAGIAFPKLKRLGFQGMLRWASWDWDEHVQAMPALESLTVENSKLNRLPPGLVYHTRALKALVLTNAVSLESVENLHSLVELYLADNPKLEMVVNCSSLTKIEILRCPELKAFDRLPAVRSIVWEDLDADTLPGYLQEAKDASSEEWRSVRHVQQLKVFGFKPQSETSECYFLYTKEPYHVETNISKA

SEQ ID NO: 128477 - protein, 167 aa, Oryza sativa
  Clone ID: PAT_MRT4530_30826C.1.pep
QSKGPWYDVETGRRDGDVSVAEYAENDLAPPDSNIVDVKTFFSVKSLNAKDIAVLFGCHSIGTSHCGAFQKRLYNFTGRMDQDPSLDAGYAAKLKKLCPPGHGHDHDHDGHGGAGGAAKVPMDPGSGFTFDLSYYRHVLATGGLFQSDGSLRDDPVTRGYVEKLANA

SEQ ID NO: 128478 - protein, 106 aa, Oryza sativa
  Clone ID: PAT_MRT4530_30827C.1.pep
YDSLVGPVQLKPAGAKLLCRISGSTNSQIDEPPSYEEALKQGLPTTRPIAPMATGVLGQHTPVTLDLPPPADTQQKPVLPGPSAVVVTRPSRASLRRAASGPRSTL

SEQ ID NO: 128479 - protein, 117 aa, Oryza sativa
  Clone ID: PAT_MRT4530_30828C.1.pep
EMVVNCSSLTKIEILRCPELKAFDRLPAVRSIVWEDLDADTLPGYLQEAKVKRLHINCNLSLLNLISLQDASSEEWRSVRHVQQLKVFGFKPQSETSECYFLYTKEPYHVETNISKA

SEQ ID NO: 128480 - protein, 82 aa, Oryza sativa
  Clone ID: PAT_MRT4530_30829C.1.pep
MHQKEDVDAHQDPLPCSARRMEIGAPLLLSRDSSWRKEAGETTERWEISRSLTPREGTGKILEYSTRHQDSGKQEPTPPCWI

SEQ ID NO: 128481 - protein, 85 aa, Oryza sativa
  unsure (1)..(85): unsure at all Xaa locations
  Clone ID: PAT_MRT4530_30830C.1.pep
GWQWQQEDKKKNYRSSMGIWKAKPEEEIWLTGERREVYSCFHGATGGCSGSGEGGGGSGQTASAXRWRGQSSAAPSCDAVPRVAM

SEQ ID NO: 128482 - protein, 1841 aa, Oryza sativa
  unsure (1)..(1841): unsure at all Xaa locations
  Clone ID: PAT_MRT4530_30831C.1.pep
MTKPPSKTEVEPANVIPVTLEDFEGEDRKAMDEYINELTREALMRASTRTRQGVIIKPGPRPKLAPDLVSNDEVTQSIQQQVASTIDSSMIAFKDKLDATFEGKFDEFLRVKFGPLMADYMSKDKASTTANQPPIDQTGIRTDGAGQTAGQTGYYPGGQTGTQAGPTVPLDAGQTGPWAGQTGAIIPIQGIDPMTNASYLYHLRTFDPPVSTAANNPXVPPHVPNAYNDVARGYPPDTRQGXYNHIAPQTQPIRPPNPPPNQHGPNNMEDIISEIIRNRFGIETTNRARVYKKPYPDYYDNVSFPRNYRVPEFTKFSGEDGKTTWEHVGQFLVQCGEANSDTFKLRLFSLSLSGNXFTWFTSLPANSIHTWAQLEEKFHDYFYTRETELRLCDLTSVKQKYNEPVIDYIKRFRDVRNRCYSLNITDTDLVGLAFNGLIAPLRERLDGQQFFDVSQLMQRALAQESRVKDNKKLVRSYDKKPNVNVIDYPEASDSEEEGDHDIYVAEXSWTNKNKPFVCSNLMPTPRKDRQSEVKYSFDVAKCDKIFDYILQEKQIILPKGHVIPSQEELKRRAYCKWHDSHSHSTNDCNVFRRQVQSAIDEGRLKFTDGSKMKLDHDPFLVNTITFNTKQVLIRPEPAESTKGTGVIIGEPRPKMIVPKKPENYEKQGGEKIRKKDXRPRSAPRERFGHSPRWSHSLSYHHPQDMSWGSYPMPPPGYPYPYFMPWGATPPMFNHMPPMQFNQGWGGPRRPIHEHLSSPNNSRFYGKNQANEEKREGKRVKVEARTSEVITIKVGSHDVQIPSGDGVGVSPNKKSEADTSSRRPDSGPTDASGRSDRAPNVSLTSASSQSDRWSTSGLTGLQRRFDRRIAKGDVRASSSPSKINRGHYLPPGIEPNPRWMPMDLTTTQKRRLQRFRAQEIREKKAEEQRDKRFNELRPPPEKEEQSVDKGESSPKEDMDINMVCMLPMEFCAMDEAEVAQFSLGPKDVVFEKPDESNRHMKPLYLKGHVDGKPVSRMLVDGGAAVNLMSYSLFKKLGREDDELKKTNMILNGFNGEPTEAKGIFSAELTVGNRTLPTXFFIVDVQGNYNVILGRCWIHANCCMPSTLHQCLIQWDGDDVEIVQADTSAEVAMADATFEXRHGNMQCLSGRDLSEANLEWLQKRVQEYRFTKNDIGETVEDFDEVEKLGKGFTSADPLEEVDICDGTKPRPTFVNKNMRADYKVKIIELLKEYVDCFAWEYHEMPGLSRELVEHRLTIKPGFRPAEGAPRSGGQGIMARGRKRISSSASLYPCQTLCPAPRFPRPLSRPLVSRAHSSINPARPFAAHEQIIKPNTMLYYSAYKLWRWLELNTWRLLVIRNXGATSCRSLQMLXGSLNRYIDSCLDIITNFDDFAIRHIAXMIILEQMTWHNKHLAIILCEIGKTGDQGRSDRPHAAGLTSDPERSDWPWPVRPILGRALGGTFQSIXGRINPTLKVDRKIRRQAFKYTLLDGDLYRRNIDGVLLKCLDEDQSKVAMGEVHEGICGTHQSAHKMNWLLRRAGFYWPKMIDDCFKYYRGCEACQRFGNGHRFMLVATDYFTKWAEAVPLNNMTHTEVIDFILKHIIHKFGIPQILTTDQSASFMSKEVKSFTESYGIKLLSSSPYYAQANGQAESSNKTLLKLVKKKIEEHPKRWYEVLSEALWAHRISKHGATKVTPFELVYGQEALLPVEVNLGSLRYIKXDDLSSEDYXTLMGDNLDEVIDKRLKALEEIEKEKKRVAKAYNKRVKAKLFQVGDLVWKTILPLGTRSKELGKWSPSWEGPYRVCGIVXGNAHFLETLQGERFQRAINGKYLKKYFPSVWQDA

SEQ ID NO: 128483 - protein, 2035 aa, Oryza sativa
  Clone ID: PAT_MRT4530_30832C.1.pep
MTKPSSKTEVEPSHMIPVTLDDFEGEDRKAMEEYINELTREALMRATTRTRQGVIIKPGPRPKLAPDVVSNDEVSQSINQQIASTIDSSMPNFKDRLDVMFKERVDGFLRNRLGSLMDDYILKDKAYTTANQHPIDLIGSKTDGAAFMAGPTGPDGRSDRDTAVGPTGQMAGQTGCYPTGQTGFQAGPTAQPDAGQTGPWAGQTGAIVPIQGIDPTTNASYLYHFRTFDPPVSTVTTNPQIPPHIPNVYNDVSRGYPPNTRQGQYNHIAPQTQPIRPPNPPPNPQGPNNMEDVISDIMRNRFRIETRNRARAYKKLYPDYYNNVPFPRNYRVPEFAKFSGEDVAPLREKLDGQQFLDVSQLMQRALVQESWVKDKKFARPFDKKPNVNVVDYSDASDSEEEGDHDIYVAEWSWTNKNKPFVCSNLMPTPRKDRQSEVKYSFDVAKCDKIFDYLLQEKQIRFLKGHVIPSQEELKRRAYCKWHDSHSHSTNDCNVFRRKVQSAIDEGRLKFTDGSKMKLDHDPFPVNTINFNNKKVLIRSEQSESTKGKEVVIGEPRPKMMVPKKPEVGVWKENKGEASTSKAPRKTKVTFDMLLEKYEKQGGEKIRNKGKRPRSPPRERFGHSPRRSHSPSYHHPQDMSWGPYPMAPPGYPYPYFMPWGQRRQWWGGPRRPIHERLSSSNKSRFYGKNRVNEEKREGKRVKIEERTSEVITIKIGSHDVPVPSGDGVGKSPSKKSEAGTSSSQSAGLTRPPGWSDRSHAVGLTGPSGRSDRQPDSGPTEASGRSDRVPAVGLTGASGRSDRWSATGLTGLQRQFDKRAAKGDVGAPSSSNKVNRGHYLPPGTEPNPRWMPKDLTATQKKRLQRLRAQELREKRAEEQRDKMFNELRPPPVWRPKSIEKAKPIDVEEKEEQSVDKDKSSPKEDIDINMVCMLPMEFCAMDEAEVAQFSLGPKDAVFEKPDESNRHMKPLYLKGHVDGKPVSRMLVDGGAAVNLMPYSLFKKLGRKDDELKKTNMILNGFNGEPTEARGIFSAELTVGNKTLPTAFFIVDVQEWLQKRVQEYRSTKNDIGETVEDFDEVEKLGQGFTSADPLEEVDIGDGTKPRPTFVNKNIKADYKVKVIELLKEYVDCFAWEYHEMPGLSRELVEHRLPIKPGFRPYKQPPHRFNPLLYDRVKEEIDRLLKAGFIRLCRYAEWVSSIVPVEKKGSGKIRVCIDFRDLNKATRKDEYPMSIADMMINDASGHKVISFLDGNAGYNQIFMAEEDMYKTAFRCPGFVGLFEWVVMTFGLKNAGATYQRAVNLIFHDLLGIILKIYIDDIVVKSDGMEGHIADLRLAFERMRRYGLKMNPLKCAFGVSAGKFLGFMVHERGVEIDPKKIEKIRDFKAPTCKKEVQKLLGKVNFLRRFITNLAGKIDAFVPILRLKKEADFTWGAKQQEAFEELKRYLSTPPVVTYIVTCQADVIKHMLQRPILSGRIGKWAYALIEYDLAYEPLKTIKGQIVCDFIVDHHIDVAYEGEVCLVEVIPWKIYFDGSSCKEGQGIGVVLISPNGMCYEASVRLEYYCTNNQAEYNALLFGLQVMEMIGAKYVEAFGDSELVVQQVAGIYKCLDGSLNRYLDSCLDIIANFDNFAIRHIARCDNSRANDLAQQASGYNVKRGLFLILEEPVLDFKFLCEIGKVGDQRRSGRRCTAGLTGDQGRSDRLHAAGLTGVPEQSDRPCVAGLTGSRQDAGDTFQDTEEDWRIPLIQYLKDPTLKVDRKIRRQAFKYTLLDGDLYRRNIDGVLLKCLDEDQSKVAMGEGWALDFIGQIYPSSSKGHRFVLVATDYFTKWAEAVPLKNMTHKEANGQAESSNKTLLKLVKKKIEEHPKRWHEVLSEALWAHRISKHGAPKVTPFELVYGQEAVLPVEVNLGSLRYIKQDDLSSEDYKTLMGGNLDEVIDKRFKALKEIEKEKKRVAKAYNKRVKAKLFPVGDLVWKTILPLGTRSKEFGKWSPSWEGPYRVCGIVRGNVYFLETLQGERFQRAINGKYLKKYFPSVWQDA

SEQ ID NO: 128484 - protein, 103 aa, Oryza sativa
  unsure (1)..(103): unsure at all Xaa locations
  Clone ID: PAT_MRT4530_30833C.1.pep
SPNRLRPGXVEFESDKXSRLSRFRQCDSFGQKSAVKTYGILEFIRDKSHVRQGHILIKSTGTLXEPKGKIFGPALKLSRSSRPLCVFRINKYKNSMFTYRDYC

SEQ ID NO: 128485 - protein, 1573 aa, Oryza sativa
  Clone ID: PAT_MRT4530_30834C.1.pep
MTKPPSKTEVEPSNVMPVTSDDFEGEDRKAMEEYINELTREALMRATTRTRQGVIIKPGPRPKLAPDVVSNDEVSQSIQQQIASTIDSSMANFKDRLDVMFKDKVDGFLRSRLGSFMDDYTLKHKAYTTANQPPIDQTGSKTDRTAFTAGPTGPGGWGYPPDTRQGQYNHIAPQTQPIRPPNPPPNQQGPNNMEDMISDIMRNRFWIETRNRARTYKKPYPDYYDNVSFPRNYRVPEFAKFSGEDGKTTWEHVGQFMAQCGEANSDTFKLRLFSLSLSGNAFTWFTSLLANSIHTWAQLEEQFHDYFYTGETELRLCDLTSVKQKYNESVIDYIKRFRDVRNQCYTLNITDRYLAGLAFNGLVVPLRERLEGQQFIDVSQLMQRALAQESRVKDNKKLARPFDKKPNVNVVDYPEASDSEEEGDHDIYVAEWSWTNKNKPFVCSNLMPTPRKDRQSEVKYSFDVAKCDKIFDYLLQEKQIRLPKGHVIPSQEELKRRAYCKWHDSHSHSTNDCNVFRRQVQSAIDEGRLKFTNGSKMKLDDDPFPVNTISFNDKKVLIRPKQVESTKEKEVVIGEPRPKMIVPKKPEVGVWKENKSGASTSKAPRKTKVTFDMLLEKYKRQGGEKIHNKGKRPRSPPRERFGHSPRRSHSPSYHHPQNMSWGPYPIPPPGYPYPYFMPWGATPPMFNYMPPMQFNQGWGGPRRPIHERLSSSNNSRFYGKNRANEEKSEGKRVKVEERASEVITIKVGFHDVPIPSGDGVGKSPSKKSEAGTSSSQSAGLTRPSSRSDRGHVAGMTGPLGRSDRRPDSDPTDASGRSNRVPHVGLTGASGRSDRWSMASLTGLQRRFDERIAKGNRRLQRLRAQELREKKAEEHRDKRFNELRPPPVWRPKSIEKAKPIDVEEKEEQSVDKSELSPKEDMDINMMGSRNLMPYSLFKKLGREDDELKKTNMILNGFNGEPTEARGIFSAELTVGNKTLPTAFFIVDVQEANLEWLQKRVQEYRSTKNDIGETVEDFEEVEKLGKGFTSADPLEEVDIGDGTKPRPTFVNKNMRADYKVKVIELLKEYVDYFAWEYHEMPGLSRELVEHRLPIKPGFRPYKQPPRRFNPLLYDRVKEEIDRLLKVGFIRPCRYAECVSSIVPVEKKGSGKIRVCIDFRDLNKATPKDEYPMPIADMMINDASGHKVISFLDDNVGYNQIFMAEEDMYKTAFRCPGFVGLFEWVVMTFGLKNAGATYQRAMNLIFHDLLGIILEIYIDDIVVKSDGMEGHIADLRLAFERMRWYGLKMNPLKCAFGVSAGKFLGFMVHERGVEIDPKKIEKIHDFKAPTCKEVQKLLGKVNYLRRFISNLAGKIDAFVHILRLKKEADFTWGAKQQEAFEELKRYLSTPHVVRAPKAGKPFRLHIASEDKVIGAILTQEEDDKEYIITYLSRHLLDTKTRPILSGRIGKWAYALIEYDLAYEPLKSMKGQIVCDFIVDHHIDIAYEGEKRHLVLRPKQNDSSGKRRSLRGFSSTPQAKLNWGLSLGPLTPSSAQKHYTSEKGGIIARLSTTTVLSKPHQRCRRARGYKDGLWLFA

SEQ ID NO: 128486 - protein, 381 aa, Oryza sativa
  Clone ID: PAT_MRT4530_30835C.1.pep
MVSGGGVAAENGEMVGNGEGRKGAGASVLVTGGAGYIGTHTVLRLLEKGFAVTVVDNFHNSVPEALDRVRLIAGAALSARLDFIAVRDSPKQHACSSSCTVELNRAGEVEIEIHVCVRFQGDLKSKDDMEKMYYENNVAGTMNLYSAMTKYGCKKIVFSSSATVYGQPEKTPCVEDSKLSALNPYGTTKLVLENYFRQVQAADPEMRVILLRYFNPIGAHRSGDIGEDPRGIPNNLLPYIQQVAVGRRPELNVYGVDYPTRDGTAIRDYIHVVDLADGHIAALEKLFATPDIGCVAYNLGTGCGTTVLEVVKAFEEASGKKIPIKICPRRPGDCTEVYASTDKAKKELGWSARFGIEDMCRDQWNWAKKNPYGYSANAEQN

SEQ ID NO: 128487 - protein, 72 aa, Oryza sativa
  unsure (1)..(72): unsure at all Xaa locations
  Clone ID: PAT_MRT4530_30836C.1.pep
ADSCRTAWAGYYYGRYWTMRKLSMFWCTDTTHALKDLDEAXNASPDACVRILGFYNARQVHVMSFIAYKPPF

SEQ ID NO: 128488 - protein, 207 aa, Oryza sativa
  Clone ID: PAT_MRT4530_30837C.1.pep
MEKLKARRKSLELHSALAGKKRPASAGFLVVAADGRRNHQESAAEHPDVVVVPSPSADVVVVPALPPSSSSSRRRHCRPHNAKDGHLPLSGRGSRGGGVVAAAAAVAAGLRRSSCDVDLSSDGLISARLLPPEAVHRRRLVEQIGARFTRPPAASRSGGERENGHHRAVLRRIVPRCRLPPPRATPPPATCPRRAAACRLPRAASPG

SEQ ID NO: 128489 - protein, 1518 aa, Oryza sativa
  Clone ID: PAT_MRT4530_30838C.1.pep
MEEYINELTREVLMRASTRTHQGVTIKPRPCPKLAPDLVSNDEVSQSIQQQIASTIDSSMVAFKDQLDAIFKGKFDEFLRIKFGPLMDDYTLKDKASTTANQPPIDETGSKTDGTAFTAGPTGPDGRSDRDTAVGPTGQTAGRTGYHPGGQTGTQAGPTAPLDAEFPNLPSLVVRMANSIHTWTQLEEKFHDYFYTGETELRSCDLTSVKQKYNESVIDYIKRFRDVRNRCYTLNITDRDLAGLAFNGLIAPLRERLDGQQFLDVSQLMQRALAQESRVKDNRKLARPFDKKPNVNVVDYSEASDSEEEGDHDIYIAEWSWTNKNKPFVCSNLMPTPRKDRQSEVQSAIDEGRLKFTDSSKIKLDHDPFPKYEKQGSERGRNKGKRPRSPPREQFGHSSRRSYSPSYHHPQDMSWGSYPMPPPGYPYPYFMPWGATPPMFNHMPPMQFNQGWGGPRRPIHERLSSPNNSRFYGKNQANEEKREGKRVKVETRTSEVITIKVGFHDVPIPTGDGVGVSPNKKSEAGTSSSQSAGQSRPSSRSDRSHATGLTEPSGRSDRAPDVGLTGASGRSDQWSMAGLTGLQRRFDRRIAKGDVEASSSSNKVNTGHYLPPGTEPNPRWMPKDLMATQKRRLQRLRAQELREKKAEEQRDKRFNKLRPPPVWRPKSIEKAKPIDVEEKEEQSVDKGESSPKEDMDINMVCMLPMEFCAMDEAEVAQFSLGPKDAVFEKPNESNRHMKPLYLKGHVDGKPVSRMLVDGGAAVNLMPYSLFKKLGCEDDELKKTNMILNGFNGEPTEAKGIFLAELTVGNKTLPTAFFIVDVQVEKLGKGFTSADPLEEVDIGDGTKPKPTFVNKNMRADYKVKIIELLKKYVDCFAWEYHEMWGLSRELVEHRLPIKPGFRPYKQPPRRFNPLLYDRVKEEIDRLLKAGFIRPCRYTEWVSSIVPVEKKGSGKIRVCIDFRYLNKATPKDEYPMPIADMMINDASGHKVISFLDGNAGYNQIFMAEEDMYKTAFRCPGFVGLFEWVVITFGLKNAGATYQRAMNLIFHDLVGIILEIYIDDIVVKSDGMEGHIADLRLAFERMRRYGLKMNSLKCAFGVSAGKFLGFMVHERGVEIDPKKIENIRDFKAPTCKKEVQKLLVMEMVGAKYVEAFGDSELVVQQVVGVYKCLDGSLNRHITRHDNSRANDLAQQASGYNMKKGLFLILEEPVLGFKSLCEIGKTGDQGRSDWHCTAGLTSDQGRSDRPHAAGLTGDPERGCEACQRFGNVQLAPAAVLNPIIKPWPFRGWALDFIGQIYPSSSKGHRFVLVATDYFTKWAEAVPLKNMTHMEANGQAESSNKTFLKLVKKKIEEYPKRWHEVLSEALWAHRISKHGATKVTPFELVYGQEVVLPVEVNLGSLRYIKQDDLSSEDYKALMGDNLDEVIDKRLKALEEIEKEKKKVAKAYNKRVKAKLFQVGDLDWKTILPLGTRSKEFGKWSPSWEGPYRVCGIVRGNAYFLETLQGECFQRAINGKYLKK

SEQ ID NO: 128490 - protein, 408 aa, Oryza sativa
  Clone ID: PAT_MRT4530_30839C.1.pep
MVSGGGVAAENGEMVGNGEGRKGAGASVLVTGGAGYIGTHTVLRLLEKGFAVTVVDNFHNSVPEALDRVRLIAGAALSARLDFIAVRDSPKQHACSSSCTVELNRAGEVEIEIHVCVRFQGDLKSKDDMEKVFAAKRYDAVIHFAGLKAVGESVAHPQMYYENNVAGTMNLYSAMTKYGCKKIVFSSSATVYGQPEKTPCVEDSKLSALNPYGTTKLVLENYFRQVQAADPEMRVILLRYFNPIGAHRSGDIGEDPRGIPNNLLPYIQQVAVGRRPELNVYGVDYPTRDGTAIRDYIHVVDLADGHIAALEKLFATPDIGCVAYNLGTGCGTTVLEVVKAFEEASGKKIPIKICPRRPGDCTEVYASTDKAKKELGWSARFGIEDMCRDQWNWAKKNPYGYSANAEQN

SEQ ID NO: 128491 - protein, 186 aa, Oryza sativa
  Clone ID: PAT_MRT4530_3083C.1.pep
MAGPYAPQLTRWRAAVGGAVVRDFVEHAGSVIALRPEDYYHRAAAATGDDDDDGDDPRERVLLGGRLYPVADETTTIHGGVGGGGRTTLRCVEFCPEPGVAPLRLTVTTAAAPAEEEEKQRQEVAEVVSPDGAVRVLGRGERFGGGGGEKGTVQHVVDVEGEREVFVLLVSVRPELARIVRVQRLT

SEQ ID NO: 128492 - protein, 1368 aa, Oryza sativa
  Clone ID: PAT_MRT4530_30840C.1.pep
MGRGKNLETVLEEQEPAWAGEVGELRQTMAELQEKIEEENKAIHEQIQNQAVQAQIHRDEMMQSLKAIQEMLSSTASCSGKEAKEKIDAVRTPGTAQSATQTAHKIEEEVKKGPKKFNFPEFNGEHPEAWIRKANKYFSLTKTPEEEKVLVAEVYITGKADQWIDSYDIPTETLTWPEFCTMVCKRFAAKSKVEITDTFRNLKQYSSVETYIDKFEEIMPLVKRNNPNLNEEYFLDYFISGLKEHIKRPLKSMGIHSLVQAYEHARNYDSGPQTNRGGSGFHRNEKKNDWASTSKMEVKGKEEKKEDGGEEEEEEYESPEGEVEYTTPPDSPKGKNKNRGEPEIAMHAISNGEKGATTLTLKVRMGQVTASALVDSGSTTTFISPALVRRAKLEIKNCESIPVRVANREFLYTGAQCHQQVYSIQGEQFVTTFRVLEMKGYDIIFGCDWIRQYSPVSLNLKTKEMTVNKGGSVVVLSDVTVPARNFMISMHKMEKWIDQGMAGAVLYMKSVQKEKEGHGTLESIEKVLANFEDVFEEPKMLPPTRDCDHTIPLVPGAKPVNVRPYRLPHNQKNAMEELVKQLISSNTIKPSMSPYSSPAILVKKKDGSWRMCIDYRQLNSNTIKNKYPIPVIEDLLDELHGSKYFSKIDLRSGYHQIRMDVKDVPKTSFSTHMGHFEFVVMPFGLTNAPATFQVLMNRILAEHLRKFVLVFFDDILIYSKTLQEHVEHVSKAMEILRTNQLFAKRSKCVFGQRQVEYLGYVISDAGVATDPEKIRAVREWPTPTNITELRGFLGLAGYYRRFIQNFGVICRPMFDSLKKMGFKWEEKQQQSFDEIKSRLAQAPVLALLDFTQPFILEADASGSGIGAVLMQGGRPIAYISKAIGPRAAGYSTYDKEALAILEALKKWKHYFMGTSRITEGVQYKLLVKLLGYDYKIEYKKGKENRAADALSRKPQVEQLQVVTLVIPKWVQEVIESYKGDEKCLVLEAKLRIDGQAQPPYSLSGGILRYKDRIVIGSGGTLREQLKKSFHDSALGGHSGERGTYQRVKLLFYWPKMKEDIKQYVKMCAVRQKNKGENQLSPRLLQPLPIPDMAWTHISMDFVEGLSKSEGKDVIWVIVDRLTKYAHFIALSHPFTAEQILEKFKDNFYKHHRLPIVIGSDRDRIFTSQALHGVKPPLVAEHMLPSSLVEGARNREQAKAAIFEAVKSNLEKAQARMKYFADRRRSERTLEVGDMAYLKMQPYRHNSLGLHGSLKLHSKYYGPFRVTEKVGAVAYRLLLQEGSLIHPVFHVSQLKKHLGPKAVPETALPLIDAEGNVLTEPVAVLERRMIPRNNEPVVQWKVHWANLPAEAATWEDASFIAKVFPAFKP

SEQ ID NO: 128493 - protein, 89 aa, Oryza sativa
  Clone ID: PAT_MRT4530_30841C.1.pep
KKSLVSKYSYFWTSPPHSILVTSYLGKNKKKNAATTPKVLPLQLGVDNESTRLVNINELKSNLVLLKLINEPYLTYIISILSILLFYYT

SEQ ID NO: 128494 - protein, 114 aa, Oryza sativa
  unsure (1)..(114): unsure at all Xaa locations
  Clone ID: PAT_MRT4530_30842C.1.pep
LSPTITSGVCDGRLPCPLTTTEGDDFRQKVWSMTGGSYCRPAYXRRKTGFAMFGVFLXCIPIDMKCAELEQRPHHASRPIPSSTLPQHTVLGKRIERCLNLQGGLLDLSCCGIS

SEQ ID NO: 128495 - protein, 1843 aa, Oryza sativa
  unsure (1)..(1843): unsure at all Xaa locations
  Clone ID: PAT_MRT4530_30843C.1.pep
TKSPPSKSEVDPSNVMPVTRESLDEEARKAFDEHMKKYADELLKTCTKTRQGTIFKPDLVSSSTIDKVTFEDLSQSIQQQVAHTIDESMIVLKNKLEASFENNCENFMRNKLGPLVADFIFKDKASTSASQAPVDQINSKTDGAKTMTGQTEYYSGGQTGTQAGLTAPLDAGQTGPWTGQTGAIVPIQGVDPMTNASYLYHLRIFDPPVSTAANNPQVPPHIPNAYNDVSRGYPPDTRQGQYNHIAPQHQPIRQPNPLPNQHRLDNMEELISGIIRDKFGIEARNCAKVYQKSYPDYYDNVPYPRGHRVPEFTKFSGEDSRTTWEHVGQFLAQSGEANSDTFKLRLFSLSLSGTAFTWFTSLPANSIHTWAQLEQRFHDCFYTGETELRLSDLTSVKQKYNESVIDYVKRFRDVRNRCYSLNITDRDLDDLAFNGLIAPIKERFDGQQFLDVSQLMQKALAQESRVKDNKKFVRPYEKKPNVNAIDYSEASDSEDEGDHDMYVAKWSWTNKNKPFVHSNLMPTPRKDRQSEVKYSFDVAKCDKIFDYLLQEKQIRLPKGHIIPSQEELKRRAYCKWHDSHSHSTNDCNVFRRQVQSAMDEGRLKFTDGSKMKLDHDPFPVNTINFNDKKVLIRPEQAESTKGKEVIIGEPRPKMIVPKKPEKYEKQGDERARNKGKRPRSPPRERFGHSPRRSQSPPYHHSQHMSWGPYPMPPPGYPYLYYMPWGATPPMFNHMPPMQFNQRWGGPRRPIHERLSSPNNSRFYGKNQVNEEKREGKRVKVEARTSEVITIKVGSHDVPIPSGDGVGESSSNKSETGRSDRRPQVGLTGPSGRSDHRPHVGLTGASGRSDRWSTSGLTGLQRWFDKRFSRSSAGASSSSSKLNRGHYLPPGTEPKPRWMPKDLTATQRRRLQHLRAQEMREKKAEEQRDKRFNELRPPPEKEEQSVAKDESSPKEDMDINMVCMLPMEFCAMDEAEVAQFSLGPKDAVFKKPDESNRHMKLLYLKGYVDGKPVSRMLVDGGAAVNLMPYSLFKKLGREDDELKKTNLILNGFNGEPTEAKDILSVELTMGNKTLXTAFFIADVQGNYNVILGRCWIHANCCVPSTLHQCLIQWDDDDVEIVKADASAEVAMADTTFDWRHGNIQCLSGRDLSKANLEWLQKRVQEYRSTKNDIGETIEDFDEVEKLGQGFTSADPLEEVDIGDGTKPMPTFVNKNMSADYKVKIIELLKEYVDCFAWEYHEMPGLSRELVEHRLPIKLGFRPYKXPPRRFNPLLYDRVKEEIDRLLKAGDLNKATPKDEYPMPIADMMIKDASGHKVISFLDGNAVYNQIFMAEEDMYNTAFRCPGFVGLFEWVVMTFGLKNAGATYQRAMNLIFHDLLGIILEIYIDDIVVKSDGIDGHIADLRLAFERMRRYGLKMNPLKCAFSVSAGRFLGFMVHERGVEIDPKKIEKIRDFKAPTCKXEVQKLLGKVNYLRRFISNLAGQAFKYTLLDEDLYRRNIDGVLLKCLDEDQSKVAMGEVHEGICGTHQSAHKMNWLLRRAGLYWPRMIEDCFKYYRGCEACQQFGNGHRFVLVATDYFTKWAEAVPLKNMTHTELNDFILKHIIHRFGIPQILTTGQGASFMSKEVKSFAESYGNKLLSSSPYYTQANGQAELSNKTLLKIVKKKIEEHPKRWHEVLSEALWAYRISKHGATKVTPFELVYGQEAVLPVEVNLGSLRYIKQDDLSSEDYKILMGDNLDEVIDKRLKALEEIEKEKKRVAKAYRKRVKAKLFQVGDLVWKTILPLGTRSRESSKWSPNWEGPYRVCGIVRGNAYFLETLQGERFQRAINGKYLKKCFPSVWQNA

SEQ ID NO: 128496 - protein, 1252 aa, Oryza sativa
  unsure (1)..(1252): unsure at all Xaa locations
  Clone ID: PAT_MRT4530_30844C.1.pep
FYAKNQVNEGKREGKRIKVETRTSEVITIKVGSHDVLIPSGHEVGESSSNKFEARTNSSQSAGLTNLLGRSDXGPSGRSDRLSQAGLTGPSGXGLTGLQRRFDGRISKGSSGVSSSSSKIKSGHYLPSGTEPKLRRFNELRPPPTKMWRRKSIDIEELVVVQKEEEEQSVDESYPKEDMDVNMMCMLPMDFCAMDEAEVAQFSLGPKDAVFEKPDESNCHMKPIYLKGHIDGKPVSRMLVDGGAAVNLMPYSLFKKLGRGDDELKKTNXRRKGIFSVELIVGNKTXPTAFFIVYVQDFDEVEKVGQGFTSADPLEEIDIGDGTKPRPTFVNKNMTADYKVKIIELLKEYVDCFEXEYHEMPGLSRGLVEHQLPIKPGFRPYKQAPYRFNPLLYDRVKEEIYRLLKAGFIRPCRYAEWVSSIVPVEKKGSGKIRVCIDFRDLNKATPKDEYPMPIADIMINDTSGHQNACATYQRVMNLIFHDFLGIILEVYIDDIVVKSDGMEGHIADLKLAFERMRRYGLNVNLLMCAFGMSAGRILRFMVHERGVEIDPKKIEKIRDFKAPTCKKEVQKLLGKVNYLRRFISNLAGKIDAFVPILRLKKEANFTWGXKQQEAFEELKRYLSTPPVVRAPKAGIPFRLYIASEDKVIGAVLTQEEDGKEYIITYLIRHMLQRPILSGXIGKWAYVLIEYDLAYEPLKSMKGQIVVHFIVDHHVDIAYDEEICLVEVIPWKIYFDGSSCKXGQVIGVVLFSPNGMCYEASVRLKYYYTNNQAEYDALLFGLQVMEMIGAKHIEAFGDSELVVQQVAGAYKCLYGSLNRYLDQCLDIIANLYNFAIRHVARRDNSRANDLAWQAYGYNVKKGVFFILEEPVLDFKPLGEIGKNADRGRSNLRCTAGLTGDXGWSDRPYAAGLTGQPGRSDRPYAAGLTDSRQKVGGHVPIDSKAELIVISDICAQDTEEDWRIPLIKYLKDPTLKVDRKIWRQMFKYTLLDEDLYRRNIDGVQLKCLDNDQSKVAMGEGHRFVVVATDYFTKWAQAVPLKNMIHTEVIVFILKLIIHRFGIPQTLTTNQAESSNKTLSKIVKKKIEEHPKKWHEVLSEALWAHRISKHGATKVTPFELVYSQEAVLPVKVNLGSLRYIKQDDLSSEDYKNLMGDNLDEVIDKRLKALEEIEKEKKRMAKAYNKRVKAKLFQVGELVWKTILPLGTRSREFDSRHSPKHVLXGLDSHPNSAPRDKIWKIAKVWMSDGFPLVGPV

SEQ ID NO: 128497 - protein, 97 aa, Oryza sativa
  unsure (1)..(97): unsure at all Xaa locations
  Clone ID: PAT_MRT4530_30845C.1.pep
HRNFPLFLFLSISFGREKLLTFQQYCFKQNMHFRFAYTRQASCAMRKSPVRYIIRGITWRITDKTXAQGIAVSQRVHIDLLKGLIARRTCLMIIGCK

SEQ ID NO: 128498 - protein, 1619 aa, Oryza sativa
  Clone ID: PAT_MRT4530_30846C.1.pep
MTKKPSKTEVEPSNMIPVTLDDFEGEDHKAMEEYINELKREALMRASTRTRQGVIIKPGPRPKLAPDLVSNDEVTQSIQQQVASTIDSSMIAFKDKLDASFEGKFDEFLRVKFGPLMADYMSKDKASTTANQPPIDQTEFPNLPCLVVKMAQLEENFHDYFYTGETELRLCDLTSVKQKYNVPVIDYIKRFRDVRNRCYSLNITDRDLAGLAFNDLIAPLRERLDGQQFLDVSQLMQRALAQESRVKDNKKLVRSYDKKPNVNVIDYSEASDSEEEGDHDIYVAEWSWTNKNKPFVCSNLMPTPRKDRQSEVKYSFDVAKCDKIFDYLLQEKQIRLPKGHVIPSQEELKRRAYCKWHDSHSHSTNDCNVFRRQVQSAIDEGRLKFTDGSKMKLDHDPFPVNTINFNDKKVLIRPEQAESTKGKRVVIGEPRPKMIVPKKLEVGVWKENKSEASTSKAPRKTKVTFDMLLEKYEKQGGERARNKGKRPRSPPRERFGHSPRRSHSPPYHHPQDMSWGSYPMPPPGYPYPYYMPCGATPPMFNHMPPMQFNQGWGGPRRPIHERLFSPNNGRFYGKNRANEEKREGKCIKVEARTSEVITIKVGSHDVPIPSGDEVGESSSKKSEAGTSSSQSAGLTRSSSRSDRSHTAGLIGPSGRSDRRPDSGPTDASGRSDRAPNVSLTGASGRSDRWSMSSLTGLQRRFDRRRKSVEKEKSVIVEEKEEQSVDKGESSPKEDMDINMKLGREDDELKKTNMILNGFNGEPTEAKGIFSAELTVGNKTLPTAFFIVDVQDFDEVEKLGKGFTLADPLEEVDIGDGTKPRLTFVNKDMRADYKVKIIELLKEYVDCFAWEYHEMPGLSRELVEHRLPIKPGFRPYKQPPRRFNPLLYDRVKEEIDRLLKVGFIRPCRYAEWVSSIVPVEKKGSGKIRVCIDFRDLNKATPKDEYPMSIADIMINDASGHKVISFLDGNAGYNQIFMAEEDMYKTAFRCPGFVGLFEWVVMTFGLKNAGATYQRVMNLIFHDLLGIVLEIYTDDIVVKSDGMEAHIADLRLAFERMRRYGLKMNPLKCAFGVSAGKFLGFMVHERGVEIYPKKIEKIRDFKAPTCKKEVQKLLGKVNYLRRFISNLAGKIDAFVPILRLKKEADFTWGAKQQEAFEELKRYLSTPPVVRVPKAGKPFRLYIASEDKVIGAVLTQEEDGKEYIITYLSRRLLDAETRHIARCDNSRANDLAQQASGYNVKKGLFLILEEPEAEEDWRIPLIRYLKDPTLKVDRKIWRQAFKYTLLDEDLYHRNIDGVLLKCLHKDQSKVAMGEVHEGICGTHQSAHKMNWLLRRAGFYWPKMINDCFKYYRGCEACQRFGNVQLAPAVVLNPIIKPWPFRGWALDFIGQIYPSSSKGHRFVLVATDYFTKWAEAVPLKNMTHTEANGQAESSNKTLLKLVKKKIEEHPKRWHEVLSEALWAHRISKHDATKVTPFELVYGQEAVLPVEVNLGSLCYIKQDDLSSEDYKTLMGDNLDEVIDKRLKALEEIEKEKKRVAKAYNKSVKAKLFQVGDLVWKTILPLGTRSKEFGKWSPSWEGPYRVYGIVRGNAYFLETLQGERFQRAINGKYLKKYFPSVWQDA

SEQ ID NO: 128499 - protein, 223 aa, Oryza sativa
  Clone ID: PAT_MRT4530_30847C.1.pep
MAPRKPNPASAKGPDPGRIDDDTTTFLGISLMDDGELAKLVSSGALVEGQAFAPGKAVVPKLVDNRTVVFAVFFEAGLRFPCNVLLSEILRHLRLGVPDLRTMVTPVGTKKTVFRSMNFNVRPERSDLWPVNAAMWKSESAKALRCRRRAIAPNRKPKITVDGAMEARFALLRKVCSRLSCRDLVEEFCMLRFFPLSRSWQVAVDQDEEVDGLLKLVPPEGTN

SEQ ID NO: 128500 - protein, 908 aa, Oryza sativa
  Clone ID: PAT_MRT4530_30848C.1.pep
MPKDLTSAQKRRLQCLRAQEIREKKAEEQRDKRFNELRPPPVWRRKSIENEKSVVVEEKEEQSVDKGESSPKEDMDINMVCMLPMDFCAMDEAEVAQFSLGPKDAVFEKPDESNRHMKPLYLKGHVDGKPVSRMLVDGGAAVNLMPYSLFKKLGREDDELKKTNMILNGFNGEPTEAKGIFSAELTVGNKTLPTAFFIVDVQEANLEWLQKRVQEYRSTKNDIGETVEDFDEVEKLGKGFTSADPLEEVDIGDGTKPRPTFVNKNMRADYKNASATYQRAMNLIFHDLLGIILEIYIDDIVVKSDGMEGHLANLRLAFERMRRYGLKMNPLKCAFEADFTWGAKQEEAFEELKRYLSTPPVVRAPKAGKPFRLYITSEDKVIGAVLMQEEDGKEYIITYLSSRLLDAETRPILSGRIGKWAYALIEYDLAYEPLKSMKGQIVCDFIVDHHVDIAYEEKVCLVEVIPWKIYFDGSSCKEGQGIGVVLFSPNGMCYEVSVRLEYYCTNNQAEYNALLFGLQVMEMVGAKYVEAFGDSELVVQQVAGVYKCLDGSLNRYLDSCLDIIANFDNFAIRHIVRHDNSRANDLAQQASGYNVKKGLFLVLEEPVLDFKSLCKIGKTGDQGRSDQLLAVGLTGDPEQSDQPCVAGLTGSGQSTGGHVSINLEAELIVNLDVCAQEAEQDWRIPLIRYLKDPTLKVDRKIRRQAFKYTLLDGDLYHRNIDGVLLKCLDGDQSKVATGEANGQAESSNKTLLKLVKKKIEEYPKRWHEEAVLPVEINLGSLRYIKKDDLSSEDYKTLMGDNLDEVIEKRLKALEEIEKEKKRVAKAYNNRVKAKLFQVGDLVWKTILPSGTRSKEFGKWSPSWEGPYRVYGIVRGNAYFLETLQGERFQRAINGKYLKKYFPSVWQDA

SEQ ID NO: 128501 - protein, 354 aa, Oryza sativa
  Clone ID: PAT_MRT4530_30849C.1.pep
MAGARAIGSLPVPNVQELAKTCNGPDEHIPERYIRPEASSEEVISNYHGEAIPIIDLNKLLSPQSSEECVKLRSACQYWGFFQLINHGVPDEVIANLKRDIVDFFSQPLDAKKEYTQLPNSLEGYGQTFVFSEDQKLDWADMLYLHVHPSDSRDLRFWPTSPASFRRSLDAYSSETKSLALCLFEFMAKAVGAKPEALLGIFEEQPRGLRMAYYPPCLQADKVMGLSPHSDVVGLTLLLQVNDVQGLQIKKDGKWLSVDAPNGALIVNIGDTLEILSNGKFRSVEHRAVINPNKERISASLFHYPCENMVIRPLTEFVKDGKVNYRSISYLDFMTQFFTQQLDGKNRLEVLKLD

SEQ ID NO: 128502 - protein, 116 aa, Oryza sativa
  Clone ID: PAT_MRT4530_3084C.1.pep
YSPYLYIILLLNKNGSCPVWLGRDLIHRTKRKHKRENIINSQASSRPCLKGVQGSCRRRSSPCGSKFCGQQGSVQPSGHRARLPGGRVLPVAGIQIIRVLTLIRTYRSHIVHNIGV

SEQ ID NO: 128503 - protein, 728 aa, Oryza sativa
  Clone ID: PAT_MRT4530_30850C.1.pep
MAPRKPNPASAKGPDPGRIDDDTTTFLGISLMDDGELAKLVSSGALVEGQAFAPGKAVVPKLVDNRTVVFAVFFEAGLRFPCNVLLSEILRHLRLGVPDLRDHHWMARWFYHTIPFEARSESAKALRCRRRAIAPNRKPKITVDGAMEARFALLRKVCSRLSCRDLVEEFCMLRFFPLSRSWQVAVDQDEEVDGLLKLVPPEGTNASCSHNKADDDAEPSRKRTHGQVKLAPRKRRVPASSDSDADDRDDVEDRDGEEEGEEEEGAEAAARKAADEAVENRTKTPGYTPTPSLGHNETEVESNSSPLHRKDLEGAKALVVFSAGKVVKGGPVKKAAKKKGLVDVARVFSDDESSDETPTSPASRSLDLSTAPVLSIDAGGAGGSAAAGASASTDRVMKPVVSPLVKSKGKGAAVETSASEYSLAAPHFTPGDFETWVELIPFVVGVSNLVSPVGTPSLFTELNEFDEGCSAIKSLAVQILAADCSTERTMRAHLDGFRSRIRAKDDEIGRKSLEMEALSNTLKEAKVENKRLQAELEKGRKARAEVDRLKAKLEKEKAHSAALTDYYNLTEPKIEALRLEASKAEASVAEEWQRFLWEMAKATESAKTACQTLRLALFDMGARVRGVPAKDASAFDFSEWTQQAGGVFGCEHVAEFPNYAKGDWEVSAQDVSPALRAWRKQFWQKDVRSTAKARLLEQLAKAEVVDQGEGKDAAVGGGGGDAQDHLEV

SEQ ID NO: 128504 - protein, 390 aa, Oryza sativa
  Clone ID: PAT_MRT4530_30851C.1.pep
MATPATLAPSPCCRGTRAIVVVLTGRMGVLATLAPALRPQRQRHIARHDNSRANDLAQQASGYNVKRGIFLILEEPMLDFKSLSEIGKIADQGRSDRRCTADLTGVARPETEEDWRIPLIRYLKVPTLKVDRKIRRQAFKYTLFDEDLYRRNMDGVLLKCLDNDQSKVAMGEGHRFVLVATDYFTKWVKAVPLKNMTHTEANEQAESSNKTLLKLVKKKIEEHPKKWHEVLSEALWVHRISKYGATKVTHFELVYGQEAVLPVETLMGDNLDEVIDKRLKTLEEIEKEKKRVAKAYNKRVKVKLFQVGDLVWKTILPLGTRSREFGAVCCHFVLYRYWNVELWKNLFCTLFNATSNSSEAAVLRSLRMSFQEYLYTNGQLVGKLNQQLAK

SEQ ID NO: 128505 - protein, 46 aa, Oryza sativa
  unsure (1)..(46): unsure at all Xaa locations
  Clone ID: PAT_MRT4530_30852C.1.pep
MAAGRGIXQLLKKACRPYSXSPLSRFWIHDEESSGHTGSRALAILG

SEQ ID NO: 128506 - protein, 106 aa, Oryza sativa
  Clone ID: PAT_MRT4530_30853C.1.pep
MAKATESAKTACQTLRLALFDMGARFGCEHVAEFPNYAKGDWEVSAQDVSPALRAWRKQFWQKDVRSTAKARLLEQLAKAEVVDQGEGKDAAVGGGGGDAQDHLEV

SEQ ID NO: 128507 - protein, 1022 aa, Oryza sativa
  unsure (1)..(1022): unsure at all Xaa locations
  Clone ID: PAT_MRT4530_30854C.1.pep
MNLMPYSLFKKLGREDDELKKTNMILNGFNGEPTEAKGIFSAELTVGNKTLPTAFFIVDVQDFDEVEKLGKWFTSANPLEEVDIGDGMKPRPTFVNKNMRADYKVKIIELLKEYVDCFAWEYHEMPGLSRELIEHRLPIKPGSRPYKQPPRHFNPLLYDRVKEKIDPGGYAEWVSSIVPVEKKGSGKIRVCIDFRDLNKATPKDEYPMPIADMMINDASGHKNAGATYQRAMNLIFHDLLGIILEIYIDDIVVKSDGMEGHIADLRLAFERMRRYGLKMNPLKCAFDVSAGKFLGFMVHERGVEIDPNKIEKIRDFKAPTCKKEVQKLLSKVNYLRRFISNLAGKIDAFVPILRLKKXADFTWGXAKQQGAFEELKRYLSTPPVVXVPKAEKPLRLYIASEDKVIGAVLTQEEDGKEYIITYLSRRLLDAETMPILSGRIGKWAYVLIDYDLAYEPLKSMKGQIVCDFMVDHHVDIAYEGEVFLVEVIPWKIYFDGSSCKEGQGIGVVLFLPNGMCYEALVRLEYYCTNNHAEYNALLFGXQVMEMVGAKYVEAFGDSELVVQQVAGVYKCLDGSLNRYLDSCLDIIANFDNFAIRHIARRDNSRANDLAQQASGYNVKKRIFLVLEESELDFKPLCEIGKTGDQGWSNRHCVAGLTGDQGRSDRLHAAGLTGIPERSDRPCVAGLTGSGQSAGGHVSINLEVELIVNLDICTQEEKEDWRIPLIXYLKDPTLKVDWKIWRQAFKYTLFGGELYRXNIDCVLLKCLDEDQSKVAMGEGHRSVLVATEYFTKWAEAVPLKNMTHTEVIDFILKHIIHRFGISQTLTMDQAESSNKTLLKLVKKKIEEHPKRWHEVLSEALWAHRISKHGATKVTPFELVYGREVILPVEVNLGSLHYIKQDDLSSEDYKTFMGDNLDEVIDKRLKALKEIENEKKRVAKAYNIRVKAKLFQVGDLVXQTILPLGTRSKEFDSRCSSKRQGGMCLHQNLAPRIKIGKIARIWKSTGFLRVGWSDRRVLGGQTAS

SEQ ID NO: 128508 - protein, 650 aa, Oryza sativa
  unsure (1)..(650): unsure at all Xaa locations
  Clone ID: PAT_MRT4530_30855C.1.pep
MAKSSPFDIHSSPYILRPRGLWLCEAPALFSALRGLCSIVFTMGGFAPTDLDVLGLNPYWSHGFGRFGRRASCHTANKPLTGKGEIGASAETVQTMWYDDGELAKLVSSGVLVEGQAFAPGKAVVPKPVDNQTVVFAGFFEAGLRFPCNMLLPEILHLFQMARWFYHTIPFEAGSESAKALRCRRMVIAPNRKPKIAVDGAMEARFALLRKVCSRLSCRDLVEEFCMLHIFPLSLSWQVTVDQDEEVDGLPKLVLPEGTNVLTLDQADAEAWKMIGDVSVIEYSQLLTRQAAGRRRCRAFAKGTRGQVKLAPRKRWVPACSDSDADDEDDVEERDDEEEGEEEEGAEAAAGKAANEAVENRAETPGYTPTPSPGHNETGVESNSSHLDRKDLEGAKVLVAFSAGKVAKGVVRNHLRAKDDEIGRKNLEMEALANTLKEAKVENKRLQAELEKGREARAEVDRLKAELKKEKAHSAALTDYYNLTEPKIEALRLEVSKAEASAAEESQRFSWEMAKATESAKXACQTLRLALSDMGARVRGVPAKDASIFDFSEWTXRPVVRFRTTPLRTFGCEHVAEFPNYAKGDWEVSAQDVSPTLHAWQKQFWQKDGRSTAKARLLEQLAKAEAADQGEGKDAAEGGGGGDAQDHPEL

SEQ ID NO: 128509 - protein, 88 aa, Oryza sativa
  unsure (1)..(88): unsure at all Xaa locations
  Clone ID: PAT_MRT4530_30856C.1.pep
VPFFLPSKVNKTRTIXGCFTNYNMNIQSQGGAHQXGTHQGVGENGNQGKKNKDKVDELAVKKVXVSCIGGRLLNIQNFEMIPDQQRMS

SEQ ID NO: 128510 - protein, 809 aa, Oryza sativa
  unsure (1)..(809): unsure at all Xaa locations
  Clone ID: PAT_MRT4530_30857C.1.pep
MAPRKPNPASAKGPDPGRIDNDTTAFLVISLIDDGELVKLTVVTPAGTKKTMFGSMNFNVRPEHSDLWPVNAAMSKWDRHWMARWFYHTIPFEAGSESAKALRCRRRAIAPNRKPKIAVDGAMEERFALLRKVCSRISCRDLVEEFCMLLIFPSPIRGKSRLTKMKRSTVCRSWFFLRGRTVRLRFRYALMCFAIFPGSTLNMATPFIFTVLTLDQADAKARRMIGDVSVIEYSQLLTRQAAGRVDRVYDGELPPRANPHKADDDTGPSRKRTHGQVRLAPRKQRVHASFNSDADDEDDVEERDGEEEREEEEGADAAAGKAADEAVENHAETPGYTPTTSPGHNDTGGAKALVAFSAGKVAKGCPVKKAAKKKGLVDVARVFSDDESSDKSPTSPTGRSLDLSTAPVLPIDASGAGGSAAARASASTDRVVKAAARVFGSPLRQPIVSLLVKPKGKGAAVETSAPEYSLAAPHFAPGDFETRAELIPFVEGVSNLVSPVGTLSLFTELNEFDEGYSAIKSLAVRILAAHCSIERTVRARLDRFRIHLRAKDDEIGRMSLEMEALANTLKEKGREARAEVDRLKAELEKGREARAEVDRLMAELKKEKAHSAVLTDYYNLTEPKIEALDLEVSKAEASAAEESQRFSREMAKATESAKTVCQMLRLALFDMGVRVRGVPAEDASAFDFSEWTQQAAGVVSDCATAYGDCCARVSAAFTMGLLHQFGCEHVAEFPNYAKGEWEGVRRKLCTAPSGNWRSKNEKFVVLXVCQKCDARFGLFIARCASTLTPSRSSSDTSRPSSPQENITLG

SEQ ID NO: 128511 - protein, 197 aa, Oryza sativa
  unsure (1)..(197): unsure at all Xaa locations
  Clone ID: PAT_MRT4530_30858C.1.pep
SSRANSRAEVAWPTERDKANRQPHRSYPFLLSPTERSRFSPLSTVPLLPSPLPSPSSPLHCPPPPPPLCRPLLLLSSSDGSGGGSGTLPSARSGGREGGGGGSAVGGDAAVVRRPVDGALPSARSGGRWWRRLGGGRGGGSGETAREVATAASHGSDSGGGGEXAAPSSSPSDDGGGGGDVSGGGGGGEGSGALLLS

SEQ ID NO: 128512 - protein, 785 aa, Oryza sativa
  Clone ID: PAT_MRT4530_30859C.1.pep
MAPRKPNPASVKGPDPGLVDDDTTVFLGISLVDDGELAKLVSSGALVEGQAFTPGKAVVPKPVDNQTVVFAVFFEAGLRFLCNVLLPEILRLFQVELPQLSPSVLVRIAIFDWACRTSGFEPSAELFGAIFFATVNSKTMITPAGTKKTVFGSVNFNVRPERFDLWPVNAAMSKWDRHWMASWFYHTIPFEAGSESAKALWCRRRAIAPNRKPKIAVDDALVAQFALLRKVCSRLSCRDLVEEFCMLRIFPLFQSWQVAVDQGEEVDGLPKLVLIFVVLTLDQADTEAQKMIGDVSVVEYSQLLTRQAAGRANRVYDGELPPRHHETGVESNSSPLHRKDLERVKALVAFSASKVAKGGPVKNISKKKGLVDVACVFSDGESSHETLTSPAGRSLDLSTAPVLSIDATGAGGSAAAGASASTDRVVKAVARVFGSPLRQPVVSPLVKPKGMGAAVETSASEYSLTTPHFAPGDFETRAELIPFVEGVSNLVLPTGTPSLFTELNEFDEGYSAIKNLVVRILAAHCSTEQTVRAHLDGFRNRLRAKDDEIGRKGLEMEALANSLKEAKAENRRLQSELEKGREARAEVDRLKAELEKGREARAEVDRLKAELKKEKAHSIALTDYYNLTEPKMEALRLEVSKAEASATEESQRFSREMAKATESARTACQTLRLALCDMGARVRGVPAEDASAFDFSEWTQQAGGTVSDCATAYGDCCACVSAAFTMGLLQQFGCEHVAEFPNYAKGDWEARLLEQLAKAEAADQCEEEDAAVGGGGGNAQDHPEV

SEQ ID NO: 128513 - protein, 120 aa, Oryza sativa
  Clone ID: PAT_MRT4530_3085C.1.pep
MVGANASLLLELESMVARRLDQATLGVVMIPCTALLDVPLVMCLVRGFLKDATRMARLVDAYLVESALEARLRPAEFEESSPAPSDGLKCYDLVEGKGPTAVKGSIVQDASIGFAQYVQV

SEQ ID NO: 128514 - protein, 62 aa, Oryza sativa
  Clone ID: PAT_MRT4530_30860C.1.pep
FGKKENNRERGETPRKNKKFNVLKNPRLARAVPLAVNEKSPPKKRRGKNAFSPKKTVKGIQN

SEQ ID NO: 128515 - protein, 256 aa, Oryza sativa
  unsure (1)..(256): unsure at all Xaa locations
  Clone ID: PAT_MRT4530_30861C.1.pep
MAPRKPNPASAKGPDPGRIDDDTTTFLGISLMDDGELAKLVSSGALVEGQAFAPGKAVVPKLVDNRTVVFAVFFEAGLRFPCNVLLSEILRXFDWACRTSGFEPSTELFGAIFXCTMNSKTMVTPVGTKKTVFRSMNFNVRPERSDLWPVNAAMWKXDHHWMARWFYHTIPFEARSESAKALRCRRRAIAPNRKPKITVDGAMEARFALLRKVCSRLSCRDLVEEFCMLRFFPLSRSWQVAVDQDEEVDGLLKLVP

SEQ ID NO: 128516 - protein, 232 aa, Oryza sativa
  Clone ID: PAT_MRT4530_30862C.1.pep
MAPSISSTAPSLSSWIPSSPTPLSTLVPLLPDAPPSSAGTISSQAPLTTPVPLLRCALSGDVPHFPNQGLPLELEAFFGAATWLDPRWARQAPPIQPQRPGKILVYERPVEPSYEAVVQEGLVHQRMQKLCLGGEVRAEAVDEVEDKGGGSTDSCAGSGIVRAKEMPSACVDDAMMASWATYICPGEGGEEVVVLASGMGSCEHRDEVGHCVLGKVRRRGNTVDGRLWRSHG

SEQ ID NO: 128517 - protein, 490 aa, Oryza sativa
  unsure (1)..(490): unsure at all Xaa locations
  Clone ID: PAT_MRT4530_30863C.1.pep
MARWFYHTIPFEAGSESAKALRCRRMVIAPNRKPKIAVDGAMEARFALLRKVCSRLSCRDLVEEFCMLHIFPLSLSWQVTVDQDEEVDGLPKLVLPEGTNVLTLDQADAEAWKMIGDVSVIEYSQLLTRQAAGRRRCRAFAKGTRGQVKLAPRKRWVPACSDSDADDEDDVEERDDEEEGEEEEGAEAAAGKAANEAVENRAETPGYTPTPSPGHNETGVESNSSHLDRKDLEGAKVLVAFSAGKVAKGVVRNHLRAKDDEIGRKNLEMEALANTLKEAKVENKRLQAELEKGREARAEVDRLKAELKKEKAHSAALTDYYNLTEPKIEALRLEVSKAEASAAEESQRFSWEMAKATESAKXACQTLRLALSDMGARVRGVPAKDASIFDFSEWTXRPVVRFRTTPLRTFGCEHVAEFPNYAKGDWEVSAQDVSPTLHAWQKQFWQKDGRSTAKARLLEQLAKAEAADQGEGKDAAEGGGGGDAQDHPEL

SEQ ID NO: 128518 - protein, 853 aa, Oryza sativa
  Clone ID: PAT_MRT4530_30864C.1.pep
MATSYSSLCSFPAEAADLVVTAGEHQSIADRLNLPLPSDGYFSGGDKLLFASDDHRLPRSFSFFTRRAARTTDPAITHLVATVTLSGYRFFGGRSWRTNVSAHSVSFDLEGYYSNDSASAALCMVGSGSRARDDGLGVVIIPDVALRLRLPRPATLTRPFVTGRLEGPDFGAVTLVAYAEGDYKYGEAASCPTPPGAVRSESKVFDGNFTCDRLGALLRGSYTMEYAEGRAPSGFPLRQRLRSMHISEIYCGENGAVRAYMVFDFDDASSDAILLGIHEAPWRRGFQADGDEALVADGFWKPSQGRLCLRACRTVRSTVRESDCGIRIHFWFPAVWSIQQRSFVAGMIRNTRSDDDGDTNKMSGAISVSRTGFRGDLSDIKYHYTRVEDAKNYYHSNPELSKERNGRFPGNYSYRDFAFSLYITTHGGYGYASPVTLGSAMVDGGTLTADDAFSRHAVAEMIKQRLLSVSYEFDIHLYRRVNSSRAWNVSRVPDRWRVSAEGVYDTKSGTLCMVGCRVINSSSDCQILVTVQLPALGGEDGTGSISSLRKKSDTLFFETLGFAAYGAQPAIEAAQAISRVDTERIMLVTSMTLSCVFLVLQLRHARKNPDALPATSITMLAVLALGYMIPLVVNYEAMFVDDGGSRNRHFIELARGGRRWLELNEFVLRLSTMMKSAIHVPPPPPPPLSDDLLSYAGLILDGFLLPQIVSNAFSASRVNAISPWFYVGGTAIRAAPHAYDGLRARGYVQRWIPSYIDVYAGPRDGLFSVAWDVVIPCGAAALAVLLFFQQRLGGNTILIGTQAPEYVASPNLGDEFRSWRDRDALASVFLRSTLVPSLSNNAGIRHADDLTSR

SEQ ID NO: 128519 - protein, 101 aa, Oryza sativa
  Clone ID: PAT_MRT4530_30865C.1.pep
MEDEMISFFHDGLRLMILGNDMKVIRTAMSTMLSEVHYQGRQRQRFRRPALSIAGAHCSGALTVRAPGTMLEEDTRLDDDLAGAVSEGGGLGAEAAVAEGG

SEQ ID NO: 128520 - protein, 85 aa, Oryza sativa
  Clone ID: PAT_MRT4530_30866C.1.pep
YNIEILERADMYECKSCSTLVDTNSKLSSSDGTPVADQYLTFTQPDISYVVQQVCLHIHDSRDSHLAALKRILRYVHGTLDYGLH

SEQ ID NO: 128521 - protein, 76 aa, Oryza sativa
  Clone ID: PAT_MRT4530_30867C.1.pep
GAVDRDSNVKVLLQCTKSHENERLLPRADNLKLNRRIVKITIDLLASGCLIYLYMMAVYLICVTEILLYIYEGRNI

SEQ ID NO: 128522 - protein, 437 aa, Oryza sativa
  unsure (1)..(437): unsure at all Xaa locations
  Clone ID: PAT_MRT4530_30868C.1.pep
MRITDRKPISFDETFSPVVKPTTVCAVLSLVVSCRWPVHQLDGKNAFLHGIFQETVYCTQPSDFVDPTKLDLVCRLNRSLYGLKQTLRAWYSQFASYLLTLGXAKSDTSLFRGPDLFYLLLYVDDILLTKSSXALLRWTIQALQSDFSMKNLSSLHHFLXGITVTGLLLSQHXYNIEILERADMYECKSCSTLVDTNSKLSSSDGTPVADPTDYRSLAGALQYLTFTQPDISYVVQQVCLHIHDSRDSHLAALKRILRYVHGTLDYGLHLRHSSTADLVAYSLTLTXASCSDTRMSTSGYVVFLGDNLVSWLSKXQHTVSRSSAKAEYRVVANVVVETCWLHQLLHELHAPSXLSYSGLVYCDNVSVVYLLTTQVQHQRTKHMEIDLHFVHDRVAVSSVRVLHVPMTSQYANIFTKGLPSSIFSVFRSSLNVRPADV

SEQ ID NO: 128523 - protein, 266 aa, Oryza sativa
  Clone ID: PAT_MRT4530_30869C.1.pep
MERTLIVREYFTDIDENDWVNFYSTEEYSYLFKMLATDQKDHPKMVSVANDLAVVLGGSLITANMISDMLRRNHNVHFWLRILRRFERMVKNNFLKYGEHPKDIIEKEQPVDSTEFMTSYPTHACILVKPPRVERDDIPNYKKPISRLLRTLAPPPTPPSPPSSSLAATATETATTAAEPAASTEPAATATEPAASTEPAATATEPAASTEPAAAATESLHRPASAFLVVAACLFTDTNSSPHRGRRRRPDADLPDRHLHRPAPPP

SEQ ID NO: 128524 - protein, 89 aa, Oryza sativa
  Clone ID: PAT_MRT4530_3086C.1.pep
MAIKRTKAEKKVAYDKKLCQLLDEYTKGDSIVLMGKNTLIRRCIKVHADNTGNKEFLELMPLLVGNVGLIFTKGDLKEVREEVAKYKFC

SEQ ID NO: 128525 - protein, 361 aa, Oryza sativa
  Clone ID: PAT_MRT4530_30870C.1.pep
MAAGFALNHFQLIIYKGGCSEMGSKLFRELHKKHINTSDGGRVKEFVVFLARCECMCRRPYDAYLYTDNCVFAHHVEKQEIINFLLQNPGNQGARLVLPIIGGCRVGKKSLISHVCNDERIRSYFSSILYINGDSSCGSIAHAKFKMERTLIVREYFTDIDENDWVNFYSTVSQMTAGGSKVVIISRIENLARFGTAKAVHLNSLSQEEYSYLFKMLATDQKDHPKMVSVANDLAVVLGGSLITANMISDMLRRNHNVHFWLRILRRFERMVKNNFLKYGEHPKDIIEKEQPVDSTEFMTSYPTHACILVKPPRVERDDIPNYKKPSISFKELYFMTRMDLQQLQGSAEAPVDLVTHSDIL

SEQ ID NO: 128526 - protein, 256 aa, Oryza sativa
  unsure (1)..(256): unsure at all Xaa locations
  Clone ID: PAT_MRT4530_30871C.1.pep
VQGHHCRTAPPPPLTPPRRLLQPPPPAPPPPXPPPPLASTASPPPAPPSTARPSPPPSPARPPXHPPPRCGPPPPYTVPRPPPLPPPRXPPPPSSTMPRPTTPSSTAPRPTPSSTARPPPPSSTAPRLTPPSSIVQRPTPSSTAPQSTPPPFTAPATPRRRLLHSRSQASPPPSQPQVPHXRSPPPPPPAXPRSPPLPSTSPAPXPPPPSASCXHXTAPALPPAXTCPPLPTSTALLPXPXPAPRRXTAPPPPXAS

SEQ ID NO: 128527 - protein, 75 aa, Oryza sativa
  Clone ID: PAT_MRT4530_30872C.1.pep
LHTCHGSGALKPRDSLGLALRKGCFNHPPIPGLVFFGSPHKKTFSGSLVPQQGSITLVTRLVDYNTRDCLLMESV

SEQ ID NO: 128528 - protein, 226 aa, Oryza sativa
  unsure (1)..(226): unsure at all Xaa locations
  Clone ID: PAT_MRT4530_30873C.1.pep
TLKQTLPSLPHSAASSSNPSAPPPPAPTAGSAPTVPPPPLASTASPPPAPPSTARPSPPPSPARPPLPPSTALRPASTLHRAAAAASASTARPPPPSSTMPRPTTPSSTAPRPTPSSTARPPPPSNTPSQAPPPPXRSQASPPPSQPQVPHSALRLLRLLPLPRSPPLPSTSPAPXPPPPSASCXHXTAPALPPAXTCPPLPTSTALNQIKAKSYDGNLECYWLNK

SEQ ID NO: 128529 - protein, 189 aa, Oryza sativa
  unsure (1)..(189): unsure at all Xaa locations
  Clone ID: PAT_MRT4530_30874C.1.pep
SVSASAAAASSILQSLPLHVSFDRGFYLLVKAIQELRERKDGLVVTVGIGGPTGSGKTSLAEKVASVLGCVVIVSMEDYRTVAGADDGSDVDAIDFDALARNLQDLVKGKDTLMPLVDFQEKKRTGWRQLKISPSGVVIVDGAYALHSTLRSLLDIRVAVVWCVHFSLLSKVQHDXGDSCSWTIDGSIF

SEQ ID NO: 128530 - protein, 224 aa, Oryza sativa
  unsure (1)..(224): unsure at all Xaa locations
  Clone ID: PAT_MRT4530_30875C.1.pep
LLTVAEAAQGGGCAEGGASGGFPPSSQIRCRRRWMVEAARAVXGWTRRRLRREGGGRWRWRPSPLDLARRLRPRLYPPPPLSDLATGEDGAAEEDDRDRRWRRSGGGRQVRHHLRLHRLPPLHGTSRVRRRRCAPPPSPSPRGSSVLCPRERPGGSGSAGSARIWPPPPSGAAAAGLGGRERAATAAAARHRASRRRRFHLSRPFRRPQKYPPPLARGRGTGSA

SEQ ID NO: 128531 - protein, 105 aa, Oryza sativa
  unsure (1)..(105): unsure at all Xaa locations
  Clone ID: PAT_MRT4530_30876C.1.pep
HLRIRILQQMSCPCLDILGADVRRCSRCLVSATLSCTTLVMWSEHVGEQLEGAPTSRRPTAAAAVARVLRXHGLCCTAXXSXXGAGXXXAVXXRXXXXWXXFFXG

SEQ ID NO: 128532 - protein, 98 aa, Oryza sativa
  Clone ID: PAT_MRT4530_30877C.1.pep
APILGLRHGLLLVRCLLIEPCALPALNEQAGLLLLANYEDYAQPAEVYPSVHALKPNNKTMSGSISESNTVLNVAQLNYAGWTNTPLDPAAFSTYTAR

SEQ ID NO: 128533 - protein, 1635 aa, Oryza sativa
  Clone ID: PAT_MRT4530_30878C.1.pep
MAKGSLEMEVEEVQQLNAFLPNIGLVHFTWNLEEDVSVAFLITATYKQRHPSGREGGFANCNFAMLLACDCDDDAQTAENGNAPMLSNYRAQPAPPLAEPLLLDKPQRAHWLRQLKPWRRNAADDHLSAGIAINWSSVRSATKDWITNPMNIAMLLWLLCVAVSGAMLVLLLLGLLDGAFPTPAARNHWIEINNQVLNALFTLMSLYQHPVLCHHLFLLCRWRPADAADLRAAYFKDGAGPRHGERAHMAVVVALLHLTVACQYVLCGLYWGYTKKTRPELVENGFFVLGVVAPVVAVVYTVCSPLGKDNYGELACPNAFDSVSQHKCTGHAVVEPEWAGGMFDCGGDATAWWLSLSCTFCAFGWNMERLGFGSMFVHTATFVLLCFAPLWVMGVSALHIHDVVIGDMVGGAGALLCVCGLLYGGYWRIQMRERFGLPASTACCGSPSVTDYARWLFCWPCALAQEVRTESLYHIDCETFYKKLPVVDDVEDEKRLPLLASHHVQFHEPPDTMIMAASEGSNDHVVIVHEEMVPPAVQVVVEQVVVEGDKSEEECSAVHDEKIMGSPLPESVVIVDDDEIPASLSDGSWTVEKKQEQHKKHKEKKKERLLDFLRAAPSKAPWFSFSGAAFLTRLASLRTTNNPAASRRLPAFVRSVDWRALRAKCLAWAKHPMNAALLIWLAFVAGGVAFVFLLMTGALNSAVPAASRRRRWTEVANQMLNALFTIMCVYQHPKLCHHLALLLRWRAADVAELRALYCKNGAAGLRRERLHVAAVVLLFHATCFAQYGYCALFWFFGRDNRPDLAVNLCMALGLGFPIVAALYMVYGPLGRKIVLIPASTDDEENLNSQVDEANAIAVTAQCDSNRNRAVVAKPEWAGGLFDVGDDPTVAALSLSCTFCVFGWNMERLGLGNMYVHVFTFALLCAAPVLVFAVAALNVHDDTLRFVVGAAGALLSVLGLTYGGFWRAQMRRRFGLPAHRWSMCGGRATAADYGKWLCCAPCALAQEVRTANLYDVEEDVLYAKGGEEEEEEEAAMAPLEREGCIVAVDAPPLPMRVEEKDYVVRLLLAGVAPSNRLPPLTVKLLHARLLRLDLLAGLSSLLLRALTSSALHLHALRVHCLLPNPSHLTIPIALKSASRLPHPLRAGEQLHARSLKLPSHTNPHVLTSLLSLYAKCGLLHRAQRVFDEMPHPSTVPWTALITAYMDAGDLREAVHVARNAFANGMRPDSFTAVRVLTACARIADLATGETVWRAAEQEGVAQSVFVATAAVDLYVKCGEMAKAREVFDKMRHKDAVAWGAMVGGYASNGHPREALDLFLAMQAEGMKPDCYAVAGALSACTRLGALDLGRQAIRMVDWDEFLDNPVLGTALIDMYAKCGSTVEAWVVFQQMRKKDIIVWNAMILGLGMTGHEKIAFALEAHQLVDDMPMPANAVILGALLGGCKIHRNTELAEHVLKQLILLEPWNSGNYVMLSNIYSNRGRWEDAAKLRLDMKAKGVEKVPACSWVEFEGKVHEFRVGDKSHPLSDQIYKKLDELGLEMKTMGYEPTTEVVMFDVEDEEKEHTLVHHSEKLAIAFNLLITGPGETIRVTKNLRVCSDCHTAIKLVSRITHREIIVRDNNRFHCFRDGSCSCNDYW

SEQ ID NO: 128534 - protein, 58 aa, Oryza sativa
  Clone ID: PAT_MRT4530_30879C.1.pep
TNPSSIQISHLSPYIIPSNSSIYSSPLKPPTLFPLITSCTRDFQAESMRESLGQRVRR

SEQ ID NO: 128535 - protein, 301 aa, Oryza sativa
  Clone ID: PAT_MRT4530_3087C.1.pep
MAIKRTKAEKKVAYDKKLCQLLDEYTKVLIAVADNVGSNQLQEIRKGLRGDSIVLMGKNTLIRRCIKGNVGLIFTKGDLKEVREEVAKYKVGAPARVGLVAPVDVVVPPGNTGLDPSQTSFFQVLNIPTKINKGTVEIITPVELIKKGDKVGSSESALLAKLGIRPFSYGLVITNVYDSGSVFSPEVLDLTEEDLMEKFASGVSMVASVSLAISYPTIAAAPHMFLNGYKNVLAVAVETEYSYPHADKIKEYLKDPSKFAVAAAVAAADSGAAAPAASKEEEKKEEPEEESDGDLGMSLFD

SEQ ID NO: 128536 - protein, 1639 aa, Oryza sativa
  Clone ID: PAT_MRT4530_30880C.1.pep
MTKPPSKTEVEPSNVIPVTLEDSEGEDRKAMEEYINELTREALMRASTRTRQGVIIKPGPRPKLAPDLVSNDEVTQSIQQQVASTIDSSMIAFKDKLDATFEGKFDEFLRVKFGPLMADYMSKDKASTTANQPPIDQTGSKTDGAAHTAGLTGPDGRSNHDLAVGLTGQTADQNGTIIPIQGIDPMTNASYLYHLRTFDPPISTAANNLQVPPHVPNAYNDVARGYPPDTRQGQYNHIAEQTQPIRPPNPPPNQHGLNNMEDIISEIIRNRFGIETGYCARVYKKPYPDYYDNVPFPRNYRVPEFTKFSGEDSKTTWEHRFRDVRNRCYTLNITNRDLADLAFNGLIAPLRERLDGQQFLDVSQLMQRALAQESRVKDNKKLVRSYDKKPNVNVIDYPEASDSEEEGDHDIYVAEWSWTNKNKPFVCSNLMPTPRKDRQSEVKYSFDVAKCDKIFDYLLQEKQIRLPKGHVIPSQEEFKRRAYCKWHDSHSHSTNDCNVFRRQVQSAIDEGRLKFTDGSKMKLDHDPFSVNTINFNDKKVLIRPEQAESTKGKGVVIGEPRPKMIVTKKPEVSVWKENKSGASTSKAPRKTKVTFGMLLEKYEKQGGERVHNKGKRPRSPPRERFGHSPRRSHSPPYHHPQDMSWGSYRMSPPGYPYPYFMPWGATPQIFNHMPPMQFNQGWGGPRRPIHERFSSPNNRRFYGKNRANNEKREGKRVKVEARTSEVITIKVGSHDVPIPSGDGVGVSSNKKSEAKTNSSQSAGLTRPSGRSDRSHAAGLTGSSGQSDRRPDSGPTDASGRSDRASSVGLTGMSGRSDRWSTSGLIRLQRRFDRGIAKGDMKASSSSNKINRGHYLPPRTEPNPRWMPKDLTATQKRRLQRLRAQEIREKKAEEQRDKRFNELRPPLVWRRKSIEKEKPVVVEEREEQSVDKGESSPKEDMDINMVCMLPMEFCAMDEAEVAQFSLGPKDAVFEKPDESNRHMKPLYLKGHVGGKPVSTMLVDRGAAVNLMPYSLFKKLGREDDELKKTNMILNGFNGEPTEAKGIFSAKFTVGNKTLPTAFFIVDVQGLSRELVEHRLPIKPGFRPYKQPPRRFNPLLYDRVKEEIDRLLKAGFIRPCRYVEWVSSRVLVEKKGSGKIGVCIYFRDLNKATPKDEYPMPIADMMINDASGHKVISFLDGNAGYNQIFMAEEDMYKMAFRCPGFVGLFEWVVMTFGLKNAGATYQRTMNLIFHDLLGIILEIYIDDIVVKSDGMEGHMADLRLAFERMRRYGLKMNPLKCAFGVSAGKFLGFMVYERGVEIDPKKIEKIRDFKAPTCKKEAQKLLGKVNYLRRSRCYLGAKQQEAFEELKRYLSTPPVVRAPKAGKPFRLYIASEDKVIGAVLTQEEDGKEYIITYLSRRLLDAKTRYIVRHDNSRANDLAQQASGYNVKKGLFLILEEPVLDFKSLCEIGKTGDQGWSDRHCTAGLTGNQGRSDRPHAAGLTGDPERSDRPCVVDRKIRRQAFKYTLLDGDLYRRNIDGVLLKCLDEDQSKVAMGEANGQAESSNKTLLKLVKKKIEEHPKRWHEMLSEALWAHRISKHGATKVTPFELVYGQEAVLPVEVNLGSLRYIKQDDLSNEDYKTLMGDNLDEVIDNRLKALE

SEQ ID NO: 128537 - protein, 245 aa, Oryza sativa
  unsure (1)..(245): unsure at all Xaa locations
  Clone ID: PAT_MRT4530_30881C.1.pep
QALIDQTNSRTDGVAHTAGPTGPDGRSDRDFTVGPTGQMAGPTGYYPGGQTGTXAGLIAPLDVDQTRPWTNASYLYHLRTFDPPVSTAATNPQVPPHVPNAYNDVGRGYPPDTRQVQYNHIAPQTQPIRPPNPPPNQHRPDNMEEIIGGIIRDKFGIETRNRAKVYQKPYPDYYDNMPFPRNYRVPEFTKFSGEDGRTTWEHVGQFLAQCGEANSDTFKLRLFSLSLSSTGFTWLISLPANSIHT

SEQ ID NO: 128538 - protein, 793 aa, Oryza sativa
  unsure (1)..(793): unsure at all Xaa locations
  Clone ID: PAT_MRT4530_30882C.1.pep
MTKLPSTKAEVEPGNVIPVALEELDEGARKALNEHLKAYTQDLLTKACARTRQGVVFKPGSLPKPTFDMVSAEELSQSIQQQIAHSIDSSMVTLNNKLDASIETRCEEFMRTTFGSLMADFMFKDKASTSASQAPIDQISSKTDGTGQMAGQTGYYPGGQTGPQTGLTAPLDAGQTGSWTRQTDAIIPIQGVDPITNNAYLYHLRTFDPPVSTVVACSQVPPHVPNAYNDPSRGYPTDTRHGQYNYIAPQPQPIRPPNPPPNQHRPDNIEELISGIIRDKFGIEARNRAKVYQKPYPDYYDDVPYPRSYRVPEFTKFSGEDSRTIWEHVGXFLAQCGEASSSDTFKLRLFSLSLSGIAFTWFTSLPANSIHTWAQLEQRFHDYFYTGETELRLSDLTSVKXKYNESVIDYVKRFRDVRNRCYSLNITDRDLADLAFNGLIAPIKERLDGQQFLDVSQLMQMVLAQESRVKDSKKFVRPYEKKPNVNLIDYPEASDSDGEGDHDMHVVEWSWTNKNKAFVCSNLMPTPRKDRQSEVKYSFDVAKCDKIFYYLLQEKKIRLPKGHIISSQEELKRRAYCKWHDSYSHSTNDCNVFRRQVQSAIDEGRLKFTHGSKMKLDHDPFPVNTINFNDKKVLIRPEQAESTKGKXVVIGETRPKMMVPKNPEKYEKQGGEKAGNKGKRPRSPPREXFGHSPRRSESPTYHRPQDMSWGPYPMPSPGYPFPYYMPWGATPPMFNHMPPMQYNQGWGGPRRPARERLSSPNNSRFYAKNRANEEKREGKHVSIWSKTSRTHLG

SEQ ID NO: 128539 - protein, 72 aa, Oryza sativa
  Clone ID: PAT_MRT4530_30883C.1.pep
GHVHSDTEKARSRCSTVRRALTPVYSACSSGRLDDIQTIRLLENQITKTDRKVREALYLGMTDSGVKEHGTM

SEQ ID NO: 128540 - protein, 2093 aa, Oryza sativa
  Clone ID: PAT_MRT4530_30884C.1.pep
MTGATTTGNDERTTTTTTTGAGEEAMRAAGSGCTEARMARTTPLRCRRRRRRRETTSRATDGTSTTRTIGDDADGPRRGLDGGEMMPRTTLPVTVPREGTAAPADARAWRKGQPEEMPPRRKEKPARATVFWRNSGEEEMPTRFLAIPLGKRSVHRQLNFDFAMTKPPSKTEVEPSNVIPVTLEDFEGEDHKVMEEYINELTREALMRASTRTRQGVIIKPGLLPKLVPDLVSNDEVTQSIQQQVASTIDSSMIAFKDKLDATFEGKFDEFLRVKFGPLMADYMSKDKASTTANQPPIDQTGSKTDGAAHTAGLTGPDGRVPEFTKFSGEDGKTTWEHVGQFLAQCGEANSDTFKLGLFSLSLSDNAFTWFTSLSANSIHTWAQLDEKFHDYFYTGETELRLCDLTSVKQKYNEPVIDYIKRFRDVRNRCYSLNITDRDLAGLAFNGLIAPLRERLDDQQFLDVSQLMQRALAQESRVKDNKKLVRSYDKKPNVIDYPEASDSEEEGDHDIYVAEWSWTNKDKPFVCSNLMPTPRKDRQSDVKYSFDVAKCDKIFDYLLQERQIRLPKGHVIPSQEELKRRAYCKWHDSHSHSTNDCNVFRRQVQSAIDEGRLKFTDGSKMKLDHDPFPVNTINFNNKKVLIRPEQAESTKGKGVIIGEPRPKMIVPNKPEVGVWKENKSEASTSKAPRKTKVTFDMLLEKYEKQGGERIRNKGKRPRSPPRKRFGHSPRRSHSPPYHHPQDMSWGSYPMPPPGYPYPYYMPWGATLPMFNHMPPMQFNQGWGGPRRPIHERLSSPNNSRFYGKNRANEEKREGKRVKVEARTSEVITIKVGSHDVPIPFGDGVGVSSNKKSEAETSSSQSAGLTRPSGRSNRNHATGLTGPSGRSDRRPDSSPTDASGRSNRAPSVGLTGASGRSDRWSTSGLTGLQRRFDRGIAKGYVRASSSSNKINRGHYLPPGTESNPRWMPKDLTATQKRRRKSIEKEKPVVVEEKEEQSVDKGESYPKEDMDINMVCMLPMEFCAMDEAEVAQFSLGPKDAVFEKPNESNRHMKPLYLKGNVDGKPVSRMLVDGGAAVNLMPNSLFKKLGREDDELKKTNMILNGFNGEPTEAKGIFSAELTVGNKTLPTAFFIVDVQGFRPYKQPPHRFNPLLYDRVKEEIDRFLKAGFIRPCCYAEWVSNIVPVEKKGSGKIRVCIDFRDLNKATPKDEYPMPIADMMINDASGHKVISFLDGNTGYNQIFMAEEDMYKTAFRCPGFVGLFEWVVMTFGLKNAGATYQKAMNLIFHDLLGIILEIYIDDIVVKLDGMEGHIADLRLAFERMRRYGLKMNPLKCAFDVSAGKFLGFMVHERGVEIDPKKIEKICDFKAPTCKKEVQKLLGKVNYLRRFISNLAGKIDAFVPILRLKKEADFTWEAKQQEAFEELKRYLSTPPVVGAPKAEKPFRLYIASEDKVIGAVLTQEEDGKEYIITYLSRRLLDAETSTCIVACQADVIKHMLQMPILSGRIGKWAYALIEYDLAYEPLKSMKGQIICDFIVDHHVDIAYEEKVCLVEVIPWKIYFDGSSCKEGQGIGVVLFSPNGMCYEASVRLEYYCTNNQAEYNALLFGLQVMEMVGAKYVEAFGDSELVVQQVAGVYKCLDGSLNRYLDSCLDIIANFVNFAIRHIARRDNSGANDLAQQASSYNVKKGLFLILEEPVLVFKSLCEIGKTGDQGRSDRHCVAGLTGDQGRSDRPHAAGLTGDPERYDRPCVVGLTGSGQSAGGHVSINLEAESIVNSDICAQEAEENWRIPLIRYLKDPTLKVDRKIRQQAFKYTLLDEDLYRRNIDGVLLKCLDEDQSKVAMGERMRGLSMVRQCTIGARRRVEPYNQTMPFRGWALDFIGQIYPSSSRGHRFMLVATDYFTKRAEAVPLKNMTHTEKIEEYPKRWHEVLSEALWAHRISKHGATKVTPFELVYGQEAVLPVEVNLGSLRYIKQDDLSSEDYKTLMGDNLDEVIDKRLKALEEIEKEKKRVAKASNKRVKGKLFQVGDLVWKTILPLGTRSKEFGKWFPSWEGPYRICGIVRGNAYFLETLQGERFQRAINGKYLKKYFPSVWQDA

SEQ ID NO: 128541 - protein, 710 aa, Oryza sativa
  Clone ID: PAT_MRT4530_30885C.1.pep
MSGISTYAKVLTVHDYSIESVEAVLNSTTSMIETFTAFQKSAKKHSTAAFVFSSMCGIVLMVLAQIVVVFLALLIEAVLIINMLGPMASMVISMTRLIRHDYGDDNGNLRAALFIFYSLALAHSVCFYCWFLLQYFLEKLSKSASKEFGLNKDFGGQKLLLQYLRETKAKCADDLSLPGGWNMVTYAVGLLKSVSRDDHLDGLRMLDAFVVNKRPSIRLELLSSSESIQNLIKMLQWTDPALEDQEMRERAARIVADVATGALHIVQIPGALQCISSLLQVSPLRQYCQEPQGTRELIHQGLQILERLACDDQNCREICCNQRLLTKIIAPITSPALLHTDYDNAWVDILSILLKLVRLLISAPGEAGTRVCHDISACEDAVRNLLGILGQNATYPMQLQENAMEILTEIAIGSPAIMAEDFIRKLWCIFLSNRGTSRLRRKAGEQLAKLLSAQGANGQVFVKDVFCENDTVVAQLIDILVQDKECQISAAAILEHLCCHFVRYNELSELCVVKLLRMILDLISKMEIKEETVPGAGESNSFDVHNDEESKPPKQSGPKKPWVPKNDELSEETKFLAALMSLLVVICNKMVDAHVFCYVTSVDAALVKKLKKIIEANNKNTADCLRIVKLACQVVIAIIHLKPSCIKDFNGNHFDAVLSTALKNMSDIDNCMLFAVQDCQITKPARTLSSLVKEAQGLLQNAQDVTVLSD

SEQ ID NO: 128542 - protein, 104 aa, Oryza sativa
  unsure (1)..(104): unsure at all Xaa locations
  Clone ID: PAT_MRT4530_30886C.1.pep
MDEATVAVHGADGRVVEEGLARMDGLTLELCNFSPSLLCFSRXRGGGGERSVVLVVGIVAVQPCPPANAKQARATGGGGGEFGRSAVEAEAERVLGSPQPCVLS

SEQ ID NO: 128543 - protein, 702 aa, Oryza sativa
  unsure (1)..(702): unsure at all Xaa locations
  Clone ID: PAT_MRT4530_30887C.1.pep
NRPLNPFYLKGHVDGKQVFRMLLDGGAAVNLMPYSLFKKXGRENNKLKKTNMIFIGFNGEPXEAKGIFSAEFTXGNKTLPTVFFIVDVKDFDEVEKLGKGFTSANPLEEVDIGDGIKPRPTFINKNLRADYKVKIIELLKEYVDCFAWEYHEIPGLSRELVEHRLPIKPGFRPYXQPPRRFNPLLYDRVKEEIDRLLKDGFIRPRCYAEWVSSIVPVEKKGSCKIRVCKDFRDLNKATPKDEYPMPIADMMINGVSGHKNVGATYQRAMNLIFHDLLGIILEIYIDDIVVKSNGMEGHIADLRLAFERMRRSGLKMNPLKCAFGVSAVRFLGFMVHERXVEIDPKKIEKIRDFKALTRKKEVQKLLGKANYLRRFISNLAGKIDAFVPILRLKKXADFTWGAKQQEAFKGLKKYLSTSPVVRAPKTVKPFRLCIASKDKVIGAVLTQEEDGKEYIITYLSRRLLDAETRPILSGRIGKWAYALIEYDLAYEPLKSMRGQIVCDFLVDHHVDIAYEEEVCLVEVIPXKIYFDGSSCKDGXGIGVVLFSPNGMCYEASVRLKYYCTNNQPEYDALLFGLQVMELVGDKHVEVFGDSELVVQQVARVYKCXDGSLNRYLDSCLDIIANFDNFAIRYIARHDNSRANDLSQQASCYNVKKGLFLVLEESVLDFKPVTTGNNPTGVPDVRALSLSQEARLNKTHPPV

SEQ ID NO: 128544 - protein, 1133 aa, Oryza sativa
  Clone ID: PAT_MRT4530_30888C.1.pep
MTKPPSTKAEVDPSNVLPVMMESLDEEARMAFDEHMKKYADELLKTCSKTRHGVVFKPDLVSSSTFDKTGTQAGLTAPMDAGQTGLWTGQIGTIVPIQGIDSMTNVSYLYYLRTFGPPVSTAASNPQVPPHVPNAYNDVSRGYPPDTRQGQYNHIAPQHQPIRPPNPPPNQHRPDNIEHLISGIIRDKFRIEARNRAKVYQKPYLDYYDNVPYPRNYRVPEFTKFSGEDSRTTWEHRFRDVRNRCYSLNITDRDLADLAFNGLITPIKERLDGQQFIDVSQLMQKALAQESRVKDNKKSVRPYEKKPNVNSIDYFEASDSDDEGDHDIYVAEWTWTNKNKPFVCSNLMPTPRKDRQSEIKYRFDVAKCDKIFDYLLQEKQIRLPKGHIVRVQSAIDEGQLKFTDGSKMKLDHDPFSVNTINFNDKKVLIRPEQAESTKGKGVIIGEPRPKMIVPKKLEVGVWKENRSEASTSKAPRKTKVTLDMLLEKYEKQGEKREGKRVKVEARTSEVITIKVGSHDMPIPSGDGVGKSSSNKSEIGTSSSQLAGLTRPSGRSDRSSADRSDRAIRPFCAMDEAEVAQFSLGPKDAVFEKPDESNRHMKPLYLKGHVDGKPVSRMLVDGGVAVNLMPYSLFKKLGREDNELKKTNMVLNGFNGEPMEAKGIFSVELTVGNNTLPTAFFIVDVQEANLEWLQKRVQEYRSTKNDIGETIEDFDEVEKLGQGFTSADPLEEIDIGDGTKPRPNFVNKNMRADYKVKIIELLKEYVDCFGWEYHEMPGLSLKEEIDRLLKAGFIRPCRYAEWVSSIVLVEKKGSGKIRVCIDFRDLNKATPKDVYPMPIADMMINDASGHKVISFLDGNAGYNQIFMAEEDMYKTAFRCPGFVGLFEWVVMTFRLKNTGALYQRAMNLIFHDLLGIILEIYIDDIVVKSDGMKGHIADLRLAFERMRRYGLKMNPLKCAFGVSAGRFLGFMVHERGVEIDPKKIEKIRDFKAPTCKKEVQKLLGKVNYLRRFISNLAGKIDAFVPILRLKKEADFTWGAKQQEAFEGLKKYLSTPPVVRAPKAGKPFWLYIASEDKVIGAVLPQEEDGKEYIITYFSCHLLDAETRANDLAQQASGYNVKKGLFLILEEPVLDF

SEQ ID NO: 128545 - protein, 172 aa, Oryza sativa
  Clone ID: PAT_MRT4530_30889C.1.pep
MTKQSSSKAEVEPTNVIPITLDDFEGEDRKSMEEYIKEITHEALIRACTRTRQGVIIKPGPRPKLTPDLVSNEEVTQSIQQQDASAIDSSMVIFKNKLDATIEGRFDEFLRTKFGPLMADFMLKDKASTSASQAPTDQTSSRTDGAAQMACPTGPDGRSDRDFAIGPTGQMA

SEQ ID NO: 128546 - protein, 258 aa, Oryza sativa
  Clone ID: PAT_MRT4530_30890C.1.pep
MGEVHEGICGTHQSAHKMNWLLRRAGFYWPRMIDDCFKYYRGCEACQRFGNVQLAPAAVLNPIIKPWPFRGWALDFNGQIYPSSSKGHRFVLVATHYFTKWAEAVPLKNMTHTEANGQAESSNKTLLKLVKKKIEEHPRKWHEPFLPVEVNLGSLRYIKLDDLSVEDYKTVMGDNLDDVIDKRLKTLEEIEKEKKRVAKAYNKRVEEKLFQEQRQETQQQLTKNKSNWRRRTTTAVATDVGCGSDEAGMGTMAASASC

SEQ ID NO: 128547 - protein, 379 aa, Oryza sativa
  Clone ID: PAT_MRT4530_30891C.1.pep
MTKPSSKTEVEPSNVMPVTLDDFEGEDRKAMEEYINELTREALMRATTRTRQGVIIKPGPRPKLAPDVVSNDEVSQSIQQQIASTIDSSMANFKDRLDVMFKDKIDGFLRSRLDSFMDDYTLKDKAYTTVDQSPIDPMGSKTDGTAFTVGPTGPDGRSDRNIAVGPTNQTAGQTGYYPRGQTGPQAGPTAHNDTGQTGPSAGQTGAIVPIQGIDPMTNASYLYHFRTFDPPVSTATSNPQVPPHIPNAYNDVSRGYPPDTRQGQYNHIAPQTQPIRPPNPPPNPQGPNSMEDMISDIMRNRFRIETRNRARAYKKPYPDYYDNVPFPRNYRVPEFAKFSGEDGKTTWEHLGQFLAQCGEANSDTFKFYSYLGSIRRTIS

SEQ ID NO: 128548 - protein, 219 aa, Oryza sativa
  unsure (1)..(219): unsure at all Xaa locations
  Clone ID: PAT_MRT4530_30892C.1.pep
SDGQSESANRVIVMYLRCLTGDRPRQWLQWLPWAEYVFNTAYQTSLRDTPFRVVYGRDPPSIRSYEPGDTRVAAVAKTMEERDKFLADIRSRLEQAQATQKRHYDKAHRHVTYQVGDWALLRLRQRAASSLPQTVAGKLRPRFYXPYRITELINDVAVRLALPPRARLHDVFHIGLLKKFHGSPPDAPPPLPAVHHGAVVPEPERAVKTRLARGVRQLL

SEQ ID NO: 128549 - protein, 329 aa, Oryza sativa
  Clone ID: PAT_MRT4530_30893C.1.pep
MAFGQDTIEQLYRELAGGRRLSAKLQALLEGPLDSRGQKEAVDVSRELGRVFMVSLYMLKPCSNSSRRPEGVTRTAPETRTDDSICLHTPARVKRVRLYFKCTFSRERSCAAKKQVQQRDAGEPPMFLVTYLNEHTCQQPQAVPGTPNTAGSSPTTTSRQRQSSSSPPAEMLDLTMNGAGLFSRLLLPHAVGGGGSAAEEEAAIVTCLAAVISGGGAAAAPPPLIWPTSAPEAAFVAFAAGHSASAADESVADEAAAAQIADMDYCFGQYDQSTFGAAAAADHRVLIGDDGDVQRIVAARIADTVCPRYTRDTSAWETAGTSSMRGSID

SEQ ID NO: 128550 - protein, 493 aa, Oryza sativa
  unsure (1)..(493): unsure at all Xaa locations
  Clone ID: PAT_MRT4530_30894C.1.pep
MSDEFDNSIDPAEIYTTDMFMAEHSVLNSFAGRIDKRIKARLEGGTSRRTSGPRKYINRNHEGAHDQLFADYFAEDPLYSAATFRRRFRMRRHVFLHIVDELGKWSSYFTHRVDCTGRLGHSPLQKCTAAIRMLAYGTAADALDEYLKVPQSTALECLENFVEGVVEVFSSRYLRRPTAEDLERLLQVGESRGFPGMLGSIDCMHWRWKNCPNAWKGQYTRGDQKYPTIILEAIASYDLHIWHAFFGIPGSNNDINVLNQSPLFIEAIKGEAPQIQFAVNGTXYNTGYYLADGIYPEWATFVKSIRSPQLEKHKLFAREQEGKQKDIECAFGVLQARFNIVHRPARSWSQKVLRKIMQACVILHNMIVEDEGEMAEDPIDLNAAPGTSIVLPPEVHAGSNDHPSFSDMCTIYELAVVFXRTFEGGLTWGSRTLTDRTGRNSSPCRQSAPPPPRPPRSRPRRSPSVPPRTPRTPPLGPMSARSTAAERLRRLLR

SEQ ID NO: 128551 - protein, 146 aa, Oryza sativa
  Clone ID: PAT_MRT4530_30895C.1.pep
FQMSKKPETGARLFIGGFPRYTEKTELEEFCSRFGKVKHTDLVPFRQVAFVTFTSKEEATLAMFGIQQQVFKGSHLRVDWAKVRQDKKDAKSESAPAAGVKADSQPGAKDSAKDVAPAKERYIPGDTKESAVKSQENIQVQVTEDV

SEQ ID NO: 128552 - protein, 243 aa, Oryza sativa
  unsure (1)..(243): unsure at all Xaa locations
  Clone ID: PAT_MRT4530_30896C.1.pep
LQTPTPSSKLLLQLELAPIGVTDPSKVFGKLLAPDLKKKRKKKXESPPPSGTPPSAGQPPRRRQPASXPRRRQAHALPXARAPPASPRAAASPRVAAEPAHRRXQPPRCRPRTPPPSPRAAASPHAAAEPVLRRRQPARRRLPPNLAGEDGRGERGWEEEEEFRGSSMAFLCKYIKILKGSGSFGVEWSCGAAKTQLHPRSTNLWSCSANSAPKNKEFVPFGTAPALGKLELGAGAVPNGALL

SEQ ID NO: 128553 - protein, 36 aa, Oryza sativa
  Clone ID: PAT_MRT4530_30897C.1.pep
ERGVSRGTTRILAKPRIDIDPTGKSTKNIVYRDVLF

SEQ ID NO: 128554 - protein, 41 aa, Oryza sativa
  Clone ID: PAT_MRT4530_30898C.1.pep
RLINLEIIILFTRFGIWGKPVLYCIVPYWTINSLKKKTSML

SEQ ID NO: 128555 - protein, 65 aa, Oryza sativa
  Clone ID: PAT_MRT4530_30899C.1.pep
FKSGKLPPLQRSPVWRLKWNCKLILYNYLLLTMNVHQEGNLCSMHPFTISCTRLQCFHWVYPSCI

SEQ ID NO: 128556 - protein, 105 aa, Oryza sativa
  Clone ID: PAT_MRT4530_308C.1.pep
RGPQDCFKPWGLVKDFCPLFQTPAFSPGRKRGFPPGKIFLGFFLPPIFRPLLVLKNGGPFCSPVLLPPLLGAGGDSASLTGPPHPWSFFSGGDIFNFPGRPPLVF

SEQ ID NO: 128557 - protein, 114 aa, Oryza sativa
  Clone ID: PAT_MRT4530_30900C.1.pep
MATMQERVEEVAAEALGNLDPVVSNLLDTRSGVPLFVGSGEAAADNLRAKGKRVIYDGSIGEHVKRAMCRVHILACHNWPLMCDGPHLEWAPIEPITNAFTCDETLWPVTDRSS

SEQ ID NO: 128558 - protein, 332 aa, Oryza sativa
  Clone ID: PAT_MRT4530_30901C.1.pep
MSNIGMGMGVIEAGRFMRMSSERRARHLVGMGVVLTLNTSILILGSATRAPTHCTRGVFLWPCIAIGLFFMVVFILGLCGAKNNNEGLFFCHLLGVFIAILALIGFIIFGYVAIGPGIDLSDVKAREYNLDDYKSGWLRARVDDAAYWATTSACLRGDRGAGCKAMTKLVRDPHSGLFVPDGGRRHVDMSPIQEPGTKASSPVIPPSTSELVASGHILHHPRHVGARRRCQRPPSSKPHAEARRRRPHPPPSTPRRSSSLAPASSVIHAPRRSSSLAAASSIVHATSELVAGGHVLRHPRHTSERAPSSSPAICSLTERRGEARRGSGGLLR

SEQ ID NO: 128559 - protein, 117 aa, Oryza sativa
  Clone ID: PAT_MRT4530_30902C.1.pep
MSYSTPSEYTMPLQAEDAHGDVTNLSASELKNKRSREWYASLTKEQKEDRNRKARDARRRRKDESQGNVPKATTSKFSTPTPTLGDISIVTAGDPAGREQWVSNDELLDTPTTKGTG

SEQ ID NO: 128560 - protein, 39 aa, Oryza sativa
  Clone ID: PAT_MRT4530_30903C.1.pep
FCKITKFEFNIDQLGAILIDRFIQFIGKPGYRICKYKIK

SEQ ID NO: 128561 - protein, 125 aa, Oryza sativa
  Clone ID: PAT_MRT4530_30904C.1.pep
PIRAHSPSIDRLIMELKHAAHTRKSSVSTALPLLLMFLLLATAAASASASPSAISHQPNDLEDFATCFRASSCYDTGCAIRCRDLGLNPAGSRCKVLPGIGQCCCCGRLPPPASSSSPVFPSIVA

SEQ ID NO: 128562 - protein, 50 aa, Oryza sativa
  Clone ID: PAT_MRT4530_30905C.1.pep
NRRVSNHPPILNKRIQNHVVYRPYSDRFDPTDHALFSFQLFLQTSNFSIT

SEQ ID NO: 128563 - protein, 122 aa, Oryza sativa
  Clone ID: PAT_MRT4530_30906C.1.pep
PRVRPRVRPRVRPRVRPRVRPTTHEPFSKLRSFCFSMFEILSEGKGERILDLLSDATDLVLQQSTIKGLKEDSFVLQVSVENFADAEALLFSGMLKRTTAATNANSKSSRSQCIITIRAVHK

SEQ ID NO: 128564 - protein, 171 aa, Oryza sativa
  Clone ID: PAT_MRT4530_30907C.1.pep
RCVADGVGVLSLSLGGGSAPYFRDTVAVGAFGAAAAGVFVACSAGNSGPSGATVANSAPWVATVGAGTLDRDFPAYVTLPTGARLAGVSLYAGPSPSPRPAMLPLVYGGGGDNASRLCLPGTLDPAAVRGKIVLCDRGVNARVEKGAVVKAAGGAGMVLANTAASGEELVA

SEQ ID NO: 128565 - protein, 1696 aa, Oryza sativa
  Clone ID: PAT_MRT4530_30908C.1.pep
MEGLVGRAVRKEFPGFGVFDGVVESYDAEAGYFRVMYEDGDSEEVELGEVVGLLVGGSPVGVEMAHPLPLTPGRRPKKRRRGDEEGGVGVGAVVAMEVDSVVLAVPAGGAEPASPVVVVEGSSRDEVDGDVVSEMAEKRRRVVSPGPESSGKPLRRSARQAKAAARVAEMEAAAAVAAAAEAEAAAAAMAEAEAEAAVTPPQSGSKRKRASGAGRYRSVAKDLEKAAVERLPPKPELPPSSQSLDLEGLPALDVFQVYSCLRSFSRQLFLSPFLLETFVAALRCIYVNPLIDWVHFSLLRAMKSHLEDLANEGDPPAMHCIRNLNWELLDLATWPIYLAEYLLTRGSELRYGMKLTDLKLLNTEYYTQPAMVKLELLRALCDDVLEIEAIRSEVVSRMSELDGNDELCKSTRTRRKRRASAVKNLLNSSRAPEDSSDTEDGNSDECYLCGMDGNLLCCDGCPAAFHSKCVGVVEDLLPEGNWFCPECLIQKNDGFKNMVKPGRGAEVLGMDPHDRLYFGTCGYILVVESTAEDSLDSTCHYYGIFDHHSLFNVLRTCHPSYSSITNMISLFWGTAIDSFDSNGRCENNKEFSIFDAKIDCSHLLPSKQHTEHEQLKSDKNGSCEQLACGKAHASDPDRLDHDTSHHKFSLRSAVISENGNATSAKTQQDVCSYANGLPAENKIDQSPHKKISDCYIHSNPAMYVNYYSFGQIAASAAEELKDKLSENKEGKKVGQDAASFQLKTICKKYANIFALTDQKLSVELRKEKCGWCNSCQISGGVDCIFRVTDGKCMEGLQSEKNMNSHIILAIHIILSIEERLNGLLIGPWKNPQFSSYWRKAVLKASDVSSLKQPLLMLECPVRRVAFSVEWQKPADSVEVVGSAAHVLVRTSNKSSRHGSTRKPGRKPFIVELKVDSRDVGVYWRRGGRLSRQVFHWKRLPKSLTYKAVRQAGRIKIPTILYSDGSQFARRSKYIAWQAAVEMAENVAQFILQIKELEFNIRWTEILSTLPASLATKETQKIARLFKKVIVRRKRVDGTNVEYLLDFGKRENIPPVIAKHGKKLDEPSNERNRYWLSEGHLPLSLLKAYEAKALTRLLKKKDIDHLPKKMIDLKPPKPKKSGFDDLLEKAKKQVLGLCGHCDKEVKISDAVNCQYCEALFHKKHFKVPRGATDAYYVCNKCLSEKVLNVKSPQKKVVSKKNSLKKKTKKQSLKIVTRSKQIVAKSKKKMGKNKGKRGRPRKYPLNESKNKLPELRVKEPANVPKNEPAKRISKRLYSKYMKGNSNISERSAKRRRTASHYSYWLDGLRWTQNPNDDRAISFRTERVVFPCEDADLSEVFPVCRLCQKCYSGESIYIACEDCGDWFHGDIYSITLENVNNLIGFKCHRCRLKDVPVCPYVQTDNILMAQSDKDDVTSRSIEDKEDRSPTDLVAHDSLEGSHGHIIEKEVNDHSFEKEVGDHICLQAQEDHNEKELDSHSTEKELGDHNKTEEFDGNMKVLFNLNSTKELDSTSTEKELGDHNKIEEFDVNMEMFFNLNNTKELDSTGESICAGGEAHCLHELNNHEILKECHSLDNNLGELDNQDCQKECHNQNSLKELENHRSSQELDSHKSPEELDNIISPKELDCTENNEHSAAVTQSDGFLDDPFNIRISDKGLIIASENGKIKESIPLQTKNKPEENPVPADHDIDLQVVVTL

SEQ ID NO: 128566 - protein, 58 aa, Oryza sativa
  Clone ID: PAT_MRT4530_30909C.1.pep
MIFPRDKINTIPLEYSRVKCYNGIFVCLRMNSVTIIYQKYFCAIAGNYISSNVVKKYQ

SEQ ID NO: 128567 - protein, 55 aa, Oryza sativa
  Clone ID: PAT_MRT4530_3090C.1.pep
MRPRGNWVGIEEEEEEGEDEDDQKFGAERRKYLDIKVQHLDTNGISVDTLVPYKS

SEQ ID NO: 128568 - protein, 111 aa, Oryza sativa
  Clone ID: PAT_MRT4530_30910C.1.pep
NASAVLKFVMTFHLYTRTYKVRIESPKLGLLYHPYLNSRLTAVLPTWRVDDMVFFFPFPPFLFCPLLLSSSSARATSSSPMPTTVIAKRRCCRRKRPKKREMKEEGGRKKK

SEQ ID NO: 128569 - protein, 189 aa, Oryza sativa
  Clone ID: PAT_MRT4530_30911C.1.pep
HQPRPPAATITGRCHQPPPVQIRPGWRGSRGRSTPRCRAGARRPGRRGGGPCRGVLVAPRSTTDVESSWSAADVAFSRRGPPPSSAPSPSIPPPATPLQIRPDVAWIWPPPPPPRTAPPAAERGVGEARPRRRRPCGCAALPAPARAAARWRRGRWEEESGGARVAPRAARGRATRGPISLISCSPYDL

SEQ ID NO: 128570 - protein, 76 aa, Oryza sativa
  unsure (1)..(76): unsure at all Xaa locations
  Clone ID: PAT_MRT4530_30912C.1.pep
LHMXXPRCEPKRSLPKMEVEAPKANGETPQPHLVKPSSETRNRRPTWMQKARQRRKKWPALPSFEQTLHALSFRHR

SEQ ID NO: 128571 - protein, 155 aa, Oryza sativa
  Clone ID: PAT_MRT4530_30913C.1.pep
MAIDGSPAIRLPGQQRWANGSGGGRGLAGLAAARPQPLAVRSERSGNNQQLRTESQLRDKMKSDEDYSSYSGLMQSGIIRKGSFTYYLRCVVQSFVSAVCPGSARHGQDVVRVRRAVLWGTHTARVYEPSKSAAERETRTSGVTVTRAWVGVRRA

SEQ ID NO: 128572 - protein, 718 aa, Oryza sativa
  unsure (1)..(718): unsure at all Xaa locations
  Clone ID: PAT_MRT4530_30914C.1.pep
TGPWTGXTGAIIPIQGIDPMTNASYLYHLRTFDPPVSTTATNPRVPPRVPNAYNDVAREYPPDTRQGQYNHIASQTQPIRPPNTPPNQHRPDNMEEIISGIIMDKFRIETRNRAKVYQKSYPDYYDNVLFACNYRVPEFTKFSGEDCRTTCEHVGQFLAQCGEANSDTFKLRLFSLSLSGTAFTWFTSLPANXSIHTWAQLEQRFHDYFYTGETELRLCEXKKYNEPVIDYIKRFRDVINRCYSLNITDRDLASXLIAPLRERLDGQQFLDVSQLLQRALAQESWVKDNKKIVRPYEKRPNVNMIDYLEASDSEDKGDHDMYVAEWSWTNKNKPFVCSNLMPTPRKDRQSEVKYSFDVAKCDKIFDYLLQEKQIRLSKGHIIPSQEELKRRAYCKWHDSHSHSTNDCNVFXRQVQSAIDEGRLKFTDGSKMKLDHDPFPVNIINFNDKKVLIRPEQAESTKEKGIIIGESRPKMIVPKKPEKYEKQGGERACNNGKRPRSPPRERFGHSPRWLHSPPYHHSQDIPWGPYPMPPLGYPYPYYMPWGATPPMFNHMPPIQFNQRWGGPRRPIHEHLSSPNNGWFYGKSRASEERREGKRIKVEARTSEVITIKVGSHDVPIPSGDEVRESSRKKSEAGTSSSXSAGLTGPSSRSDRSHTAGLTGPSGRSDCRPDNGSTDASSRSDXSLEKSNYVTAKIRPSNLGVKLSGPPVPKEKVLIQ

SEQ ID NO: 128573 - protein, 40 aa, Oryza sativa
  Clone ID: PAT_MRT4530_30915C.1.pep
MARGVRVLVFERIGNAREFRFRLGMFCQILSASAQSRLCP

SEQ ID NO: 128574 - protein, 121 aa, Oryza sativa
  unsure (1)..(121): unsure at all Xaa locations
  Clone ID: PAT_MRT4530_30916C.1.pep
ALTSSTARGPAPWAXDEALQPGQLYFVLXVSAXRRXLSGHDMAALAVKASAALSSIGVPTSSATRRKDDRDGASASGKRRRTSRVAPLAVVSGIAHAPLMAKTRKCGRRRACVRRLSVASE

SEQ ID NO: 128575 - protein, 822 aa, Oryza sativa
  unsure (1)..(822): unsure at all Xaa locations
  Clone ID: PAT_MRT4530_30917C.1.pep
ASRGSADLWCRREGWTAHTAVPTGPXGRSPPWSDRTSDRSDRTSGGRLDRVLDWGNPPDTRQCQYNYITPQPQPIRPPNPPPNQHRPDSMVELISGIIRDKFGIEGRNRAKVYQKPYPDYYDNVPYPRGYRVSEFTKFSGDDSRTTWEHRFRDVRHRCYSLNITDRDLVDLAFNGLIAPIKERLDGQQFLDVSQLMKKXVRSYEKKPNVNSIDYSDASDKEGESDHDMYVAEWSWTNKNKPLVCSNLMSTPRKDRQSEVQSAIDEGRLKFTDGSKMKLDHDPFPVNTINFNDKKVLIRPEQAKSTKGKGVIIGEPRPKMMVPKNPEVGVWKENRSGASSSKAPKKTKVTFDMLLDKYEKQSGEKARNKGKRPRFPPREQFGSLSNAAAGLFLSLLHAVGGNYSTNRTNEEKKEEKRVKVGTRSSEVITIKVRSDDVPIPSGDEVGESLSNKSEAGTSSSQSAGLTXPYGRSDYRPNVGLTGASCQSDRRPNVGLTGTSSRSIXWSTSGLTGLEXRFDRRFAKSSEGASSSSSRLNRGHYLPPGIEPKPRRFKELQPPPTKMWRRKSIDIVESVVVKEKEEQSVAKDESSPKEDMDVNMVYMLPMEFCAMDKAEVAQFSLGPKDAXFEKPGESNRLMKPLYLKGHIDGKSVSRMLVDGGATVNLMPYSLFKKLGRGDDKLKKTNMILNGFNGEPIEAKGTFSMELTVGNKTLPAAFFIVDVQGNYNVILGRCWIHANCCVPSTLHQCLIQWDGNDVEIVQADTSAEVTMADVTFEWRHGNIQCLSGMDLSSYDFISISNGKFVPISVKLASLARLGHINLCNE

SEQ ID NO: 128576 - protein, 421 aa, Oryza sativa
  unsure (1)..(421): unsure at all Xaa locations
  Clone ID: PAT_MRT4530_30918C.1.pep
MASELTYRGGAGAPGSASDGGEYSPKPSKPLSWLTRAARYAAAEHRPAFALAGMLLAAALFSLYAPSSDASSSAATTTTTTFSHLSSLPSSSAASLHESAGGKVPLGLRRRALRVLVTGGAGFVGSHLVDRLVERGDSVIVVDNFFTGRKDNVAHHLANPRFEVIRHDVVEPILLEVDQIYHLACPASPXNPIKTIKTNVVGTLNMLGLAKRIGAKFLLTSTSEVYGDPLQHPQVETYWGNVNPIGVRSCYDEGKRTAETLTMDYHRGANLEVRIARIFNTYGPRMCIDDGRVVSNFVAQALRKEPLTVYGDGKQTRSFQYVSDLVEGLMSLMEGEHIGPFNLGNPGEFTMLELAKVVQDTIDPNARIEFRPNTADDPHKRKPDITRAKELLGWEPKVPLREGLPLMVTDFRKRIFGDQEA

SEQ ID NO: 128577 - protein, 348 aa, Oryza sativa
  Clone ID: PAT_MRT4530_30919C.1.pep
AGGSSSCRRGSSWAGSVPLGLRRRGLRVLVTGGAGFVGSHLVDRLVERGDSVIVVDNLFTGRKENVVHHLGNPNFEMIRHDVVEPILLEVDQIYHLACPACPVHYKYNPVKTIKTNVVGTLNMLGLAKRIGAKFLLTSTSEVYGDPLQHPQVETYWGNVNPIGVRSCYDEGKRTAETLTMDYHRGANLEVRIARIFNTYGPRMCIDDGRVVSNFVAQALRKEPLTVYGDGKQTRSFQYVSDLVEGLMRLMEGEHVGPFNLGNPGEFTMLELAKVVQDTIDPNAKIEFRPNTQDDPHKRKPDIGRAKELLGWEPKIPLHKGLPLMVTDFRKRIFGDQDSTATTTGGQQG

SEQ ID NO: 128578 - protein, 48 aa, Oryza sativa
  Clone ID: PAT_MRT4530_3091C.1.pep
YIYTTSVRFRRTGHRCNVPQTSWIPSEVCTSRLTLGGPEGLEPRVVVS

SEQ ID NO: 128579 - protein, 420 aa, Oryza sativa
  unsure (1)..(420): unsure at all Xaa locations
  Clone ID: PAT_MRT4530_30920C.1.pep
MTKPSSKTEVEPSNVMPVTLDDFEGEDRKAMEEYINELTREALMRSTTRTRQGVIIKPGPCPKLAPDMVSNDEVSQSIQQQIASTIDSSMANFKDRLDXDVMFKDKVDGFLRSRLGSFMDNYTLKDKAYTTVDQSPIDPMGNKTNGTAFTAGPTGFYPSGQTGSQAGPTAHHDAGQTGPWAGQTGVVVPIXGIDPMTNASYLYHFRTFDPPVSTATSNPQVPPHISNAYNDVSRGYPPDTRQGQYNHIAPQTQPIRPPNPPPNPQGPNNMEDMISDIMRNRFGIEPRNRVRAYKKPYPNYYDNVSFPRNYRVPEFAKFSGEANSDTFILCLFSLSLSGTAFTWFTSLPANSIYTWAQLEQKFHDHFCTGKIEHRFSDLTSVRQKYNESFVDYIERFRDIKSRCFSLKITDKDLAILCCNK

SEQ ID NO: 128580 - protein, 462 aa, Oryza sativa
  Clone ID: PAT_MRT4530_30921C.1.pep
MSRANSRQTKAQSCEGLNAEGIAGGPAWGELAEAPWRAQGDGGGLAETAAALSVLLEKCKNVEVNVQQEDQQRSIPLLLYLTSQSDKNGSTPLHFAASLKTSIEGFTSRLCEHFRPKQSPTTLLLGLNESAIYQPDNRGSYPILVAASNGILKVVITLLKRYPDCATLRDIQGRTFFHVAVEKKRRNIVAYVCERPGFSPILNMQDSHGDTALHLAVKAGYHMLIFQNPRYMISQLLALSGGTVGYSRQDHFFEKYSKKRDEVIDSNDMTSAAQVLGISSALIATVTFAAAFTLPGGYRADDHTDGGTPTLAGSYPFDAFIISNSLAFICSLLATVSLLYSGIQSRDISIRRRYYAFSMLLMQSSTTSFTVAFAMGMYLVLAPVTLNAAVSVCIIAFVSLLPGNMEIGVSLAIANTLRIRLGIWAAMSQARPVLLFTWKRVWSCIIIFGLPGLMKIHRTKMA

SEQ ID NO: 128581 - protein, 163 aa, Oryza sativa
  unsure (1)..(163): unsure at all Xaa locations
  Clone ID: PAT_MRT4530_30922C.1.pep
ICDRIKYQHRAYCKWHDSHSHSTNDCNVFRXXVQSAIDEGRLKFTDGSKMKLNHDPFLVNTINFNDKKVLIRPEQAESTKGKXVIIGEXRPKMMVPKNPEKYEKQGGERARNKGKRPRLPPRERFGHSSRRSQSPPYHHSLDMSWGPYPMPPPGYPYPYYMAW

SEQ ID NO: 128582 - protein, 401 aa, Oryza sativa
  Clone ID: PAT_MRT4530_30923C.1.pep
SGTTIVDQIDLLQEQVKMLAGEVALCTSSLKRLSEQAANNPDDSQIQEQIEKLKNEIDEKKSHIRVLEQRMAQSLETTEDPAIRTEMSQTFSKLSTQLSEKTFELEIMSADNRILQDQLQAKVSENAELVETVAQLRQEIDNLLKTAKNEDNVASMQSSEPSSTSSNPRDLANEVASHSKMPSRTTEDHTESPLKSQVLLQAAEIENLKLDKLRLAEEKDGLEIHSQKLAEESSYAKELAAAAAVELKNLAEEVTRLSYENAKLNADLAAAKDQTRISIQSDTKRRDQENGIFVEELQKELVASCQREAVLEDTLSQRARRESELLKVIEDAKCHEHDLENELANMWMLVAELKKENSQEDLFQFKATQNGYHSSKSDTGRMMSGMEASDNRNWDGVSVST

SEQ ID NO: 128583 - protein, 92 aa, Oryza sativa
  Clone ID: PAT_MRT4530_30924C.1.pep
MQEIWRTPVPLKDPSIDSEMTILMWEAERSKNIVMWYLFVEVKAFGAVDADRRDGDFRGLTTCQYPWNVIVANAAAVKTLKDMEANRCIKRL

SEQ ID NO: 128584 - protein, 147 aa, Oryza sativa
  unsure (1)..(147): unsure at all Xaa locations
  Clone ID: PAT_MRT4530_30925C.1.pep
LAISANSSFCPVFSLYDHLRERVAIPILHDPTHYLLSPMGNPDPTYFINSETNRIPFRETKPELSHWLTVFRSXLSKLDEWRDWFVWISASKQSTWKKMDIFQCLLLSLADMPKSESMLSAATYFXWSDTLNVLMFGQGPMTPDQLS

SEQ ID NO: 128585 - protein, 255 aa, Oryza sativa
  Clone ID: PAT_MRT4530_30926C.1.pep
SFWDATKPLCEIGKTGDQGRSDRHCAAGLTADQGRSDRPRATGLTGHPGRGCEACQRFGNVQLVPAAALNTIIKPWPFRGWALDYIGQIYPLSSKWHRFVLVATDYFTKWAETVPLKNLTHTEANGHAESSNKTLLKLVKKKIEEHPNKWHEITRHMGDNLDEVIDKRLKALEEIEKEKKRVAKAYNKRDRSPVHCSVWISMDGIVDLYLSMDSVDLLHLTSAPSHCRVSSGSGGHHCDSVTIDRDPPPTVRQGV

SEQ ID NO: 128586 - protein, 1474 aa, Oryza sativa
  Clone ID: PAT_MRT4530_30927C.1.pep
MVAAGDHRRGGAAAERGEGRGKGGDGPRLTPGRRRRRRRQPERREAVARLGSTGTAALRRSATETERWTRGYPPDTRQGQYNHIAPQTQPIRPPNPPPNQQGPNNMEDMISDIMRNRFGIETRNRARTYKKSYPDYYDNVLFPRNYRVPKFAKYSGEDVAPLRERLDGQQFLDVSQLMQRALAQESRVKDNRKLARPFDKKPNVQSAIDEGRLKFTDGSKMKLDHDHFPVNTINFNDKKVLIRPEQAESTKGKEVVIGEPRSKMIVLKKPEVGVWKENRSGASTSKAPRKTKVTFNMLLEKYEKQGGEKIRNKGKRPRSPPKERFGHSPRRSRSPSYHYPQDMSWGSYPMPPSGYPYPCFMPWGPTPPMFNHMPPMQFNQGRGGPRRPIHERLSSPNNSRFYGKNRANEEKWEGKRVKVEERTSEVITIKVGSHDVPIPSGDGVGVSPNKKSEAGTSSSQSAGRFDRSPHVGLTSASGRSDRWSTAGLAGLQLRFDERAAKGDVRASSSSSKVNKGHYLPPGIEPNPRWMPKDLTATQKRRLQRLRAQEIREKKAEEQRDKRFNELRPPPVWRPKSIEKEKPVDINEKEEQSVDKDAVFEKPDESNRHMKPLYLKGHVDGKPVSRMLVDGGAAVNLMPYSLFKKLRREDDELKKTNMILNGLNGEPTEARGIFSAELTVGNKTLPTAFFIVDVQEWVSSIVPVEKKGSDKIRVCIDFRDLNKATPKDEYPMPIADMMINDASGHKVISFLDGNTGYNQIFMAEEDMYKTAFRCPGFVGLFEWVVMTFGLKNAGATYQRAMNLIFHDLLGIVLEIYIDDIVVKSDGMEGHVANLRLAIERMRRYGLKMNPLKCAFGVSAGKFLGFMVHERGVEIDPKKIEKIHDFKAPTCKKEVQKLLDKVIGAILTQEEDGKEYIITYLSRRLLDAETRPILSGRIGKWAYALIEYDLAYEPLKSMKGQIVCDFIVDHHIDIAYEGEVCLIEVIPWKIYFDGSSCKEGQGIGVVLFSPNGMCYEASVRLKYYCTNNQAEYNALLFGLQVMEMVGAKYVEAFGDSELVVQQLAGVYKCLDGSLNRYLDSCLDIIVNFDNFAITHIAWRDNSRANGLAQQASGYNVKKGLFFILEESVLDFKSLCEIGKTGDQGRSDRPHAAGLTGDPERSDWPCVVGLTGFGQSAGGHVSINLEAELIVNSDICAQVTEEDWRIPLIQYLKDPTLKVDRKIRRQSFKYTLLDGVLLKCLDEDQSKVAMGEGHKFVLVATDYFTKWAEAVPLKNMTHTEANGQAESSNKTLLKLVKKKIEEHPKRWHEVLSEALWAHRISKHGATKVTPFELVYGKEAVLSVEVNLGSLRYIKQDDLSSEDYKTLMGDNLDEVIDKRLRALEEIEKEKKRVAKAYNKRVKGKLFQVGDLVWKTIFPLGTRSKEFGKWSPSWEGPYRVCGIVRGNAYFLETLQGERFQRAINGKYLKQYFPSVWQDA

SEQ ID NO: 128587 - protein, 1821 aa, Oryza sativa
  unsure (1)..(1821): unsure at all Xaa locations
  Clone ID: PAT_MRT4530_30928C.1.pep
MMKPSSKAEVEPANVIPITLDDFEGEDRKSMEEYIKELTQEALIRASTRTRQGVIIKPGPRPKLTPNLVSNEEVTQSIQQQVASTIDSSMTVFKNKLDATFEDKFDEFLRFKVGPLLADFMGKDKASTTASQAPIDQTSSGTNEAAHIAGPTXDYGRSDRVLPRRSDRDSGRSDRASGCRSDRALDRPDRHNNTDSGDRSNDXASYLYHLRTFDPLVSTTANSPHVPPHVPNAYNDVARGYPPDTRQGQYSHIAPQTQPIRPQNPPPNQHRPDNMEEIISGIIGDKFGNETRNRAKVYHKPYHDYYDNVSFPRNYRVPEFTKFSSEDGRTTWKHVGQFLAQCGEANSDTFKLRLFSLSLSGTAFTWFTSLPANSIHTWAQLEERFHDYFYTGETKLWLCDLILVKQKYNEPVIDYIKRFRDVRNRCYSLNITDRDLAGLAFNGLIAPLRERLDGQQFLDVSQLMQRALAQESRVQSAIDEGRLKFTDGSKMKLDHDPFPVNTINFNDKKVLIRPEQAESTKGKGVIIGEPRPKMIVPKKPEVGVRKENKSEASTCKAPRKTKVTLDMLLEKYEKQGGWGGPRRPIHERLSSPNNGRFYGKNRANEEKREGKRIKVEARTSEVITIKVGSHDVPIPSGDEVGESSSKKSEAGTSSSQSAGLTRPSDRSDRGHTAGLTGPSGRSDRRPDDGPTDASGRSNRPPNVGLTGASGRSDRWSTSGLTGLQRRFDKRFAKGDVRASSSSTKPNRGHYLPPGTEPKLRWMPKDLTATQRRRLQRLRAQEIREKKAEEQRDKRRKTIEKEEPVFVEEKEEQSVAKDESSLKEDMDINMVCMLRMEFCAMDEAEVAQFSLGPKDAVFEKPDKSNRHMKLLYLKGHIDRKPVSRMLVDEAKGIFSAELTVGNKTLPTAFFIVDVQEANLEWLQKRVQEYRSTKNDIGETIEDFDEVEKLGQGFTSADPLKEVDIGDGTKPRPTFVNKNMRADYKVKIIELLKEYVDCFAWEYHEMPDLSRELVEHRLPIKPGFRPYKQPPHLFNPLLYDRVKEEIDRLLKAGFIRTCLYVEDLNKATPKDEYPFDEVEKLGQGFTSADPLKEVDIGDGTKPRPTFVNKNMRADYKVKIIELLKEYVDCFAWEYHEMPDLSRELVEHRLPIKPGFRPYKQPPHLFNPLLYDRVKEEIDRLLKAGFIRTCLYVETPGAYXGNELTLRLLGYLRDYLMNCANGXWKAHSRFEEAGFTWGAKQQEAFEELKRYLSTPPVVRAPKAGKPFQLYIASEDKVIGVVLTQEEDGKEYIITYLSRRLLDAETRPILSGRIGKWAYALIEYDLAYEPLKSMKGQIVCDFIVDHHIDIAYEGEVCIVEVIPWKIYFDGSSCKEGQAIGVVLFSPNGMCYKASVRLEYYCTNNQAEYNALLFGLQVMEMVGAKYVEAFGDSELVVQQVAGVYKCLDRSLNRYLDSCLDIIANFDNFAIRHIARHDNSRANDLAQQASGYNNVKKGLFLILEEPVLDFKSLCEIGKTGDQGRSDRPHAVGLTGDPERSDRPCIVGLTGSGQSAGGHVSINLEAELIVNSDICAQEAKEDWRIPLIRYLKDPTLKVDRKIRRQAFKYTLLDENLYRRNIDGVLLKCLDEDQSKVAMGEGHRFVLVATDYFTKWAEAVPLKNMTHTEANGQAESSNKTLLKLVKKKIEEHPKRWHEVLSEALWAHRISKHGATKVTPFELVYGQEAVLPVEVNLGSLRYIKQDDLSSEDYKTLMGDNLDEVIDKRLKALEEIEKEKKRVAKAYNKRVKAKLFQVGDLVWKTILPLGTRSKEFGIELRKIRENFREYN

SEQ ID NO: 128588 - protein, 1579 aa, Oryza sativa
  unsure (1)..(1579): unsure at all Xaa locations
  Clone ID: PAT_MRT4530_30929C.1.pep
MTKPSSKTEVEPSHVIPVTLDDFEGEDRKAMEEYINELTREALMRATTRTRQGVIIKPGPRPKLAPDVVSNNNVSQSIDQQIANTIDSSMANFKDRLDVMFKEKVDGFLWSTLGSLMDDYTLKDKAYTTADQLPIDPIGSKTDGAAFTAGPTWPDGRSDRVLSHRSDQPSGRFDRATXRRSDRALGRGYPPDTRQGQYNHIAPQTQPIRPPNPPPNPQGPNNMENMISDIMMNKFGIETSNRARAYKKPYPDYYDNVSFPKNYRVPEFTKFSGEDGKTTWEHRFRDVRNRCYTLNIIDRDLAGLAFNGLVAPLREKLDGQQFLDVSQLMQRALAQESRVKDNKKFARPFDKKPNVNVVDYSDASDNEEEGDHDIYVAEWSWTNKNKPFVCSNLMPTPRKDXQSEVQSAIDEGRLRFTDGSKMKLDHDLFPVNTINFNNKKVLIRPEQAESTKGKEVVIGEPRPKMMVPKKPEVGVWKENKGGASTSKAPRKTKETFDMLLKKYEKQGDERDHNKGKRPRSPPREXFGFLSNAAAGLSLSLLHAMEGNAANNRVNEEKREGKRTKVEERTSEVITIKIGSHDVPIPSGDGVGKSPSKKSEAGTSSSQSASLTRPSGRSDRSHVAGLTGPSGRSDRRPDDGLTDASGRSGRSDRWPTAGLTGLRCRFDERAAKGDVGASSSSSKVNRGHYLPPRTEPNPRRFNELRPPPVWRPKSIEKAKPIDVEEKEEQSVDKDKSSPKEDMDINMVCMLPMEFCAMDEAEVAQFSLGPKDAVFEKPDESNRHMKPLYLKGHVDGKPVSRMLVDGGAAVNLMPYSLFKKLGHEDDELKKTNMILNGFNGEPMEARGIFSAETQTVGKNKWNGPLPPKTPGPFFFLFFPNFPGAFPAGKYLGASLEWLQKRVQEYRSTKNDIGETVEDFDEVEKLGQGFTSADPLEEVDIGDGIKPRPTFVNKNMRADYKVKIIELLKEYVDCFAWEYHEMPGLSRELVEHRLPIKPGFRPYKQPPRRFNPLLYDRVKEEIDRLLKAXFIRPCRYAEWVSSIVPVEKKGSGKIRVCLDFRDLNKATPKDEYPMPIADMMINDALGHKVISFLDGIILEIYIDDIVVKSDGMEGHIADLILAFERMRRYGLKMNLLKCAFGVSAGKFLGFMVHERGVEIDPKKIEKIRDFKAPTCKKEVQKLLGKVNYLRRFISNLAGKIDAFVPILRLKKEADFTWGAKHQEAFEELKRYLSTPPVVRALKAEKPFRLYIASEDKVIGAVLTQEKDAKEYIITYLSRRLLDAESRHIARHDNSRANDLAQQASGYNVKKGLFLILEEPDTEEDWRIPLIQYLKDPTLKVDRKIRRQAFKYTLLDEDYIAETGCEACQWFGNVQLAPAAVLNPIIKPWPFRGWALDFIGQIYPSSSKGHRFVLVATDYFTKWAEAVPSRNMTHTEANGQAESSNKTLLKLVKKKIEEHPKRWHEVLSEALWAHRISKHGATKVTPFELVYGQEAILPVEVNLGSLRYIKQDDLSSEDYKTLMGDNLDEVVDKRLKALEEIEKEKKRVAKAYNKRVKAKLFQVGDLVWKTILPLGTRSKEFGK

SEQ ID NO: 128589 - protein, 50 aa, Oryza sativa
  Clone ID: PAT_MRT4530_3092C.1.pep
MRPPTTATTVARSHEHKAVRGGLRNHGSDMQMQTAPHHAIRPWFKEKGKM

SEQ ID NO: 128590 - protein, 1806 aa, Oryza sativa
  unsure (1)..(1806): unsure at all Xaa locations
  Clone ID: PAT_MRT4530_30930C.1.pep
MTKPPSKTEVEPSNVILVTLEDFEGEDHKAMEEYINELTREALMRASTRTRQGVIIKPGPRPKLAPDLVSNDEVTQSIQQQVASTIDSSMISFKDKLDATFEGKFDEFLRVKFGPLMADYMSKDKAFTTANQPPIDQTGRKTDGAAHTAGLTGPDGRSYRDLAVGPTGQTAAATSSPQVPPHVPNAYNDVARGYPPDPRQGQHNHIAPQTQPIRPPNPPPNQHGPNNMEDIISEIIRNRFGIETRNRARIYKKPYPDYYDNVPFPRNYRVSEFTKFSGEDGKTTWEHVGQFLAQCGEANSDTFKLRLFSLSLSGNAFTWFTSLPANSIHTWAQLEEKFHDYFYTGETELRLCDLTSVKQKYNEPVIDYIKRFRDVRNRCYSLNITDRDLAGLAFNGLIAPLRERLDGQQFLDVSQLMQMALAQESRVKDNKKLVRTYDKKPNVNVIDYPEASDSEEEGDHDIYVAEWSWTNKNKPFVCSNLMPTPRKDWQSEVKYSFDVAKCDKIFDYLLQEKQIRLPKGHVIPSQEELKRRAYCKWHDSHSHSTNDCNVFRRQVQSAIDEGRLKFTDGSKMKLDHDPFPVNTINFNDKELIRPEQAKSAKEKGVVIGEPRPKMIVPKKPEVDVWKENKSGAKQGGERARNKGKRPRSPPRERFGHSPRRSHSPSYHHPQDMSWGSYPMPPLGYPYPYFMPWGATPPMFNHMPPMQFNQGWGGPRRPIHERLSSPNNSRFYGKNRANEEKREGKRVKVEVRTSEVITIKVGSHDVPIPSGDGVGVSPNKKSEADTSSSQSAGRSDRPTDTGLTDASGRSDXAPNVGLTGASGRSDRWSTSGLTGLQRRFDRRIAKGDVRASSSLSKINRGHYLPPGTEPNPRWMPKDLTATQKRRLQRLRAQEIREKKAEEQRDKRFNELRPPXEKEEQSVDKGESSPEEDMDINMVCMLPMEFCAMDEAEVAQFSLGHKDAVFEKPDESNRHMKPLTTRGHVDGKPVSRMLVDGGAAMNLMPYSLFKKLGREDDELKKTNMILNGFNGEPTEAKGIFSAELTVGNKTLPTAFFIVDVQGNYNVILCRCWIHANCSVPSTLHQCLIQWDGDDVEIVQADTSAEVAMADATFEWCHGNIQYLSGRDLSSYDFISISDGKFVPISKRVQEYRSTKNDIGETVEDFDEVEKLGKGFTLADPLEEVDIGDETKPRPTFVNKNMRADYKVKIIELLKEYVDGFAWEYHEMPGLSRELVEHRLPIKPGFRPYKQPPRRFNPLLYDRVKEEIDRLLKAGDLNKVNPKDEYPMPIADMMINDASGHKVISFLDGNAGYSQIFMAEEDMYKTAFWCPGFVGLFEWVVMTFGLKNAGATYQRAMNLIFHDLLGIILEVYIDDIVVKSDGMEXHIADMRLAFERMRRYGLKMNPLKCAFGVSAGKFLGFMVHERGVEIDPKKIEKIRDFKAPTCKKEVKKLLGNMNYLRRFISNLAAFKYTLLDGDLYRRNIDGVLLKCLDEDQSKVAMGEVHEGFYWPKMIDDCFKYYRGCEACQRFGNGHMFVLVATDYFTKWAEAMPLKNMTHTEVIDFILKHIIHRFGITQTLTTDQGASFMSKEVKSFTESYGIKLLSSSPYYAQANGQVESSNKTLLKSVKKKIEEHPKRWHEVLSEALWAHRISKHDATKVAPFELVYGQEAVLPVEVNLDSLRYIKQDGLSSEDYKTLMEDNLDEVIDKRLKALEEIEKEKKRVAKAYNKRVKAKLFLVGDLVWKTILPLGTRSKEFGMWSLSWEGPYRVCGIVRGNAYFLETLQGERFXRAINGKYLKKYFPSVWQDA

SEQ ID NO: 128591 - protein, 1412 aa, Oryza sativa
  Clone ID: PAT_MRT4530_30931C.1.pep
MEVDEVGGRWTFSRANEGYTSCGPVVEMSWHRAGVLLLGAQSCLPVPGVPAVGGIGSVLLSMARMGWKLCHVFRLYTVVVQSAIDEGRLKFTDGSKMNLDHDPFPVNTINFNDKKVLIRPEQAESTKGKGVIIGEARPKMIVPKKPEVGVWKENRSGASTSKAPRKTKVTFDMLLEKYEKQGGWGGPRRPIHERLFSPNNGRLYGKNRANEEKRERKRIKVEVRTSEVITIKVGSHDVSIPSGDEVGESSRKKSEAGTSSSQSDGLTRPSGRSDRSHTAGLIGPSGRSDRRPDSGPTDTSGWSDRAPNVGLTGASGRSDRWSTSGLTRLQRRFDRRFAKGDVRASSSSNKVNRGHYLPPGTEPDPRWMPKDLTATQKRRLQRLRAQEIREKKAEEQRDKRFNELRPPPVWRHKSIEKEKPVVVEEKEEQSVDKGESSPKEDMNMNMVCMLPMQFCAMDEAEVAQFSLGPKDTVFEKPDESNRHMNPLYLKGHVDGKPISRILVDGGAAVNLMPYSLFKKLGREDDELKKTNMILNGFNGEPTEAKGIFSAELTVGNKTLPTAFFIVDVQGFDEVEKLGQGFTSADPLEEVDIGDGTKPRLTFVNKNMRAEYKVKIIELLKEYVDCFAWEYHEMLGLSRELVKHRLSIKPGFRPYKQPPCRFNPLLYDRVKEEIDRLLKAGFIRPCRYAEWVSSIIPVEKKGSRKIRVCIDFRDLNKATPKDEYPMPIADMMINDASGHKVISFLDGNAGYNQIFMAEEDMYKTAFRCPGFVGLFEWVVMTFGLKNAGATYQRAMNLIFHDSLGIILEIYIYDIVVKSDGMEGHIADLRLAFERMRRYGLKMNPLKYAFGVSAGKFLGYMVHERGVEIDSKKIEKIRDFKAPTCKKEVQKLLGKIVCDFIVDHHVDIAYEKEICLVEVMPWKIYFDGSSCKEGQGIGVILFSPNGMCYEASVRLEYYCTNNQAEYNALLFGLQVIEMVGAKYVEAFGDLELVVQQVAGVYKCLDGSLNRYLDSYLDIIANFDNFAIKHIARRDNSRANDLAQQASGYNVKKGLFLILEEPVLAFKSLCEIGKAGDQGRSDRHCVAGLTGDQGRSDRLHAAGLTGDPERSDRPCVVGLTGSGQSAGGHVSINLEAELIVNSDICAQEAEEDWRIPLIRYLKDPTLKVDRKIRRQAFKYTLLDEDLYRRNIDGVLLKCLDEDQSKVAMGEEKRFVLVATDYFTKWAEAVPLKNMTHTEANGQAESSNKTLLKLVKKKIEEYPKRWHEVLSEALWVHRISKHGATKVTPFELVYGQEAVLPVEMLMGDNLDEVIDKRLKALEEIEKEKKRVAKAYNKRVKEKLFQVGDLVWKTILPLGTRFKEFGKWSPSWEGPYRVCGIVRGNAYFLETLQGERFQRAINGKYLKKYFPSVWQDA

SEQ ID NO: 128592 - protein, 470 aa, Oryza sativa
  Clone ID: PAT_MRT4530_30932C.1.pep
MALQTLNPRHVLPLPLPRRRAPRPRVLHRPPPPRRRLEGAARPRAVAVAVNEARRRWPPAEGGGEEGKETDLATLGNLCVDVVLSVPQLPPAPREEREAYMERLAASPPDQKFWEAGGNCNLAFAAARLGLRCSTLGHVGEEIYGKFLLDVLEEEGISVVGMLDNSDSGACRNAYETLLCWVLVDPFQRHGFCSRADFSDEPAFSWIRKLPAETKTAIHHSKILFCNGYAFDELFPDVISSAIDCAIDAGTAVFFDPGPRGKSLLHGTLDEQRALEHSLRLSDVLLLTSDEAESLTNIRNPIQAGQELLKRGIRTKWVVIKMGSKGSIMVTKSAVSSAPSFKIDVVDTVGCGDSFTAAIAFGFLHNLPAVSTLTLANAVGAATATGCGAGRNVAHLDKVLQLLRESNINEDDTPWSELIEASSFCSEVSVLSKTAVNSFSDRLVHVPTCNVVSNLLSMLEAVSERSTVQA

SEQ ID NO: 128593 - protein, 187 aa, Oryza sativa
  unsure (1)..(187): unsure at all Xaa locations
  Clone ID: PAT_MRT4530_30933C.1.pep
QYLQKKEIFVSALLAIAVCNAFCXLDALIQGYTTYXLQSHLLLLEQVHHPXCGTCIRQQHIIGSTPFWKPDTMQLINNQCMQQQRCQQLKLLWHHSHYQTISXSFRLFVHELQLQQMXGLVYFDQTKSETXALLTLNLPSICGIYPNYYIGTMSIPTGVLVWACTVIEYRFICYKYSHASSCVTVET

SEQ ID NO: 128594 - protein, 70 aa, Oryza sativa
  Clone ID: PAT_MRT4530_30934C.1.pep
MMSPTLFRVFPVCSSFFDFTGRALLLFLFDLISLCLDVRVVCATSICCWVRHICMIYMGAPVISTYRKGL

SEQ ID NO: 128595 - protein, 256 aa, Oryza sativa
  unsure (1)..(256): unsure at all Xaa locations
  Clone ID: PAT_MRT4530_30935C.1.pep
WSLHGKMALVTGXTRGIGRAVVEELAXAGGRPLHTWARNEAELGERLKEWEASGFRVTISVCDLSARDQRERLIGDVADRFGGKLDILVNNVGTNIRKPTTEYSADEYSFLMATNLESAYHLCQLGHPLLKASGSGSIVFISSVAGIVALFSGTIYAMTKGAMNQLTKNLACEWAKDNIRTNCVAPGYILTSLSEGILANKEFEGSVKSRTPLRRVGEPAEISSLVAFLCMPGSTYITGQTIAVDGGMTVNGLYPS

SEQ ID NO: 128596 - protein, 39 aa, Oryza sativa
  Clone ID: PAT_MRT4530_30936C.1.pep
MPKPRTFSSKLVVQYSTKIKIFEPSASSLIEKKKEEFKT

SEQ ID NO: 128597 - protein, 369 aa, Oryza sativa
  Clone ID: PAT_MRT4530_30937C.1.pep
MGKGGKGAEAAAAAVAGAGEEENMAAWLVAKNTLKIMPFKLPPVGPYDVRVRMKAVGICGSDVHYLREMRIAHFVVKEPMVIGHECAGVIEEVGSGVTHLAVGDRVALEPGISCWRCRHCKGGRYNLCEDMKFFATPPVHGSLANQIVHPGDLCFKLPENVSLEEGAMCEPLSVGVHACRRADVGPETGVLIMGAGPIGLVTLLAARAFGAPRVVIVDVDEHRLSVARSLGADAAVRVSARAEDVGEEVERIRAAMGGDIDVSLDCAGFSKTVATALQATRGGGKVCLVGMGHNEMTVPLTSAAIREVDVVGIFRYKDTWPLCIEFLRSGKIDVKPLITHRFGFSQEDVEEAFEVSARGRDAIKVMFNL

SEQ ID NO: 128598 - protein, 104 aa, Oryza sativa
  Clone ID: PAT_MRT4530_30938C.1.pep
PFSGPYDVRVRMKAVGICGSDVHYLRVICCSLTERMKDNVAYICLLFECVQEMRIAHFVVKEPMVIGHECAGVIEEVGSGVTHLAVGDRVALEPGISCWRCRHC

SEQ ID NO: 128599 - protein, 89 aa, Oryza sativa
  Clone ID: PAT_MRT4530_30939C.1.pep
HVRGNIQQVHQQGRCHKTVALTEAVSVVQACVVSNHYCRGCLVSRWAVAYNYITSAGQQIGQTECANSRQQSINALHLFKGSTIEGRRL

SEQ ID NO: 128600 - protein, 217 aa, Oryza sativa
  Clone ID: PAT_MRT4530_3093C.1.pep
ERWTQSKCSKRRRRQAGRGRRWTGGGRGGELVPHGWPQRAEAAAAARGGQRPRRAETAGRAARGTAVAGDGGRGEPRQQATPRVGRRPRRAGAARPTPSGGRRRRRAEAAGYAKRRPGLRRAGAGGCGERRTAGRAARGTATTASGGGGPHRVGDDGGERRPAAAASGGGGLRRAEDGGRGERLLLVQSCSFRAWLSCGDGGDGLCGAHHWPAKWSG

SEQ ID NO: 128601 - protein, 216 aa, Oryza sativa
  Clone ID: PAT_MRT4530_30940C.1.pep
MATTDPLLVGLVLLDSRRRRRGGRCRRNRTGKVARELPKLAGGGRNHPASAMLPLNLCNLTRGADPEPEVIIPLLVSHLAGGNEATAMASFLPRGGGRHERIGRKGGAAKGGRARAGMVRLVGRERKKLAKERLDQITVHKSLGRTYAPAVSTECPPLRVGKVANALDVISEDKLQLLEEHDACPDSNPRFVFFGTEGVMWKRGNDTDGATGRAEC

SEQ ID NO: 128602 - protein, 611 aa, Oryza sativa
  unsure (1)..(611): unsure at all Xaa locations
  Clone ID: PAT_MRT4530_30941C.1.pep
MAEKLPASPSSAGPGSVKEKIPELGLSEIDEANIVPITLDKLTPEQQKDLDTMMQQAWNKFLSSFTETCKGTLVQKYKVKVVADVPGTGSSKDGEVKQALDGAAQPSDKGAADGFQGNQGDGSQGVXGVDSQGIQGDGVQGVQDHVDYAVHHALINQSGILVNTLSNIVKTMVDGSMAEYQAKGPVYLPGEVFPNYRPLITDNQPAVHSIPLNAPSAQPTAPVSAPAPAAPPSAPGQLVNPRLALGSSGTTRSNDVMKEKFGLRPKDAGNLYRXPYPEWFERVPLPNQFKVPDFSKFSGQDSTSTYEHVSRFLAQCGEASAVDALRVRLFRLSLSGSAFTWFXSLPYGSINSWADXEKHFHSYFYSGVHEMKLSDLTAIKQRHDEPVHEYIQRLRXMRNKCYSLSLTDAQLADLAFQGMITPIREKFSSEDFDSLSHLTQKVTLHEQRFTEARKNSRKVNHICPYIYGSDNDDDDDSEIAAAEWVRSKMVIPCQWVKNSGKEERYDFDITKADKIFDLLLREKQIQPSTGHTIPSAEELGKKKYCKWHNSGSHTTNDCKVFRQQIQAAIEGGKIKFDDSKRPXKLMAIIFLSIWCIQLAEQPMGDEQGVSG

SEQ ID NO: 128603 - protein, 107 aa, Oryza sativa
  Clone ID: PAT_MRT4530_30942C.1.pep
GGGFFFFFFGAKATKAGITTQLDRPTSQGGVSEDKTSYNAQGPSIPGPSKKRPAAIPKSRATGSTSGFTSGPPRTQPLEPARLRPENPRALNRLRHHHHQTYACPNL

SEQ ID NO: 128604 - protein, 428 aa, Oryza sativa
  Clone ID: PAT_MRT4530_30943C.1.pep
MPQEHYDTRLLPFPQRSRKPSVDEQFAHFVEVIQKIHINVPLLDAMQVLTYARYLKDILNNKRSLPTTEVVKLTEQCSNVILHKLPEKKNDPGCPTITCLIGAQQFDQALCDLRASVSVMPKDIFDKLNFIVLSATLMRLQLADLSVRYPAGIAEDVPVKIRDFFILVDFVVLDMDTGKETPLILGRPFLSTAGANIDVGTGSIRFHNNEKEEKFEFQPRTEQHSMVRIKYGPNPQNIQVVKVEPPKMDSLESLLEDAGKIKRTGQEARAAGLEEAVSRTKNKKGVEGKAKDARSITSGDGWKICELNSKEWGRLGPPGVRPNPLVQPNRPGTGHLPLLARMRRRLSRLFKGSGSPSSRHDESSTHSSADVSMEDADKPVIGALIAVLSFNRQGKEKQCLMGIRGKDKPLCQRFFNLRESTYTLHLYL

SEQ ID NO: 128605 - protein, 48 aa, Oryza sativa
  Clone ID: PAT_MRT4530_30944C.1.pep
FRCHDINPVTIILRFQKQQNVSSPAAYFKLQDSKDHHYSEFLNRSTNE

SEQ ID NO: 128606 - protein, 72 aa, Oryza sativa
  Clone ID: PAT_MRT4530_30945C.1.pep
VIHGSTQVSVFGYAVNLVEFYFLETYSVCCERYYCQCSVYSGSTFYVVRCSCLPRPTRRVVHLNMHLSLGCA

SEQ ID NO: 128607 - protein, 1477 aa, Oryza sativa
  Clone ID: PAT_MRT4530_30946C.1.pep
MEDMISDIMRNRFGIETRNRARTYKKSYPDYYDNVLFPRNYRVPKFAKYSGEDVAPLRERLDGQQFLDVSQLMQRALAQESRVKDNRKLARPFDKKPNVQSAIDEGRLKFTDGSKMKLDHDHFPVNTINFNDKKVLIRPEQAESTKGKEVVIGEPRSKMIVLKKPEVGVWKENRSGASTSKAPRKTKVTFNMLLEKYEKQGGEKIRNKGKRPRSPPKERFGHSPRRSRSPSYHYPQDMSWGSYPMPPSGYPYPCFMPWGPTPPMFNHMPPMQFNQGRGGPRRPIHERLSSPNNSRFYGKNRANEEKWEGKRVKVEERTSEVITIKVGSHDVPIPSGDGVGVSPNKKSEAGTSSSQSAGRFDRSPHVGLTSASGRSDRWSTAGLAGLQLRFDERAAKGDVRASSSSSKVNKGHYLPPGIEPNPRWMPKDLTATQKRRLQRLRAQEIREKKAEEQRDKRFNELRPPPVWRPKSIEKEKPVDINEKEEQSVDKGESSPKEDMDINMVCMLPMEFCAMDEAEVAQFSFGPKDAVFEKPDESNRHMKPLYLKGHVDGKPVSRMLVDGGAAVNLMPYSLFKKLRREDDELKKTNMILNGLNGEPTEARGIFSAELTVGNKTLPTAFFIVDVQEWVSSIVPVEKKGSDKIRVCIDFRDLNKATPKDEYPMPIADMMINDASGHKVISFLDGNTGYNQIFMAEEDMYKTAFRCPGFVGLFEWVVMTFGLKNAGATYQRAMNLIFHDLLGIVLEIYIDDIVVKSDGMEGHVANLRLAIERMRRYGLKMNPLKCAFGVSAGKFLGFMVHERGVEIDPKKIEKIHDFKAPTCKKEVQKLLGKVNYLRRFISNLAGKIDAFVPILRLKKEADFTWGAKQQEAFEELKRYLSTPPVVRAPKAGKPFRLYIASEDKVIGAILTQEEDGKEYIITYLSRRLLDAETRPILSGRIGKWAYALIEYDLAYEPLKSMKGQIVCDFIVDHHIDIAYEGEVCLIEVIPWKIYFDGSSCKEGQGIGVVLFSPNGMCYEASVRLKYYCTNNQAEYNALLFGLQVMEMVGAKYVEAFGDSELVVQQLAGVYKCLDGSLNRYLDSCLDIIVNFDNFAITHIAWRDNSRANGLAQQASGYNVKKGLFFILEESVLDFKSLCEIGKTGDQGRSDRPHAAGLTGDPERSDWPCVVGLTGFGQSAGGHVSINLEAELIVNSDICAQVTEEDWRIPLIQYLKDPTLKVDRKIRRQSFKYTLLDGVLLKCLDEDQSKVAMGEGHKFVLVATDYFTKWAEAVPLKNMTHTEANGQAESSNKTLLKLVKKKIEEHPKRWHEVLSEALWAHRISKHGATKVTPFELVYGKEAVLSVEVNLGSLRYIKQDDLSSEDYKTLMGDNLDEVIDKRLRALEEIEKEKKRVAKAYNKRVKGKLFQVGDLVWKTIFPLGTRSKEFGKWSPSWEGPYRVCGIVRGNAYFLETLQGERFQRAINGKYLKQYFPSVWQDA

SEQ ID NO: 128608 - protein, 196 aa, Oryza sativa
  Clone ID: PAT_MRT4530_30947C.1.pep
MSEEDTNAAAGQPRRAPKLNERILSSLSRRSVAAHPWHDLEIGPGAPAVFNVVVEITKGSKVKYELDKKTGLIKVDRVLYSSVVYPHNYGFIPRTLCEDNDPMDVLVLMQEPVIPGSFLRARAIGLMPMIDQGEKDDKIIAVCADDPEYRHYNDINKKNENKEVAVDAFLPANTARDAIQYSMDLYAQYILQSLRQ

SEQ ID NO: 128609 - protein, 273 aa, Oryza sativa
  Clone ID: PAT_MRT4530_30948C.1.pep
MAAAAAAAPNGNSNGNHHGLQGDVSVTYLYIECCYGTAVGTGTARYQNPGRWIWPDPTASRVWYRAVPILSLCSTTRRTEVEGQKRNFVCNNRIGRDGRAARTLEVLRFSIDRRRRCLLDRRRRLLEDDIDATAAGKDDIDATATGNDEFATAAACFNAAVAGKDEFDAAAAIRVLDETIRRLEQLFRFTQADNPGPAVLLRIIGRINRANTRRSTLFAQLHTYIRRRRRRHHQQQAPPSPPAGGNIASNGNGAAINNGNSNNAAAGAPPADA

SEQ ID NO: 128610 - protein, 1245 aa, Oryza sativa
  unsure (1)..(1245): unsure at all Xaa locations
  Clone ID: PAT_MRT4530_30949C.1.pep
MTKPSSKTEVEPSHVIPVTLDDFEGEDRKAMEEYINELTREALMRATTRTRQGVIIKPGPRPKLAPDVVSNDEVSQSINQQIASTIDSSMANFKDRLDVMFKEKVDGFLRSRLGSFMDDYTLKDKAYTTADQPPIDLMGSKTDGAAFVTSPTGPNGRSDRDTAVGQTGQMAGQTGYYPVGPTGQMAGQTGTFDSPVSTATTSPQIPPHIPNIYNDVSRGYPPDTRPGQYNHIAPQNQPIRPPNPPPNPQGPNNMENMISDIMRTKFGIETRNRARAYKKPYPDYYDNVPFPRNYRVPEFTKFSGEDGKTTWEHVGQFLAQCGEANSDTFKLRLFSLSLSGNAFTWFTSLPANSIHTWAQLEEQFHDYFYTGETELRLCDLTSVKQKYNESVVDYIKRFRDVRNRCYTLDITDRDLAGLAFNGLVAPLREKLDGQQFLDVSQLMQRALAQESRVKDNKKIARPFDKKPNVNVVDYSDASDSEEEGDHDIYVAEWSWTNKNKPFVCSNLMPTHRKDRQSEVQSAIDEGRLKFTDGSKMKLDHDPFPVNTINFNDKKVLIRPEQAESTKGKEVVIGEPRLKMMVPKKPEVGVWKENKGEASTSKAHRKTKVTFDMLLEKYEKQGGERDHNKGKRPRSPPRERFGHSPRRSRSPPYFHPQDMSWGSYPMPPPSYPYPYFMPWGAMPPMYNHMPPMQFNKGWGGPRRPIHERLSSPNKSRFYDGVGKFPSEKSEAGTSSSQSAGLTRPSGQSDRGHVAGLTGPSGRSDRRSDDGLTDASGRSDRTPHVGLTGASGRSDRWSTAGLTGLQRRFDERAAKGDVRASSSPNKVNRGHYLPPGTEPNPRWMPKDLTATQKRRLQRLRAQELREKKAEEQRDKRFNELRPPPVWRPKSIEKAKPIDVEEKEGQSVDEGKSSPKEDMDINMVCMLPMEFCAMDEAEVAQFSLGPKDAVFEEPDESNRHMKPLYLKGHVDGKPVSRMLVDGGAAVNLMLYSLFKKLEREDDELKKTNMILNGFNSEPTEARGIFLAELTVGNMTLPTAFFIVDVQEASLEWLQKRVQEYRSTKNDIGETVEDFDEVEKLGQGFTSADPLEEVDIGDGTKPRPTFINKNMKADYKVKIIELLKEYVDCFAWEYHEMPGLSRELVEHRLPIKPGFRPYKQPPCRFNPLLYDRVKEEIDRXLLKAGFIRPCRYAEWVSSIVPVEKKGSDGNAGYNQIFMAEEDMYKTAFRCPGFVGLFEWVVMTFGLKNA

SEQ ID NO: 128611 - protein, 94 aa, Oryza sativa
  Clone ID: PAT_MRT4530_3094C.1.pep
MEEDRMIYAEDLGYMSTPCLSPPSDVNDLNPPEDPNNISVLHPAFIDDDSSKRCSVTGNPHAYHGLYPCLFPVACLSFPYPFLKFVGFFGQVSA

SEQ ID NO: 128612 - protein, 482 aa, Oryza sativa
  Clone ID: PAT_MRT4530_30950C.1.pep
MSEEDTNAAAGQPRRAPKLNERILSSLSRRSVAAHPWHDLEIGPGAPAVFNVVVEITKGSKVKYELDKKTGLIKVDRVLYSSVVYPHNYGFIPRTLCEDNDPMDVLVLMQEPVIPGSFLRARAIGLMPMIDQGEKDDKIIAVCADDPEYRHYNDISELSPHRLQEIKRFFEDYKKNENKEVAVDAFLPANTARDAIQYSIAETAYEVFMVLVNMYNQICKSGCSNKTSATLRLRREGGYVELGKPEGLRQRTLATTWRTEVEGQKRNFTCNNRIGRDGRASRTLEALGFSIDRRRRRRRRERGHRRRHRRREQRVCCWRRLLQRRRRYRRGKDDIDAAAAGKDDIDAAATGNDEFATAAACFNAAVAGKDEFDAAAAACFNIRVLDETIRRLEQLFRFTQANNPGPAVLLRIIGRINRANARRSTLFAQLHTYIRRRRRRHHQQQAPPSPPAGGNIASNGNGAAINNGNSNNAAAGAPPADA

SEQ ID NO: 128613 - protein, 153 aa, Oryza sativa
  Clone ID: PAT_MRT4530_30951C.1.pep
MAMCDIENGNNGRWPLLPPVKKMKTRREACSVPPSPWMPAAAPWMPEDKLTAAKSGNRIHRRIVSRPQSPVDTAHATIVPIHAPQRHRIRRSSLTRVLLILELPPLLLSPSHHWNCLATTTHPLIAIAIPPLCTRNHKSSLIHKMWRGTGKSG

SEQ ID NO: 128614 - protein, 60 aa, Oryza sativa
  Clone ID: PAT_MRT4530_30952C.1.pep
HVTGLFLLHDGDSHQLILYCLNLSHLYWKHAFSARNLHSLTTNLAAAVVAVVMEAMCMRR

SEQ ID NO: 128615 - protein, 239 aa, Oryza sativa
  Clone ID: PAT_MRT4530_30953C.1.pep
MGQANFALQVISGNPGALRDMLRSASGSCPPANYRNSVVLEDGDAVLQSRLAELGASTPTCVYFGQAPRGQQTSLLLGRLGLARGSVAARHITEAFTDGERNLVIGDGGDGRHGMEVPVFDAEGRRYGLTCGYSDYAMCYRLFGAAREFGRFRANNREVRDVAVGKDKLMKVFTFRSPALRPVEVDLDDGHPDGALGMIVLFYDLDAKEAVKNELLDTDTLTVNQIMKHYPKLAQMMLN

SEQ ID NO: 128616 - protein, 2512 aa, Oryza sativa
  unsure (1)..(2512): unsure at all Xaa locations
  Clone ID: PAT_MRT4530_30954C.1.pep
KQGGERARNKGKRPRSPPRERFGHSPRRSHSPSYHHPQDMSWGSYPIPPLGYPYPYFMPWGATPPMFNHMPPMQFNQGWGGPRRPIHERLSSQNNSRFYGKNRANEEKREGKRVKVEVRTSEVITIKVGSHDVPIPSGDGVGVSPNKKSEAGRSDRPTDTGLTDASGRSDXAPNVGLTGASGRSDRWSTSGLTGLQRRFDRRIAKGDVRASSSLSKINRGHYLPPGTEPNPRWMPKDLTATQKRRLQRLRAQEIREKKAEEQRDKRFNELRPPQEKEEQSVDKGESSPEEDMDINMVCMLPMEFCAMDEAEVAQFSLGHKDAVFEKPDESNRHMKPLYLKGHVDGKPVSRMLVDGDAAVNLMPYSLFKMLGREDDELKKTNMILNGFNGEPTEAKGIFSAELTVGNKTLPTAFFIVNVQEANLEWLQKRVQEYRSTKNDIGETVEDFDEVEKLGKGFTLADPLEEVDIGDETKPRPTFVNKNMRADYKVKIIELLKEYVDGFAWEYHEMPGLSRELVEHRLPIKPGFRPYKQPPRRFNPLLYDRVKEEIDRLLKAGFIRPCRYAEWVSSIVPVEKKGSGKIRVCIDFRDLNKVNPKDEYPMPIADMMINDASGHKVISFLDGNAGYSQIFMAEEDMYKTAFWCPGFVGLFEWVVMTFGLKNAGATYQRAMNLIFHDLLGIILEVYIDDIVVKSDAFERMRRYGLKMNPLKCAFGVSAGKFLGFMVHERGVEIDPKKIEKIRDFKAPTCKKEVKKLLGNMNYLRRFISNLAGKIDAFVPILCLKKEADFTWGAKQQEAFEELKRYLSTPPVVRAPKAGKPFRLYIASEDKVIGAVLAQEEDGKEYIITYLSRPLLXPKRVDHHIDIXYEGEVCLVKVIPWKIYFDRSSCKEGQGIGVVLFSPNGMCDEASVHLEYYCTNNQAEYNAILFGLQVMEMVGAKYVEAFGDSELVVQQVAGVYKCLDGSLNRYLDSCLDIIANFDNFAIRHIARHDNSRANDLSQQASGYNVKKGLFLILEEPVLDFKSLCEIGKTGDQGRSDRHCTAGLTGEQGRSDRPHAAGLTGDPERSDRPCVASLTGSGQSAGGHASINLEAELSVNSDICAKGTEEDWRIPLIRYLKDPTLKVDRKIRRQAFKYTLLDGDLYRRNIDGVLLKCLDEDQSKVAMGEGHMFVLVATDYFTKWAEAMPLKNMTHTELVYGQEAVLPVEVNLDSLRYIKQDGLSSEDYKTLMEDNLDEVIDKRLKALEEIEKEKKRVAKAYNKRVKAKLFLVGDLVWKTILPLGTRSKEFGGVLLSPRRYFTDCDDYSYTDDDDDYDDFVVSTPTPTTTTTSTTSSVNNGEGSSRRSWWPPQRQHLYVVLDDWSRGFSVHKMDLDGNEADADDQLVTVAATDYLPARTYRRLPAPAVRFEYVHSRLKMMGSSAQFAALGSNIVAKGYPFSDKDGLAVVYDTKTAAQAFVHRLPEALERWDAAGNKLYAFTPSDRSVDWDPRIDAGMHRLEEDPLATERWSWSHDPSPVPFDNDHAHRRITSHAVRPGGSAIFVSIENWSVPRPGHGDDHVAAQAAEAEAKKMAGTFSYDTERGEWTRHGDWLLPFRGEAHYDGELDAWVGLHCDSHRHGKLCSCDIVAAGSHEEEPNWKLCEMVVMTSTVEDDATLVPMGGGGKFCLVEGRSHCRWWDASLTGGDGFTVVGGGGICAGGSAANAEMDSERDAWFGGSDLGSPFSLHLPLHCRMDPNSACRVVVRVVAYVEYMDNGSQDYHVSSPHKWVVDKDTISLIDLMKDLDDEIIRGSAQELRVTFWDKRVGRDVEICSDAVLLEAFNQYWDVRKLPLQVTQVRLTMFLPEMLPQKRFPPKKNSKSRDKATDQSMPNPDPWGEFDEVEYVGVSDERENYNELVSDDEANDPNYTPEESDGDEENDDPVDDLEVNDNRGCEPLIHITDRCMRQYAVLKEVELAVPYSEATRYRAYCKAKKCKWRIHASRLPDGRTWQIKNMPYEHRCASTGKLENNCMASNSWVKDRVINKLREDPTIGAAALKKTLEEKYLITLSYYVVWDGRQMALDEILGGWEQSFEVVYSFKAEIEKRSPGSIVEIEYDVINEKHRFSRMFIALKPCINGFLNGCRPYLGIDSTVLTGKWRGQLASAIGIDGHNWMFPVPYAVFGSETKKNWEWFMVCLNKAIGSPEVLVLSTDAGKGIDAAVTRVFNNGVEHRECMRHLYKNFQKRFHGEVKSVVQKRDLTTWRHTVDLTKQECSCNEWQLTGLPCRHAISFIGSLREVELEDYVSPYYSVAMFRVAYSTVVPPMPDKSLWEKVDTGFKMWPPILKRSAGRPRTRRFIGVEEGGSGKKRRRCKGCHGFGHLQKTCNEPVYDPDAPPPAPPKPKRVRKKKSKPKQVPTGGNNTMPPPAAADSADQATSTAAPAADQAHADVADQGPAGVGAAADQAHAAAADQAPVGGAACGDQAPTGAGDQAPAQVAMQVDDIPGLVTRSKSVASPEHASPFKANKRKAVVTRTAKKL

SEQ ID NO: 128617 - protein, 1987 aa, Oryza sativa
  Clone ID: PAT_MRT4530_30955C.1.pep
MWTPRQWLKGEEEVAPGWLGSASKPTGDQGDRRRRASAGNGKRRRGRRWRTAHRPAAAAEGDGERRERQRVRDRGKDGGEELLTVSTAAGAKDEDGGDDRRCGGTDGRRRHPRRRWGGVRRGDDDHGGLNCRPEMEGREKLTGSRGERRSGGILATRGGGQESSCGGEANGGGAAIVLVNLSKKLRTRFFATPLGKRSVHHQLDFDFAMTKPPSKTEVEPSNVIPVTLDDFEGKDRQAMEEYINELTREALMRASTRTRQGVIIKPGPRPKLTPDVVSNDEVSQSIQQQIASTIDSSMVAFKDRLDVMFKGKFDEFLRMKFDSLMDDYTLKDKASTTANQPPIDQTGSKTDGTAFTAGQTGYYPGGQTGSQAGPTAHLDTGQTGPWAGQTGAIVPIQGIDPMTNASYLYHFRTFNPPVSIATSSPQVPPHVPNAYNDVSRGYPPDTRQGQYNHIAPQTQPIRPPNPPPNQHGPNNMEDIISDIIKNRFGIETRNRARTYKKPYPDYYDNVPFPRNYRVPEFAKFSGEDGKTTWEHVGQFLAQCGEANSDTFKLRLFSLSLSGNAFTWFTSLPANSIHTWVQLEEQFHDYFYTGETELRLCDLTSVKQKYNEFVIDYIKRFRDVRNRCYTLNIADRDLAGLAFNGLVAPLRERLDGQQFLDVSQLMQRALAQESRVKDNRKLARPFDKKPNVNVVDYPEASDSEEEGDHDIYVAEWSWTNKNKPFVCSNLMPTPCKDRQSEVQSAIDEGRLKFIDGSKMKLDHDPFPVNAINFNDKKGNRSGASTSKAPRKTKVTFDMLLEKYEKQGGDKIRNKGKRPRSPPMERFGHSPRRSHSPSYHYPQDMSWGSYPMPLPGYPYPYFMPWGATPPMFNHMPPMQFNQGWGGPRRPILERLSSPNGSRFYGKNWANEEKREGKRVKVEERTSEVNTIKVGSYDVPIPIGDGVEVSPNKKSEAGRSDRRPYSSLTDASGRSDRAPDVGLTGASGWSDWWSTAGLTGLQRRFDRRIAKGNVEASSSSNKVNRGHYLPPGTEPNPRWMPKDLTATQKRRLQRLRAQELREKRAKEQRDKMFNELRPPPFCAMDEAEVAQFSLGPKDAVFEKPDESNRYMKPLYLKGHVDGKPVSRMLVDGDAAVNLMPYSLFKMLGREDDELKKTNMILNGFNGEPTEAKGIFSAELTVGNKTLPTAFFIVNVQEANLEWLQKRVQEYRSTKNDIGETVEDFDEVKKLGKGFTSADPLEEVDIGDETKPRPTFVNKNMKADYKVKIIELLKEYVDCFAWEYHEMPGLSRIILEICIDDIVVQSDGMEGHIADLRLAFERMRRYGLKMNPLKCAFGVSAGKFLGFMVHERGVEIDPKKIEKSRDFKAPTCKKEVQKLLVMEMVGAKYVEAFGDSELVVQQVAGVYKCLDGSLNRYLDSCLDIIANFDNFAIRHIARRDNSRANDLAQQASGYNVKKGLFLILEKPVLDFKSLCEIGKTGDQGRSDRHCTAGLTGDQGQSDRPHAAGLTGDPEWSDRPCVAGLTGSRQNAGGHASINLEAELSVNSDICAQGTEEDWRIPLIRYLKDPTLKVDRKIRRQAFKYTLLDGDLYRQNIDGVLWKCLDENQSKVAMGEGHRLVLVATDYFTKWAEAVPLKNMTHTEANGQAESSNKTLLKLVKKKIEEYPKRWHEVLSEALWAHRISKHGATKVTPFELVYGQEAVLPVEVNLGPLRYIKQDDLSSEDYKMLMGDNLDEVIDKRLKALEEIEKEKKRVAKAYNKRVKAKLFQVGDLVWKTILPLGTRSKEFGMWSPSWEGPYRVNTSRAFGKTLRRYYGRLPVEGRSDWRCVAGLTGKSESDSVSSEGKTNPYIRDMAGSLALASCDLAPPSSPSLQPCAAAVPVVAVARGDRHRGRQVAAVLVRPFAVAVDRRSTVAAVDPIFSAASISPPVPSVAFPPLLWSPVSSPRRPLPVGALRSCRSAVIRRRACATRAAAGGDVTADVIGTVRREPP

SEQ ID NO: 128618 - protein, 432 aa, Oryza sativa
  Clone ID: PAT_MRT4530_30956C.1.pep
MLGDQRRKFLLESASSSSEEVVSRSRNLAVESSAVAVTAAGVRKGEEVEEEELLNRRSKKNKVASDSGNSGTGVWDSEMQDADQNGEANTSELIGAIGRELAITCLLHTPRSYYGMIACLNRSFCSLMRSGQLYRLRREARIVEHMIYCSCNVLEWDGFDPCRQRWFNIPSMPPIECFTLADKESLAVGTNILVFGKKVEAHVVLRYSLLSNSWTTGDMMNSPRCLFGSASFGEKAIVAGGIGDNGTLSSAELYDSEAKTWTTLPSMNRARKMCSGFFMDGKFYVIGGKADNHNEILNCGEEFDLEKGTWRLIPDMASGLNGGSGAPPLVAVVNNELYAADYAEKEVRRYDKVNNAWITLGSLPEKYTSVNGWGLAFRGCGDKLIVIGGMSAPGGGVIEICSWIPNNGQPDWKIIGSRRSGSFVYNCAVMGC

SEQ ID NO: 128619 - protein, 63 aa, Oryza sativa
  Clone ID: PAT_MRT4530_30957C.1.pep
NVSKSREPRGGGQSHLLSLSPACFSLFVEETSLARPKFSNGRFDIIFFYSKTVIPSATCGSPL

SEQ ID NO: 128620 - protein, 158 aa, Oryza sativa
  Clone ID: PAT_MRT4530_30958C.1.pep
MQFLRGGGGGSGGGGAGGMAWEVLKRHFSRKRAVDVRRINPKVPKEEAVAISGRLLQIFTDHGPLTVGNTWNHAKDAGISGLNSKTHMKILLKWMTGRRIVKLNCVGTGNSKKFLYSPYSADADKSEEAAAEELSKAAASQGGKATKGQQKKRATALH

SEQ ID NO: 128621 - protein, 62 aa, Oryza sativa
  Clone ID: PAT_MRT4530_30959C.1.pep
MAGGGRRQLGTAADKDEHGWEQATYGRGRWRLLTRRHSHRRGNDWEWRHPRPLPCAADKEEE

SEQ ID NO: 128622 - protein, 57 aa, Oryza sativa
  Clone ID: PAT_MRT4530_3095C.1.pep
MSTGFLPFFTIAATPSSRCHSQSSSVTSSFPSNRTSTWRNNSFVVLQSSGSNMERPS

SEQ ID NO: 128623 - protein, 81 aa, Oryza sativa
  Clone ID: PAT_MRT4530_30960C.1.pep
MGGGGHGGGTTYKGYTIPHNKRWHTVAGKGLCAVMWFWVFYRAKQDGAVLLGMRHPWDGHDDHSHGHGHEHEGSSSTSSSH

SEQ ID NO: 128624 - protein, 92 aa, Oryza sativa
  Clone ID: PAT_MRT4530_30961C.1.pep
LFSFFFLGFGFFFFFFFFFFFLGFKTIQYSILGLNTIPGLATQQRFDGPPPWGKPAKPRTGRGGKSRPGGGQPGTMTGAAPRTGPPWADPTR

SEQ ID NO: 128625 - protein, 47 aa, Oryza sativa
  unsure (1)..(47): unsure at all Xaa locations
  Clone ID: PAT_MRT4530_30962C.1.pep
DIPHLVLNEXIMETGGSVYXCPYWGSIYMPAYLFXHTVDKLSEKKKK

SEQ ID NO: 128626 - protein, 105 aa, Oryza sativa
  Clone ID: PAT_MRT4530_30963C.1.pep
KKKKKNSRLVLSLIKTKRTIQFVDWCPTGFKCGINYQPPSVVPSGDLAKVQRAVCMISNSTSVVEVFSRIDHKFDLMYSKRAFVHWYVGEGMEEGEFSEAREDLA

SEQ ID NO: 128627 - protein, 48 aa, Oryza sativa
  unsure (1)..(48): unsure at all Xaa locations
  Clone ID: PAT_MRT4530_30964C.1.pep
MVKKSRNAQTVCTXKKKKKKKKKKKKKKKKKKKKKKKKKKKKKKKGRP

SEQ ID NO: 128628 - protein, 101 aa, Oryza sativa
  Clone ID: PAT_MRT4530_30965C.1.pep
SNNNNFLGRGDNFLQKHQNPKKSTKRGPLPWENKEGKGGDQAQEFPPPKIFYVFRRGNQPGKPKLHIFRKSLVQKLEPKHVPGLSGRPTFVHNLGDFGGGP

SEQ ID NO: 128629 - protein, 197 aa, Oryza sativa
  unsure (1)..(197): unsure at all Xaa locations
  Clone ID: PAT_MRT4530_30966C.1.pep
SFKTGTKDIFKICIYKCKCNKXNETRDKEYFTEVRKLAGFLIPVEASPTPPLNHEATARLLRQGVGKAAAGPRRGLPKPRSLGVVLPLLRRPCYFATARKLVVIGNNLNLSLGAGQTGVXWPVRPARARSDRYRLGLIDYGSSGSGFPPKEHPTWPLPKYPRPVRLGYTHRSDRPTYAGQTAFRGPVRPALPGPTLS

SEQ ID NO: 128630 - protein, 173 aa, Oryza sativa
  Clone ID: PAT_MRT4530_30967C.1.pep
HYGIWIILFEEIKQDKGQSIASARFPMSLYCNKKKQLISPNNPFMNYEMMRIRERFGVFLPRENYALPRRKNPLSKSSVPLVVADHVVLVPGRPDDDEHLGGGLADALRRQLPPLLHQQPPLPREVGAAARRRTRGSHRESRRGAAAGGAPREAERTVIRSQFHTNTSRKHKV

SEQ ID NO: 128631 - protein, 362 aa, Oryza sativa
  Clone ID: PAT_MRT4530_30968C.1.pep
MKGKGWFGLWENNTELQAHDYAECFQEQMALVYDPAANEYRNLPGVDTRVPNFGSVRSFGSKDSACREWCLASLIGALEEMGYRDGDNMYGVPYDIRYAPPIPGQASQVYSRHFREFMELVETASEKQHHNKKAIILGHSLGGMVALEFVRNTPSAWRDKYIEHLFLVAPTLSTGFVPTVRNLVSGPKDLLHVANTTALSLRPMWRSFETSIVNVPSPGVFGHEPIVVTKRRNYSAYDLEDLLAAIGFSDGIEPFRRRTIARMNYIEAPMVPLTCINAVGKRTPRQFVYWDGNFDDEPTEIVYGDGDDSINLVSMLAFDEEMRRQPGQKGRFKSIKLNNASHGSILTDEWALRRVMQEIFLK

SEQ ID NO: 128632 - protein, 111 aa, Oryza sativa
  Clone ID: PAT_MRT4530_30969C.1.pep
MLDGEERMRVAGDGATWRCSLFYALADGGCLASYVVLLPNKAPHWLPAVGMVDGNTIASPLPGSILARLDPTTPSNQGWRSLIGLNTFSLNDDAITWHSSAASSMGDVFAS

SEQ ID NO: 128633 - protein, 340 aa, Oryza sativa
  Clone ID: PAT_MRT4530_3096C.1.pep
MGSSQESTFSSASTAAQVNACALDLLPVYAKELIAGGAAGAFAKTAVAPLERVKILLQTRTHGFQSLGILQSLRKLWQYEGIRGFYKGNGASVLRIVPYAALHYMTYEQYRCWILNNFAPSVGTGPVVDLLAGSAAGGTAVLCTYPLDLARTKLAYQVSNVGQPGNALGNAGRQPAYGGIKDVFKTVYKEGGARALYRGVGPTLIGILPYAGLKFYIYEDLKSRVPEDYKRSVVLKLSCGALAGLFGQTLTYPLDVVRRQMQVQNKQPHNANDAFRIRGTFQGLALIIRCQGWRQLFAGLSLNYVKVVPSVAIGFTTYDMMKNLLRVPPRERLYQSSGNA

SEQ ID NO: 128634 - protein, 187 aa, Oryza sativa
  unsure (1)..(187): unsure at all Xaa locations
  Clone ID: PAT_MRT4530_30970C.1.pep
CPRHHVALPPGGIGPESLIIAGVSLSALVKXGAQKSSSLKCPRISPAAPSRTKKXRGSHGSLVEEFTFRHLVRQVGGVFVIFEVLSSAGVMIVAPPMRGKAXPPQENRATPGRGLGPXHPHWKRXNGQTFVASLRNVRWPPKFGPNLTEKYDGGVNPSESLQICTTIIEAPGGWGGVKTPLPLLQQS

SEQ ID NO: 128635 - protein, 341 aa, Oryza sativa
  Clone ID: PAT_MRT4530_30971C.1.pep
MEGSRGDKGKVVVVMGATATGKSKLAIDLALRFGGEVINSDKIQVHDGLDVVTNKVTDEERAGVPHHLIGGVPPDADYGVDDFRRDAARAVASVLARGRVPVIAGGSNRYLEALLDGEGGSFRERHELCFLWVDSRAPALHRYVRHRVDRMVEQGLVGEVRGLFRLDDADYSRGIRRSIGVPEMDAYLRQEATGALLTHGDKYKVALLASAVGEIKANTWSLARRQLRKIHRLRGLPGWSLRRLDVTRVLELKVEARSEAECAAAWEADVIAPAAREVGMFLHGGGNVVESGREEQPVVVEKMEVAAVGGAGAAAAAEKWCGRRLLETTAAYHGMEAAAAV

SEQ ID NO: 128636 - protein, 60 aa, Oryza sativa
  unsure (1)..(60): unsure at all Xaa locations
  Clone ID: PAT_MRT4530_30972C.1.pep
RGRRWPIEKETPESEPTTTFLRXDGYGAGSRSMRERIVAVIRRXQGEVCAELDEAYGSGP

SEQ ID NO: 128637 - protein, 102 aa, Oryza sativa
  unsure (1)..(102): unsure at all Xaa locations
  Clone ID: PAT_MRT4530_30973C.1.pep
MPLSSPCRSLSVLMLQHNPVLGDIPSGFLLGRPXELFPCARTAGELLPRADGRQAPPPRAAGRRCPGALPPPLRARAGPLPHARGAASRRARPPCAVVAALL

SEQ ID NO: 128638 - protein, 121 aa, Oryza sativa
  Clone ID: PAT_MRT4530_30974C.1.pep
FFLPPPPALQVGLLLKSKAEGFLSNWHSVAILGAPIGICRICVFLHPACSYTTCPNGSRGIPSMSRSLPSQACIERRLTGINFWSLCHLSVSPVLYPVVPPKCKNDKPIISSKVDNSIEKS

SEQ ID NO: 128639 - protein, 79 aa, Oryza sativa
  Clone ID: PAT_MRT4530_30975C.1.pep
FAEASNIIDVEDARHIVQNDKLLGDRVDEIVKEWDAQKEAFYEKTGVRRDELAVVEHDEPGVLPHENDEFDEIRQLLLE

SEQ ID NO: 128640 - protein, 48 aa, Oryza sativa
  Clone ID: PAT_MRT4530_30976C.1.pep
IRRCQLPVSMSMPLQYHVNFDCYTTVHSMVDYTSMPMQAKRNIDCNGF

SEQ ID NO: 128641 - protein, 70 aa, Oryza sativa
  Clone ID: PAT_MRT4530_30977C.1.pep
KSNIASGQKGSSQAGRMSACKPTTVTIADLHRRGGRPPAKIIFAGERWLVRSAYENRNRPPAKKKNSAYE

SEQ ID NO: 128642 - protein, 179 aa, Oryza sativa
  unsure (1)..(179): unsure at all Xaa locations
  Clone ID: PAT_MRT4530_30978C.1.pep
GIGDPRADRLLTSPATHSSRRAALARITAFAATGLARAPXPRRRISXSSSAXGNNGGAGEMAQTLAASAKTFSGRWRCLGLLSEGTKQPRRRDIXGLTPCKESKRSEAGEESIKKLQTVLKKYAPXDSAPALAINATIQKTKRRFQNYRKDRPDCCDERLPHLIDKGDQRHWGEFITPG

SEQ ID NO: 128643 - protein, 180 aa, Oryza sativa
  Clone ID: PAT_MRT4530_30979C.1.pep
MKAARDEGTGGKHHGREVAMATRGRIPHAALAISHRGKSCVRARGRRGRIPPAPLTAGHESCLVSAVPLSGTLFLRSGARELPLAASNGGGAQRWAVEIALLVPRPPAPSPAMGPRGWGSHAATGRGGEESRAAMVLDSPELGQRRSGSWLGQVWRTSTTGSEWQRTRCRRGRQSGRDAE

SEQ ID NO: 128644 - protein, 89 aa, Oryza sativa
  Clone ID: PAT_MRT4530_3097C.1.pep
VCLRNHIRHKDLIYLNFLNSVHSKKALQISYQHVHSNKSNVKAAYTYIKIEHMHLNKYCSTVYIILDTLLNKRVVQIYRYSIHYPIIHL

SEQ ID NO: 128645 - protein, 117 aa, Oryza sativa
  Clone ID: PAT_MRT4530_30980C.1.pep
MECRGSRGCGSSMNIKSKSKVGIDQSKGENSPNSELALTLTTLKVKQEDDILSGVLVPGAIFENGSTRDRESHPKVLSGTSWRRGEVENFPKCCPEVPGTFTRNLLAGFQFKLVSNV

SEQ ID NO: 128646 - protein, 186 aa, Oryza sativa
  Clone ID: PAT_MRT4530_30981C.1.pep
MATDAAAASRQTPPPALPNTGELQALPCAQTPGEPLPHARMAGEPLPSSWTAGEPISRATSPARGRPASHSPARGRPVSSSPVRYRCRRRHDASAHLPLPRAFFYWAASSSPSSSIPHSLRAYYLLVHLLSRAALVRRRSPPPLHTVVFPRRERPGRRERQGREGQEEGRRGRMTGGSHICHVSAT

SEQ ID NO: 128647 - protein, 402 aa, Oryza sativa
  Clone ID: PAT_MRT4530_30982C.1.pep
MECRGSRGCGSSMNIKSKSKVGIDQGKGAVFENDSTRDRESHPEVLSGTSWRRAIHNCPEVPWKKERKLSKNEDLAHKFFKSTKEGHFASSCPCKIDDEATLPRKTSRINKRKCYGCNEKGHEIGFCPHKKDDHCNQSSKRQTDDGVERRWGAAANEGGAGEEVDEEVVGAEGVGDRRRRRRGGGPVEEGERIPSNELRGGGGVAVLGKGEEDDVDLVGSGEGGGERLPCRSRMVREVMGDALRRRGGGDNDSARGRNSPAVRARGSGSPAVRAQGRCSPAVGAWGRRSLAVRAWGGARQPVPLARGMGLELAVGRDRRWGRLSGSSAASVAMGNSDHDTTSKAGLHEQTTGCFPSTRPLPLPSSVPTATAATPHRRSGRGEEKRWGREGRREEEEGKPGRS

SEQ ID NO: 128648 - protein, 46 aa, Oryza sativa
  Clone ID: PAT_MRT4530_30983C.1.pep
PPLSSQQLSPREATVAPLLHGCSSRKIKSQRPLDESNFCLGVSLLD

SEQ ID NO: 128649 - protein, 59 aa, Oryza sativa
  Clone ID: PAT_MRT4530_30984C.1.pep
DHSMFFAYFMNNCKRIQEAALIDGPSLVLLFVKFSKKFKNQAKYHCMVLSNVHVRNKRF

SEQ ID NO: 128650 - protein, 237 aa, Oryza sativa
  Clone ID: PAT_MRT4530_30985C.1.pep
MASSGKEHRRGVPRPPPLSLYIEREQGEVIMAGQALATTRMLQQVATSSSGKKRILSKQLSMKETTREVKWEKRRRQIHRQRSSMALQDVEEEASANMFAATTDSEMGSSTERVPKRLTDGDLDELRGSMELGFGFDEENGGQNLCDTLPALDLYFAVNRQLSEPKMRLSTSSLPSPTSATSSSSTLGGTSNPGSPVAPSSFMDSWKICSPGDNPQLVKTRLRHWAQVVACSVKHSS

SEQ ID NO: 128651 - protein, 261 aa, Oryza sativa
  Clone ID: PAT_MRT4530_30986C.1.pep
MERVMECDYPASKKNKVVHPMDCEMKEEPTNAASMNQHSLWSQWQLLDSILPTGGFAHSYGLEAAMQSRMVNNPEELRSFVVQVLENTGSLLLPFVCCANKSPDAATWVKLDQLLEAMLTNEVSRKASMSQGSALLRVAASVFTEIQSLQDLRQTFLGSKIVSFHHAPIFGLICGLVGFDSETTQRAYMFVTMRDVISAATRLNLIGPLAASVLQHQVAEDAERMVQKWKDRGVEEATQTSPLLDALQGCHAYMFSRLFCT

SEQ ID NO: 128652 - protein, 516 aa, Oryza sativa
  unsure (1)..(516): unsure at all Xaa locations
  Clone ID: PAT_MRT4530_30987C.1.pep
MGRMAARRCGCSSTAGDGAWRGRRSSLFAGPAPGTMTEADIVAVVPAAARVDDSTVTRGGTTGTTPGCCFAVCSSTEESDKALDPFHNNGTLPGASMXNVGKIRVRRAGTXAAKQKLLIGMSPRYAKVNEVSALMSLYGNIRQLKVLKSSKKTKKAGNXEIPELAWKVHAKTVXRGAIEALSCTRVLFCGSGANLVVKLDDTEREKQARKAQKAQAQPSKPLRFYLFPQLLSISGAPQMSFLPPYNVLDYKTEGTTDPELKDLMKMTNDKLEMLVTELKSVVNLLENRVTYNDPIQPIQHSLLPVEHDEKQYKPNECDSKTLEVPGHYGHTKNPLALYSTMYPHVNQGNLLQGLNTNIFPGTDPKISNLIQSAGYIQPPYPDLSGLHYPVSYAGALVGDTPQYFSDGKVNIPNSHSNHASSAANTKIGSKIEGPPRANLFVYDIPQEYGDEDLANLFQEFGRILSTKVFIDRATGVSKCFGFVSYDTPASAQAAIRRMNGSQIGGKMLKVQLKRET

SEQ ID NO: 128653 - protein, 227 aa, Oryza sativa
  Clone ID: PAT_MRT4530_30988C.1.pep
MAGSGQRQYPERSGAGDDETTASRVSVADLLGLVDVLDAFRGRSCAAGIIAQAQHIIRSATRLLRSSSLCTCTTSASLKVAKSRDCQIKAHELETGTCTRGSEGVKLCLACTTARATFGGKSSSPDYLTEKAPQHQFDTVRNHCNEWVTQYSNTIVHRKANFGSKFPKSSPPPPPPASPLPPSTHKWSCKPSSHRIVHYHLQPSKHSHVLSVKPGIKMTGEDGRHHR

SEQ ID NO: 128654 - protein, 210 aa, Oryza sativa
  Clone ID: PAT_MRT4530_30989C.1.pep
MTTQQASGADAESGMDLDGVTTEGNTALHVVATCGDGPGYLRSAGVIYSRSQHLMLVQNNNGDTPLHCAVRAGHSKMVDHLIDLVETKDNSPSSARLEELLRKENCRKETAFHDAVCIGNKDIITNLLKYYSELAGFLMDATGTSPLYLAVLHQQVDIAKLLHQMTDGNLSYSGPNRQNALHAAVLQDQGAYAIYICCFEFHSSYIPYLF

SEQ ID NO: 128655 - protein, 970 aa, Oryza sativa
  unsure (1)..(970): unsure at all Xaa locations
  Clone ID: PAT_MRT4530_3098C.1.pep
RLHRRPASVAADWCPRLCGWLVTPPFMGIHVFTXGWPTPPPTDVSXLYTAGLLCRRCWASTTSPPACLRRRRVVXLHRRPASVAAEWCLRLHGWPIMPPLLGVYDFTAGLPPSPPSGASAYTAGLLCRRCWASMTSPPACLRRRRVVPPPTRLAYYAAAVGRLRLHHRPASVAAEWCLRLHGWPIMPPLLGVYDVTAGPPPSPPTGVLAYAVGWSHHRSWAFTSSPXPAGLRRRRLMFPPARLAYYAAAVGRLXLHRRPTSVAADWCLRLNGWPIMPPLLGVYDFTAGLPPSPPSGASAYTAGLLCRRCWASTTSPPACLRRRRXWCLRLHGRPIMPPLLGVYDFTAGLPPSPPSGASAYTAGLLCRRCWMSTSSPLAHLRCRRLVFPLTRLTYYAAISGHLCFHRRPPSSPPTGVFIVIDGRLCSHIGHFCHHQGEYYKAKIQIQICTKGIHGFKLISYAPGMDQSEHHHRLAFAAADWCFRLHGWPIMPPLLGVYVFTDRXPSSVADWCFRLHGWPLCRRCWASTSSPTGXLRRRRLVFPPARLAFMPPLLGVYVFTNRXPSPLPTGVSACTAGLLCHRCWASTSSPTGRLVRRRLVSPPARLAFMPPLLGVYVFTNRLAFAAADWCLRLHDWPIMPPLLGVYVFTDRPSRPPPTGVIACTAGLYAAVVXASTSSPTGLLSPPPTGVTACTAGLYAAVVRRLRLHQPACFRRRRLVSPPARLAXMPPLLGVYVFTDRPSRPPPTGVTACTAGLLCHRCWASTSSPTGRLVRRRLVFPPARLAYYATIVGRLRLHRPAASSAADWCFRLHGWPXLCHCCWASTSSPTGRLIRRRLVSPPARLACYDAXLMLSSSRLLHRRHXLIXSASSTQVPSPLRLVYTATTTDGHHRLPSPTXMPPPTGAFIFTTARLHYQFASVAADSCSLHHXRCNFVIMDFYLDIFNTYLQSSNDYSTTRSYNSRLYVQLFPN

SEQ ID NO: 128656 - protein, 53 aa, Oryza sativa
  Clone ID: PAT_MRT4530_30990C.1.pep
RKKEAWRRNKQGPPVEGTGGVGQEPPSRFAKLTEHSDSFLPPSEFRAAVVETE

SEQ ID NO: 128657 - protein, 85 aa, Oryza sativa
  Clone ID: PAT_MRT4530_30991C.1.pep
PREFMARHLTRVCHLGNSSLGHQSTSSPKVLPGKFLDPKMIVLCFPFPEHEDSEADCYTPLPGLYPLVFATYKMLLVSSYTGYVL

SEQ ID NO: 128658 - protein, 239 aa, Oryza sativa
  unsure (1)..(239): unsure at all Xaa locations
  Clone ID: PAT_MRT4530_30992C.1.pep
PPAPLYPHCTPPPPPPTNPPPLPTPLPSPPXSHAPPRPSSPPPPPSPLVLCPSPPPPXPAPSPHPPSPPPSSPPLSRRSPPLSPPPPPPPPRLPPPCLAPPLAPPPPHPSSPPRCAPPPPSPPHGRAPPHPPIAPPPPASSRPPTAPAPRAPPAPDPLAXPPPTPSTPLVPVRSPPPRPPGPKSLSSPSXPQPKSPPSLPSLSGLSLPCPGPPLPRPAQAARQPVVFFLPPASSLSHKP

SEQ ID NO: 128659 - protein, 42 aa, Oryza sativa
  Clone ID: PAT_MRT4530_30993C.1.pep
LFFYINSTIKDKRRYYLVALGSPSTITQHNIIKGNLITFNFE

SEQ ID NO: 128660 - protein, 69 aa, Oryza sativa
  Clone ID: PAT_MRT4530_30994C.1.pep
RLNNCENYSRTLYRTLQRRRRIAGEIENSRHIHCYSVERCKKAIKQDVIRKVHALPQKPSTKTFEKFMS

SEQ ID NO: 128661 - protein, 51 aa, Oryza sativa
  Clone ID: PAT_MRT4530_30995C.1.pep
TSTGAPAHLEHHLRICCTNEWISLVSMLETCKLGALELVWLFIISSAGTNY

SEQ ID NO: 128662 - protein, 93 aa, Oryza sativa
  Clone ID: PAT_MRT4530_30996C.1.pep
ERRTSRSPRMVTAPVRFLIGKACTRSYHIGRLLLPRPRLVQRPTVSFNHNNTAELRRSWAGNSLAIAITCCSAACNSTSVSLIIYLLLSLSIN

SEQ ID NO: 128663 - protein, 127 aa, Oryza sativa
  Clone ID: PAT_MRT4530_30997C.1.pep
MRPSSLSTVVLSVIFTAALLAVAKADGGSVTAAAAAPPPAAWTAVANVNDKSIQQVGQSAVRIYGLSTNKTYLRFVNVVSGQTQPCNGGYNYRLWSPWPARAPPRRATTPSCGASSAPPTGSSCPSL

SEQ ID NO: 128664 - protein, 102 aa, Oryza sativa
  Clone ID: PAT_MRT4530_30998C.1.pep
HACSTSHKSIRRDTHGCPSDQLFNQFTTRGINTKLVRSHTDQTHMGGGDRGLIQVGDSTAAGAPLTRDYTRRTCKGAPDSKRPWRLRWHLNRLKANQVRVTG

SEQ ID NO: 128665 - protein, 423 aa, Oryza sativa
  Clone ID: PAT_MRT4530_30999C.1.pep
MGCGIDKDSTGRVPPFRFASPKPQAHPHQPKNHNLPLSSPLLAAGAAAAAVTAAFSLSSLSFSPPRGETIVLQPYQLFIWFQFNFIVNSQALKSYIWLQCFDGSIQQVEEEVAMFCPMICREIVKNGTGSSKNHAIALPERVNPTSLSLILDYCRFHQVPGRSNKERKSFDEKFVRIDTERLCELTSAADSLQLKPLVDLTSRALARIIEGKTPEEIRDIFHLPDDLTEEEKLEPLKNINDDPRIRLLNRLYAKKRKELQERQKLKDVQVQEEQKDERSLDEILCFINGDGGSGGGKASKNKKKNKRRKDHSKNPPKANPEPVNKEEATRGVPFNAGTGNISRTPCQSSDVQDDVEYPFEDADLDDGLDPAMQEELDREVEDFARRLNSVWPERMHLGQERRIESHMIGGNGSLQRFSGFNHR

SEQ ID NO: 128666 - protein, 800 aa, Oryza sativa
  unsure (1)..(800): unsure at all Xaa locations
  Clone ID: PAT_MRT4530_3099C.1.pep
WASSSTPPVCLRRRRLVSPPIRSVGHPTVDGHRHIHRRPASVAADWCPGLYGRLVTPPFMGVYDFTAGSPPLPPSGASAYTAGLLCRRCWASTTSPPACLRCRRVVPPPTRLVYYAAAVGRPRLHRRPASVAAEWCLRLHGWSIMPPLLGVHDFTAGLPPLPPSGASAYTAGLLCRRCWASTTSPPACLRRRRVVPPPTRLAYYAAAVGRLRLHRPAASSAADWCLCLHGWPIMPPLLGVYDFIAGLPPSPPSGASAYTAGLLCCRCWMPTSSPLAHLRCRRLVFPLTRLTYYAAISGHLRFHRRPPSSPPTGVFIVIDGRLCSHIGHFCHHQGEYYKAKIQIQICIKGIHGFKLISYAPGMDQSEHHHRLASTAADWCFRLHGWPXMPPLLGVYVFTDRLAFAAADWCFRLHGWPIMPPLLGAYVFTDRLAFVAADRCPRLHGWPLXPPLLGVYVFTDRLAFAAADWCFRLHGWPIMPPLLGVYXLHRPACLRRRRLVFPPARLPFMSPLLGVYVFTDRPPRPPPTGVSACTAGLVCCRCWASTSSPTGRLVRRRLVLPPARLAYYAAVVGRLRLHRPAAASAADWCHRLHGWPVITPTDAIFFTAGYIAVTTYRHQYLQHKLPTFAMAADWFLHFHGCMILPVLIGLTIFIAFLPSPLRLVYTATTTDGHHRLPLPTXVMPPPTSAFIFTTARLRYQFTSSRRCNFVIMVERLHLYYLRHWQTLLLLLRKFYYFTNHDVFVIXLDISACDAMLFYYNKRLSNIHDFYLEIFNTYLQSSNNYSTTRGYSFRLYVQLFPN

SEQ ID NO: 128667 - protein, 99 aa, Oryza sativa
  unsure (1)..(99): unsure at all Xaa locations
  Clone ID: PAT_MRT4530_309C.1.pep
MAPKADKKPTAXNPAEEEPVGENAPSAXKKPKAVKRLGGEKGKKGGARXGKKDGRKKGKKSVDTYKSYIRKEMKEDPPIIWICSKAMYIMKSLINDMLE

SEQ ID NO: 128668 - protein, 85 aa, Oryza sativa
  Clone ID: PAT_MRT4530_30C.1.pep
PAAPTVGGVISELAAPTVGVEQPPIHYVDWDSLEIDGTLDDEGRIHVMNDDQFGPGVLEGIEGATIPVDNIVPGELVIIYDKNNP

SEQ ID NO: 128669 - protein, 606 aa, Oryza sativa
  Clone ID: PAT_MRT4530_31000C.1.pep
MRASSFSSLMLPCSHGHGGGRATASTCAAAAAACLALVALVILVVSMDPRAQASSWFFLSSSSSSSSSSSSTLVRPAASSHAASLRKPSSWGGGNGGGGGGEHLLVTSSSFGSGGGARGSWSRNSTSKEVLFQGGGGGGGDEMTSTAAAPTPALIIGSSSGDGVSPSRVAVTAAAAEPTPALAPAPAPEWGVGDAASGDDIIQVMPQAQRRRDVKLELLELGLAKARATIREAIQNKDNKPPLTDKDYVPVGPVYRNAYAFHRSYLEMEKVFKVFVYEEGEPPVFHDGPCRSIYSTEGRFIYAMEMENRMRTRDPDQAHVFFLPFSVVKMVKMIYEPNSHDMDPLRRTISDYINVVSTKYPHWNRSLGADHFMLSCHDWGPYVSSANGHLFSNSIRVLCNANTSEGFDPSRDVSLPEINLRSDVVDRQVGGPSASHRPILAFFAGGDHGPVRPLLLQHWGKGQDADIQVSEYLPRRHGMSYTDMMRRSRFCLCPSGYEVASPRVVEAIYLECVPVVIGDDYTLPFADVLNWAAFSVRVAVGDIPRLKEILAAVSPRQYIRMQRRVRAVRRHFMVSDGAPRRFDVFHMILHSIWLRRLNVRVIARED

SEQ ID NO: 128670 - protein, 49 aa, Oryza sativa
  Clone ID: PAT_MRT4530_31001C.1.pep
GIPPFQISHAEHIRLISRSVFCDVRAPAGVRCHGQSGPKLRYVDLTIFA

SEQ ID NO: 128671 - protein, 120 aa, Oryza sativa
  unsure (1)..(120): unsure at all Xaa locations
  Clone ID: PAT_MRT4530_31002C.1.pep
MGATSKTMHPQPTIADVIKAGRGAGKRAPPVSGSGRAVHGGSGPRTGEERRATRRPRDSXNRRPRSTQGXIGRRRELAAGARGHGANRPGDHGARRRGAHAXQRRKTAADGDRPAAESGG

SEQ ID NO: 128672 - protein, 94 aa, Oryza sativa
  unsure (1)..(94): unsure at all Xaa locations
  Clone ID: PAT_MRT4530_31003C.1.pep
LGEGGRAPXKRAPPVSGSGRAVHGGSGPRTGKERRATRRPNRWXGARGHGANRPGDHGARRRGTHAAAAQDGGRRRLAGGGEWRRRGEAAATWL

SEQ ID NO: 128673 - protein, 651 aa, Oryza sativa
  Clone ID: PAT_MRT4530_31004C.1.pep
MEHARRFPTDPKEYKLCEEVGDGVSATVYKALCIPLNIEVAIKVLDLEKCSNDLDGIRREVQTMSLIDHPNLLRAYCSFTNGHQLWVIMPYMAAGSALHIMKTSFPDGFEEPVIATLLREVLKALVYLHSQGHIHRDVKAGNILIDTNGAVKLGDFGVSACMFDTGNRQRARNTFVGTPCWMAPEVMQQLHGYDYKADIWSFGITALELAHGHAPFSKYPPMKVLLMTLQNAPPGLDYERDKRFSKSFKDLVATCLVKDPRKRPSSEKLLKHSFFKHARTAEFLARSILDGLPPLGERFRTLKGKEADLLLSNKLGSESKEQLSQKEYIRGISGWNFNLEDLKNAAALIDNTNGTCHLDGVNSKFKDGLQEANEPENIYQGRANLVASARPEDEIQEVEDLDGALASSFPSRPLEALKSCFDVCGDDDPPTATDLREQPNMESTSPMQQFQQIENHKSANCNGESLERSASVPSNLVNSGSHKFLSGSLIPEHVLSPYRNVGNDPARNECHQKNTCNRNRSGPLFRQMKDPRAHLPVEPEEQSEGKVIQRRGRFQVTSDSIAQKEVISRLISSIEEISDAADASTTGSSQPSGVHFREKELQSYIANLQQSVTELAEEVQRLKLKNTQLEEQINALPKKDERLRREDTRQQ

SEQ ID NO: 128674 - protein, 41 aa, Oryza sativa
  Clone ID: PAT_MRT4530_31005C.1.pep
HQGFQSCHCMMMRDVLFSIIWTIILLQFSTQRPQRVGMSSA

SEQ ID NO: 128675 - protein, 230 aa, Oryza sativa
  Clone ID: PAT_MRT4530_31006C.1.pep
WLPSSPTVGLKPSISPSVHPPTATLPTLTHGSSSTSAPTSPTARTPPPPPPLSPAAASSRSPSAPRRRRSSPTSAPGPPTPTPPSSSPRNPSSPASTPTSSSSESTAIKSTTWSTTPAAVVTAAAAALRSRLSGTPTAPSIAVITLVSSAALPSSPAAVPVPVTTTTTTPPASMSAVLIRSYGMGYLDNVATSSSASTTPSMANGARRPFVSTSCAIRRTKTPFSITRRR

SEQ ID NO: 128676 - protein, 73 aa, Oryza sativa
  Clone ID: PAT_MRT4530_31007C.1.pep
FIKNIFFFWCFIITKLIFLINFFHKKKKIHKTPLVMIIKQKMKQNSFWLLRKNNIDELMQKPCLNCMNTIRLY

SEQ ID NO: 128677 - protein, 312 aa, Oryza sativa
  Clone ID: PAT_MRT4530_31008C.1.pep
MAAAGKERSRVLVIGGTGYIGRYIVAASAREDHLTSVLVRDPAPADPAKAAVLQGFRDSGATLVKGDLYGHQSLVAAIKSADVVISAVGYAQLADQTRIISAIKEAGNVKRFFPSEYGNDVDHVHAVEPVKSVYATKARIRRVIEAEGIPYTYVSSNFFAGRFLPSLAQAWIKGLPTDKVIILGDGNVKGVFATEEDVGTYTIKAVDDPRTLNKILYLRPSSNILSHNELVSLWEKKVGKTFDRVYIPEDEVLKKIQESPAPLNVVLSINHSVWVKGDHTNFEIEPSFGVEATELYPDVKYTTVDEYLNRFL

SEQ ID NO: 128678 - protein, 244 aa, Oryza sativa
  unsure (1)..(244): unsure at all Xaa locations
  Clone ID: PAT_MRT4530_31009C.1.pep
SGFPGRPTRPETLLDISTLSLEEVTGRLKAAEDSGQSSSSSLPGGSGKLYLTEEEWLERHKKKEQEAKKGNGGGNTRGKRRGGQGCNGSGGGDNASPVRKKDKCRNCGKLGHWAKYCRSKPKQEQAHVAQEEDXPTLMLMTGGCIDVVEETGAPCATPSPPALRPRPDVIEFVEQKVIAALDDATDHDNKRXILDTDASNHMTGSXTNVTGNVRLGDGSLVHIGGRGTILFACKNVILTVETDR

SEQ ID NO: 128679 - protein, 266 aa, Oryza sativa
  unsure (1)..(266): unsure at all Xaa locations
  Clone ID: PAT_MRT4530_3100C.1.pep
GQPPDRTRARTPRGGRRRRRRRRRCSRRLVERWPAAARREAPRGSCAGAPCRAHQAAAETWFDPQLLDLRSRGRSISPSPRTRRRRRGRRRRRRVRQGRRRRRRRRGRGRRRTRRPRRRSGPPSCPGCRGRGRGRSSWRRRSGTRRRRRRCRRXRRPWREKPREEARAPRQXSGARRATPCRRRGSGRRRRRRGGGRRCRGAAPVGGLSPSGGGGGALPPEQRRRRPSSHERWRRPSPPPAAAVAPSPTTGGGSSGRGGGGGPSAS

SEQ ID NO: 128680 - protein, 1218 aa, Oryza sativa
  Clone ID: PAT_MRT4530_31010C.1.pep
MDDDGETPMPSLELHKLPTLAGAAIPNPIARHPLYHPSPSFFISPTDVVLRDILFDASPASAAGERRRRHVAAYHRAGPRREVAFDPATVRAAIFTCGGLCPGTNTVVRELVVGLSELYGVRGGVFGVRNGYRGFYSDEVVPLDPAAVEHWHKAGGAALGTSRGGFDLARIVDAIERHGFNQVYAVGGDGTMRGAARIHREVRRRGRLAVAVAGIPKTVDNDVGVVDRSFGFHTAVEAAQQAIAAGHVEAESAANGVGLVKLMGRSAGHIALHATLSSRDVDCCLIPEEDFYLRGAGGLFDFLYRRIKDNGHAVVVVAEGAGQRLIPRTTTTSASGACAGADESGNETFLDVGAWLKAEMRAWWEEEHAGEVFTVKYIDPTYMIRAVPANAGDNLYCTLLAHAAIHGAMAGYTGFVSGTINGNYAYIPMDEVAEAKNPVDTKDHKWAWSFVVYLGGHSHGRGGAALASSQERAKNSHHEFLGSFLGSKEKARDAIFYSYTKYINGFAATLEEEEAMEISKHPSVISVFPNRGHRLHTTRSWEFLGMEKDGRIRANSIWAKARFGEGVIIGNLDTGVWPEAGSFSDDGMGPAPVRWRGICQDQASDDAQVPCNRKLIGARYFNKGYLSTVGQAANPASTRDTDGHGTHTLSTAAGRFVPGANLFGYGNGTAKGGAPGAHVAAYKVCWRPVNGSECFDADIIAAFDAAIHDGVDVLSVSLGGAPAGYLRDGVAIGSFHAVRRGVTVVCSAGNSGPGAGTVSNTAPWLVTVGASTMDREFPAYLVLGNNKKIKGQSLSPVRLAGGKNYPLISSEQARAANATASQARLCMEGSLERGKVEGRIVVCMRGKNARVEKGEAVRRAGGAGLVLANDEATGNEMIADAHVLPATHVTYSDGVALLAYLNSTRSPSGFITVPDTALDTKPAPFMAAFSSQGPNTVTTQILKPDITAPGVSILAAFTGQAGPTGLAFDSRRVLFNAESGTSMSCPHVAGVAGLLKALHPDWSPAAIKSAIMTTARVKDNMRRPMSNSSFLRATPFSYGAGHVQPGRAADPGLVYDMNDTDYLGFLCALGYNSSVIATFMASGSGAQPPYACPPARRPEDLNYPSFALPHLSPSGAARTVTRRVRNVGAAPAAYVASVAEPRGVSVAVRPSRLEFTAAGEELEFAVTFRAKKGSFLAGEYEFGRLVWSDAAAGGRHRVRSPLVVRVVDKKGKNGLPIS

SEQ ID NO: 128681 - protein, 59 aa, Oryza sativa
  Clone ID: PAT_MRT4530_31011C.1.pep
ITPPLKKIKFSSLTGQTIPWGYLFVPNLFCSGFGILITTTPPFFCPTLPVGSGQKTLNP

SEQ ID NO: 128682 - protein, 130 aa, Oryza sativa
  unsure (1)..(130): unsure at all Xaa locations
  Clone ID: PAT_MRT4530_31012C.1.pep
CKGPFAPQKLAIEVRGSPTYILGPLPFHNQCGTIQQSPPSHIGVPQPFTAPSPCXTPQNRSTVHQYRKGAFTLQKLAIEVRGSPTYILGHLHFHNQCGTIQQLDHVRVSSASSCAMLCDHPGPHQPCAPC

SEQ ID NO: 128683 - protein, 121 aa, Oryza sativa
  Clone ID: PAT_MRT4530_31013C.1.pep
RLEEKSEIGSVAGGEGRGDETDESDRKKYTEGPSTCHRATKSSLNRKLELKLALAANFAKSRPKVQNSHSSLTGAHAMAQMPHQTIPTYGSQAPITRGTAMDEHPGNRTHGGGGSEVSPRA

SEQ ID NO: 128684 - protein, 237 aa, Oryza sativa
  Clone ID: PAT_MRT4530_31014C.1.pep
MSASFLEIQPSELSFPFELLKQSSCSMQLTNKTDHYVAFKVKTTNPKQYCVRPNIGVVLPGSTCDVTVTMQAQREAPPDMQCKDKFLVQSVAAENGATTQDISAEMFNKVAGKVVEEFKLRVVYVPTTTSSAMPEDSEQGSSARPFAQENGIHNSTMPQPVFRSSAEPTKERPTEPSSMISKLNEENRVAIQQNQKLRHELELLRKESSKSSGGFSLTFLAIVGLLGIIVGYILKKT

SEQ ID NO: 128685 - protein, 147 aa, Oryza sativa
  unsure (1)..(147): unsure at all Xaa locations
  Clone ID: PAT_MRT4530_31015C.1.pep
TVLWGNRHENLLLTIHLTVRCTMGKXTHIQKHEDHAXDLGARSMFCMTFTGEGSRITPSHSAQDFKXWNDYGLMVVRNEQEMFKIEAAHYMISICGNSVLRERSSSLKSGRVFFLVQGWRFMIKTLGKFEVQDLLTNACQNLLPFMV

SEQ ID NO: 128686 - protein, 81 aa, Oryza sativa
  unsure (1)..(81): unsure at all Xaa locations
  Clone ID: PAT_MRT4530_31016C.1.pep
EKLLSSKTQSCKRNLEVLVSPNPARPGRIGCNXFRCNSIQRNRNGGGGASHAGALLPGAAPCXAALLLPRRFACATVAGGR

SEQ ID NO: 128687 - protein, 373 aa, Oryza sativa
  Clone ID: PAT_MRT4530_31017C.1.pep
MRGRLLADAAVAGGGGGVVPIYWSQPLYMANLTIGTPPQPASAIIHLAGEFVWTQCSPCRRCFKQDLPLFNRSASSTYRPEPCGTALCESVPASTCSGDGVCSYEVETMFGDTSGIGGTDTFAIGTATASLAFGCAMDSNIKQLLGASGVVGLGRTPWSLVGQMNATAFSYCLAPHGAAGKKSALLLGASAKLAGGKSAATTPLVNTSDDSSDYMIHLEGIKFGDVIIAPPPNGSVVLVDTIFGVSFLVDAAFQAIKKAVTVAVGAAPMATPTKPFDLCFPKAAAAAGANSSLPLPDVVLTFQGAAALTVPPSKYMYDAGNGTVCLAMMSSAMLNLTTELSILGRLHQENIHFLFDLDKETLSFEPADCSSLS

SEQ ID NO: 128688 - protein, 115 aa, Oryza sativa
  Clone ID: PAT_MRT4530_31018C.1.pep
MTSQFRREERVAQGSDEDGAAVATARDAVASPRPWQRQIQRLLAVTTRLAVAATSHNARNFLAVMSSPELPEFLGQGPEPPGEEHRNFLAVMSSPELPEFLGQELGTKSIYITAR

SEQ ID NO: 128689 - protein, 268 aa, Oryza sativa
  unsure (1)..(268): unsure at all Xaa locations
  Clone ID: PAT_MRT4530_31019C.1.pep
MIKWGIGSSGTPADSYYEVRSDCTDDVPKSKFKIKAGKTLSVRKWQAAFSTDGCLDIASVLSRIQKGGVHPTVRGEVWEFLLGCFDPRSTFDEREEIRQIRRLQYARWKEDCREMDSHVGSGKVITAPLITEDGRPIKDPLVLLEATSSENTSDGTSTSSTNGNEIDESASRITDKLIIDWKLTLHQIGLDVLRTDRTMAFYENKENLSKLWDILAVYAWIDKDXGYCQGMSDLCSPMIVLLKDEADAXFWCFEKLMRRLRGNLNARI

SEQ ID NO: 128690 - protein, 823 aa, Oryza sativa
  unsure (1)..(823): unsure at all Xaa locations
  Clone ID: PAT_MRT4530_3101C.1.pep
LCRRCWASTTSPPACLRRRRVVPPPTRLAYYAAAVGRLRLHRRPASVAAEWCLRLHGWPVMPPLLGVYDFTAGLPPSPPSGASAYTAGLLCRRCWASTTSPPACLRRRRVVPPPTRLACYAAAVGRLRLHRRXAAEWCLRLHGWPIMPPLLGVYDFTAGLPPSPPSGASAYTAGLLCRRCWASTTSPPACLRRRRVVPPPTRLAYYAAAVGRLRLHRRPASVAAEWCLRLHGWPVMPPLLGVYDFTAGPPPSPPSGASAYTAGLLCRRCWASTTSPPARLRRRRVVPPPTRLAYYAAAVGRLRLHRRPASVAAEWIQIQICIKGIHGFKLISYAPGMDQSEHYHRLASTVADWCFRLHGWPXMPPLLGVYVFTDRXASSAADWCFRLHGWPLXPPLLGVYVFTDRXPSPPPTGVSACTAGLYAAIVGRLRLHRPACXAAADWCFRLHGWPIMPPLLGVYVFTDRPPRPPPTGASACTADLFCCRCWASTSSPTGRLVRRRLVFPPARLAFMPPLLGVYVFTDRXASSAADWCFRLHGWPLXPPLLGVYVFTDRPPRPPPTGVSACTAGLFCCRCWASTSSPTGRLVRRRLVFPPARLAFMPPLLGVYVFTDRPPRPPPTGVSACTASLLCCRCWASTSSPTGRLVRRRLVFPPARLAYYAAVVGRLRLHRPAAASAADWCHRLHGWPVIAPTHAIFFTAGYIAVTTNRHQYLQHKLPTFAMAADWFLHFHGCMXSTTTDGHHRLPSPTXMPPPTGAFIFTTARLHYRFTSSRQHNFVIMVERLHLYYLXDFYLDIFNTYLQSSNNYSTTRSYSSRLYVQLFPN

SEQ ID NO: 128691 - protein, 183 aa, Oryza sativa
  Clone ID: PAT_MRT4530_31020C.1.pep
MDPAGSSLERGDGSCDAARGTCGGSVVGHGFGRRHLGAWVAARVVRGGCSGHGPQIQPSAVVSGTGGGFGRGRWSSGRRRLIRWKAGANPAKSSLSHSTDNYQHGSATTITIGRVTERTNMDASKRAAYVKKIHEKTNEEIEKKVRSNAGKVVLVVVTENGVNTIFGDSAREVYINIMSKPKE

SEQ ID NO: 128692 - protein, 268 aa, Oryza sativa
  unsure (1)..(268): unsure at all Xaa locations
  Clone ID: PAT_MRT4530_31021C.1.pep
ARELVGARDIGGEIGGHQRVAGDETNSLVPTPTRDDARRRPATKKKAAAARVDGVEQPPVVDGENGGAAKLLLLTAHLLATTAGGGDGGDGTAALPKMACDGGGLATRRGGARRHGRTRERGQTKEEITGNIYMSSDXRDRITNGRNXIGKNSDSFLEXTRKRIQISSKPQPFALILGGKGRGDREEQNPSINWKRSNRIWPDXSGKRRLGFGSAAAAGWRSGTTLTGGPHLSAXGERARARAAWAGLGRARXEEREERRWAGIGPKT

SEQ ID NO: 128693 - protein, 73 aa, Oryza sativa
  Clone ID: PAT_MRT4530_31022C.1.pep
GIREQEKKISLKKGQFIITRVQNYYKNQINWGGKIGKTGFFHKKTQGLQKLKKRFTKGKPNENKGGLKETGRG

SEQ ID NO: 128694 - protein, 104 aa, Oryza sativa
  Clone ID: PAT_MRT4530_31023C.1.pep
MAVAGERWPAAVEVKALLRASLPDARQHHNQQGGLNVHLIVLPPPRQGIQPHHHLRPPVRLTLASPHCHLPSLDLLLPTAAPMDGLSKTSRPARVIGKAQQLSS

SEQ ID NO: 128695 - protein, 237 aa, Oryza sativa
  Clone ID: PAT_MRT4530_31024C.1.pep
MYSDRVSGRKRSVMDRLGSGGGGGGGGGGGGGGGGGGSRPRPDSVKRFRQADGTWRRELYMDSVGVQSSSGVPSRNIQGNQKPHLQQNTQVMRKSSVPDLREKLSGVQRPQLNSTVQIPKSVPEISTSAKPVQKREPVQKREPPVNAALPATKKVNEPSAPKQCQEKTDSSLDRLLKSLDVEKYSINFQAEEVDMKALLHMNEEDMKSLGIPMGPRKKILSALASKKKKLSKSLPTS

SEQ ID NO: 128696 - protein, 263 aa, Oryza sativa
  Clone ID: PAT_MRT4530_31025C.1.pep
MYSDSVSGRKRSVMDRLGSGGGGGGGGGGGGGGGGGGSRPRPDSVKRCDFELAIGSNRRLLFVSVHALLDVTGLRLVVGSYGDRGFVRQMGLGDVNFIWTLWEFKVHVMRKSSVPDLREKLSGVQRPQLNSTVQIPKSVPEISTSAKPVQKREPVQKREPPVNAALPATKKVNEPSAPKQCQEKTDSSLDRLLKSLDVEKYSINFQAEEACLTYLGIQVDMKALLHMNEEDMKSLGIPMGPRKKILSALASKKKKLSKSLPTS

SEQ ID NO: 128697 - protein, 78 aa, Oryza sativa
  Clone ID: PAT_MRT4530_31026C.1.pep
MASRRHGEMRDEARAKECEKSRGGEAEGEDEGSSRFCPPRGDDSPAHTRPTRAASQSGAARGGELEGDPAEGWPTSPT

SEQ ID NO: 128698 - protein, 98 aa, Oryza sativa
  Clone ID: PAT_MRT4530_31027C.1.pep
MATVKENDVANLSPNLVVHQLPCRVAVDKSVGEKEGRGARYCRRGVFSHAAQAKRGRASGANDGERGEQHRIREEEPSSDLHHESNERRGQVGRRHGS

SEQ ID NO: 128699 - protein, 66 aa, Oryza sativa
  Clone ID: PAT_MRT4530_31028C.1.pep
RVDQAREASDSYVERTAQSIRAPESREAPPVDRVASELWVGAAACVGSRRWVARDSGRSAGVQLSL

SEQ ID NO: 128700 - protein, 84 aa, Oryza sativa
  Clone ID: PAT_MRT4530_31029C.1.pep
SGKRRSARQGRLLRSRGTVGGRRGRARARRCKRAGQTARGARRGTRRVRKRRRGRGRPGGGEGEEWMVVAAMARQLSALSKLAA

SEQ ID NO: 128701 - protein, 350 aa, Oryza sativa
  unsure (1)..(350): unsure at all Xaa locations
  Clone ID: PAT_MRT4530_3102C.1.pep
CRRCWATTTSPAACLRRRRPVSSPIXRLVTPPFIGVHVFTDRLAFADWCFRLHGWPIMPPLLGVYDFTTGLPPSPPTGVLAYTVGTTHPICLFCRIQIQICIKGIHGFKLISYALGMDQSEHHHRLAFVAADWCPRLHGWPIMPPLLGVYVFTTGSPSSPPTGVLACTAGLLCRHCWAPTSSPXACLRRRRLVSSPARLAXMPPLLGVYVFTNRLAFVAANWCPRLHGWPIMPPLLGAYIFTDRPPHPPPTGVSAYTAGLLCRRCWTSTFSPTGRLVRCRLVFPPARXAYYAAVVGRLRLHRPAASSAADWCFRLHGWPIMPPLLGVYVFTDRPPRPPPTGVTACTAGLL

SEQ ID NO: 128702 - protein, 962 aa, Oryza sativa
  Clone ID: PAT_MRT4530_31030C.1.pep
MWRRRRGGGGGGGGGGVAVAVALAVMLVVGAAAGETAASDAAAMRAVARALGADKALGWSTGDPCSSPRAWAGVTCDSAGRVTAVQVGNRSLTGRLAPEVRNLTALARLELFDNSISGELPSLAGLSSLQYLLVHNNGFTRIPPDFFKGLTALAAVSLDNNPFDPWPLPADLADCTSLTNFSAVPANVTGALPDFFGTALPSLQRLSLAFNKMSGPVPASLATAPLQALWLNNQIGENQFNGSISFISNMTSLQELWLHSNDFTGPLPDFSGLASLSDLELRDNQLTGPVPDSLLKLGSLTKVTLTNNLLQGPTPKFADKVKADVVPTTERFCLSTPGQPCDPRVNLLLEVAAEFQYPAKLADNWKGNDPCDGYIGVGCDAGNITVLNFARMGFSGSISPAIGKITTLQKLILADNNITGTVPKEVAALPALTEVDLSNNNLYGKLPTFAAKNVLVKANGNPNIGKDAPAPSGSGGSGGSNAPDGGNGGDGSNGSPSSSSAGIIAGSVVGAIAGVGLLAALGFYCYKRKQKPFGRVQSPHAMVVHPRHSGSDPDMVKITVAGGNVNGGAAASETYSQASSGPRDIHVVETGNMVISIQVLRNVTNNFSDENVLGRGGFGTVYKGELHDGTKIAVKRMEAGVMGNKGLNEFKSEIAVLTKVRHRNLVSLLGYCLDGNERILVYEYMPQGTLSQHLFEWKEHNLRPLEWKKRLSIALDVARGVEYLHSLAQQTFIHRDLKPSNILLGDDMKAKVADFGLVRLAPADGKCVSVETRLAGTFGYLAPEYAVTGRVTTKADVFSFGVILMELITGRKALDETQPEDSMHLVTWFRRMQLSKDTFQKAIDPTIDLTEETLASVSTVAELAGHCCAREPHQRPDMGHAVNVLSTLSDVWKPSDPDSDDSYGIDLDMTLPQALKKWQAFEDSSHFDGATSSFLASLDNTQTSIPTRPPGFAESFTSADGR

SEQ ID NO: 128703 - protein, 161 aa, Oryza sativa
  Clone ID: PAT_MRT4530_31031C.1.pep
ARGLVPNSARGVYGVDVGYGQVAEKIRVHERVSVIERTNLRYLTELPQLVDLVTLDLSFISILLVMPAVVKVMKTDSTLITLIKPQFEARRSQVGGGGIVRDPLVHKEVLDRIISGVEQFGFCNKGWIESPIKGAEGNKEFLACFHRIPVQELQPEEAKST

SEQ ID NO: 128704 - protein, 123 aa, Oryza sativa
  Clone ID: PAT_MRT4530_31032C.1.pep
RAAGIRHEAHSPLLSIFLLRSVLSFPAVLSLLQDKWNPLPYALSILAVEFSNTLIITYAHPCLLFSPGLSDLRMMVFGDVQSTQWRWFLGPTDLCMRRHRLGRSIFFLPPLSCSELKACRNAG

SEQ ID NO: 128705 - protein, 142 aa, Oryza sativa
  Clone ID: PAT_MRT4530_31033C.1.pep
MSATYDREAEHRALNATLSGVHGLVASGVTAVPSIFRVPDPEPPPPPPSSSQESPPLPPSIPVVDLGGTGGDREAVVVTIRRAAVDEGSDKARLYSRDPARAAKYNCNFDLYQSPAANWRDMLYLRMAPDPPPAGDLPEYCR

SEQ ID NO: 128706 - protein, 118 aa, Oryza sativa
  Clone ID: PAT_MRT4530_31034C.1.pep
MAQQRSTSRQAEKGDWGGGDVRAHRGSGGGSAARWNPSRRAASCVRGIRRGEGLRGRSGGAESRGALAVLQEGRKEAEAEAAGGVEWSVRNEPSHQLLETLPIWGGEQLDGIIRGIRS

SEQ ID NO: 128707 - protein, 77 aa, Oryza sativa
  Clone ID: PAT_MRT4530_31035C.1.pep
YLRKHNISISTFLSITCICMLSIQHVFPSTFTFFLICACCSIASFTLKTIQIFYQRPKVHAFMVWSLLSRGNFNVRK

SEQ ID NO: 128708 - protein, 906 aa, Oryza sativa
  Clone ID: PAT_MRT4530_31036C.1.pep
MPRKKPTSLSPGTSRFPPSPGIYKFRPAILWDSARHNRFSARNRFSVLEAISDEDDDSLTERDSTTSDSCGEDNSRKDPPLMEDGEIVNPLVRTLLELFSEEQISEIPLMETYIRRCGISEGMGSHLIEENNFLFGAFTSIVACPWIKKDTILLSSILLRLSEIWNQSEWVTNLLDFFEDAQFRTSVYNVVAFFEDQLTMSTTENSNGIDHKEKLSYSTLFALLPLLLPLLLKLLQYVHSLWTDEVASNVSEKLEGAKFIIQAEKPFGIIEETTEMLDMNEEELLENEIRKWLKKIRQTGFLYKETMLVPDKFCHISFTEEKIEELGKDHLFEVTREISYMLAVMALPELNGGIANEHQSIVSIVETSADLESTCSSSLVGYLLYHDDLRPSILRLINNIIGYWKDSEARIKVVSFCHMLIQLAISTHNDKLISFVQDNLIPMVVRCLIFEPISNNNDLLLLCEDAYRCIQREESVSEGQHDGNSAEIFENWLSKQMIVAHYEHSPPDELEDFVCIWEIEEEFTAYLHTYTEMLHKVDGIGDTIEDVYLRCPIPFVSKHDNNCCPISNSWAMSSMLSCSGYDESVQELVDDDSEVWSALPGCCRQETLELFCRILDPWEPQFHPLIREDDKEMLREIAYLLTSREDIHCVQSFQPVSSDFLLHLQPYAQNYIEVKNASSGYDRVKEQIRLHEAFDTHLASGALDDHVRQISSSKDNFVKIMLDDDTLHSQFIDLDYDLLKLSHERRAKLLSKQDQLCLYYKHMKCAVVNLQHRDRLESLICELESEGFFRVDDDSIEWEKEHFSELVDEFNEHIFAGIHLPKYYVIRGVMDYREMLHMKDSTWDDAFTVVVGGAFCRWMEDRDLFWMETRYYRHRYYDIIQEPVKMVLTHITSIFFLAPENLETPF

SEQ ID NO: 128709 - protein, 68 aa, Oryza sativa
  Clone ID: PAT_MRT4530_31037C.1.pep
TPHHQETSTRHYSYNANTTIPYLNLMLLISHDVLDVVYKPCLMQNMIFLSFFIYSLVTSFFYPRWQII

SEQ ID NO: 128710 - protein, 286 aa, Oryza sativa
  unsure (1)..(286): unsure at all Xaa locations
  Clone ID: PAT_MRT4530_31038C.1.pep
XIPGSTHASACSMSSMLSRKITSMYCKRETEQKFKFLCKLITFKPYIKCSGYDESVQELVDDDSEVWSALPGCCRQETLELFCRILDPWEPQFHPLIREDDKEMLREIAYLLTSREDIHCVQSFQPVSSDFLLHLQPYAQNYIEVKNASSGYDRVKEQIRLHEAFDTHLASGALDDHVRQISSSKDNFVKIMLDDDTLHSQFIDLDYDLLKLSHERRAKLLSKQDQLCLYYKHMKCAVVNLQQGKRNTFQNLWTNSMSIFLLGFTFQNIMLFVELWIIREMLHXEG

SEQ ID NO: 128711 - protein, 86 aa, Oryza sativa
  Clone ID: PAT_MRT4530_31039C.1.pep
MGPRLLLFAGAPRTTLVTGLCSTPQLVATVDLRSAGRGPLLRRHGGSGSGNRGTTLPRAATAGQGGGQCRRWPGCGGGWGRVVALS

SEQ ID NO: 128712 - protein, 420 aa, Oryza sativa
  Clone ID: PAT_MRT4530_3103C.1.pep
MYGRMPKKSNNTKYYEVLGVSKTATQDELKKAYRKAAIKNHPDKGGDPEKFKELAQAYEVLNDPEKREIYDQYGEDALKEGMGGGSSSDFHSPFDLFEQIFQNRGGFGGRGHRQKRGEDVVHTMKVSLEDLYNGTTKKLSLSRNALCTKCKGKGSKSGAAATCHGCHGAGMRTITRQIGLGMIQQMNTVCPECRGSGEMISDKDKCPSCKGNKVVQQKKVLEVHVEKGMQHGQKIVFQGEADEAPDTVTGDIVFVLQLKDHPKFKRKFDDLFTEHTISLTEALCGFQFVLTHLDGRQLLIKSNPGEVIKPGQHKAINDEGMPQHGRPFMKGRLFVEFNVEFPEPGALTPGQCRSLEKILPPRPRNQLSDMELDQCEETTMHDVNIEEEMRRRQQHRRQEAYDEDDDEDAGAGPRVQCAQQ

SEQ ID NO: 128713 - protein, 352 aa, Oryza sativa
  Clone ID: PAT_MRT4530_31040C.1.pep
DCYLSSPIKFVSKHDTDCCAISHAWAMSTMLSCSGYDESVQELVEDDSEVWSALPGFCRQETLELFCRILDSWEPQFHPLIRQDDKEMLREIACLLTSREDIHHVQSFQPVSSDFLLHLQPYAQNYIEVKNASLATVLVLKVLFLHQYDRVKEQTRLHEAFDIHLASGALDDFVRRTSSSKDDFIKIILDDDILRSQFTDLDYDLLKLSYEHRDRLESLICELEAEGFFSVDDDSIEWENEHFSELVDEFNEHVFAGIHLPKYYVIRGIMDYREMLNMKDSTWDDAFSVVVDGAFCRWMEDRDLFWMETRYYSHCYYDIIQEPVKMVSKLTLVLMHISSILFLAPENLETPF

SEQ ID NO: 128714 - protein, 59 aa, Oryza sativa
  Clone ID: PAT_MRT4530_31041C.1.pep
NCASIHNWRSCMMSYSTPQVEVSVMQSTVEPRESQLSSLSILIHQCHLILYIYIPIFTC

SEQ ID NO: 128715 - protein, 474 aa, Oryza sativa
  Clone ID: PAT_MRT4530_31042C.1.pep
MGEKQGAACITACVESRLVARHLGVSLFVYATASLTTSSVRASSYYDLTLPPDCSAIGALRWSDIYRTCGYLDANDGKRTKLPRQGTDKDGRPGALQRRAGRESRGRVAEGSRDGGEQNRLDFSAVTLASPPPLRLQSQPRRHLASPPPPPVRIRRLLLARLSRRHHRERERERGGERTSPPPRLLRRDPARWPWRAPRPPHTMGTLPVAHRFSLASAFLPRHRRPSPSAPNRRRRHGTVVAYMEPNPNSPSSIAGRLIGALPVVGLVARILSDEGGVGGDMIDFAEFRRRVSKKCTVMDSQAFYDFNERRGKAGDPFYVLLCCWLAAVGGGLLKTEEILEGVARLRLSNDIEFEEETFLDMMKTAKEKRAKLKAPAPQIPMEARAEKALEAIYVCCFGQDMVEDVDVKLLCKMLNAVFPSVGRQAVERIVTSMAKQVAAGERKGPGVKTVSKEAAQRQLKDLEFLKQNKLDSA

SEQ ID NO: 128716 - protein, 40 aa, Oryza sativa
  Clone ID: PAT_MRT4530_31043C.1.pep
KLFFFGKDNKLIREFLPFLQKIMVLFMHAVIKNFLSYKKQ

SEQ ID NO: 128717 - protein, 350 aa, Oryza sativa
  Clone ID: PAT_MRT4530_31044C.1.pep
MKLSNMTAFLSLLIFILLVAIEARNLVGVERVELPNPASMVTAYWQKMLPHSPMPTAILELLNPPTDVNQGVHGNGYDQVYGNGYDGGYINGYSHSYSNGYSNGYFHKANLHFLEDALKPGSIITPYITGIATRAPFLRRDIADSIPVSTKNFADILAMFSPISLVMADGIQSALDTCEHHRPIKGEERACATSIESVVEFAMSVLGTRDLRAFSPDVPPEGIMPGNMYKVVAVRTVAGLRGDTVTCHTMRFPFAVFYCHAINPTRVYAVVLESEEDGSGSGSGTPEKMEALAVCHLDTSRFDPKTPLFVEHNLRPGDASVCHFVSRDSVIWAPVAAVITHGDEQVSIAE

SEQ ID NO: 128718 - protein, 63 aa, Oryza sativa
  Clone ID: PAT_MRT4530_31045C.1.pep
DKRKRLNIYHTFGRAHPHRIGVQKRDGQTTQVQLKIPKNRGVQGETKKEHMGFGGVIPAPENI

SEQ ID NO: 128719 - protein, 616 aa, Oryza sativa
  Clone ID: PAT_MRT4530_31046C.1.pep
MAVKASSADNRTRSTVSLCIVIGMCCFFYILGAWQKSGFGKGDSIALEITKRTDCTILPNLSFDTHLAKQARPRDLVSPAKKFKPCPDRYTDYTPCQDQNRAMKFPRENMNYRERHCPPQKEKLHCLIPPPKGYVAPFPWPKSRDYVPFANCPYKSLTVEKAIQNWVQFEGNVFRFPGGGTQFPQGADKYIDQLASVVPIANGTVRTALDTGCGVASWGAYLLKRNVLAMSFAPRDSHEAQVQFALERGVPAVIGVLGTIKLPYPSRAFDMAHCSRCLIPWGANGGIYMMEVDRVLRPGGYWVLSGPPINWKVNYKGWQRTKKDLEAEQNKIEEIADLLCWEKVKEIGEMAIWRKRLNTESCPSRQDESSVQMCDSTNADDVWYKKMKPCVTPIPDVNDPSEVAGGAIKPFPSRLNAVPPRIANGLIPGVSSQAYQKDIKMWKKHVKAYSSVNKYLLTGRYRNIMDMNAGFGGFAAAIESPKSWVMNAVPTISKMSTLGAIYERGLIGIYHDWCEAFSTYPRTYDLIHASGLFTLYKNKCNMEDILLEMDRVLRPEGAVIMRDDVDILTKVNRLALGMKWNTRLVDHEDGPMVREKVLYAVKQYWVGGNQTAAAAA

SEQ ID NO: 128720 - protein, 194 aa, Oryza sativa
  Clone ID: PAT_MRT4530_31047C.1.pep
MPTSLLPTTSGGGHLCPSPPPSRRRRFCQVAAAAGGIGRRAVSLAGVASWLTATAAGRADASPFDKYVKKKKLEPLETYVPAVLLTQDQFRDLEKSLEFEKPRYDESRSLLRSGPASSLRINIRAVAQYASSSGQGKAASDAVDECLRLLQTVPSAVLDKGKAIADAYRTPTDDYEMGDATELDPRLKQLQDIL

SEQ ID NO: 128721 - protein, 108 aa, Oryza sativa
  unsure (1)..(108): unsure at all Xaa locations
  Clone ID: PAT_MRT4530_31048C.1.pep
LRSGPASSLRINIRAVAQYASSSGQGKXASDAVDECLRALEDLDSLLLQASRNNPSAAVDVMRSKISVALGALDNLLQTVPSAVLDKGKAIADAYRTPTDDYEMGRCN

SEQ ID NO: 128722 - protein, 137 aa, Oryza sativa
  Clone ID: PAT_MRT4530_31049C.1.pep
PAPEERRDLFPQTLTLAALIQRSPTAASASASSAAAATGVGGVEPAVTLDQVPRWSDPDQRLSSSSSRTAAGFDESPASSFLSFADDGMADVVGGRGVSRFPVDHEINSKIHPWNLEVDFHPWILACFPLLIYILYL

SEQ ID NO: 128723 - protein, 1324 aa, Oryza sativa
  unsure (1)..(1324): unsure at all Xaa locations
  Clone ID: PAT_MRT4530_3104C.1.pep
QQRLHRRPASVAAEWCLXPPFMGVHVFTTGLPPSPPIGVSAYTAGLLCRRCWASTTSPPACLRRRRLVSPPTRLAYYAAAVGRLRLHRRPASVAAEWCLRLHGWPIMPPLLGVYDFTAGLPPSPPSGASAYTAGLLCRCCWASTSSPPACLRRRRLVPSPTRLAYYAAAIGRLXLHRRPASVAAEWXPPPTRLAYYAAAVGRLRLHRRPASVAAEWCLRLHGWPIMPPLLGVYDFTAGLYPSPPIGASAYTAGLLCRCCWASTSSPPAXLRRRRLMPPPTRLAYYAAAVGRLRLHRRPSSVAADWCPRLYGWLVTPPFMGVHDFTAGLPPSPPTGASAYTAGLLCRRCWASTTSPPACLRRRRLVSSPIRSVGHTTVDGHRHLHRRPASVAADWCPSLYGRLVTPPLMGIVIYTAGLPPSPPTGVIAYTVGRSHHRSWASMSSPXPAGLRRRRLVFLPARLAYYAAAVGPLLLHHRPAYVAADWCHRLYGWSVTPPFMGVHVFTXGWPSPPPTGVSACTAGLLCRRCWASTTSPPACLRRRRLVSSPIRSVGHTTVDGHRHLHRRPASVAADWCPRLYGRLVTPPFMGVHVFTDRLXPSPTGVSACTAGLLCRRCWMSTSSPLAHLRCRRLVFPLTRLAYYAAVSGHLRFHRRPPSSPPTGVFIVIDGRLCSHIGHFCHHQGEYYKAKIQIQICIKGIHGFKLISYALGMDQSEHHHRXASSAADWCSRLHGWPIMPPLLGVYVFTDRLAFAAADWCFRLHGWPIMPPLLGIYVFTDRPPRPPPTGVFACTAGLYAAVVGRLRLHRPACXDAADWCFRLHGWPLCRRCWASTSSPTGXLRRRRLVFPPARLAXMQPLLGVYVFTDRPPRPPPTGVFACTAGLYAAVXWASTSSPTGRLVRRRLVLPPARLAFMPPLLGVYVFTDRLAFVAADWCPRLHGWPIMPPLLGAYVFTDRPPLPPPTGVSACTAGLYAAVXWASTSSPTGLPSPLPIGASACTAGLXYAAAVGRLRLHRPARLCRRXLVFPPARLAXMPPLLGAYVFTDRXPSSPPTGVLACTAGLLCRRCWAPTSSPTGXRLLRRRLVSTPARLAYYAAAVGRLRLHRPARXAAADWCFRLHGWPLCRRCWASTSSPTGXLRRCRLVLPPAQLAYYAAAVGRLRLHRPARLCRRRLVFPPARLAYYDRPPHPQLTATTTDGHHRLPLPTXMPPPTSAFIFTTARLRYQFTSSRRCNFVIMVERLHLYYLRHWQTLLLLLRKFYYFTNHDVFVNLDISACNAMIFYYNKXLSNIQDFYLDTFNTYLQSSNDYSTTRSYNSRLYVQLFPN

SEQ ID NO: 128724 - protein, 129 aa, Oryza sativa
  Clone ID: PAT_MRT4530_31050C.1.pep
MAPVDPARHCLVRFLLRFGCGLSLWVLPGARGFVHSKEEEGECKYIRLKRHALPRSFAHKFCLPEDSDTGDISTHCENGLLMVIVKKWMLPEKKTTSAALLPIGRHLGGLDKDGEERKREGEEDWFADV

SEQ ID NO: 128725 - protein, 33 aa, Oryza sativa
  Clone ID: PAT_MRT4530_31051C.1.pep
PSPSQGSSPDGGRKTLPVPVRWQGREAVVGPHP

SEQ ID NO: 128726 - protein, 166 aa, Oryza sativa
  Clone ID: PAT_MRT4530_31052C.1.pep
MRLASGCTFTTGWMQHLAASVLRRPPRGSARREEESSPEGVVGYVELIGGDSSSSAAMGEDTQEAKALMIAIVPHLHRWYSRLRWPLLAGRLRRVGCLPVLVDKCALRRLRSTTFLHTKTFTPDFGILWFKASRLLAEWSSLVTLHLPLLYILAFSSRKELFLTSH

SEQ ID NO: 128727 - protein, 57 aa, Oryza sativa
  Clone ID: PAT_MRT4530_31053C.1.pep
YCNDSFNYRVYQQLYSGIGTNIVVLQEMIHHSPVGHLPWHYLYDGARIGCDKIAHAS

SEQ ID NO: 128728 - protein, 384 aa, Oryza sativa
  unsure (1)..(384): unsure at all Xaa locations
  Clone ID: PAT_MRT4530_31054C.1.pep
MATANPFDILGADDNDDPAQLLAAAAAAAQKAEAKKAAAAAAAPAAGKXAAQAASAAAKFPTKPAPPSQAVRESRGGGAPSRGGFGRGERGRGRGGRGYGQNRDFGGDNANGYQGGYGGGYGDGAVAAGGEGDRERGPRAPFHGGRRGGYRNGEYGDDSERPPRRNYERHSGTGRGYEMKRDGAGRGNWGTATDEALAXAQETEEALKVEESAPIAEKQGEQDDAPTGEKDNKEGAANEEEEKEEDKEMTLEEFEKLREEKRKALLAFKAEERKVEVDKDLQSMQPLSTKKGNDEIFIKLGSDKDKKKENAERDERAKKSVSINEFLKPAEGERYYGGRGRGRGRGDRGGRGYGGGYQRGPYSTSAPSIEDQAQFPTLGGKPRA

SEQ ID NO: 128729 - protein, 74 aa, Oryza sativa
  Clone ID: PAT_MRT4530_31055C.1.pep
FTTQKGFPQARSTSLNTRRVGTSLAHERLVRSLIFWTNMGKTHGRGGPPRATCKDRTHWTVDLGLSKGMGQPEI

SEQ ID NO: 128730 - protein, 92 aa, Oryza sativa
  unsure (1)..(92): unsure at all Xaa locations
  Clone ID: PAT_MRT4530_31056C.1.pep
WLCLNQNSFDLTREKLLATGGHHILVSLNHYKFICKGSQLTRLSVPCIYINRSVLMDSEAQIQCLFMYWEXDHIXCGQRRPQVPILHNXVYX

SEQ ID NO: 128731 - protein, 58 aa, Oryza sativa
  Clone ID: PAT_MRT4530_31057C.1.pep
NTAASKTTEKAPRNVSLNNMVRQSPPRKTTPATIGASWESLPSDLQSIGLEVMSYRDA

SEQ ID NO: 128732 - protein, 155 aa, Oryza sativa
  Clone ID: PAT_MRT4530_31058C.1.pep
EPPPPPSLALSPISISLSLSVAAGRLVADADADVVAAEHDSAAPRRRGGTTRRDATTPPRHGTAAPPRLRRTTPPPRNAAAAPRAALPPRCTPHRCRARRHAAAAPPRRHSAAATPALRCRHVNERINVNERMNVNENVNERNVRERELNVNERA

SEQ ID NO: 128733 - protein, 135 aa, Oryza sativa
  Clone ID: PAT_MRT4530_31059C.1.pep
RRMHAYVSFDPLERRGPGGPVEDHYRTLQLPRGPPRARSRGPSAARAHVSSRPFQRTTRLRGVHFQRTQPWPTRLVTGHTTDGTADGRGWTIPGRLKYRPRPTDGPWTNVPGHPPQRPNDRPTDTGSTVYTLTDS

SEQ ID NO: 128734 - protein, 36 aa, Oryza sativa
  Clone ID: PAT_MRT4530_3105C.1.pep
YTFFISTTIYIEPTPSPNYNALPYPTAFPNIAKFHV

SEQ ID NO: 128735 - protein, 104 aa, Oryza sativa
  Clone ID: PAT_MRT4530_31060C.1.pep
MTRRPVLDVEHAQVVTDACPPATPTTRPPPLRPCLSGPPPTSSPSPPRPPPSPLPRPPPPHSCAAPSRASPPWTWPPTLVRSIRDRSRPSPPHPQSPPTLCAAP

SEQ ID NO: 128736 - protein, 910 aa, Oryza sativa
  Clone ID: PAT_MRT4530_31061C.1.pep
MSTSADPSSAPTAEYVEICQPRFKSLEEYLQILALSRKKLASLVYEGPMTPTLLDVTMIIGLDITSSANPVSLNTTSTFEFKTQNIGGWSGFVAKNMGNGPPNLMFSFSGDPLGAQGDFEAISPPARLPPAEMSSSASPSIAPSAEYTEHLSNLVAIPSLSHENHYFLGPIGNLDPTEFIIAETNRIPFRLANPNQATKQVHRDELGISQALALTTANSAKDEPLMAAATYFWSNTINAFLFNQGPMTPTLLDITMITGLDVTSSANPMSLNTKNQFDFRTKSIGGWSGYVAAYMGKGSVTSREHVAFLLMWLEKFLFCGSSCGPTTNWQFLAEALETKRQFPLGKILLGYLYQMLNNASAKIAVGSIVSAGRPWWLLQTWLNLVAMKAVNQPAVTEAEFPRLEPITNDDGEERTHHRCMSDGEYASTPADAGAKLSAELLKDWVCSFYEGFQRDARVWFPYEDLINFDLPGDFRFEDLNSEKWWGEWKQNIFHQSTSMYMTDLFPDVISQKTESSPPRKSNSGRDIEYAPGLLPNGGGLAPPVIGYHAPKTSSLFQGQMREPADVGRKRKTKASAIDPLALAPKKKTKKNKPTPADDLPALDPSIEQALDEEKIEEDIDQAAAEKKKTVVRKKSAVTTLKPAPPPPPPPSPPMQQMSSDRTPLATGSHHVEEEEQPAANAIPVLADLFSFDIKDYFDEEVEEESTSKALAPLDETVKKTLEDISIRLESSLDNLVADCGSIRARFAEIQALVPDDLANTITLAVYLEQHQFKLEKAKQWIADRRERKDIEATIQANWELVHEEKAKLDQLSAGPIQSNIDKLEARKIDLIAQLEECNAELNLERQKLANLPSAVEEHKSRLRSAIKNVADMTKSLKFISGTDTQDIQAIEEVDQIRQRAVSAIQRYLSR

SEQ ID NO: 128737 - protein, 43 aa, Oryza sativa
  Clone ID: PAT_MRT4530_31062C.1.pep
SLPTKWRAARCAHFALRSLAALLPLSGRAAGSTSVNIFTGTIF

SEQ ID NO: 128738 - protein, 60 aa, Oryza sativa
  unsure (1)..(60): unsure at all Xaa locations
  Clone ID: PAT_MRT4530_31063C.1.pep
KLKECPFHFKRSTSSPKSAEGHIPSXLKVGSNCCTLGVQIFKDQGSLTSQKEIFCFQKAY

SEQ ID NO: 128739 - protein, 80 aa, Oryza sativa
  unsure (1)..(80): unsure at all Xaa locations
  Clone ID: PAT_MRT4530_31064C.1.pep
AGAGAGGGRRKTTAQIIAEIKRMEIRXRAMATSSAAVACLPALASILEEQHHHSPCRSLGVHQVAVEVTYSHGYMCLHAL

SEQ ID NO: 128740 - protein, 98 aa, Oryza sativa
  Clone ID: PAT_MRT4530_31065C.1.pep
MENNEGGKGSNERVTERLCQAAISVELFNLLDEKIHMDTTEGEAMRKAVDLFYDKENCFYLVFTYFFDLLEGISLICTGKINNPRRGVSIAKVQHNNV

SEQ ID NO: 128741 - protein, 66 aa, Oryza sativa
  unsure (1)..(66): unsure at all Xaa locations
  Clone ID: PAT_MRT4530_31066C.1.pep
TGLXSMSKSGALSMRLHCPDTKVPAPIAIHFTDKARRKXQASKGTGTNXFKSSTKQHGYNCCLTKA

SEQ ID NO: 128742 - protein, 53 aa, Oryza sativa
  Clone ID: PAT_MRT4530_31067C.1.pep
MPWCWMLKPHPVLYGEAGALSIDVGVYTDAPIGLARRSSEFLMPPASHLRAYA

SEQ ID NO: 128743 - protein, 163 aa, Oryza sativa
  Clone ID: PAT_MRT4530_31068C.1.pep
MASSSGSGGSAVSAATAAAGGSSSAAEEELRALMEQRRAKRMLSNRESARRSRMRKQRHLDDLTAQVAHLRRENAHVATALGLTTQGLLAVDAENAVLRTQAAELAARLASLNDILSCINTNGAAAAAAAALTVAAATDPLLAFDSAAFDDLFRSSPELFQLC

SEQ ID NO: 128744 - protein, 80 aa, Oryza sativa
  Clone ID: PAT_MRT4530_31069C.1.pep
MRSHAGESGQSPDLGRDGHCHRIRARTAAGRPSSPAHALPSPPGRGGEEPWQLVVRALPFAGEGRGGHPGSCAGIRGVGE

SEQ ID NO: 128745 - protein, 363 aa, Oryza sativa
  Clone ID: PAT_MRT4530_3106C.1.pep
MAAAARLVSTTLARSSSSLAAAARRPDLLASSPRGFSSMADSIQRSGSGDITRVDEVGLEEVPDVIQNYHLCVVKNRRLDSDTIAKASQMKIIMQYGVGLEVAQLPPWILSIQLFAGVDVNAATEHKIKVARIPGSTTGNAVSCAEMAIYLTLGVLRKQKVMDTAVKRKDLGIPVGDTIFGKSVLILGFGAIGVEIAKRLRPFGVKILATKRNWSSDTLPCDIDELVDKKGGPEDMYEFAGEADIVITCLLLTNETVGIVDHKFLSAMKKGSYLVNIARGRLLDYDAVFNHLKSGHLGGLGIDVAWTEPYDPEDPILKFSNVIITPHIAGVTEYSYRTMAKVVGGVALKLHSGEPITEVEFVN

SEQ ID NO: 128746 - protein, 314 aa, Oryza sativa
  Clone ID: PAT_MRT4530_31070C.1.pep
MAHRRIALAVLVTLLLSAFRPCLAQQSNDDTSKHHRSATAGGFTPTTVVVLVALITAFVLLTVFSVLINRCAQARAPPRRAFRSTASHQPVGGAAAASRASRGLDKEVVEAFPTAVYGDVKARMAAKSGPLECAVCLAEFADSDELRLRLPSDLTAPEEAVQEEESEELDEASLMATFTPESVIDFGATHDHEFDRAGYPHYRRTQSAMDAAPDRHTLRLPEHVMKELAADRRHRRAASLAGYPDSVERTPRWLTSLWRSVSWQRQSRADWDAGEEHGGSKRVHPVAGAQDETPSGSGSDGSKENSDSDALNRV

SEQ ID NO: 128747 - protein, 62 aa, Oryza sativa
  Clone ID: PAT_MRT4530_31071C.1.pep
TRTMGQTKYIFVSIKKKRGAFSGEIKSVSLTGCWVIRAPNYNGRKGDKPRTVIKWLSEHFIG

SEQ ID NO: 128748 - protein, 160 aa, Oryza sativa
  Clone ID: PAT_MRT4530_31072C.1.pep
LGMASALETLCGQAFGAKKYHMMGVYMQRSWIVLLACAVLLLPMYIYAEDVLLLTGQPPELSAMAGRVSVWFIPLHLSFAFLFPLQRFLQCQMKNFASAAASGVALCVHVLGVLSTLSGYPARLAARRCLRSAASSFMTCSGSLSVCRSGAASMADCVLR

SEQ ID NO: 128749 - protein, 57 aa, Oryza sativa
  Clone ID: PAT_MRT4530_31073C.1.pep
ELSHVKGGLPKRGSNLALSPSDKNLVQMGAPAPMSVNMARKIEPTPFPQINPHSKPR

SEQ ID NO: 128750 - protein, 63 aa, Oryza sativa
  Clone ID: PAT_MRT4530_31074C.1.pep
QSSGKAAQRGTGGDRGGDRAWNSKTRRGACRGWSGERERERGIVLGSASAHAYTHAHACAAHW

SEQ ID NO: 128751 - protein, 61 aa, Oryza sativa
  Clone ID: PAT_MRT4530_31075C.1.pep
PQSGSLDRYNPTGCTASDCLQSCTHHLKGSRDVAPHRSTGLRSLLLGGTVSKTMGVTPSGI

SEQ ID NO: 128752 - protein, 61 aa, Oryza sativa
  Clone ID: PAT_MRT4530_31076C.1.pep
MKTWHPINFVRWLHTNCATPPKSPRHTQPIIGEDLAAWPLPFAAPRVGYGDRICEASDMQN

SEQ ID NO: 128753 - protein, 75 aa, Oryza sativa
  Clone ID: PAT_MRT4530_31077C.1.pep
HHTHFTKIFLQIINYSHIHYTISLDKPIISLNTLRLPIAQHPNISAPFMDPMIAMPQYHPRKSISILQNWNNHLP

SEQ ID NO: 128754 - protein, 51 aa, Oryza sativa
  unsure (1)..(51): unsure at all Xaa locations
  Clone ID: PAT_MRT4530_31078C.1.pep
PTGVSLVPRPLVYVXLSDPXVLLVPVCLLYGVVYDLKYAWRLIQIKKKKKK

SEQ ID NO: 128755 - protein, 52 aa, Oryza sativa
  unsure (1)..(52): unsure at all Xaa locations
  Clone ID: PAT_MRT4530_31079C.1.pep
MASPQCCANPPTLNPAGGEGKVVESFFGIKAYVXFSSDFKFSVILISDVFWF

SEQ ID NO: 128756 - protein, 739 aa, Oryza sativa
  unsure (1)..(739): unsure at all Xaa locations
  Clone ID: PAT_MRT4530_3107C.1.pep
SHHHSWATTSSPXPACLRRRRLVSPPTRLAYYAAVVGHLRLHCRPASVVADWCPRLYGWLVTPPFMGVHVFTDRPPRPPPTGVSAYTAGLLCRRCWASTSSPXAGLRRRRLVFSPARLAYYAAVVGRLRLHRWPASVAANXCPRLYGWLVTPPFMGVHVFTDWLAFAAAGWCLHLHGWHIMPPLLGVYIFTDRXPSPPPTDVSACTASLXYAAAVGCLRLHRRPTSVSADWCSRLYGWRTPPPXWVSSSTPLAWFHWRRLVFLSPLMDCFVPTSATSXPPREYDKAKSSFIFRAECLNVRSHLLGEIKFDKRRNTYLXYLKILAFFSSIIFTSDTTHPISLFCRIQIQICIKGIHGFKLISYALGMDQSEHHHRXPSPPPTGVSACTAGLLCHRYWASTSSPTGXSSPPTGVFAYTDGXHTTVVGRLQLHRPACLRRRRLVPPPARCPIMPPLLGVYVFTDRPPRPPPTGVSACTXSLLCHRCWASTSSPTGRLVRRRLVFPPARLAYYAAVVGRLRLHRPAASSVADWCFRLHGXLLCRRCWASTSSPTGRLVRRRLVFAPARPAYYAAVVGHLHLHRRSSHLLXLVPLPLRLVYTATTTDGHHHLPSPTXMPPPTYAFIFTTARLHHRFAFVTADLCXTSLQQYNFVIMVERLHLYYLRHRQTLLVLLRKFCYFTNHDVFVNLDISACDAVLFYYNKWLFNIQDFYLDIFNTYLQSSNDYSMTRSYSSRLYVQLFPN

SEQ ID NO: 128757 - protein, 125 aa, Oryza sativa
  unsure (1)..(125): unsure at all Xaa locations
  Clone ID: PAT_MRT4530_31080C.1.pep
SSSTGDNPYYPVLPFLQELAGWVFFPSEFLCHLFLYLFLYLNDPLFDLFNGPVFDMCDQXLVILLVNLAKAWXCVDSIASNNLVKQLALMEPLFXPGMANLSFGKRLMLVGRRFTFMGQYGMGEL

SEQ ID NO: 128758 - protein, 69 aa, Oryza sativa
  Clone ID: PAT_MRT4530_31081C.1.pep
APRRLRPRQWDLVCIGFVCYRIGCIWFSRPRMKIRLDDKLRDLKLTYSEGEWLIALLSLRDFFYFFIKN

SEQ ID NO: 128759 - protein, 610 aa, Oryza sativa
  unsure (1)..(610): unsure at all Xaa locations
  Clone ID: PAT_MRT4530_31082C.1.pep
PIAIASFYHHFVKDFNTIAAPLNELSDKGALFQWGQSQEETFNLLKDNLTHAPLLQLLXFGKTLKLDCDASGFGTEGVLIQKGKLVAYFSDKLYGPSLKYSNYDKESYALVQTLETXQHYLWPKEFVIHSNHXSLKHIRSQSKLNHIVIXESFPYVIKHHKDKENVIANAFTXDFNFFLVWERSTLIMIKNIKDHYVHDVDFKXFLLYCMEGKMWNKIVITNGFVFRSHKLCIPASSVRLLLLXEAHGGSLMAYFGMKNTEDVLASHFYCSRMRRDIEHCVSHCTTCNKAKSRLNXHGLYMPLSVPSVLWEDISINFVLRLYRTKRGRDSIYXRFSMMPHIIHFHMSDDATQIDELFFREAVHLNEVMSTVVSDCDTXLSYFWRTLWNKLGTKLLFSTINHRXADGQTEVVNLTLSTMLRPYMEKNLKMXEESLTHVEFVYNRSLHSNPFHVVYDFNPHAPVDILPLPISEKVNFDASKRVEFVLKLHETTRENIERMNDKYKVTSNQGRRELTFKLGDLVWLPMRKEIFPYLHRSKLIPRADGPFKAITKINDNAYKIXLFVDYIVSDAFSVADLKSXLGGEHELESRMTSIQTXEDNKDISTMDTVDS

SEQ ID NO: 128760 - protein, 41 aa, Oryza sativa
  Clone ID: PAT_MRT4530_31083C.1.pep
TVSNLPGYSSAAKLYICELKKKLATSVKMSMIVTKFGPWGG

SEQ ID NO: 128761 - protein, 81 aa, Oryza sativa
  Clone ID: PAT_MRT4530_31084C.1.pep
GPPPFGGLNLTNEPPASKVFFFLSKGGGFIFPPPKQDKLGPPYFFDWTWVCDFGCIKGPPPVLIPGWFYLLTPQKKSPFFP

SEQ ID NO: 128762 - protein, 54 aa, Oryza sativa
  unsure (1)..(54): unsure at all Xaa locations
  Clone ID: PAT_MRT4530_31085C.1.pep
MPSRSHGVASSAAEMARTAAGGVERGGGGGGXTCGRRSGSVGRAKWQRRRASAR

SEQ ID NO: 128763 - protein, 78 aa, Oryza sativa
  unsure (1)..(78): unsure at all Xaa locations
  Clone ID: PAT_MRT4530_31086C.1.pep
PRGTATSTNQRQTEAGRDTGGPLTAGSHHHPLPAITDLHRLSHARRRAGSKDRGWDGWIDLXLHTAVSALCPRVHEEI

SEQ ID NO: 128764 - protein, 199 aa, Oryza sativa
  Clone ID: PAT_MRT4530_31087C.1.pep
MAKNESMLIVAAHFWSDAMNAFLFGRGSMTPTLIDVIMLTSLNISALDNPFHLMTKPTYQLKTKDAGGWKGYMAHHMKTSTVTDRDHVAFLNMWLERFIYCGKTVGPTTNPQAITEALVSGHSIPLGKHLLGSVYSLLHNVSAKLATGQPITNPGGPWWLINLWLNLYMHKTLQQDPTSMSFCHTLKISILICEIENSG

SEQ ID NO: 128765 - protein, 49 aa, Oryza sativa
  Clone ID: PAT_MRT4530_31088C.1.pep
LNVEDHHRLFCVPHQQCFFPLSAAKILLIGKVNPPAFVSCSFCCIVAFW

SEQ ID NO: 128766 - protein, 61 aa, Oryza sativa
  Clone ID: PAT_MRT4530_31089C.1.pep
AAISPEKVRSMRKEVIRLIPTVVYADTRSSRVDFRDAFDVAVDAVVGRVARRRRDEPDARR

SEQ ID NO: 128767 - protein, 292 aa, Oryza sativa
  Clone ID: PAT_MRT4530_3108C.1.pep
MAGSVGGGGWPAGGSATPALRSNGSAVCIYKDMFFTYPINLYELNILLKILVDEVGLEEVPDVIQNYHLCIVKNRLIDSDIIAKASQMKVIMQYGVGIEGVDVNAATEHKIKVARINGSTTGNAVSCAEMAIYLTLGILRKQVLILGFGAIGVEIAKRIRPFGVKILATKRNWSAETLPCDIDELVDKKGGPEDMYEFTGEADIVITCLLLSNETGSYLVNIARGHILDYDAVFDHLKSGHLGGLGIDVAWTEPYDPEDPILKFSNVIITPHTAGVTEYSFRAAAKIVLTYS

SEQ ID NO: 128768 - protein, 69 aa, Oryza sativa
  Clone ID: PAT_MRT4530_31090C.1.pep
MAEERGPDPHVFGGGDNPPPKEGAQGPQGQRGGGGNPGGGPRLKAGIAPPPVKPPGKPLGSPRGQPKPP

SEQ ID NO: 128769 - protein, 847 aa, Oryza sativa
  unsure (1)..(847): unsure at all Xaa locations
  Clone ID: PAT_MRT4530_31091C.1.pep
MASSSSGVMNSLLTKLATLIREECYSKLKGVRNEVVSLEGELRSMEALLEKLACMDELDVQVKEWRDQVREMSYDIEDCIDDFVHRLGKYDVRSGLIKKTTELPRKLRARHQIAKKIEEIKNHVKEVNERRMRYKLDEYTSKSSCEPIDPRVVTIYANTADLVGIDIPRDDVVKLLMGDDEQQLKGFGGLGKTTLANEVYRKLDGHFHCRAFVSVSQRSDITRLMSKVLSELTGQYNLHIGELDNLLKVIREYLQDKRYLFMCRYFIVIDDLWDSSAWNVIRCAFPENNHGSRVLTTTRIYSVAISCCSNKKEYVYNMSPLGEVDSRRLLFSRIFGTGEACSEVFEEISGDILKRCGGLPLAIMSISSLLAGQSKTKWEYVRNSLGSMFERNPTLEDMKHILDFSYRNLPQHLKTCLLYLSIYPEDHTIERNDLVRQWMAEGFVSRTHGLDSEDVAQSYFNELINRSMIQPVQVDYNDEVLSCRVHDIMLDFIRSKSAEENFIVVLDHPQVVVGAHKKIHRVSVQYDADEEHGIISTTILGSLSQVRSIAVFRSSFRPSLLELKHLRVLHLELPMREVMDLTGICGLSLLRYLKIRGYYACFKLGMKIRQLLHLETFDLGESFVPRIAIPSDIVHLPCLLHLVIPCGTTLPDGIGSLKSLRTLTSLDLALNSVNNIECLGELTNMRHLGVHLGDIGLLADADVARRLDALCSSLESLSRSSSCLRSLDLDSHFILVSFDRLSDLCPSPRHLRRLNLYGCRLPRIPRWISQLHNLYSLVLLVREAWCLLNLKAMMEFXILAKLPSLVQLDLGIRECPKERIVVSGAGTAFRALRDLTFSCPKPRLAFL

SEQ ID NO: 128770 - protein, 37 aa, Oryza sativa
  Clone ID: PAT_MRT4530_31092C.1.pep
MAMARWKASATRRHWRRPLLVLASLRRHSVSRPSHRS

SEQ ID NO: 128771 - protein, 468 aa, Oryza sativa
  Clone ID: PAT_MRT4530_31093C.1.pep
MTFLNVHEVLPNHVMKYLSGSKVVAVGRDISGKLITTDGMLISDSNGSEDAEEFMLSTCKISEGWEGGALFDSDGNLIGMNLLFLVGRSLFLPISIIIERLEYFRTSYRRRKFFALATKLKAIRVGGRLSIEMPKSLLEDVCDEDQFECLDSMGYPMPSISMANDGMVLVNTFEETFGDLYDEGVWSELSKNVSSRISRNVVSLASFNGETRYFACTGFFIEWNGCTSILTSASLVRKSGDRSKIVENLRVANVVLILFCDPCSSKIEVLLPNKKRTEGTLEHCNLHYNVAIVSVKDFRALCPANLHHEQESVCEDVLAVGRCFESDILMAASGHLVGWSGTLDCRMLRYANFKITKAGIGGPLIDFDGRYVGINFFDDIVGTPFLSCTVILHVLSRFDEERTINKVGNGDTSSGVLDWTMTGDRSVRPNSWPVPKPFWCHPDDLPRNETRTRHKYGYYNGQKFKYMC

SEQ ID NO: 128772 - protein, 97 aa, Oryza sativa
  unsure (1)..(97): unsure at all Xaa locations
  Clone ID: PAT_MRT4530_31094C.1.pep
PPEPGGFPDPLSPXGPFMGGGFCGFKFPSGPPPGSFFWGRPPEFSAFRGSRFGPGLFXVKNQTPSFWGWPRNPDFFGRVGDEIFLVWGPAQGLVQSR

SEQ ID NO: 128773 - protein, 116 aa, Oryza sativa
  unsure (1)..(116): unsure at all Xaa locations
  Clone ID: PAT_MRT4530_31095C.1.pep
FKAARLLDRPGLNLLDPRIRFVSMPIMPLKTGDFLKHKGVNHTGSPYDEYWQKLNMPQTGMXKPYRQYRRCTSDYFKHYPQPAIDLIDNLLALQPETRGTADSTFHTDFFRRKPCL

SEQ ID NO: 128774 - protein, 148 aa, Oryza sativa
  Clone ID: PAT_MRT4530_31096C.1.pep
MATRRVSGAARPAGYSVLSACRRHRQPEIALLPLVGDAENAGRSATTRCLQGIISSSCVPNHLAGVAVDTAEPPKSIDGEALPANASPHHHPLPAGEGHCQVAKVLVVDIRKSLIYHPQVRDGYRRTPVAGTCHDAPLLGTDVPLRLY

SEQ ID NO: 128775 - protein, 335 aa, Oryza sativa
  Clone ID: PAT_MRT4530_31097C.1.pep
MAARRRHVAAGAGAPAPAAREWAAVTAGGGAAWALSPVEEHGMAVGMDGSISPSQASRGGEEAAGNGKDGEALGGGDKALPFEFRALEVCVEFACKSLEHETCTLEKEAYPALDELTSKVSTLNLERVRQIKSRLVAISGKVQKVRDELEHLLDDDMDMAALHLTEKLAYQSSRFDIDKEASELEDHSSRDEEGVEGGGGGDGDDETIAGGGSFSPNTDELEILLESYFVQIDGTLNSLSTLREYVEDTEDYINMMLDEKQNQLLQMGILLSTGTLVSSCAIAVTGVFGINVHISLYDSPASSAAFPCAAAGIVAGSLALYLAALLCYKRAGILQ

SEQ ID NO: 128776 - protein, 77 aa, Oryza sativa
  Clone ID: PAT_MRT4530_31098C.1.pep
NMSGTRFILNFYRDGGSAWFNMVHNKTRLCMMSLARTRDAGRSGRGPGCRRAGHLGPNPVPHPPAVHHPRPPLRRPV

SEQ ID NO: 128777 - protein, 434 aa, Oryza sativa
  Clone ID: PAT_MRT4530_31099C.1.pep
MAARRRHVAAGAGAAAPAAGEWAAVTAGGGAAWALSPVEEVGTKQELMRRTGLPPRDLRALDPALSSAASASSCRPSAITGRDRAVVVNLDRARAVITASEVLVPSPRDPAVAPLVRELRARLALAASPTPAPSPSPPQHGMAVGMDGSISPSQASRGGEEAAGNGKDGEALGGGDKALPFEFRALEVCLEFACKSLEHETCTLEKEAYPALDELTSKVSTLNLERVRQIKSRLVAISGKVQKVRDELEHLLDDDMDMAALHLTEKLAYQSSRFDIDKEASELEDHSSRDEEGVEGGGGGDGDDETIAGGGSFSPNTDELEILLESYFVQIDGTLNSLSTLREYVEDTPDVRNMVGDEKQNQLLQMGILLSTGTLVSSCAIAVTGVFGINVHISLYDSPASSAAFPCAAAGIVAGSLALYLAALLCYKRAGILQ

SEQ ID NO: 128778 - protein, 232 aa, Oryza sativa
  unsure (1)..(232): unsure at all Xaa locations
  Clone ID: PAT_MRT4530_3109C.1.pep
EWISQNITTGLPSPPPTGXLRLYGWLVTTPLLGVYVFTDRXASSATNWCFRLHGWPXLCRRCWASTSSPTGRLVRRRLVFPPARLXYYATVVGRLRLHRPAASLTGRXSAADWCHRLHGWPVMTPTDAIFFTAGYIAVTANRRQHLQHKLPTSAADWFIHFHGCMILLVLIGLIVFIAATTTDGHHRLPSPTGYAAAGWCFYLHNYMSSLPLSYFTNHDVYRSFDISACVTK

SEQ ID NO: 128779 - protein, 302 aa, Oryza sativa
  Clone ID: PAT_MRT4530_310C.1.pep
MRKLVPSPSLPTATALAGTPEMAAVALALALRGWWEEVNGSPAWQDGAFFSLSAAYALVSAVALVQLIRIQLRVPEFGWTTQKVFHLMNFVVNGVRAVVFGFHAQVFLFQTKVYTLVLLDLPGLLFFSTYTLLVLFWAEIYHQAKNLPTDKLRIIYMAVNGVIYVIQVCIWIYLGTNDSPLLEPVSKIFISVVSFLALLGFLIYGGRLFFMLRRFPIESKGRRKKLYEVGTVTAICFTCFLIRCIVVAMSSFDPDLSLEVLDHPILDFFYYMLTEILPSALVLFILRKLPPKRVSAQYHPIR

SEQ ID NO: 128780 - protein, 187 aa, Oryza sativa
  Clone ID: PAT_MRT4530_31100C.1.pep
MACSFPPSSATRLQAVDAAAVRSSRVPPRAATVSPVQRSLGAGCKAAAAARQEGATQDPAISVSSARTQLDLLEQLTTPTSDGIGVENGAPTEPRVQTTIREQLSAVIGDRDGEYTLPLGKKLKEGLKKLNSLTVSQRRNIKRQALLTKVSGRNDSVFFATVGAFVLVPPLAILAIAVLTGYVQLLP

SEQ ID NO: 128781 - protein, 107 aa, Oryza sativa
  unsure (1)..(107): unsure at all Xaa locations
  Clone ID: PAT_MRT4530_31101C.1.pep
MRVVGTKTTSSYGGYSYXXKYCRVGKAVSRNPVPSCRNYIARWCAFFWGRGGSXXHPPRQILNXCCRELAAVPMQCLCYSLSVLVRGVFTEEGDRFAVMISHHSAPG

SEQ ID NO: 128782 - protein, 60 aa, Oryza sativa
  Clone ID: PAT_MRT4530_31102C.1.pep
FQELLLKLNGDRAIWEYPFAVAGVNITFMLIQMLDLQSVKPRSFIGAVFLKLLSGKAYVS

SEQ ID NO: 128783 - protein, 59 aa, Oryza sativa
  Clone ID: PAT_MRT4530_31103C.1.pep
MGSIPPPPQKKNVGYGKKKNRFYFQKKKKKKKKKKKKKKKKKKKKGGHSRSRTLVLASR

SEQ ID NO: 128784 - protein, 106 aa, Oryza sativa
  Clone ID: PAT_MRT4530_31104C.1.pep
PTRAIANTDSVKLRYAAYKGWMNVIDDLHLSDFVYRLGGLYGPARSAVHTLAKSTYYDRRPKFHESRQSTALIHVVDNCQAIHASMSIRSATRIYNAVDDHPAPTS

SEQ ID NO: 128785 - protein, 47 aa, Oryza sativa
  Clone ID: PAT_MRT4530_31105C.1.pep
EVVWLLPSPEYSQAGRSSRRSRTLRSMPESGVILRAVTKHTLNRACA

SEQ ID NO: 128786 - protein, 48 aa, Oryza sativa
  unsure (1)..(48): unsure at all Xaa locations
  Clone ID: PAT_MRT4530_31106C.1.pep
RGCERGGFGRGFGRGGGGDRGGRRGGLRXRIQEEEKRLPLTKFGRLEK

SEQ ID NO: 128787 - protein, 133 aa, Oryza sativa
  unsure (1)..(133): unsure at all Xaa locations
  Clone ID: PAT_MRT4530_31107C.1.pep
MHEALFDINLFSILTILSFLLSLPLMLFSEGVKFSPRYLRSTVSVXKIQINRHYSQKYMNKWNVLFGLQGLNLQELCVRAALAGFCFHGYQKVRTEETVTSSLGQERFVLDDSLTCKQKDHSVFFFEIGSSPT

SEQ ID NO: 128788 - protein, 103 aa, Oryza sativa
  Clone ID: PAT_MRT4530_31108C.1.pep
GTKLHLNDPRRPGVHSWLNNKGTEIILNPQNTEALALPAALYLYEKMIHTITSRGPPPPCTTTGHRNIILWQSCEDCKGALNPEGGPPKLFFNWGNKGHPGLW

SEQ ID NO: 128789 - protein, 82 aa, Oryza sativa
  unsure (1)..(82): unsure at all Xaa locations
  Clone ID: PAT_MRT4530_31109C.1.pep
GRSWVLLELGPVGPAVCARSDRPARGDSMSRESICGDGPGSDRRQGDGQTGGSEAVRSAAATGXRRLQRSDRLTYTGQTDGI

SEQ ID NO: 128790 - protein, 325 aa, Oryza sativa
  unsure (1)..(325): unsure at all Xaa locations
  Clone ID: PAT_MRT4530_3110C.1.pep
MADSIQRSGSGDITRVLFCGPYWPASTSFTKEXYLHSYPFIQVDEVGLEEVPDVIQNYHLCVVKNRRLDSDTIAKASQMKIIMQYGVGIEGVDVNAATTQYSKVARITGSTTGNAVSCAEMAIYLTLGVLRKQKVMDTACEGHGRGITIGXDSKLEKKIVLLEFETFVAQMAIIDXLNRLSSRYNNKMVXSVICYGTDNSSTNTIXVLKDKYEFTGEADIVITCLLLSNETVGIVDHKFLSTMKKGSYLVNIARGHILDYDAVFDHLKSGHLGGLGIDVAWTEPYDPEDPILKFSNVIITPHTAGVTEYSFRAAAKVCTNSSKCP

SEQ ID NO: 128791 - protein, 158 aa, Oryza sativa
  Clone ID: PAT_MRT4530_31110C.1.pep
MAAAGDLTDEERRALRGSKFAPLPAPTAPSRPQPRMAHPGGPLTTNKAAALAKFLERKLQQPDGLESLNPDLVKLAVRNAKETIKASKGEPSTSGRIVRHVSSFGDSSESYHIAQKDKSFQNGGEQSKKKKKNKKKNLKAAKDSKSQKASKKKKLKSL

SEQ ID NO: 128792 - protein, 173 aa, Oryza sativa
  Clone ID: PAT_MRT4530_31111C.1.pep
MAAAGDLTDEERRALRGSKFAPLPAPTAPSRPQPRMAHPGGPLTTNKAAALAKFLERKLQQPDGLESLNPDLVKLAVRNAKETIKASKGEPSTSGRIVRHVSSFGDSSEDSDDSKDGEETKGVKRKRKNKKDKSFQNGGEQSKKKKKNKKKNLKAAKDSKSQKASKKKKLKSL

SEQ ID NO: 128793 - protein, 421 aa, Oryza sativa
  unsure (1)..(421): unsure at all Xaa locations
  Clone ID: PAT_MRT4530_31112C.1.pep
MHHDPNPFDEGADENPFSNGGGGGARRGGGGGGGGGGGGGKSQFSFGFGGLGGGGSKGGATVDIPLDNMSDSKGKGKELLQWEADLKRREADITRREEALKSARVPMEEKNWPPFFPIIHHDIANEXIPANAQKLQYLAFASWLGIVLCLFWNFIAXIVCWIRGGDSKLFFLATIYGMLGMPLSYLMWYRPLYRAMRTDSAFSFGWFFLCYMLHIAFCVFAAIAPPVIFRGKSLTGILAAIDTFSDHAIVGIFYFVGFALFCLETLVSIWVLQFNFTVDWSVGLRQEPCSLEPEDSNPSVWGSHLCFETWKESCTPWRFSFRRTWDQVQSQLQLLNLGSANTEPNEAVYHIFPSDAAADEVMRCSPAATRLRVDCVGGLDVHIWCTANSKVEGSSISDIQPPVSSLHSLILSQPSLRCHVA

SEQ ID NO: 128794 - protein, 70 aa, Oryza sativa
  Clone ID: PAT_MRT4530_31113C.1.pep
MASHLDAAALLLLCLAVGCAGFLGPIIEALENGSFTGNRAVDAAAGDLLRLALPAAYFTGIILVYRRVAL

SEQ ID NO: 128795 - protein, 123 aa, Oryza sativa
  Clone ID: PAT_MRT4530_31114C.1.pep
NPPKSNLKTHETNPKLLSNKSNPISKNKILKSHEKKNPISLGEAVDTDRICCVKPPTWRRHRIHQGKPLTPSSLPLVVGEGVAATAAARGDLEGGEGAVAAAAHGGEGAVVVVMVGKCRRCSR

SEQ ID NO: 128796 - protein, 104 aa, Oryza sativa
  Clone ID: PAT_MRT4530_31115C.1.pep
DQNSKRDSSESIGVTQRTPVLQDRKTQEDTTSKSTPESTRLGNHPACHACTAGRGVTAGVFFYPHGTPWLANDRNKMRVRQSSRATSSSVVHTSCVGSSHRGQS

SEQ ID NO: 128797 - protein, 710 aa, Oryza sativa
  Clone ID: PAT_MRT4530_31116C.1.pep
MGRKDTSSSSSAAGGKKDKPMSVSAILASMDAPASKAKPSKAASKPKPSKAPASSYMGDIDLPPSDEEEDDADLVAMATKPKAARATVDLNAIAPSQKDAKKKDKREAMAAAQAEAAKQEALRDDRDAFSVVIGARVAGSAGASEGDSAAADDNIKDIVLENFSVSARGKELLKNASLRISHGRRYGLVGPNGMGKSTLLKLLSWRQVPVPRSIDVLLVEQEIIGDNRSALEAVVAADEELAALRAEQAKLEASNDADDNERLAEVYEKLNLRDSDAARARASKILAGLGFDQAMQARSTKSFSGGWRMRISLARALFMQPTLLLLDEPTNHLDLRAVLWLEQYLCSQWKKTLIVVSHDRDFLNTVCNEIIHLHDKNLHVYRGNFDDFESGYEQKRKEMNRKFEVFEKQMKAAKKTGSKAAQDKVKGQALSKANKEAAKSKGKGKNVANDDDDMKPADLPQKWLDYKVEFHFPEPTLLTPPLLQLIEVGFSYPNRPDFKLSGVDVGIDMGTRVAIVGPNGAGKSTLLNLLAGDLTPTKGEVRRSQKLRIGRYSQHFVDLLTMEENAVQYLLRLHPDQEGMSKAEAVRAKLGKFGLPGHNHLTPIVKLSGGQKARVVFTSISMSHPHILLLDEPTNHLDMQSIDALADALDEFTGGVVLVSHDSRLISRVCDDEQRSEIWVVEDGTVNKFDGTFEDYKDELLEEIKKEVEE

SEQ ID NO: 128798 - protein, 96 aa, Oryza sativa
  unsure (1)..(96): unsure at all Xaa locations
  Clone ID: PAT_MRT4530_31117C.1.pep
MAADTPASPGLAXVGLNKGHKTTPRVVKPRVSRTKGHLSKRTAFXSRXVSXEVAGLAPYEREVIELLRNSKDKRARKFAKKRLGTFGRAKAKVDKL

SEQ ID NO: 128799 - protein, 298 aa, Oryza sativa
  Clone ID: PAT_MRT4530_31118C.1.pep
MAPPPGKSPDRDGASDPDVDKNVLDSEMDMAARGNSEKKDAERPRRGLEINLEDDKMVQRMPADEVAPKKLTLQLDLEKPSLGDEKSPSERRPQPALQQQKPKNEIKHEKSAMPAVTPPMPIPVGSWLGSFPPFGYLGPVPALSAAGLHHPMDVKPGSSAGLQHAALLPPVRPKRCATHCFIAQQIRYNQQVTAKMQNFWTPATAAAAAAAASRSAAPFYGPRPFNMGVVPPAEAASLLVNPMQGSYPVRAHAPLQEAKAPSMATSPFQGSLSKDKAAMNNAAVAESSQRKQPPAHEA

SEQ ID NO: 128800 - protein, 96 aa, Oryza sativa
  Clone ID: PAT_MRT4530_31119C.1.pep
MEVRRCQCQESLRLARLTILFMASALCPRRRYDVDITSLGRKQQKEGRWSLRLWRWRSIPGDFSIPSGNPSCHMCLSCACAIILVLGTCAIILVLH

SEQ ID NO: 128801 - protein, 627 aa, Oryza sativa
  unsure (1)..(627): unsure at all Xaa locations
  Clone ID: PAT_MRT4530_3111C.1.pep
VGSCSLHGFTKREAADWCLRLQDXPIMPLLLGVYNFTAGLSPPPSTGVLAYTVGWSHHRXWASSLSPXPACFRRRLVFSPIRLADSAAVDGPRHLHRLAFATAADWCPRLYSWVVTPPLLGVYVFTDRPPRPPPTGVSACTAGLLCRCCWASTSSPTGRLARRRLVFPPARLAYYAAVVGRLRLHRPAASPAADWCFRLHGWPIMPLLLGVYVFTDRPPRPPPTGVSACTAGLLCRRCWAFTSSPTGRLARRRLVFPPARLAYYVAVVGRLRLHRPAASPAADWCFRLHGWPIMSPLLGVYVFTXPAASPAADWCFRLHGWPIMPLLLGVYVFTDRPPRPPPTGVSAYTASLLCRRCWASTSSPTGXPRPPPTGVTACTAGLXMTPTDAIFFTAGYITVTANRHHLQHKLSTSAADXALTSTSGLXTATTTDEHHRLPSPTGYAVADXCFFASVADDSCSLHHGNATLSSWXSDFIFIIFGTGKLYCCYFASFATSPTTTSLXASTSRHAMPCYFTTTRGSPIFRISTWTSSTHIFNQAMTTRRQEAIILDSMFSCFPTNQRVGGYTNTRXKFDKFYVKLKKSIHQPTSQLQESLSSSLIIXEQTFYFNNLKYFEGLRHFSLRPKCA

SEQ ID NO: 128802 - protein, 137 aa, Oryza sativa
  Clone ID: PAT_MRT4530_31120C.1.pep
TIVILSKVSSSPKLLRAANSPTFYSSMHPTPSPNSVQFPPKASPFKPSYSSQSPTQRLPAPKSPPKISSWKNHFTSPPPIHPTPKPWPAKNKRNLNRDDELATKCISKRIKNRQDGAHLKPLQPRSEEQGRQGEPGE

SEQ ID NO: 128803 - protein, 65 aa, Oryza sativa
  Clone ID: PAT_MRT4530_31121C.1.pep
ETHSTNGWRAQTALQFNRIVLQGSTHSYRLNEKGCLHLTRSIKDRTQQKQEFSGAASDCFNLDRI

SEQ ID NO: 128804 - protein, 66 aa, Oryza sativa
  Clone ID: PAT_MRT4530_31122C.1.pep
KFWLILTLFNVFFSFGALSHLKSLRFKYLSQAFDPSAFACSSNYIQTQTHSPLIHWWYMYLTPKCC

SEQ ID NO: 128805 - protein, 72 aa, Oryza sativa
  Clone ID: PAT_MRT4530_31123C.1.pep
MKGVFAKSPATTRTPENSQKPPAIQRLADASAHAGGHASVKFSGGGKFPEGSKLIIFQGSDLQEGEDSEEHT

SEQ ID NO: 128806 - protein, 100 aa, Oryza sativa
  unsure (1)..(100): unsure at all Xaa locations
  Clone ID: PAT_MRT4530_31124C.1.pep
XGGGXXGAKKKKKGXXGVXGXVFXXXXNXDXXXXXXGPXCGPGXXPXIPXXGSXXWGGXVXXFFXSXAQTWXLXVPPERAEXLIHXXPXXLXXXXNNXLF

SEQ ID NO: 128807 - protein, 179 aa, Oryza sativa
  Clone ID: PAT_MRT4530_31125C.1.pep
MENVTGGGGGGSPRRVVVAVDESEESMHALSWCLSNVVSAAAKSPAAAPPPAVVLVHARPARPLYYPVIDGGGYVLTQEVMDSMDRYMATAADSVVAKARDICTAFPNVKVETRVEKGDPRDVICGAVEKAGADMVVMGSHGYGFLQRTLLGSVSNHCVQHCKCPVVVVKRPGTNAKAS

SEQ ID NO: 128808 - protein, 72 aa, Oryza sativa
  Clone ID: PAT_MRT4530_31126C.1.pep
YGVVCRGESQPQAAYYLVVGRAEQVSSQLGLHLRRTCTSSSSNSCPVRRKCRWIRCRKTSPAPPPQPARTKS

SEQ ID NO: 128809 - protein, 365 aa, Oryza sativa
  Clone ID: PAT_MRT4530_31127C.1.pep
TGSDRQDSMNGLSSRFLLASSHAPSITVDFELLWRLRKYLVMLAILAVSVTYNAGLTPPGGFRTKNTTNGRDAGEPLLRVYFFPRYEVFFYCNATAFAASLVLIILLLSKSVTRQNLWLRSMQFTMILDLFSLMGAYAAGSCRAVKSSIYIWVLVVAVFIYVGIHILLCTRIFPKWLKERVQMLLQKIQAKWGVHEENRSNDQKRNIEEARKFILTLATFSATITYQAGLSPPGGFWTEGSSHPATPILRSNYLLRYNFFMSCNATSFVASLVTIMLLLSPELSMHGIRSKAVIVCVVADLLGLIGAYAAGSCRDIAVSFYVMSVSIILYVCYCILTWVKLVRTCTRIWSFFITHVQVCLEAMGV

SEQ ID NO: 128810 - protein, 251 aa, Oryza sativa
  Clone ID: PAT_MRT4530_31128C.1.pep
MEGLIPFIYKAIKERRSRTYSLCSSDMSAARRFGRVGEEEEDVVAWEEQKQWAVDGGKFAGGEREMTAHRRHRSLEELAGERLKLVKLKISQRDEEQCSRKKALAMEAMSAFAPPPPPTQLMVPVVGYGGGGGGGAGEGTTTAVRGSYGPVIAMLAVLAVLAAAAVAVGRLCFGRRVHLGQAAAGHDLEAWVERTCGPCVGARIFSTAGGAKEEGGEASAAPAEPPPPPPPAAAAEGTERGEDSCIVSGGS

SEQ ID NO: 128811 - protein, 51 aa, Oryza sativa
  Clone ID: PAT_MRT4530_31129C.1.pep
KVHTFKVSFSPLWKLQGDYTFGSLTWHNEKKSVRIPIAVRITIQDFYADVA

SEQ ID NO: 128812 - protein, 117 aa, Oryza sativa
  Clone ID: PAT_MRT4530_3112C.1.pep
NPSCKFEPININLPSFAIPDLKEPTAVLRTVTNVGQADAVSKAVVKSPPGMKISVDPSVLQFSQSKKKQSFKVIFSMTRKFQGGYLFGSLAWYDGGPHYVRIPIAVRPIVSDNYADL

SEQ ID NO: 128813 - protein, 98 aa, Oryza sativa
  Clone ID: PAT_MRT4530_31130C.1.pep
IAMLRIGLLCGNRALPASVVRRPPLGCRRVERAGLPNDCPRWCGESSSRNKAISWMLLLQPGSANERGVVPSATTVETGSGFGKIDAKIYELEGIISH

SEQ ID NO: 128814 - protein, 99 aa, Oryza sativa
  Clone ID: PAT_MRT4530_31131C.1.pep
MRECMSIHIGQAGIQVGNACWELYCLEHGIQPDGQMPGDKTLMLIKRLADKQHARAVVLVLVLCLWLSAHLTVLRPIRVIPLVLGVGILINERKMEKTN

SEQ ID NO: 128815 - protein, 49 aa, Oryza sativa
  Clone ID: PAT_MRT4530_31132C.1.pep
VMTLHPFRHCKRPESRTLHTEAPAQSSLPDRRARPWIRMRGITAVVLHV

SEQ ID NO: 128816 - protein, 54 aa, Oryza sativa
  Clone ID: PAT_MRT4530_31133C.1.pep
YRKDSSNNSLIKSESEFLCHRMFPISKFQNDIWICIMNSNISPIYTHTQFQIKE

SEQ ID NO: 128817 - protein, 128 aa, Oryza sativa
  unsure (1)..(128): unsure at all Xaa locations
  Clone ID: PAT_MRT4530_31134C.1.pep
NSTTTTSSTPWSSPAPTRIHAAQPPPPPLPPSTXSAPTRIRAPPCPDAAAPSLHEPALERIRAPPPPPPLPRRASAGADPLPLPPSPPLPPPRAGAGADPRPSASVAPPPRRRAAAAAATPPLRRAAA

SEQ ID NO: 128818 - protein, 39 aa, Oryza sativa
  Clone ID: PAT_MRT4530_31135C.1.pep
AVTGERLACKSIRKRKLRSSVDVEDVRREVDIMRYLPGY

SEQ ID NO: 128819 - protein, 530 aa, Oryza sativa
  Clone ID: PAT_MRT4530_31136C.1.pep
MADARGSSSSSGDGGGGEGNGGAGHGDFVGGGQHNWYHGILGAVPPPNVGRQNIVHHQYPAASLIQQHHQSPTMPLPMAQLPYVPQYTVLPTPAVLPSHHHHHGQSQISQENFQDWVPSNNVAAPHVPSAFQDWRQMCNGSAFMPFGQTAANSNVFYQNLTFNSWTSNNMPRNPVYTSFHPAAIEDHHAPLFHSNNHDIDPEFLGNRHLHGVDIAGAPPAKATSPATAGGLLTNTAPATVSQIHARCRRRQIYRCCGLLPRAPPPSDPCAFARAAITAARSARGLLSHLYGGLVFWLVGKRKLGEKRERKRKVVAGMDPPIVFRRSDMESEKNDDNPDQTPVSEPPSMNQNGENLIIRFNCREYRVILRKELTNSDVGNIGRIVMPKRDAEAHLPALHQREGVTLKMDDFKFETTWNFKYRFWPNNKSRMYVLESTGGFVKHHGLQTGDIFIIYKSSESGKFVSSVPFTSTTYGESDGEDYNGDRSGPGAGEVADEDFRKPEFGWYCCAKINRKESEIREQVSKEKVNSN

SEQ ID NO: 128820 - protein, 35 aa, Oryza sativa
  Clone ID: PAT_MRT4530_31137C.1.pep
GDGHYSWCHIVLLPTRVTQYGHLRSHARSPQRTVI

SEQ ID NO: 128821 - protein, 67 aa, Oryza sativa
  Clone ID: PAT_MRT4530_31138C.1.pep
QAYREIEWWRLMRHLKYINKTPNRIQMTIKRKDDGQVVKQSVKAVVTRKKGGSGRTVEEYSDKVPDF

SEQ ID NO: 128822 - protein, 72 aa, Oryza sativa
  Clone ID: PAT_MRT4530_31139C.1.pep
GKVFQGLEGGDQVKNRTVPFNSNCLVSCRFLAKLFPVCIVTNKANWSVYRLSDDDYTWTIIFINWFPPPLFL

SEQ ID NO: 128823 - protein, 847 aa, Oryza sativa
  unsure (1)..(847): unsure at all Xaa locations
  Clone ID: PAT_MRT4530_3113C.1.pep
YHPTKILATLIVASGSLRLHRRPASVAADWCHRLYGRLVTPPLMGIVIYTAGLPPSPPSGASAYTAGLLCRRCWASTTSPPACLRRRRVVPPPTRLAYYAAAVGRLRLHRRPASVAAEWCLRLHVWPIMPPLLGVYDFTAGLPSPPPTGVSACTAGLLCHRCWASTTSPPACLRRRRLVPPPTRLAYYAAAVGRLRLHRRLASVAAEWCLRLHGWPIMPPLLGVYDFTTGLPPSPPIGASAYTAGLLCRRCWASTTSPPACLRRRRVVPPPTRLAYYAAAVGRLRLHHRPASVAADWCLRLHGWPIMPPLLGVYDFNAGLPPSPPSGASAYTAGLLCRRCWMSTSSPLAHLRCRRLVFPLTRLTYYAAISGHLRFHRRPPPSPPTGVFIVIDGRLCSHIGHFCHHQGEYYKANRGLQMIQIQICIKGIHGFKLISYAPGMDQSEHHHRLASTAADWCFRLHGWPIMPPLLGVYVFTDRLAFAAADWCPRLHGWPLXPPLLGVYVFTNRLAFAAADWCFRLHGWPIMPPLLGVYVFTDRXPSPPPTGVSACTASLYAAVVGRLRLHRPACLRRCRLVFPPARLAFMPPLLGIYVFTDRPPRPPPTDVSACTAGLLCCRCWXRLRLHRPAAASAADWCHRLHGWPVITPTDAIFFTAGYIAVTTNRHQYLQHKLPTFAMAADWFLHFHDCMILPVLIGLTIFIAGLPSPLHLVYTATTTDGHHRLPPPTRVMPPPTGAFIFTTARLHYRFTSSRQHNFVIMVERLHLYYLRNQQTLLLLLHKFCYITNHDVFVSLDISACDAMLFYYNKRLSNIQDFYLNIFNTYLQSSNNYSTTRSYNSRLYVQLFPN

SEQ ID NO: 128824 - protein, 56 aa, Oryza sativa
  Clone ID: PAT_MRT4530_31140C.1.pep
KQQFNYLFFVMSLDSRFQDLGALPWQTSTKYAQSLTNLSLYSLSHTIHATDNQYAC

SEQ ID NO: 128825 - protein, 162 aa, Oryza sativa
  Clone ID: PAT_MRT4530_31141C.1.pep
MAATAQGGGGAVSVQHVARASSDELLRKFADPDAHAKQITPPRRSLALRRKRSSRRVASGLSARDLESGAELAAPKRRRSIGGSTEWKAGLLLPTTTTASARKGSAASHSHRGGAARLDDAAGIGLLLAALERTWRKTVAGASKMFVERHRTNHVLLISDMV

SEQ ID NO: 128826 - protein, 76 aa, Oryza sativa
  Clone ID: PAT_MRT4530_31142C.1.pep
DSKKLAINQLLPEILSFPNIVPSSRSRPTNEDTLLNCLLCVVFIHQSSVLSGQHYHTQTDQRQTKTNFVDIYYFFP

SEQ ID NO: 128827 - protein, 180 aa, Oryza sativa
  unsure (1)..(180): unsure at all Xaa locations
  Clone ID: PAT_MRT4530_31143C.1.pep
MPPMLQQSPPSPSIPRSPATVSPPSRAPWRQIWSQGGRRPLYLDGPKLXPPPPSPSAPRSQQPPPPDPLKRRRRRPPTVTCIGPSPLNPHLAPPPLDPPRRLVPPRLRPSRRSTRSPPPGPPCHLAPPPPLDPLAAWRPAPSRLGPPRHLAPTPTGATAAARDALPPPPGVVVAWATPPP

SEQ ID NO: 128828 - protein, 251 aa, Oryza sativa
  Clone ID: PAT_MRT4530_31144C.1.pep
MAWVKNGGDWEEKKEGRAPRFIERQCRFGNRPWAVKGASQRSAVAAQTATGGGEDDAGGRKKGKRGRERGLAPLPLWRKGGGREGDAAEGEGALPPSLGSTREEGRGQVDDDGDDGRAELHFPSRRHDGTGATRGEVAYQLVLPEGLADVHNVFHVSQLKKCLRVPEEQVPLGNIELEKNLTYKERPIRVLEKAERQTRRKTIKFYKVQWSNHSEDEATWEREDHLRAEFPELLPYVLNLGVKILVRGVGL

SEQ ID NO: 128829 - protein, 709 aa, Oryza sativa
  Clone ID: PAT_MRT4530_31145C.1.pep
MGEVAAELLYGMPAMRLSWPGPDGISGGGAEAAGGCGALLAELRQLWGEIGKSREERERTVRELEMECMRVYRRKVDEATAERASLHQSLAAGEGEIAALTAALGADSSPQLKIYTCKLSNKTRTDQICATCRTRTEVAEIPVARQELLAVASVDEGTKHASGEEGEPSRTNREQSREALPKNLIAAFSRCRTSKAEVNKWTMSLNDRVSAATNLLEELRAMKAERSKQFTAIRSEIDKISTEISGRSYGYDNSPRASEFDEHDLTIRRLNEYRARLSSLQKEKSDRLHRVLEHVTEVHSLCDVLGEDFIAIVNEVHPGLHETADPGKPTSISDSTLASLSQVVAMLTSEKTKRAAMLREAVVPLVELWDLMDLPEEERRSFRKATAVLRPAREEALSSGVLSIATIKKTEEEVERLTRLKAGRMKELVLKRRLELESICRSMHVEPDTSTVPEKSIALIDSGLVNPSELMASIDEQIAKAKEEQQSRKEIMDKINKWLLACEEEKWLEEYNLEENRFNTGRIARLNLKRAEKARLIINKIPAMIDNLMSRTLVWETERNKPFLYDGARLVAVLEEHKQARLRQEEERRRLREQKKLRTLFSEKEAMPHLKRPGSSFGRATEPCNMSRKRVDAAPPSVRSSSGSSGSSGGGAADPFRPRSSAAAGSGAGHCGEFFRSGGARRLSAAAPFNYVSRVQGRRQAAGRLVVVR

SEQ ID NO: 128830 - protein, 91 aa, Oryza sativa
  unsure (1)..(91): unsure at all Xaa locations
  Clone ID: PAT_MRT4530_31146C.1.pep
SGGRIGRRWGGHPYRFLNGGGXEDLLVSWFFVHLXWKREQGPPLRRRFXFFNFNGFTTYPSVMVLMGQGINQFNFLSKRKKETVEKKTPQK

SEQ ID NO: 128831 - protein, 464 aa, Oryza sativa
  Clone ID: PAT_MRT4530_31147C.1.pep
MATAAAGDDPPSPPPPAERPGGWFSGLVCGAGRLLAAVLGPDSPDSGTGGSASSSQESSSQSPPPPRGHRGSGDNTAHFASNNQFNQSGKEITLKDSGVGSLALVSEIDPKDAILQMLLQETYSRSECDILIKIIHERVVDSDPDVVEPSIVLPIAWQTSQQQDHVPYSSFRPNTCSASSNVHDCSQQLDNNIVENGWLEESQHALKRSNSCTGHNLDESHSRSVRPKLNDLNISNRQDGILKSHSDIASFEEATTKYPNAFRGIPEDTKKLFKDIPLLGTDNLIFSNIVSYDDTDNDISALRGKRPAVTARTFASATSEANRDNRCPTMLYPYSDRDLTNTFPIKVEPLDDIVPFDPEIVVLSRKNRNTGTICNDPCSVSKLMFQEDKEAAPRRTDSGWPGARLGSNPGEETGWEAKEVKKVLEGQQKMKNAQDQNCKRLTPVSSHCTVLPPSSGVLRNNRRV

SEQ ID NO: 128832 - protein, 93 aa, Oryza sativa
  Clone ID: PAT_MRT4530_31148C.1.pep
PAAPRTVGSSSQHAAGPVSTSRRSLERGGNEHPPPRGPHAFRNHPLPPPETARPPLAPAWPPRRPPPPSTTSPSRSVPPLGRRRSLLEGICHR

SEQ ID NO: 128833 - protein, 53 aa, Oryza sativa
  Clone ID: PAT_MRT4530_31149C.1.pep
LACPQPQHHHLQHHHASQAGTRASHCIAHLVRCDVHPEEEAVVRLVERTSHLL

SEQ ID NO: 128834 - protein, 477 aa, Oryza sativa
  Clone ID: PAT_MRT4530_3114C.1.pep
MPPPSLLLLHPRTPLPHHHRSSFRTSSPRPSRMVCAAAEGFISAAPILLPDGPWKQVEGGVTAAKGFKAAGIYGGLRAKGEKPDLALVACDVDATVAGAFTTNVVAAAPVLYCKRVLNSSKTARAVLINAGQANAATGDAGYQDTVDSADAVAKLLNVSTNDILIQSTGVIGQRIRDEALVNSLHRLVGSLSSSIEGANSAAVAITTTDLVSKSIAVQTEIGGVPIKIGGMAKGSGMIHPNMATMLGVLTTDAQVSSDVWREMVRTSVSRSFNQITVDGDTSTNDCVIALASGLSGLSSILTHDSTEAQQFQACLDAVMQGLAKSIAWDGEGATCLIEVKRLAFHSLRTISIVTVAGANNEAEAAKIARSVASSSLVKAAVFGRDPNWGRIACSVGYSGIQFDADQLDISLGAIPLMKNGQPLPFDRSAASKYLKDAGDIHGTVNIDVSVGRGGGSGKAWGCDLSYKYVEINAEYTT

SEQ ID NO: 128835 - protein, 45 aa, Oryza sativa
  Clone ID: PAT_MRT4530_31150C.1.pep
LDSFQEDFLEPSGLPPKRLCDHHIPLIPGAKPVFLKPYRHNPHNS

SEQ ID NO: 128836 - protein, 115 aa, Oryza sativa
  unsure (1)..(115): unsure at all Xaa locations
  Clone ID: PAT_MRT4530_31151C.1.pep
AKTRGLGDLLKSSAGPKKLAFRFVSVPVDLILQSTRNKDKKTMVKSINDSRSARTQSVHGNPYEALQPNPMTCTESYCRTRLNRLTLSNSDSANPXAANSDFSRSLLCFRNDFHF

SEQ ID NO: 128837 - protein, 92 aa, Oryza sativa
  Clone ID: PAT_MRT4530_31152C.1.pep
AWIRWCLVGGTYDKSLLASKLPNGRDLNRLKQHRLKTYRKAIPTLSCCSRSHFTLSLSHFILSPVLLDYSALPIRRKAQAHAAANAAARELP

SEQ ID NO: 128838 - protein, 556 aa, Oryza sativa
  Clone ID: PAT_MRT4530_31153C.1.pep
MGEMNQPPPPPVAVPPPMVMQPIMHPPVGTGAVFPPHEQFHHLAYCVHSNPSWVQVAALAFLHYLVMLGSTVMLASTIVPAMGGTPGDKARVIQSFLFMSGINTLLQTLVGTRLPTVMNASFAFVVPVLSIAKDFEQNNYASSHQRFTHTMRATQGALIVASILNMILGFSTIWGAFARKFSPVIMTPVVCVVGLGLFALGFPQVGKCVEIGLPMLILAVVVQQYVPYYFHHYHERITFLFERYSLLLCIGIVWAFAAILTAAGAYNHVSLKTQQHCRTDKSYLISSAPWIKIPYPFQWGTPIFTAGHSFGMMGAVLVSAFESTGAHFATARLAGATPPPASVLSRSVGLQGIGMFLEGIFGAPAGSSVSVENIGLLGLTKVGSRRVIQISTGFMIFFSIFGKFGAFFASIPLPIFAAIFCILFGIVAAVGVSYMQFVNKNSMRNIYIIGLSLFLGISVPQYFHEYTASASTGPARTNAGWFNDIINTVFASGPTVSLIVASILDNTLEFRGYENDRGLPWFMPFLHRRKGYSDPRNDEFYSFPIRVHDVIPSRFL

SEQ ID NO: 128839 - protein, 84 aa, Oryza sativa
  Clone ID: PAT_MRT4530_31154C.1.pep
MESRAEDQGVKRREPCKKRIGRTAGAGSEAGNGSRHQASCSPPPPPSSSFPRRCARLVKEQRARLYIVRRCITMLACWRDVDYL

SEQ ID NO: 128840 - protein, 57 aa, Oryza sativa
  Clone ID: PAT_MRT4530_31155C.1.pep
HQGGGQGPKKSEKKRVFSPGPTCRIGKGGGKPPGMGMELVIGPRGDGLAMLCSAVSF

SEQ ID NO: 128841 - protein, 281 aa, Oryza sativa
  unsure (1)..(281): unsure at all Xaa locations
  Clone ID: PAT_MRT4530_31156C.1.pep
MATPQLDKRILSELELMGFPTARSIRALHFSGNSSLESAINWLLEHENDPDIDQLPLIPREINIECGDTPNEARNDIQGMRADAQESKPEESTAAGRQKPRERIRAAKDLMEAKRTLEENQRKRXLFHMQLAERRRRLGLPMENPVASVPTLTPTKIKPVEPAVSPEQLRDCLRNLKKNYKDDTTKVTRAFQILLKIIANIVKNPEEEKFRRIRLNNPVFKERVGNLQGGVEFLELCGFMKLAISGYLVMPRDNINLALLNAAGVEVASAMENPYFGLLSK

SEQ ID NO: 128842 - protein, 34 aa, Oryza sativa
  Clone ID: PAT_MRT4530_31157C.1.pep
MLLRVKQLRVSQATTRMHDSLDPAHRLQASRTEF

SEQ ID NO: 128843 - protein, 119 aa, Oryza sativa
  Clone ID: PAT_MRT4530_31158C.1.pep
MSRKPAKACLNRDFSQYVAYTAPQLPSKVDLRPWMTSIEDQSDTNSCTANAMAGIYEYLNYRTTGRLEDVSRLFIYYNSRIKDNEGDPDITDEGTSIATTIEVVEEQGVCLESLWPYNI

SEQ ID NO: 128844 - protein, 200 aa, Oryza sativa
  Clone ID: PAT_MRT4530_31159C.1.pep
MQPMDPSNVIKKYQQQEAKSYSCSSLKPTQKNRKEEVRFTFDVSKCDRIFDELVKKENIKLSDTIPLLEELKRAYCKWHNSSSHASNEGRLVLYEMQVDKIPFPVHTIDLNNAKMLIRPEQAEGAKGKNVIICEERLKTSEDKILARKVVVEKTPDGKESLKITVKASRLGGKKFPVRLWSPYCSGATSQTGHPTRSGRS

SEQ ID NO: 128845 - protein, 686 aa, Oryza sativa
  unsure (1)..(686): unsure at all Xaa locations
  Clone ID: PAT_MRT4530_3115C.1.pep
TPPFMGVYDFTXRLASVAAEWCLRLHGWPXLCHRCWASTTSSPACLRRRRLVSSPIRLVGHTTVHGRLRLHRRPASVAADWCPRLYGWLVTPPFMGVYDFTAGLPPSPPTGVSAYTAGLLCHRCWASTTSPXGLPPSPPTGVLAYTVGXHTTVHGRLRLHXPACLRRRRLVPPPTRLAXMPPLLGVYDFTAGLPPSPPSGASAYTAGLXYAAVVGCLRPHRWLTFVAVDWCFRLHGXPIMPPLVGIFAFTDRLAVVAADWCLRLYGWLVTTPLSGVYIFTTXFAFAAADWCHRLHGWPXLCRHCWASTSSPTGXLRRRRLVFPPARLAYYATIVGRLRLHRPAASSAADWCFRLHGWPIMPPLLGVYVVTDRPPRPPPTGVSACTXLAYYAAVVGRLRLHRPAAASATDXCHRXHGWPIMPLLLGIYIFMPLPLRLVYTATTTDGHHHLPSPTDYAAADWCFYLHNYASSLPVCFCCRRLVFTSLRQYNFVIMVERLHLYYLRHRQTLLLLLRKFYYFTNHDVFVNLDISACNAMIFYYNKISTWTPSTHIFNQAMTTRRQEAIILDSMFSCFSTNQRTFYFNNFKYFGLDELGNNINSPPIICLHGWPTTQLPIEDLIVIIGCYIAIDWITDIVIFINILSSLINIANSAAVDGKLRHHSRLSLLPLIIITVGCVCRRRLFSSSS

SEQ ID NO: 128846 - protein, 60 aa, Oryza sativa
  Clone ID: PAT_MRT4530_31160C.1.pep
PYIPWQYVSEHFFFRFWFSFEFQLTLADSIVIITCIYNQCTPKYYASIPIKITKLITIET

SEQ ID NO: 128847 - protein, 83 aa, Oryza sativa
  Clone ID: PAT_MRT4530_31161C.1.pep
LAACPAPSSGYGFTSSEALPLSAPVRKSATAGKPSARTADCRSGGSTGGSAVGSARRSEMDILLSNPKEEEQAEAAELSRIIY

SEQ ID NO: 128848 - protein, 62 aa, Oryza sativa
  unsure (1)..(62): unsure at all Xaa locations
  Clone ID: PAT_MRT4530_31162C.1.pep
NFTFRADTAHYIFGLTIFGQIWTTTFLILCTRRHGXSINVHMHRPRTSTRSVLSCAPCLLPX

SEQ ID NO: 128849 - protein, 671 aa, Oryza sativa
  Clone ID: PAT_MRT4530_31163C.1.pep
MQPRERLSRQLGELHAHFLRRGHPFPPAAHPDPDLDRAYISVIRAAAAPRLALAAFACLRRVGLPAPGRRALPSLLRAIAFARSLGTAGAAHGLAFRVGAEVDGFVGTALVRAYAACGRVEDARRVFDGMPDRDLVAWGVMLDCYCQARNYEEALLLFHSMKRSRVVPDQVIIATVLSTCAHTRNLRFGKAIHSYMLVSDTLIDAQVSCALMNMYASCADMEMAEKLYNRVSEKEIVLSTTMVYGYAKNGKVEIAHSIFNGMPAKDVVSWSAMIAGYAESSKPMEALNLFHDMQRSGVKPDEITMLSVISACANVGALEKARCIHSFVENHSMCKILPIGNALIDMFSKCGSLTLALDVFNAMPQKNVVTWTSIITASAMHGDGRSALTLFENMKSEGIQPNGVTFLGLLYACCHAGLVEEGRLLFKIMVQQYRIEPMHEHYGCMVDLLGRAKLLGQAADLIQSMHLRPNVVIWGSLLAACRMHGDLELGTFAAKKILELDPNHGGAQVLLSNIYAEYGNWNDVKEVRGVMEVQGTWKKKGCSWMELNGSVHQFAVGGFLEISADLSNFEQKIEFSLYKVRLRKQQQLRYQQLLEMCNRHCSFHLSFMSSTKLQPLQPNLQEANLQGYVLGCELMVSIKVYNGYVQSVTTIDLECITKSNMIKGLQTGVKE

SEQ ID NO: 128850 - protein, 512 aa, Oryza sativa
  Clone ID: PAT_MRT4530_31164C.1.pep
MEKFLRNRFDRPPGRPVTVCVDAAASGFWRARVRPKAVRGKPPTSPSRAREADLAELVSFGALVEGQGSCGGEAVVPSPSDGRTVVFAAYFAAGLRLPCDDFLSSVLATYNVRLPQLSPLAFPKLAVFAWMCRTCGFAPAAELFAVLFTACAKTKDVETPAGPKKTVFDCVNFMLRPERSDAWPRSAVSIIAKPNVEIDGTLESRLILLRKVAQWLSTRDLCEEFCLLRISPLACVWDVSVNEGEEVFGLPCLALPAGVETRTWEDAEMEASKMIGALTTAEFARLLQRQTDGRVNRVHAGELPGRSNPSRAGDDEVGTSKKRKRAVAKGGQIRTRLGAKGTVDGDGEEEEEEEGEAGSEDDGSHGYSTSPTPAKSRAARRLHSIGILDGSDEANFFETSSTEKDFNSEIRENLERISRDEEAAAANTRRDPGLSESAAGHEGEDDRGQDHPEACGRKVCVRPLAKNRRNKNEKFMAVKGLLKIKCPFRLVYPLLFHFRLVAGVLSSIVAYA

SEQ ID NO: 128851 - protein, 58 aa, Oryza sativa
  Clone ID: PAT_MRT4530_31165C.1.pep
KKERLHLGEIKHAPLPMVPFLGFPVQAPPPGKGPPNNWAPPLRDPVPPPIFDPFSSSF

SEQ ID NO: 128852 - protein, 104 aa, Oryza sativa
  Clone ID: PAT_MRT4530_31166C.1.pep
PHQWPDQDGDLAGDWMVGCDFGGHVHVEDDETNPTVLTLEPNDERRRPATGSSGGAASVDGGDGAPVISGFGGQAAGLLHPPAHLTVVTATVDTTVAHIKDKIV

SEQ ID NO: 128853 - protein, 36 aa, Oryza sativa
  Clone ID: PAT_MRT4530_31167C.1.pep
RAPPRGFFFFFFFFFFFFFFFFFFFFFFAKRLCTDY

SEQ ID NO: 128854 - protein, 111 aa, Oryza sativa
  Clone ID: PAT_MRT4530_31168C.1.pep
ESITCFYPHKEEKNFLPNRQNRKANGELNLGKKRPLGFIQKRKTRTGTGSTKMLNQRNAFFPARRLGVPAKKLSGGGRAFRKYGAPKNFFKLRGAKKLFRKTGAPASLKMG

SEQ ID NO: 128855 - protein, 112 aa, Oryza sativa
  Clone ID: PAT_MRT4530_31169C.1.pep
MIARRLKMLVLVSLVPLALRATSLLAGHVAPPCSPESLRPEHQPAGAGDGVTMGGGGASASSYRRNRRRMEGGLAAAAVAFHARRFRPHGGGGFEADKRLAPTGSNPLHNLR

SEQ ID NO: 128856 - protein, 69 aa, Oryza sativa
  Clone ID: PAT_MRT4530_3116C.1.pep
RDKGLFLLNNIYKKKAHAFPLGPKKKPLAQGAPNNRIYNREAPPNLFTFGKGSWLRKTTPQKGGLFTGG

SEQ ID NO: 128857 - protein, 59 aa, Oryza sativa
  Clone ID: PAT_MRT4530_31170C.1.pep
FGRRLLNSTNRLFRVVQALYYNANNSSTNFRAPTPGRRRRGPIQSDKLSSLRLRIRVLG

SEQ ID NO: 128858 - protein, 143 aa, Oryza sativa
  unsure (1)..(143): unsure at all Xaa locations
  Clone ID: PAT_MRT4530_31171C.1.pep
PRWVYTGPSCFQPGLGYPMYPLPLFPGFVEAQCFAVHAPAADQXRRDCCQPAXAVDDSWSSCEPIXHMLGGIYRELGAPDVXHPMSEVFRAPERDLERRGDLPAXCNVNIPNAECSLLLRDLYISYLYCHLLVGIKNRFLFGT

SEQ ID NO: 128859 - protein, 213 aa, Oryza sativa
  Clone ID: PAT_MRT4530_31172C.1.pep
RINSAMEMDGVKQFRLQIDMQCRCMGCIRKIEKAMGCIGSVTGVETSVADVDTGIVAVAGKVNPTMLCHWLKRRIRKDVKIVYPDQQVQNSKQKLIMVLGSSSNAKGAHNTPSALPIQDHMSWDSVPPIVQSNHQSLPLIEQKIRELEKVRDMLKIQNLETELGAVRCELKQSREAINGSKKAVMDSALNQLEAYHKLEALSHSPYESCYPSQ

SEQ ID NO: 128860 - protein, 76 aa, Oryza sativa
  Clone ID: PAT_MRT4530_31173C.1.pep
MVLKLLDGGGGGGGDDGFNPSAAEHKRHEQIGNLAVELKHQRLASKPSAMVRSENKCHIAESVSLDATLDFVESLT

SEQ ID NO: 128861 - protein, 58 aa, Oryza sativa
  unsure (1)..(58): unsure at all Xaa locations
  Clone ID: PAT_MRT4530_31174C.1.pep
MTVPQYHVDTHPDSISDLSTFVIPSNISXNNGGDKETLGEGLRAMEDHRGRPSQGGGL

SEQ ID NO: 128862 - protein, 41 aa, Oryza sativa
  Clone ID: PAT_MRT4530_31175C.1.pep
WSWCSVSFPYQKNAHIVVLVLFWARVLFVAQLVVVVLCCVS

SEQ ID NO: 128863 - protein, 115 aa, Oryza sativa
  unsure (1)..(115): unsure at all Xaa locations
  Clone ID: PAT_MRT4530_31176C.1.pep
MTSSQAAARHLTLTDERRRGGANGGHLRVEGDAANSQRARTMTDGNRRRRRRGRSGGGVRVDDDSDAPAILDRNGGQDXDGDDLANPTAAFPSDDDDQSGGGARLDLRRRRRRRR

SEQ ID NO: 128864 - protein, 98 aa, Oryza sativa
  unsure (1)..(98): unsure at all Xaa locations
  Clone ID: PAT_MRT4530_31177C.1.pep
YIWDLTVWAXVRSRLGIACDTSSGDILSWWCEARKSVHKTDRKPFDAGVILVTWLVWKERNAQVFDGKATSAVHLCATIADKWETWKATGLLCAIYYG

SEQ ID NO: 128865 - protein, 60 aa, Oryza sativa
  Clone ID: PAT_MRT4530_31178C.1.pep
AKARSRQRRECLGRCGPVGPRRRLIWTSFFSPFRFPVRDFEGMLIYKRISSPEVPQLNFF

SEQ ID NO: 128866 - protein, 191 aa, Oryza sativa
  Clone ID: PAT_MRT4530_31179C.1.pep
AGRRRSWRAAATPRTSTARRRTPPRPPSRRSAPASATRTSTPAAGSAPPSPAPSPTRTAPRTPRTPPARRRRATRCYSRAAPPPPARSPRTPTAPTSPRSPRTPSPPRSPARSGARRGTARAAAATSTPSGMRRPCSSMARCRSRPPPRRRRLRPSRRRRGSRWLMLLSSSSSFLFHRNHTPRRAFQDQTP

SEQ ID NO: 128867 - protein, 63 aa, Oryza sativa
  unsure (1)..(63): unsure at all Xaa locations
  Clone ID: PAT_MRT4530_3117C.1.pep
CLPPIPPPPPPPPPPPPKPPPPTPKPNPPPFPKPPPIXLPPPPPNPPPPPPPPPPSPPPPPRX

SEQ ID NO: 128868 - protein, 441 aa, Oryza sativa
  Clone ID: PAT_MRT4530_31180C.1.pep
MSLSWRFLNLIVGDNMPQTRSICCIDLTRQQFFQPSPPESAVAQDSTAQTPVAASTMERLQLPNPILRLWNRYFFPLSEHKILSVDKSGCSLLFDANTRHLVTMPFLNKPKRDPISLFVPNGDGDDGGSIFVMDRVPKPEIGSRAQTSDQFEAFIYRKNFVDCQLLPPPPYLRDYKHCERRHKINAYAVVDGGSQICISVEDVGTYCLDTASHTWSQVGDWTLPFDAKLEYVPELKLWFGFSAGAQHFAASDLSSMDCQSQPQLVGPWKELEPPMEWRETYDSQLVNLGSGRFCIARFFQTKREGCYDEDDVYLWQDVTALTGVEILKGVLQKIDYYRSRFFWQGDDHKKKYRLTRWDIICQPKDQGGLGIHNLELQNKCLLNGIIIRMVIFRATHWLRFWAQLQRCEDGGEFLKVACRKLESMVMQLFANYGWRFTNRLQ

SEQ ID NO: 128869 - protein, 235 aa, Oryza sativa
  Clone ID: PAT_MRT4530_31181C.1.pep
VDGGGCCECNLLLTPTPPPPGGRRGLASSWRWLASSAAPMACRVVARGERDETRGEANEVEEREKGARQLQESSLVSGSVFGVKYTTLSFVNAVPLPSPGHAPGGRRDPHEGNEGLHSLFLSHGSWSRLPCLIPFGFSFLPFSPQPPTRPPSGGVEQDEPAHSYSHHHDLLRRHRSRHHLCLLLDAAWPVPLHPDLAGGRGGFGRSAYDGAGSFAPERQRREAEEAGDDAMQGGR

SEQ ID NO: 128870 - protein, 67 aa, Oryza sativa
  Clone ID: PAT_MRT4530_31182C.1.pep
MRRGRVGGGGGRKDKVLGPPSQAGQTGYMRPVRPPGCGRSNRLYAASQTAGVRLVRLGPRGRSDRRY

SEQ ID NO: 128871 - protein, 56 aa, Oryza sativa
  Clone ID: PAT_MRT4530_31183C.1.pep
YYIFFTISIFNYTDVRHLFINIILFHTNNTPLYHFNSLILPTSFNSFKYINLLVSL

SEQ ID NO: 128872 - protein, 103 aa, Oryza sativa
  unsure (1)..(103): unsure at all Xaa locations
  Clone ID: PAT_MRT4530_31184C.1.pep
NVGWSASFLGLFHHWAIFRNSVCFPKGGILRKPIIFILTRLFLSLAFFFFVNKIKLLLTIVITLLYSCTSXXGXPPFFFFSFFFFFFFFFFFFFFFFFFFLLS

SEQ ID NO: 128873 - protein, 413 aa, Oryza sativa
  Clone ID: PAT_MRT4530_31185C.1.pep
MRKEVVLVAMVVVVVVSWVVAAGGEAAAAAAVVVDPAWRFPSARLRDAYVALQTWKQTAIFSDPKNLTADWVGPAVCAYTGVFCAPLPGAGGAPGEVAVAGVDLNHGDIAGYLPAELGLLTDLALLHLNSNRFCGLVPDALRRLRRLHELDLSNNRLVGAFPSAVLDLPALRFLDLRYNDFEGAVPRQLFDLPLDAIFLNHNRLRFALPDNFGNSPASVIVLAGNHFGGCLPASLGNMSATLNEILLINNGLDSCVPPEVGLLREVTVFDVSFNSLAGPLPPEVTGMRKVEQLDVAHNRLAGAVPEAVCDLPRLKNFTFSYNYFTGEPPSCARVVPAADGDRRNCLPNRPYQRTPRQCAAFYAAPPVDCAAFQCKPFVPSPLLPPPPPPAYPGPLPPVYPVPYASPPPPPLYR

SEQ ID NO: 128874 - protein, 77 aa, Oryza sativa
  Clone ID: PAT_MRT4530_31186C.1.pep
FLSVMAGSSHSSGDTEYRFKPCLIRSEQCIKGSEAAEGSRHTSLVSVTRMVFAFEKGSFKLEERYDAFNHHTISVIV

SEQ ID NO: 128875 - protein, 50 aa, Oryza sativa
  Clone ID: PAT_MRT4530_31187C.1.pep
GIKLEDDSTRGGPKNETLATGKGVRSVVKQRGVRGVRTRPYPHKGHLQIT

SEQ ID NO: 128876 - protein, 108 aa, Oryza sativa
  unsure (1)..(108): unsure at all Xaa locations
  Clone ID: PAT_MRT4530_31188C.1.pep
RRPIHEAGXPRGLAPTSELPAGXLTPTHHPPTYDFHTQYSLVVVYIQYMILILASSSSLFFSLEALQFHGIHIHGAFPRFSFSCVMASFLCSQLLHEILTASKILLCY

SEQ ID NO: 128877 - protein, 88 aa, Oryza sativa
  Clone ID: PAT_MRT4530_31189C.1.pep
DSHAPAYTTLVHQHGQQACEAPLVAFIFISTLTSCTSPAAPGRHDTSACGRPREHVDGWAASPGTTLDWAHGTGSDAASLLMQVLVAM

SEQ ID NO: 128878 - protein, 1302 aa, Oryza sativa
  Clone ID: PAT_MRT4530_3118C.1.pep
MEAAAVSASTGALNTLLPKLADLLLLVAGEHHSSRRAVEDGVEHLESELTSMRAALEKVSAAAAPPDQLDGQVRLWARDVRDMSYHIEDAIDTYLLREAAAAGRRPPPPPCCSFVVGLTSSARRRSRAIAAEIERIKKEVEEVSRRRERYRIDDHVVAVVDDAPVDRRLPALYANFASLVGVDASVEEVIKLLSMEGYQGAVMMRRKLKLIAIVGPGGIGKTTLANLVYQKLHGQFECQAFVSVSQKPNVKAVLSSILCQVSQLKYENFSSWGEKEIIDKIRDVLKDIRYFIIIDDIWDKPTWQLLKCVLIDNDHGSKIITTTRNMDVAKLCCYSDDVDGTIQIQQPLSVADSEKLLYHKVFHNERCPPQLKGISQKILKRCGGLPLAIITIASLFANRQTQTEDHWNSCSTSDLPKRIYRLSLQNSKDDITIPDATERFSHVRSLWQGIDLKMPLSGFRVLRALDLGDCSSQNIDNIGNLVHLRYLRLRGTHYNKLPKEIGNLRFLQTLDIKQTRIKELPSTVVHLTQLMRLMVDTWTKLPNGIGNMECLEQLSEIDTSMYPSLMKELSDLPNLRVLEILISTWEQTKEEQFLDCLGSMKKLQIVHIFAPDISLDFMLNKDWTLHELQKLTVGVRRESEDIFKLNPLSGWAEFSPFSILPRWINSSLTNLSYLSIIVKILQQKDLGVLGDLPALCSLYLSVTGALKERLMIIGHSRGNGQAIAFQCLANFNFTSPAMMLVFRHGAMQRLQMLSFCFQLKETKVFHSDLDMGLENLTSLKTVHFQIDCRYARLWEVQAAEVALRSATNLNLNSPTLDLSKHFERLMYWDGMEEIPEMKIFKEENVGIVKIGPWGGNRGRRYDIEVAPHHLESIRVHSDLAVHSFEFEYSDRNGQKHVAGPWGGYGGSNVHMIQLESSEVLVEVSGTFGRFAGFQNIITSLTFVTNTQSYGPFGQREGTPFHIPVQCGGRIVGFFGRAGWCFDAIGIYVNPDLQTIKDKGKVVLAKIGPCGGKGGEACDIMVPPHHLESVTICSNIVIHSLTFSYNDHNGDHHLAGLWGSHGGSNQTIQFGPSEFITRVYGTIGSYNTPSDVVTSITLVTNAGCYGPFGQENGIPFDFPVQGNGSIVGFFGHANLYVDAIGVYVTPSMGTRKEEENVGLTKIGPFGRRGGNPFDIKVTPHQLESITISSNIVINSLAFSYISHDKQQHIVGPWGSGGESNYTIQLGPSEFFVKVSGTFGPFGEFPNVITSLTFVTNTHHQYGPFGQGGGTPFHAPMSGNGSIVGFFGREGLCIEAVGFYFCAL

SEQ ID NO: 128879 - protein, 43 aa, Oryza sativa
  Clone ID: PAT_MRT4530_31190C.1.pep
IFDEFQQLNLKTCSREAVDEDGWLHTGDIGLWMPGGRLKIIDR

SEQ ID NO: 128880 - protein, 82 aa, Oryza sativa
  Clone ID: PAT_MRT4530_31191C.1.pep
RPSRRRRRHAEPRAKPRRAPRRAARSEPEGVADPSEGQDPQDFEQGKLSLFLEHVDPNCEIVLFTNKIACNDERPTCDYAVP

SEQ ID NO: 128881 - protein, 227 aa, Oryza sativa
  Clone ID: PAT_MRT4530_31192C.1.pep
PLRPLNDHRWQLLAIRYLLFCFYWVLSWGHVTAEIDIANMTALQKHVSFFDRNKDGIITPSETIEGVVAIGCDFAFARDLAASVHAGLGPKTSPKDAPLPHLSIYINNIYRGMHRSDTGALDAKGRFVPAKFEEIFSKHAKNRPDALTSLEVKEMILANRDPNDPQSWGAAIKEWGLIYGLASDKNGYFPKDSVRGIYDGSVFVKLEKERESSQSTVCRSLSFRSSV

SEQ ID NO: 128882 - protein, 86 aa, Oryza sativa
  Clone ID: PAT_MRT4530_31193C.1.pep
SKHAKNRPDALTSLEVKEMILANRDPNDPQSWAAAIKEWGLIYGLASDNNGYFHKDSVRGIYDGSVFVKLEKERESSQSTVCRSSV

SEQ ID NO: 128883 - protein, 96 aa, Oryza sativa
  Clone ID: PAT_MRT4530_31194C.1.pep
QRPSLAAAGNPVLALLFLWVLSWGHVTAEIDIANMTALQKHVSFFDRNKDGIITPSETIEGVVAIGCDFAFARDLAASVHAGLGPKTSPVLSHSLP

SEQ ID NO: 128884 - protein, 190 aa, Oryza sativa
  Clone ID: PAT_MRT4530_31195C.1.pep
DFQAGTLVPDGYPTHHGSIIAFSGSSFVGIVAIGCDYAFARDFAAPVHAGLGPKTSPKDAPLPHLSIYIKNIYKGMHGSDTGALDAKGRFVPAKFEEIFSKHAKNRPDALTSLEVKEMILANRDPDDPQSWAAPIQEWGLIYGLASDKNGYFHKDSVRGIYDGSVFVKLEEERASSQSTVCRSLSFRSTV

SEQ ID NO: 128885 - protein, 99 aa, Oryza sativa
  Clone ID: PAT_MRT4530_31196C.1.pep
KKKPHTQAQTKVRLLHGFTSLAPWPTADRPHRPIFEAGDEHGCTLSLVHEWQLFSSAAMNLFFSSSSPSHMPFLLFSSSSAIIFFIFSSLVLLHLSCCT

SEQ ID NO: 128886 - protein, 55 aa, Oryza sativa
  Clone ID: PAT_MRT4530_31197C.1.pep
MAKAVTWSLQALPKTDLAMGRHGRWPILFPSPLGRLKAKAQQPAAFFLLPLGRRQ

SEQ ID NO: 128887 - protein, 205 aa, Oryza sativa
  unsure (1)..(205): unsure at all Xaa locations
  Clone ID: PAT_MRT4530_31198C.1.pep
MSGHRRGRGSVDEAIVAPPVSLLPSSRIHRCPRKWRQPVSTSNLDLLLPAAGSRRGTVAAARSGRRAAATAGSLRGEGGAAPXAAADVGGGRMMWGGWRCSRPPPRRRRRRRRRSRLLPPPPRCRWWPPRYLRQQPRRAPPRRRTVTAPLPAAVSSLASSSTAATAMPPAAAAPASCASVASSPAAASSAAAAASGRLPRQAARP

SEQ ID NO: 128888 - protein, 164 aa, Oryza sativa
  Clone ID: PAT_MRT4530_31199C.1.pep
MAEVADLTGDGGVLKTVVRKAKDDAIAPTDSLPLVDVHYEGTLAENGEVFDTTHEDNSIFSFEIGQGAVIKAWDIALRTMKLCLCSATLIFEVELVACRPRKGSSLGSVSDEKARLEELKKQRELAAATKEEEKKKREEAKAAAAARVQAKLDAKKGKGKGKGK

SEQ ID NO: 128889 - protein, 93 aa, Oryza sativa
  Clone ID: PAT_MRT4530_3119C.1.pep
SNKYSNLRAHLKTLSIITQTKSIAFLITTKETPQLFHFLTKCKINSLFRYLTCEHCTHLIKTRARSYNELYYNSGSAHPLSTFIHTILGSQPL

SEQ ID NO: 128890 - protein, 176 aa, Oryza sativa
  Clone ID: PAT_MRT4530_311C.1.pep
VQGENGCIFEDESDYDDDDEVDSADQTGRQAGQTAGTPPVRLAQEVWSDRPGSSAEGSVDADRDDRAGAADQTGVYCAVRLAQPAARQGISAVRPEIQHRSDWRHPLGQTGRSILVRPISIDFEGDSMPRESICGDGPGVGLGTRRRPWWRSDRRQAAVRPVAYGRSDQRRQQARQ

SEQ ID NO: 128891 - protein, 186 aa, Oryza sativa
  Clone ID: PAT_MRT4530_31200C.1.pep
MAEVADLTGDGGVLKTVVRKAKDDAIAPTDSLPLVDVHYEGTLAENGEVFDTTHEDNSIFSFEIGQGAVIKAWDIALRTMKVGEVAKITCKPEYAYGSAGSPPEIPPNATLIFEVELVACRPRKGSSLGSVSDEKARLEELKKQRELAAATKEEEKKKREEAKAAAAARVQAKLDAKKGKGKGKGK

SEQ ID NO: 128892 - protein, 71 aa, Oryza sativa
  Clone ID: PAT_MRT4530_31201C.1.pep
LTDPVDVYYSSQDSSDSSLEKILQSQDQYIRDALGSPLTSKAQAQPNVEVICEEAYNVRGMSFVIYVARKQ

SEQ ID NO: 128893 - protein, 240 aa, Oryza sativa
  unsure (1)..(240): unsure at all Xaa locations
  Clone ID: PAT_MRT4530_31202C.1.pep
NSSSVPPNAPEDVRTDADKQETFMSFSDDELTNQLICEDYTDYERLFDTAIRHEDQRNTTATKRQAAQLTAHQGGNHKPDLTHRQKAGPTTMSVGQHRTFNHTNLHHGSSGSXNDHGSQTNRCTAPRSPMAPAQTGQTAQANKETGAKPKSCFNCGELGHFDDKCPKHRRAGPRFIQADVNHSYGEEAQAPPQDLLDTIADNSIPATELCDSGATHSFISKKFVGMHGLIREELNTPMRV

SEQ ID NO: 128894 - protein, 195 aa, Oryza sativa
  Clone ID: PAT_MRT4530_31203C.1.pep
RAAEATGDGPSSQFFAGCLAGLLALELRACRSVSDHVLLLAADRCRVLKSLLVYDGGSREALHRFIHQRGAALHTLDLRLPLDLHNDHLLAIGAEAEQGQQSQNGGHSLAALRLQSCVLITGDGLRSLARTTTGAGIEELALVNCDVVEREPGLLTFLSQSMRRLRRLDLSYNETLSDQEVGAMLSSCHNLIDIR

SEQ ID NO: 128895 - protein, 259 aa, Oryza sativa
  Clone ID: PAT_MRT4530_31204C.1.pep
MRQRRHGRRGGKAAAGARGAKAASIKIEQTKPRRISQELAQASAMEEVVVGKERKRPRCALVGVGGHDSDVADEPGGVRARRTSTARLSVPTSIAFYDIQDRLGVNRPSKSIEWLICAALVARLLLRPPQRRPAPHPRRPSSGQPSEEQARTRKATVAVSPGKSGEKRRKTRSGCAARKAERIAKLRVWREGWMPRREASTSATSGGQSWIRKPSTPGSGDSCSCSDAKPGKRRWAEKAGEVVAREADGAERGGGGRRR

SEQ ID NO: 128896 - protein, 217 aa, Oryza sativa
  Clone ID: PAT_MRT4530_31205C.1.pep
MAIIEAIWPRLGDLRSADQRRRRMGHCQTGFIGVNTTTPPLDPKPSPLLPSPLTRSRGCRHRSMPSGQETLATTAASNRNHRPGATFSGSGCREPASAGSGLCKPASGSGGGAAKALGGCSRYHYAQTVGVIVIVEGNLVLTGPSFAISVYVGIDLINLHDGSQEEEDDDEEDNVGEIFCNTCTCDFTDYNSAIVETVITWYGPAEVTYVVLTNAFQ

SEQ ID NO: 128897 - protein, 54 aa, Oryza sativa
  Clone ID: PAT_MRT4530_31206C.1.pep
EAERREPQSPPRPTPNSQARPASRRRAVPPPPPPTPSALPREAEKPKDYPRKNS

SEQ ID NO: 128898 - protein, 669 aa, Oryza sativa
  Clone ID: PAT_MRT4530_31207C.1.pep
MARLLVLRSAPYHRSHLSATATFLLSPSNSKHPHSASASASFPSTARRILLPSPLRVPARAIESSPGTTKQEPTPAAGEGEAQEPPPPAASAFEVEELGWGTQLAVKLRMLVAPPWKRVRKGSVLNMKLRGEISDQLKTRFSSGLSLPQICENFVKAAYDPRISGIYLHIEPLRCGWGKVDEIRRHIVDFKKSDDEQVLHDFVGKFVVGYMPVCGEKEYYLACACGELYAPPSAYVALFGLTVQQTFLRVSLLLGTNFSKLDHTLSLLFHKIKLIECSKFLSGYLMLLNSIGKKKEEIEEFINSGVYQVARLKEEGWITDLLYDDEVMAMLKERVAQKDKKSLRMVDYSKYSRVSKWTLGLQGGGEQIAVIRASGSITRTRSPLSVPSSGIIAEQLIEKIRTVRESEKYKAVILRIDSPGGDALASDLMWREIRLLADTKPVVASMSDVAASGGYYMAMAAPVIVAEKLTLTGSIGVVTGKFILQKLYERIDFNKEIISKGRYAELNAADQRPLRPDEAELFEKSAQNAYALFRDKAAMSRSMNVDQMETVAQGRVWSGQDAASRGLVDSLGGFSQALAIAKQKANIPHDRKVQLVEISKPSPTLPEILSGIGSSLLGVDRAVKGVLQDVTSLNGVQARMDGILFERLEDLSGENQLLLLVKDIVNYFD

SEQ ID NO: 128899 - protein, 272 aa, Oryza sativa
  Clone ID: PAT_MRT4530_31208C.1.pep
MAATSASGGAGCFPRPPPSGGEEKKQDEEGQCFLDGMDLLKDATENKRFLPTGLQGVDALLGGGLRQGQLTEITGQSSSGKTQVCLCSASHVAARQLGVVMYLDTSNSFSPSRIARIVDGFPISLVREPKNVRLERVMSSIICKSVFDIFDLFEVLHQLELSLKSKVNNGGNKICLLIIDSISSILAPINGGKYPRGRSMMISVAMILKKLAYEHNLSVLVTNHMVAGNGAPKPALGESWKTVPHVRLVISRERGSKICAATVLKHTLLVFA

SEQ ID NO: 128900 - protein, 698 aa, Oryza sativa
  Clone ID: PAT_MRT4530_31209C.1.pep
NLTKLDMAYNMLEANDWSFVSSLSNCSRLTELMLDGNNLQGNLPSSIGNLSSSLEYLWLRNNQISWLIPPGIGNLKSLNMLYMDYNYLTGNIPPTIGYLHNLVFLSFAQNRLSGQIPGTIGNLVQLNELNLDGNNLSGSIPESIHHCAQLKTLNLAHNSLHGTIPVHIFKIFSLSEHLDLSHNYLSGGIPQEVGNLINLNKLSISNNRLSGNIPSALGQCVILESLELQSNFLEGIIPESFAKLQSINKLDISHNKLSGKIPEFLASFKSLINLNLSFNNFYGPLPSFGVFLDTSVISIEGNDRLCARAPLKGIPFCSALVDRGRVHRLLVLAFKIVTPVVVVVITILCFLMIRSRKRVPQNSRKSMQQEPHLRLFNGDMEKITYQDIVKATNGFSSANLIGSGSFGTVYKGNLEFRQDQVAIKIFNLSTYGAHRSFAAECEALKNVRHRNLVKVITVCSSVDSTGAEFRALVFEYIQNGNLQMWLHPKEHEHSQRNFLTLCQRINIALDIAFALDYLHNRCATPLVHCDLKPSNILLGPDMVAYVSDFGLARFICTRSNSDQDSLTSLYCLKGSIGYIPPEYGMSEERSTKGDVYSFGVLLLEMVTNISPTEEIFNDGTSLRDLVASNFPKDTFKVVDPTMLQDEIDATEVLQSCVILLVRIGLSCSMTSPKHRCEMGQVCTEILGIKHALSKIDGE

SEQ ID NO: 128901 - protein, 77 aa, Oryza sativa
  Clone ID: PAT_MRT4530_3120C.1.pep
PSEKLPMKSCKTDVNEAEILSTFLQKNHSASFTSASMSTPVPEGVFFPSEPRLKDSLKPPAPVEVLPDENLADSLTN

SEQ ID NO: 128902 - protein, 179 aa, Oryza sativa
  unsure (1)..(179): unsure at all Xaa locations
  Clone ID: PAT_MRT4530_31210C.1.pep
MASIDRPIVFFQXCLFLLCXGSLGQHLLRHITISHDIVSRRARPRECKFDRLQAFEPIRSVRTQAATTACLSMSHNELLQCTGXSVVRRVXIEPIVLLLPHYSNDASLTYIIRGRGITGPTLPGCTDTYQXQVQSSGQVQLTDRQSRXSKFKDEHHXIHRFTRGVVIALPAAVPHCRYM

SEQ ID NO: 128903 - protein, 34 aa, Oryza sativa
  Clone ID: PAT_MRT4530_31211C.1.pep
RPSVRRPVGRSTAVHGGYVMASDKTSHPGGVPLL

SEQ ID NO: 128904 - protein, 248 aa, Oryza sativa
  Clone ID: PAT_MRT4530_31212C.1.pep
MAAALSFFLLLLLLPAPLLLLPLAGNLPAAVLGEVRVERDLILVDLQDYGSGVGTLAVRPDVFSVAGFANRTGHWHALRGNDHLFRGDLVATPLPFGSSYGDLVGGVNNLLGLPLGSPFTSYATVVLSGYDGGGGGEAAAVKRALATLAAVICEGQRLHPILETILTRGRGARVAAEHLPYIEHWDAMWEELKRWRRTGEWGGGPFAGELRERASIGSAEEALAVVGWTFRQLLLGDGSIPAMCRAEL

SEQ ID NO: 128905 - protein, 716 aa, Oryza sativa
  Clone ID: PAT_MRT4530_31213C.1.pep
MDREEHLTPSHRPCRLNPAPVLSLPHEAPLPQYRSEVASEPKDPQCEDFKDQAQDLEQGKLGSSSARAYIELEPMQASSLELGSLTALAADGFVLGGGGNGTGGDDLSALLAFKAQLSDPLGVLATSWTRNASLCRWVGVSCSRRRPRVVVGLRLRSVPLQGELTPHLGNLSFLRVLDLAAANLTGPIPANLGRLRRVKILDLAHNTLSDAIPSALGNLTKLETLNLYDNHISGHVPMELQNLYSLRVMALDQNYLTDSVASLSMLRVLSLPSNQLSGPVPPAIFNMSRLETISIRKNNLTGAIPTNESFNLPMLRKIDLYMNKFTGPIPSGLASCKHLEMISLGGNLFEDVVPAWLATLSQLKSLSLGGNELVGPIPGQLGNLSMLNMLDLSFSNLSGPIPVELGTLSQLTFMSLSNNQLNGTFPAFIGNLSELSHLELAYNQLTGHVPSTIGNNIRPLKHFEIRGNHLHGDLSFLSSLSNSQRLEVLIISENLFTGCIPNSVGNLSTDNQLSKPILPASLMTLENLLGFDLSKNSIAGLLPCPDKSLYSTSAHHFLKFVLPAIIVAVAAVAICLCRMTRKKIERKPDIAGATHYRLVSYHEIVRATENFNDDNKLGAGSFGKVFKGRLRDGMVVAIKVLNMQVEQAMRSFDVERLASKLDDLVDNNQSAFIRKLRAHRCCSMGRRGEKSGTRAECGKGLLPIPNRLSLYADVTA

SEQ ID NO: 128906 - protein, 95 aa, Oryza sativa
  unsure (1)..(95): unsure at all Xaa locations
  Clone ID: PAT_MRT4530_31214C.1.pep
MAKTMEQGRREARDCAGALPSQRPLGRRMQGEEYMPKGDDFAIASSPQRGPKKLFRPIKPRGYWADDRPTAHQGPMNLNYTMYPCKCPFXKGNHV

SEQ ID NO: 128907 - protein, 213 aa, Oryza sativa
  Clone ID: PAT_MRT4530_31215C.1.pep
MGPPPPPGAATSASRKRFRTKFSPEQSPETDRVRGPGHHHDDDAAADDDDSEDSEMSDYDDDRSASPLQAPPPVLSPGYLPSATHMLLSLGSASAPAVAASRPHAAAAAMGPPPPPGAATSASRKRFRTKFSPEQKQRMQALSERLGWRLQKRDEAVVDECCREIGVGKGVFKGQLVLPLSTVITSFVLELIWVCMDNDDDDVLIGVLGGVVF

SEQ ID NO: 128908 - protein, 52 aa, Oryza sativa
  Clone ID: PAT_MRT4530_31216C.1.pep
MQLIAIYKTNMPMEFAGTAERGRPNCIKKKEGVTKIAERAGSLNEYNIRLKE

SEQ ID NO: 128909 - protein, 778 aa, Oryza sativa
  Clone ID: PAT_MRT4530_31217C.1.pep
MASSSGTREVLMLEAPPAPSGAPWRAPSDAEAVDALPYIDGDYGDPAVKREVDRMVVEVDAVPCPYVHEGEDPFKRPSYLFALVAGQLDCREDSFTTCSGRKVTLRIWGPGADLAKTAHAMYSLKAAMKWDEEVFGLEYDLDLFNIVVVPDFNMGAMENKSLNIFQSRLVLASPETATDGDYAAILGVVGHEYFHNWTGNRVTCRDWFQLTLKEGLTVFRDQEFSSDLGCRTVKRIADVSKLRTYQFPQDAGPMAHPIRPHSYIKMDNFYTVTVYEKGAEVVRMYKTMFGASGFRKGMDLYFQRHDGQAVTCEDFYAAMCDANNTQLPNFLQWYSQAGTPTVKVSSSYDASSQTFSLKFSQEVPPTPGQPVKEPMFIPIAVGLVDSTGKDMPLTSIYSDGMLQSLTSDGQPVFTTVLQFNKKEEEFIFNNIPEKPVPSLLRGYSAPVRLDSDLTESDLFFLLANDSDEFNRWEAGQVLSRKLMLSLVADFQQQKTLALNPKFVDGLRSILRNTSLDKEFIAKAITLPGQGEIMDMMPVADPDAVHAVRTFIKKELALQLKDDLLSTVTNNRSSEAYTFDHDSMARRALKNTCLAYLASLNEPDTTELAFVEYKSATNMTEQFAALAALSQNPGQVRDDTLLDFYNKWQHDYLVVSKWFALQATSDIPGNVANVQKLLGHPAFDMRNPNKVYSLIGGFCGSPVNFHAKDGSGYKFLGEVVLQLDKINPQVASRMVSAFSRWRRYDESRQALAKAQLEMIVSANGLSENVYEIASKSLAA

SEQ ID NO: 128910 - protein, 191 aa, Oryza sativa
  unsure (1)..(191): unsure at all Xaa locations
  Clone ID: PAT_MRT4530_31218C.1.pep
DCISGVQLEEHCREAAARWHDAEERRQLGDEAALRRRRRRLRRSSGXGDAEGRREERLLGGATRRTAAGSGCGGLRTSGGGSTTRRPSASGGGAAXMQRSGSLVMRRGGGRSGGSMARCKGPPLAADAEGCGEAVAARRRGGPPLAVAAMERQLGDEEXPLAARRRGRRPTTAVPARIPPLSPSVLPASQT

SEQ ID NO: 128911 - protein, 114 aa, Oryza sativa
  Clone ID: PAT_MRT4530_31219C.1.pep
MEQASCDYPTSAGARGHVRIVAIGRMQRVQIANGTCENHPDRQSFIVRQGTREHVYLGATRVALPLAAADAFGATATPSLGPSPALGSASGSHRCRDSSGCRWGPLRSRVSHWN

SEQ ID NO: 128912 - protein, 252 aa, Oryza sativa
  Clone ID: PAT_MRT4530_3121C.1.pep
MASLLPPTHLLTPPPLCCCSYALLLPRARRAPPRFSNGAFSAAESLVRGEFLGKVGTLARRMEGRRRLAVASAGRGPLFGGGGGGGGQRGSGRVVGNLAFAALLTFLATTGQLRWVLDAIVSLWLLTILLPILGLAAFFFFAGQDILQSNCPNCGKSFQILKSSLKDGPQLCPYCTQPFSVQGNKFVRESARFSSGRTTTGAQAFSESFKRGSEEPPIMAFNQQSHYVLLHAGKKTPSGTVVDIEAEVKDAE

SEQ ID NO: 128913 - protein, 72 aa, Oryza sativa
  unsure (1)..(72): unsure at all Xaa locations
  Clone ID: PAT_MRT4530_31220C.1.pep
VDVGXGRRGGSRGXGGXXRRWPYXPRXRRAARAXAAAEEEXARXGXSGXVGTARPAAIGVESVSPAMLALRA

SEQ ID NO: 128914 - protein, 159 aa, Oryza sativa
  Clone ID: PAT_MRT4530_31221C.1.pep
ALATSTPNLYAAIASENDVICYTTRFKPRWRQIEEARRPSKPSRRPCAEARGGEEALNTVWLAPTGPCPQPGAASYSTARLEKTVEERPRSGRNPGPNGEIRAAGWLLHSGAAMASTRKEVQGGSGEERGGRRFSSLSGGFGWEIKRTRRGEETRMAHN

SEQ ID NO: 128915 - protein, 55 aa, Oryza sativa
  unsure (1)..(55): unsure at all Xaa locations
  Clone ID: PAT_MRT4530_31222C.1.pep
IPXKXDXXCEEXLAGYAAXPXXFRXXTTXXYGXXXLAKTXXXXACLXXKNLGXKD

SEQ ID NO: 128916 - protein, 777 aa, Oryza sativa
  Clone ID: PAT_MRT4530_31223C.1.pep
MLMLSSKRGDDSFSVPLPVVIVAIVMLVFTFSDELPLSIVYDVSVLLLLSFGNFQIPAATVRVVLALAGILHQKDEPKKEVKPDCEKKDDNDSKNLKASLIIFYGMVLGQGILYIVACLLEVFSFIPRKYLIRHGGLGGQMGVENVNLYYAYAFEKCMEGAVLAPKKISLITFAMDSLNSDSSRKKLYGVQMLHKLLKMEQLRTKTITKLTNDTKTVASLFDMLDWTSDRDSEIRLFAAKVTAELAGSLRVVQIPGTTQLVASLLDTDHQQTTRDHFLFIDSQVGREDSPIQQDGMGQQNSPVLKYLKQMVIYCLIPVDEPSNVDEQNSCMVRCWKQITKCWSVPEEEPSTDQDFLPVQGLIILERLANFDLGNCMEISRTGLISKMIDFTSYRNHMISTNEAHQIMLASLSLRVLRRLASTEGKLGVTLRQQILEHTFILSNLAEIMDDNGNSHELKQLAAEILKNLAMDRNTSADIGHIRVIISSLMRAFLSQDPSSSTNSNHLLWKNAGQALAMLAMESRDNCLVMLMEQGYVFIRQLTTMMQDDRFKCIAASLLWNMCEHAQSELSNSDLKELSYILRETRDRKTANLSVNCNTGLLEGEPTCSFHIVFQILTSIHICALNIDSIVLEGIMDAEGAELEVLIGLSSQICQVIPEDFAREVEHGQIKEKFIKRLVEVLNAHMKPSVHCPRIRRVIVQHAIYLMEFNSRYANDFHKCWMVEALSMVERTPSRAENYRLLSGDTGLMEHNTPLTALVARAKELMGREWVRGISSVT

SEQ ID NO: 128917 - protein, 979 aa, Oryza sativa
  unsure (1)..(979): unsure at all Xaa locations
  Clone ID: PAT_MRT4530_31224C.1.pep
MAPRKPNPVSVKGPDPGRIDDDTTAFLGLSLMDDAELAKLVSSGALVEGQAFALGKAVVPKPVDNRTVLFAVFFEAGLRFPCNVLLPEILRLFEPSAELLEPYFSPXVNSKTVITLAGTKKTVFGSVNFNVCPERSDLWPVNAAMSKWDRHRMVRWFYHTIPFEAGSESVKSLRCRRKAIAPNRKPKITVDGAMEARFVLLRKVYSRLSCRDLVEEFCMLRIFPLSQSWXVAVDQSEEVDGLPKLVLPEGTNDMATDQADAEAQRMIGDVSVVEYSQLLTRQAAGRANRVYDXRGQVKLAPRKRRAPSSSHSDADDEDDVEDRDDEEEGEEEEEAEAMVGRAADDAVENRVETPGYTPTPSPGHNETGVESNSSPLHRRDSEVARALIAFSAGKVEKGSPVKKAAKKRGLVNVGRVFSDDESSDETPTSPAGHCLDLSTAPVLSIDVSRAGGSGAAVASASADRVVQAAARVFGSPLCQPVVSPLVXPKGKGAAVETSASDYSLVAPHFAPGDFETRAELIPFVEWVSNLVSPASTPSLFTELNEFDEGCSAIKSLALWILAAHCSTKRTVWARLDGFRNRLRAKDDVLGRKGLQIEALANTFKEAKAENKRLQAELEKGREARAEVDRLRVELEKERAHSVALTDYYNLTELKMEALRLEVSKAEARAAEESQRFSREMAKATASAKTARQTLRLALSDMGAWVRGVPGEDASVFDFSEWTQQAGGAISDCATAYGDCCARVSVAFTMGLLQXCGCEHVTEFPNYVKGDWEISAEDVSLALRAWRRXFWQKDGQFAAKAHLLEKLAKAEAEDQGEGEDAAAGVGRGDAQDHPEGVHRKLCVRPPLGDWRSRNKKFVAVKGLPKARCAFWPVYRDMMINGNIYTVVKVAGWMRAHPGQTLEDYDHVHTKRLEDMVRFWRNHQKTDRQEAISQRRYSLACVLPPSPLRVMYDISSDDEPSSPNHSLGGEGGCGGEGVIYL

SEQ ID NO: 128918 - protein, 703 aa, Oryza sativa
  Clone ID: PAT_MRT4530_31225C.1.pep
MPPAKLDPDPPPIHRLLELIKSEPDATAALAHLELLVSTRPAFPPPQPLLFHLLRRLATSSPSHLPRLLNLLPRLRHRPRFSESAALVVLSAFSRAIMPDAALDAFRALPSILGCNPGIRSHNALLDAFVRARRFSDADAFFASLSHGAFGRRIAPNLQTYNIVLRSLCARGDLDRAVTLFDSLRRRQVAPDRITYSTLMCGLAKQDRLDHALDLLDEMPRSRVQPDVVCYNALLGGCFKAGEFEKVMRVWDKLVKDPGARPNLATYNVMLDGLCKFGRFKEVGEVWERMVANNLQPDVITYGILIHGLCRSGDVDGAARVYSEIIKTGLVIDAAMYNSLVKGFCQAGRVQEAWKFWDSAGFAGLRNLRTYNIMIKGLFDSGMVDEAIELWDLLEKDVACIPDTVTFGTLIHGLCQNGFANKAFTIFEEARVSGKQLDVFSYSSMINGLCNVGRLVDAVKVYEKMDKDGCKPNSHIYNALISGFCQVYRTSDAVRIYSKMADNGCSPTVITYNTLIDGLCKAEKYQEASSVAREMVENGFTPDITTYGSLIRGLFSDKKIDDALSIWKQILYKGLKVDVMMHNILIHGLCSAGKVDEALHVFSDMKEKKNCPPNLVTYNTLMDGLYETGYIDKAATLWTSITEDGLEPDIISYNTRIKGLCSCDRIHEGIQLLDEVLSRGIIPTVITWNILVRAVIKYGPIQV

SEQ ID NO: 128919 - protein, 445 aa, Oryza sativa
  Clone ID: PAT_MRT4530_31226C.1.pep
MDSPVSPARWVVGKALGPVSDGLVEAWAASRELGPNVDALKAQGKDIRSPALKELLQKLRDLAFDADDVLDELDYFRIQDELDGTYHAADEHAGGCARNLFLNVTHTAKAASKRLGFSKCSCAAAADNGSHTYPRSELSIRMKDVVDQLQLVCAKVTTILNLEIHHSIRSTDSSTASNRPITTPTSIEPKLYGRDDTAKSIIDYITQGTDCGKDLTVLPIVGPGGIGKTTLIQYIYKSLEVQNHFQVKVWICVSQNFSVDKLIEEIKQYVPKVDGEKDGRPEELIEQRLKSKRFLLILDDICKCQSDDWKKLLLPLTKGQSKGNIILVTTRFPVVAEMVKTMDNSVDLEGLDPGAFRDLFLAYVFGDKLPRDVHKDLLVIGDKIAGKLKGSPLAAKTVGRLLRNHFDQYHWNRVLESREWEMETSNHDIMPALQLSYDYLPFHLQ

SEQ ID NO: 128920 - protein, 1807 aa, Oryza sativa
  Clone ID: PAT_MRT4530_31227C.1.pep
MDSAVSAARWVVGKALGPVSDGLVEAWAASRELGPNVDALKMELLYAQGVLDNAQGKDIRSPALKELLQKLRDLAFDADDVLDELDYFRIQDELDGTYHAADEHAGGCARNLFLNVTHTAKAASKRLGFSKCSCAAAADNGSHTYPRSEQGAQGRGLCCGWSYNDHDSEEEEEATGGGIRKLASGARNTIHAVGKRLHCSSFPAVVDDDSSVSICCGACMHKPPQQRKDVIKETPKLKIDRVGLSIRMKDVVDQLQLVCAKVTTILNLEIHHSIRSTDSSTASNRPITTPTSIEPKLYGRDDTAKSIIDYITQGTDCGKDLTVLPIVGPGGIGKTTLIQYIYKSLEVQNHFQVKVWICVSQNFSVDKLIEEIKQYVPKVDGEKDGRPEELIEQRLKSKRFLLILDDIWKCQSDDWKKLLLPLTKGQTKGNIILVTTRFPVVAEMVKTMDNSVDLEGLDPGAFRDLFLAYVFGDKLPRDVHKDLLVIGDKIAGKLKGSPLAAKTVGRLLRNHFDQYHWNRVLESREWEMETSNHDIMPALQLSYDYLPFHLQQCFFYCALFPEDYKFDTKELTCFWIGLDILHSEYQNKTNDDIALNNLNDLVSHGFFKKDETDGHPCYIIHDLLHNLAAKVASRECVSLHYSNVRSVEIWPSIRHLSINTDGVDDSDGMNNESFRNILQKLKTRVKVENLQTVMIFGELDESFAESFHDLFKEASALRVLHLPKMSFPVGFIFNKFSTLVHLRYIRLGAPRRSKTHLTSALSRFYHLRILDLEAWDGCLDLPRDFSNLSKLCHFLTKHDKLHFAICDVGKLQFLQELERFEVNKEEKSFELKQLGHLMELRRLGIYNLERIDTKEAAAEAKLFDKNHLLKLALSWDKCQASRYPDKEDQVLENLRPCNNLKELFIIEHGGSTCPSWLGAELSVKSLETLHLSNVTWKNLPPIGEVCLVNGLGEDQFVSCNTGQSFQNLKRLELVGLPNLRKWTAKEVPMFSLIEVLIVKNCNEVIELPFSYCTYCPSEGYENLFPRLREVEIENCPQLRMPPMPYTQTLCFVYIKDVGTRLKKLHYMSTYSLRIVGKTDLNGLDDKILAFYNLTQLQELMINNCPPLAGCYLQMLTSLKILRLDSSSVVFHLSESLSDYKWQVPVEYLSISSYHGSGKALSQLLSHLPKLSELYLMNCNKITRMCIAVEQQQTTAVELEDTQAVESIQQQQVAEDLVEEEGVVPQLAMDQEDDDGMLIFPAHLSNSLQQLILYRCPELILDVARPALPTSHEDETGGWGLQSLRSLQRLRACLLQARQILARAATKHALQITKCPKFLSAYEAPGCPFPSSLQCLKIAGCKEGVQTLDFISNLNFLTELHIDDCGEDLRCEGLWPLLTQGQLSELDVFGTPRFFAGLDPILGGLQDGQEQQLPPPLQCSSKLQELRTDDFAGVLVKPICLLLSSSLTELRLGWNDEVERFMKEQEEALQLLTSLRDLQFLRCSKLQCLPAGLHRLTSLKRLKIIGCPSIRSLPKGGLPSSLQELDVGYCNNEKLKQRTSQSIHALFPNMWISCDILYLYIDLLMPFQSYVAIRLLTGVLGFVAQVFLYLDLIIGLQDRCGRNTSLETNNVAVTCLKYASTALKVNSVAINRPDSCHRLNRCTGVFGTPRFFAGLDPILGGLQDGQEQQLSPLQCSSKLQELHTDDFAGVHVKPICRLLSSSLTKLVLGWNDEVERFTKEQEEALQLLISLQDLHFWGCTNLQCLPAGLHRLTSLKRLEIIGCPSIRSLPKGGLPSSLQELDVRASWNEKFKQRCRKLKGTIPEIILD

SEQ ID NO: 128921 - protein, 101 aa, Oryza sativa
  Clone ID: PAT_MRT4530_31228C.1.pep
MHILAELCKCGYCICSELLSDRHKKFGRIYKSRARFIPKKKKKKKKKKKKKKKKKKKKKKKKKKKKKKKKKKKKKKKKKKKKKKKKKKKKKKKKKKKKKGF

SEQ ID NO: 128922 - protein, 114 aa, Oryza sativa
  Clone ID: PAT_MRT4530_31229C.1.pep
MELSRPTTVAAAVGARWWWWWEAPSTRQTATAASDDAGMAAAAAESGADAGTPASGGLPAVRMLQILALKTDQTLEKGKEIQNVTRFNESKYIHKGAPQNGIQTFGAYNHVVIE

SEQ ID NO: 128923 - protein, 73 aa, Oryza sativa
  Clone ID: PAT_MRT4530_3122C.1.pep
MASTGGAHALVLLLFMFAAVLSPAARREAAEAMHAAANTRRHRSSGRLDGKTIDQGIGYMLMALAFVLTYVLH

SEQ ID NO: 128924 - protein, 224 aa, Oryza sativa
  Clone ID: PAT_MRT4530_31230C.1.pep
MGRRPARCYRQIKNKPYPKSRYCRGVPDPKIRIYDVGMKKKGVDEFPYCVHLVSWEKENVSSEALEAARIACNKYMTKNAGKDAFHLRVRVHPFHVLRINKMLSCAGADRLQTGMRGAFGKPQGTCARVDIGQVLLSVRCKESNAKHAEEALRRAKFKFPGRQKIIHSRKWGFTKFTREEYVKLKAEGRIMSDGVNAQLLGSHGRLAKRAPGKAFLAETIQASA

SEQ ID NO: 128925 - protein, 79 aa, Oryza sativa
  unsure (1)..(79): unsure at all Xaa locations
  Clone ID: PAT_MRT4530_31231C.1.pep
TWGPQKKKLKRGKKSPKPFLKGKTPPGLGINPNXQGIYKVLGEKEKVILFTSRGKNKEQEAAIKKIGGKVLCKKRKAPR

SEQ ID NO: 128926 - protein, 157 aa, Oryza sativa
  Clone ID: PAT_MRT4530_31232C.1.pep
MRNSEAPTHGGMEIEATRPSAGNGSTITLPGLSPLSETLWREKANTAEIIGDVSARLTWKDLTVMVTLSNGETQNVLEGLTGYAEPGTFTALMGPSGSRKSTLLDALSSRLAANAFLSSTILLNGRKAKLSFGTAAYVTQDDNLIGTLTVRETISYS

SEQ ID NO: 128927 - protein, 92 aa, Oryza sativa
  Clone ID: PAT_MRT4530_31233C.1.pep
LVSTQNGGSAEDHRLHHNYDATIWTQNKATRHLDTRNKLANMMTYTEEDDPHKMQLKTQTSLLGSYGCMTRKIDVRHRNINAALTRLMWGMC

SEQ ID NO: 128928 - protein, 425 aa, Oryza sativa
  Clone ID: PAT_MRT4530_31234C.1.pep
MGNMGSSGGHRRRNNGHGRHHHHGQPTAPPPPPQQQQQEVAPNRYVFAAASPYPPQYPNPNLPQYYPQYGNFYPPPPPSMPGPLPAPYDHHHRGGGPAQPPPPPPPPQPIHAAGEFPPAMLQQHPHYHGWGGNFSYGPPTQPPAPAPPYVEHQKAVTIRNDVNLKKETLRVEPDDECPGRFLITFTFDATVAGSMTVYFFAKEELNCNLTATKEDLLKPVTVTFKEGLGQKFRQPSGTGIDFSLFEDAELFKEGEMDVYPLAVKAETTFSIGQFSEGEEQKSQTPNSQITQAVFERKENGDYHVRVVKQILWVNGTRYELQEIYGIGNSVEGDTEGNDPGKECVICLSEPRDTTVLPCRHMCMCSECAKVLRYQTNRCPICRQPVERLLEIKVNNKGEEQQQQQIPQPPPPPSTAPPHQQQESQA

SEQ ID NO: 128929 - protein, 127 aa, Oryza sativa
  Clone ID: PAT_MRT4530_31235C.1.pep
MSGVWVFRNGVVKLVENPPASANSGGGGGGGGGGGGGGIRRKALLHMPTGEVVTSYASLERKLAALGWERYYSGGGGAAAAAAMMLQFHKRSSVDLISLPKDFSQFGSVHMYDIVVKNRDAFRVIDV

SEQ ID NO: 128930 - protein, 392 aa, Oryza sativa
  Clone ID: PAT_MRT4530_31236C.1.pep
MSMSLADSWGSAPASPIGFEGYEKRLEITLSDAPVFVDPCGRGLRALSREQIDSFLDLAKCTIVSHLSNKHFDSYVLSESSLFVYPHKVVLKTCGTTKLLLSIPRILELAAELSLPVLSVKYSRGMFIFPGAQPSPHRSFLEEVSVLNSFFGGLKSGGNAYVIGDAFKPKKKWHVYYATEEPEQPMVTLEMCMTGLDAKKAEVFFKDSTDGSCSSAKEMTMFSGISEIIPEMEICDFEFDPCGYSMNGIYGPAVSTIHVTPEEGFSYASYEAMNFNPSSLVYDDLIKKVLACFCPSDFSVAVTIFGGHGFAKSWAKGAEVDSYMCDDLVEQELPGGGVLMYQSFTAVTPGAVSPRSTLDGWNSDGAEMVAKSKEMSVCWEGEKAAKKKDADA

SEQ ID NO: 128931 - protein, 585 aa, Oryza sativa
  Clone ID: PAT_MRT4530_31237C.1.pep
MVLQLREEVEPMPYYGTDSDTFTLEVHHGGFFLGHGQNRSYVDEKVTWFDHCEAQSWNMLSIGEFIAMLGYEDSVKTYWLLRGKRLADRLRLITREIDTAAMKSFVNTVKNFVVYFDHGETYGNNNWDDTLEILPKVLSPRKVTDVENKEGERLPEFYSNKANSIELVEGDRDSESDSDDSDFMDSDYEIDDGDDDLFEDNVDDDVSPNGIVKKKSFDEEQLQLPDYDGDEDGLGLILAVQQVFPDSEHRFCVRHLYSNFQVHFKDEWNVNMEEMRNLNQEAYDWLSNMSPNTWIRAFFSDFPKCDILLNNNCEVFNKYILEARELPVLSMLERIKGRLMTRYYNKQKEMEEKWQGPICPKIRKKVSKNADMANNCFILPAVEVDGLEVKPPVYDKKVGRPKKCRRKQPQEVQGKNGPKMSKHGVEMHCSDCQQLGHNKKGRQLRKTGLRPKQQPKRKITPLVDDEAEADLEPVVTQDVMQPCPSIQPYPTNTMLSQMAVESSQPSKRALQAEPLPDSAYILSNQPSARLAPLTTATKEGRATAASGGTGKKGGFGAKKAAGSSLGAKKPDGNKSSRKKAAAKKN

SEQ ID NO: 128932 - protein, 1043 aa, Oryza sativa
  Clone ID: PAT_MRT4530_31238C.1.pep
MEVEAQTSAAAAAAGDELRSLLSATLSPDKAAVDAATEGLSRIAASSDPRFPISLLAVAAADGDQGTKVAAATYLKNYTRRNIDWGLSSPELYKEFRDRLAQALLQVEPFLLRVLIEVFRQVIEKDFVKENLWPELVPQLKQVIQSSNIISPGQHPEWNTINALTVLQSVVRPFQYFLNPKVAKEPVPPQLEQIASEILVPLQVTFHHIADKVLLSHDETNLEYEQLLLITSKCMYFTVRSYMPSRVKQILPSFCKDMFRILESLDFNSQYEDRATTRLKTAKRCLIILCTLVTRHRKHADEILTLQFSQPDGTYSQQRNQNIKSKHSFTCPGWRLVSPHFSSLLDSAIFPALALNEKDITEWEDDTDEYMRKNLPCELDDISGWAEDLFTARKSGINLLGVIALSKGPPVVSAASKRKKGDKSKGKGERSSIGELLVIPFLSKFPIPPQGEDVSSKAVQNYFGVLMAFGGLQDAMSTNIYHSLMKALTMEDFDELSCYPVRASASGAIAELIENGYAPPDWLVLLQVVMKRISVEDENESTLLFQLLGTIIESGQEKVLPHIPEIVSNIANTIMKLLPPVPDPWPQAVERGFAALVSMAQAWESSAPDENKDIEMRVWQSGQFAIAQTFSHVLQKAWLLPVEQMGLSVCSSLPPLSCVNDASILLEFIMRSITSMEETASMKVFELVAIWADIIACWDSWEEMEDQGIFNTIKEAVNFHQNFDSTGFFLKILPSRSENSSQSSVISWVSSFITRAIEAYPSATWRACSCMHTLLHTPNFSLGAEDTRMTLAVSFAQAAFSRFKSVSDSPSGIWKPLILVISSCYICYPDAIEQLLRKYDSNGYAIWASALAQISSSSFNPGLSSESEIKLAVLTLATVIERLLALSTGGTKLLHDCCVSLMESCIHLKEVQEDGDDGDGAEDLDDDDEEEEDTDEDDEDSDDDDDVREETEEEFLQRYAAAAAGESIEIVEDGDIDDETQDIELGSLDEMDVQQVVLSMMKIRPDLIRAQTFPDGLMERMAETFPEYEQLVHVHRQALAILQ

SEQ ID NO: 128933 - protein, 112 aa, Oryza sativa
  unsure (1)..(112): unsure at all Xaa locations
  Clone ID: PAT_MRT4530_31239C.1.pep
MAPASATTAASRRGSGSSGCGARPEVAASGGASGERRATVTMGQRHGSDLSGLGPAKRKERARQALTAAATGRSATTAHSRAGGAAIWVTSAGKAARAXREGSTRLTAGRGV

SEQ ID NO: 128934 - protein, 248 aa, Oryza sativa
  Clone ID: PAT_MRT4530_3123C.1.pep
MGKYGVELDAVALNSLLSVMCRGDDRAQAAQDLFEHTCRSYHPWASSSAVSLRRPPPHQPACHAQPLPCQPSAAARRTSLPSPLRRPAAPSLPIAACGEGRRERGREMEASPQIRSWLLQGCNLQPQHPFENRRARSSSHHVAEGRWMLTDAKVEFSNYWLQSKKLNRLLMLLGAAKEEAEREIAEYRAQMEAEFQRKVAESSGDSGANVKRLEQETDTKIAQLKEQAANVSPEVIQMLLRHVTTVKN

SEQ ID NO: 128935 - protein, 1090 aa, Oryza sativa
  Clone ID: PAT_MRT4530_31240C.1.pep
MEVEAQTSAAAAAAGDELRSLLSATLSPDKAAVDAATEGLSRIAAASDPRFPISLLAVAAADGDQGTKVAAATYLKNYTRRNIDWGLSSPELYKEFRDRLAQALLQVEPFLLRVLIEVFRQVIEKDFVKENLWPELVPQLKQVIHSSNIISPGQHPEWNTINALRVLQSVVRPFQYFLNPKVAKEPVPPQLEQIASEILVPLQVTFHHIADKVLLSRDETNLEYEQLLLITSKCMYFTVRSYMPSRVKQILPSFCKDMFRILESLDFNSQYEDGATTRLKTAKRCLIILCTLVTRHRKHADEILTLQFSQPDGTYCQQRNQNIKSKHSFTCPGWRLVSPHFSSLLDSAIFPALALNGKDITEWEDDTDEYMRKNLPCELDDISGWAEDLFTARKSAINLLGVIALSKGPPVVSAASKRKKGDKSKGKGERSSIGELLVIPFLSKFPIPPQGEDVSSKAVQNYFGVLMAFGGLQDFLTEKKDLTNTIIRNRILPLYSLDPCSPYLISAANWIIGQLALCLPEAMSTNIYHSLMKALTMEDFDELSCYPVRASASGAITELIENGYAPPDWLVLLQVVMKRISVEDENESTLLFQLLGTIIESGQEKVMPHIPEIVSNIANTIMKLLPPVPDPWPQAVERGFAALVSMAQAWESSAPDENKDIEMRVWQSGQFAMAQTFSHVLQKAWLLPVEQMGLSVCSSLPPLSCVNDASILLEFIMRSITSMEETASMKVFELVAIWADIIACWDSWEEMEDQGIFNTIKEAVNFHQNFDSNGFFLKILPSRSENSSQSSVISWVSSFITRAIEAYPSATWRACSCMHTLLHTPNFSHGAEDTRMTLAVSFAQAAFSRFKSVSDSPSGIWKPLILVISSCYICYPDAIEQVLRKYDSNGYAIWASALAQISSSSFNPGLSSESEIKLAVLTLATVIEHLLALSMGGTKLLHDCCVSLMESCIHLKEVQEDGDDGDGAEDLDDDDDDEEEEDTDEDDEDYNQDSDDDDVREETEEEFLQRYAAAAGGESIEIVEDGDIDDETQDIELGSLDEMDVQQVVLSMMKIRPDLIRAQTFPDGLMERMAETFPEYEQLFHVHRQA

SEQ ID NO: 128936 - protein, 93 aa, Oryza sativa
  Clone ID: PAT_MRT4530_31241C.1.pep
FFWPRYTQRGPGGPFRQSFFSEGAKANWAPFWGPPLVSKRPYATIPCGEITLFFGGPNFFHNVTPPKGFLFKVVATWKNKFRVSPLTHFFSPP

SEQ ID NO: 128937 - protein, 75 aa, Oryza sativa
  Clone ID: PAT_MRT4530_31242C.1.pep
DDNSGDGSHHSTKHLSNKLHFGGITITKFYYIIIIYLFGQRKYNFRDLHQLRIHTIIFVDGVMCSTTTQMVLPIT

SEQ ID NO: 128938 - protein, 233 aa, Oryza sativa
  Clone ID: PAT_MRT4530_31243C.1.pep
MQGEYHRSSSEDSAASAAAAAAAAAAAMAPLAAAAAAVAAKEEQAAAAAVLPLQQQQPRRQYRGVRMRKWGKWVAEIREPHKRTRIWLGSYATPVAAARAYDTAVFYLRGRSARLNFPEEISSLASLSEGGGASEPREPDGGTLSAASIRKKAIEVGSRVDALQTGMMVAPTTHHRERQKHHHHHHHHHPHLQPHGEEQHHHHEQKHQRTAWSGRAKNPDLNQAPSPENSDAE

SEQ ID NO: 128939 - protein, 47 aa, Oryza sativa
  Clone ID: PAT_MRT4530_31244C.1.pep
SEIIQTYRRPADYLHISLGRTTEILRPAILSNLLLQRNLMARLTHAI

SEQ ID NO: 128940 - protein, 245 aa, Oryza sativa
  Clone ID: PAT_MRT4530_31245C.1.pep
MWCCSGAEEELHGAPAANPAAPPPRAPGPPRGPNAPRAGGAPAKVLPIDVPAVALAELNRLTGNFGDRSLVGEGSYGRVYRATLSTGEAAAVKMFDNNGGSGQSEADFCAQLSVVSRLKCDHFTQLLGYCLELNNRIVLYEFATKGSLYDILHGKKGVKGAEPGPVLTWSQRARIAYGAARGLEYLHERAQPPIVHRDIRSSNALVFDGHDAKIGDFNLTNQSPDSAARLHSTKVLGTFGYHAPE

SEQ ID NO: 128941 - protein, 55 aa, Oryza sativa
  Clone ID: PAT_MRT4530_31246C.1.pep
FFFFFFKTAFKRSGGSVKELSQGLAHNLHSNQFRVGIREIHLGGKLTKPVVYTAV

SEQ ID NO: 128942 - protein, 108 aa, Oryza sativa
  Clone ID: PAT_MRT4530_31247C.1.pep
LFQTSGKLGFRRLASGGRCSSRRPRRREGRSSVSILSSVDHPPSLSLAAIALFHWFALSVKPFGFAGSLLRPSLSSTLSVELSGKCDNGKTCEIKCRYTKVDEFEAIC

SEQ ID NO: 128943 - protein, 120 aa, Oryza sativa
  unsure (1)..(120): unsure at all Xaa locations
  Clone ID: PAT_MRT4530_31248C.1.pep
MQMVAPRKALQVPRKSVPEKPNLEQSKPIDEELMKRLKTGQXSYKNIVKYKRLIWHNQGQLKKPFHITRAVPLDAIPGFLYDDEDDDDDDDDEGDNNVELEEIRPSSTECESSIHPAEEL

SEQ ID NO: 128944 - protein, 195 aa, Oryza sativa
  Clone ID: PAT_MRT4530_31249C.1.pep
MEQADESSVNKESSEQQQLTSEQDDDGATWLSLTLATQGSPEEATAEAEETEAANCSESEAPKPSSAPHKVFSCNFCMRKFFSSQALGGHQNAHKRERSAAKRSYHAQRMMMGLPLEAHAAFVHSLRVNQSSVIQKASQQAQIRTAPRFHEGSISWPPIAYEEVPNSTWPGSFRLRSQPSDQPSEQSKIDLNLRL

SEQ ID NO: 128945 - protein, 35 aa, Oryza sativa
  unsure (1)..(35): unsure at all Xaa locations
  Clone ID: PAT_MRT4530_3124C.1.pep
KPLAAADLRGHGFSDRAIXRAPNARICFSRRVGGM

SEQ ID NO: 128946 - protein, 67 aa, Oryza sativa
  Clone ID: PAT_MRT4530_31250C.1.pep
DHLNYKILRKITERQKLRKGMFGCLTLSNKVKCGHICSYASQISTINQVCICQYQFKRRHYCIWPYQ

SEQ ID NO: 128947 - protein, 297 aa, Oryza sativa
  Clone ID: PAT_MRT4530_31251C.1.pep
MAPHHINGLADVRAVAEMSPTLPTMIIRVPCEQSANIHRLLEFVEDRLDHGAHDLIKAEDIPRLRAIAQGNLTSADAPQFCLSLLNESQIYLRDGVLPFDLNSTTVAPDGPGAGRIHAELLMPPGSLPLPPPVVVTVSGCEPLNDARELYQYLEEYVNQEGWIVDDTQLAGLAELAEARDELVGARDKLTTLASDIGDDLLLGGAVTDDVPLLSGDFKAALARVLKLPEGMELPKDFESPLLVPAIAGRERIHGELINLRADLAALKQHVEEQWLPWANDRLSSAGVIGDQILLDME

SEQ ID NO: 128948 - protein, 117 aa, Oryza sativa
  Clone ID: PAT_MRT4530_31252C.1.pep
MASRRNVRGYAPLPTEDRDDSNLTDDVDLRFTYTPKSLRKIPWKSIALALFLLLLGCSLLFLSYFIFTGHMEGDNSQAYGLLFLGILAFLPGFYETRVAYYSSRGAPGYTFASIPDY

SEQ ID NO: 128949 - protein, 329 aa, Oryza sativa
  Clone ID: PAT_MRT4530_31253C.1.pep
MAPHHINGLADVRAVAEMSPTLPTMIIRVPCEQSANIHRLLEFVEDRLDHGAHDLIKAEDIPRLRAIAQGNLTSADAPQFCLSLLNESQIYLRVQLFSSKSDDWVRPPIDSRVVSAVASAFHLPQDGVLPFDLNSTTVAPDGPGAGRIHAELLMPPGSLPLPPPVVVTVSGCEPLNDARELYQYLEEYVNQEGWIVDDTQLAGLAELAEARDELVGARDKLTTLASDIGDDLLLGGAVTDDVPLLSGDFKAALARVLKLPEGMELPKDFESPLLVPAIAGRERIHGELINLRADLAALKQHVEEQWLPWANDRLSSAGVIGDQILLDME

SEQ ID NO: 128950 - protein, 117 aa, Oryza sativa
  Clone ID: PAT_MRT4530_31254C.1.pep
MASRRNVGGYAPLPTEDRDDSNLTDDVDLRFTYTPKSLRKIPWKSIALALFLLLLGCSLLFLSYFIFTGHMEGDNSQAYGLLFLGILAFLPGFYETRVAYYSSRGAPGYTFASIPDY

SEQ ID NO: 128951 - protein, 169 aa, Oryza sativa
  unsure (1)..(169): unsure at all Xaa locations
  Clone ID: PAT_MRT4530_31255C.1.pep
HHQWPARVGDLAGARAAGCGFGGHVHVEDDETNPTVLTLEPNDERRRPTTRGDGGGGSDLAGGELRRSDAERRGWPSFSTPWRSPRRRRRPTATADAAVRLCRSXAGGSDLLSXAATALGVTREEGRGGKRKRRTRGFYLXPWIEEIGLLRPEIAPGNQKLGFGDKLEN

SEQ ID NO: 128952 - protein, 55 aa, Oryza sativa
  Clone ID: PAT_MRT4530_31256C.1.pep
HASASVMASHPFLPPSFFFFKALQSHIHGLLSEWLVAHFFVLMNILEVLINKPTL

SEQ ID NO: 128953 - protein, 84 aa, Oryza sativa
  Clone ID: PAT_MRT4530_31257C.1.pep
MGGVKEHRTKKTKESNGNRRDEDAAREISRLSPRKYGGTAGGSAASELYELETTARYGGVGAGICPRQWRRRREADTDRSAENV

SEQ ID NO: 128954 - protein, 71 aa, Oryza sativa
  Clone ID: PAT_MRT4530_31258C.1.pep
TFCYKLLVSRYSFLVPFENIVPLSFGTLFTNVCKLFLVPLAIGPPRGQSPFQLPICQFGNGLLTVGLGLAP

SEQ ID NO: 128955 - protein, 433 aa, Oryza sativa
  Clone ID: PAT_MRT4530_31259C.1.pep
MQRLPLRRALSAAASAPVRRALSTASRRPPWAMVEKYVAVGSPERRVSLRLAEPPCGSRLIAPAHLVGYAPRVPDPDTDELNAFFAGFVKAASGDGLLLLTFMEVTGTAPLVPGGGGWRALTGISIDPDMTRFVCNPISGELFGLPDIDGTKKTAWFSDIGILTQSERPHGPPDRYAVALFREDSVGYRGGDERFAMRRFLSQTGKWDKLVGLPSSLPLHRRRMNTSTQEVVAFPGRLWWVDLSWGALSADPFSDRPELRFVELPRGSVTQPMEKERRELRRFRRVGVSEGRLRYAEVSQEEPYVLSSFALDDDGGGWTLEHRVALSRLWPHDQNLCKNTPQIAAIDPLNAGCMHLVVGRQVVSIDMDNGDLLGCTLGGGSDPSVDTLTPCLLPPWLASCRIPRAETLSRNKADAKSKSLSDMLVRVDRKKMT

SEQ ID NO: 128956 - protein, 216 aa, Oryza sativa
  Clone ID: PAT_MRT4530_3125C.1.pep
MDANRRQGGIQQLLAAEQEAQQIVNAARSVPRKLSEKHAFLLLFFCTLTKAKEEAEREIAEYRAQMEAEFQRKVAESSGDSGANVKRLEQETDTKIAQLKEQAANVSPEVIQMLLRHMEPFFCLAIFVNYGAGKWVILKDDESETATSMDADCRRLRDRSTTRRAADRRLPDCAGACPCRASFGSPCGAGGVVSAPRHRRRMAVRRRADIVTLLHC

SEQ ID NO: 128957 - protein, 109 aa, Oryza sativa
  Clone ID: PAT_MRT4530_31260C.1.pep
QTGEGSVCRSRRYYGEGSSEEAVLQASKHTSIAGMTRRESVPGRSNVHGAGAQSDVPGLSPSSAASSPHRPRYIGHSWLALISLVGSTPFMCCMQRDSDQKQIMNNEMF

SEQ ID NO: 128958 - protein, 71 aa, Oryza sativa
  unsure (1)..(71): unsure at all Xaa locations
  Clone ID: PAT_MRT4530_31261C.1.pep
REDVAVVEQXPACGXSXAEAVVVVAXKDAAVLLRKXTMAPTLKLLDXACLCFFSIXMMCACVRIXSLVXLS

SEQ ID NO: 128959 - protein, 35 aa, Oryza sativa
  Clone ID: PAT_MRT4530_31262C.1.pep
ASALVPPEIESEITVVVAIDRHVERRSGRVRCTVH

SEQ ID NO: 128960 - protein, 223 aa, Oryza sativa
  unsure (1)..(223): unsure at all Xaa locations
  Clone ID: PAT_MRT4530_31263C.1.pep
MSQHAVCCGAMFWVYLMSCVGLVMFAGLMSGLTLGLMSLSLVDLEVLAKAGTPTDKDNAARILPVVKNQHLLLCTLLIGNSLAMEALPIFLDSLVPSFGAILISVTLILAFGEIMPQAICTRYGLSVGAKAAPVVRVLLIVFFPVAYPISKLLDWVLGKGHVALMRRAELKTLVDMHGNEAXQGGELTHDETTIITGALEMTXKTAXRCHDSISETFSLXYNA

SEQ ID NO: 128961 - protein, 27 aa, Oryza sativa
  Clone ID: PAT_MRT4530_31264C.1.pep
VSTVSSVYMLVRNIDFSFHAYMDSFPS

SEQ ID NO: 128962 - protein, 531 aa, Oryza sativa
  Clone ID: PAT_MRT4530_31265C.1.pep
MSQHAVCCGAMFWVYLMSCVGLVMFAGLMSGLTLGLMSLSLVDLEVLAKAGTPTDKDNAARILPVVKNQHLLLCTLLIGNSLAMEIGADGFVAAACAQALPIFLDSLVPSFGAILISVTLILAFGEIMPQAICTRYGLSVGAKAAPVVRVLLIVFFPVAYPISKLLDWVLGKGHVALMRRAELKTLVDMHGNEAGKGGELTHDETTIITGALEMTQKTAKDAMTPISETFSLDINAKLDLHTMGMIMTKGHSRVPIYSGTPNNIIGLILVKNLITCQPEDEVPIRNVTIRKIPRVSDDLPLYDILNEFQKGHSHMAVVVRRIKEPGASIEKTYSDRSDYKTNSDRSDYKINHRDAHADGLSPSRVSIAGSRRSNIEKNGEVRLYKKSEKKRDNILDFNSGPLPSYSLDQEAVGIITMEDVMEQLLQEDILDETDEYVDVHNKIKINMLPLGKSLSPTISPSNGPHSQGLRRTPMTSPLSSYHHGGSILRSPASNNPQSPGTLPTIISPERSPASQAPSRSSPNSTQVSRNS

SEQ ID NO: 128963 - protein, 55 aa, Oryza sativa
  Clone ID: PAT_MRT4530_31266C.1.pep
PYKPHPRGRETATKNLVQQKTVNTLNHRERTKHSVARNLGEEAPNKFPEKPGGIK

SEQ ID NO: 128964 - protein, 196 aa, Oryza sativa
  Clone ID: PAT_MRT4530_31267C.1.pep
MYGVGVGGGGGGNYDGGGGNASSLFGGGGFMPSQATNAAEGTSGGGGGFPKSRNAQALLPLTVKQIMDASQTNDDKSNFAVNGMEVSTVRLVGRMLNKLDRVTDVSFTLDDGTGRVPVNRWENDSTDTKEMADIQNGDYVIVNGGLKGFQGKRQVVAYSVRRITNFNDVTHHFLHCVHVHLELTRPKHSQSPRLIL

SEQ ID NO: 128965 - protein, 51 aa, Oryza sativa
  Clone ID: PAT_MRT4530_31268C.1.pep
CIRPYHRLRQRQAGAAHQLHRLLASGLLRSLVASKRSSSYIALFNCSSLIR

SEQ ID NO: 128966 - protein, 60 aa, Oryza sativa
  Clone ID: PAT_MRT4530_31269C.1.pep
MCTWSLPGRRNDDHGVGVDYVSRRLNLPEETVGKIIIDQVDLGHLYATIDDHHYKSTMNG

SEQ ID NO: 128967 - protein, 121 aa, Oryza sativa
  unsure (1)..(121): unsure at all Xaa locations
  Clone ID: PAT_MRT4530_3126C.1.pep
CLDNNCGCWQDRDSNVTVCTDTLRVLVCRVRRWERMNGAGVGYSTCAATGIVRCDTKIGGRLLEPMHVRTLSCCSHEDYYGWECTPCLKGDGLNRRDDIDXCWEKLYCXCMGCNCDNTWGY

SEQ ID NO: 128968 - protein, 322 aa, Oryza sativa
  Clone ID: PAT_MRT4530_31270C.1.pep
MYGVGVGGGGGGNYDGGGGNASSLFGGGGFMPSQATNAAEGTSGGGGGFPKVLPLLILPKFLVCLFFLDISCAPLGLTPCGARGCGQSRNAQALLPLTVKQIMDASQTNDDKSNFAVNGMEVSTVRLVGRMLNKLDRVTDVSFTLDDGTGRVCFVLFARNGDYVIVNGGLKGFQGKRQVVAYSVRRITNFNDVTHHFLHCVHVHLELTRPKSQVNANTATGTPNQTMPRDSMAYNQSPLTNQASTFSAPQNTGTGTNMIDLVLNVFHDPAVMNDDHGVGVDYVSRRLNLPEETVGKIIIDQVDLGHLYATIDDHHYKSTMNG

SEQ ID NO: 128969 - protein, 283 aa, Oryza sativa
  unsure (1)..(283): unsure at all Xaa locations
  Clone ID: PAT_MRT4530_31271C.1.pep
MVPIGIMKVKGVLSSISIYLLVXVDAPKWFLKGIGKIYHGFLXAGWANAQGGHCHVARSKVCAIVNYGSLGILNLGLMGEALHSXRFGYXRTSPLKLWXGLVIPSLQKKRDFATTLVNRESXLFCENNWYMHEGXRSLAPTIHDRFPTRICHRRTVAQALQASTWIRYIQGALGIHTILEYLRLWSLVSSVQPINDXSDQFIXKWENSGVXYSSYSTYQAMFIGRITFQSSIWKSLAPHVANTFFGLWHFGVVGLRIGLQREDSRIQATAFSVIKMKKALITY

SEQ ID NO: 128970 - protein, 184 aa, Oryza sativa
  Clone ID: PAT_MRT4530_31272C.1.pep
GRCHLFSPAPATPLGGTSMAVSMEVDVHRGHKLIGGALLVAARMGHHCLGKTPHHGKPTPPAAEVSVYPWLPTRAELLEDFVGGGIRNGATGTSCSGSSTEVDIVRQALLTVRLVPVGVQAPWRCACWWCLTSPRRVVPPRLVDGKPRLPQTLLFVVLHLASQIAKGVLGFQGEEYTRRHIPAA

SEQ ID NO: 128971 - protein, 62 aa, Oryza sativa
  unsure (1)..(62): unsure at all Xaa locations
  Clone ID: PAT_MRT4530_31273C.1.pep
PPPSMRGANSHKXRGRNRKRXXXAAXEXKRXXSSKXTAEGXGPARRGIXGTNPRFRKFWLGY

SEQ ID NO: 128972 - protein, 179 aa, Oryza sativa
  Clone ID: PAT_MRT4530_31274C.1.pep
MPPKSRFTRLDAFTKTVDEARIRTTSGGVVTIVSLLVVLFLSWGEWADYRRIDIHPELIVDKGRGERMEIHLNITFPKMPCELLSLDVMDVSGEQQHGVMHGVNKVRLQPESQGGAVIDTKSLSLHDDAAHHLDPSYCGGCYGATPPANAQKAGCCQTCDEVREAYAQASWAFGPRRGC

SEQ ID NO: 128973 - protein, 66 aa, Oryza sativa
  Clone ID: PAT_MRT4530_31275C.1.pep
MRESRSRASGVRERASSRCRLPGLRHWLGPASWFRGTGLGFAPPPLFYGNAIDKRPSPRNAIECEF

SEQ ID NO: 128974 - protein, 29 aa, Oryza sativa
  Clone ID: PAT_MRT4530_31276C.1.pep
MINICFFCFRRDTGQFIERKQLLAIYLNS

SEQ ID NO: 128975 - protein, 111 aa, Oryza sativa
  unsure (1)..(111): unsure at all Xaa locations
  Clone ID: PAT_MRT4530_31277C.1.pep
MARAQVVLVALVAVLLLASPXAGEAITCGQVNYDDGPCLTYARXGAGPTXSACSGARSLMADARTTADRGTACNCLKNEARGIKGLMAGDADSIPSKSGVSEPYTMSASID

SEQ ID NO: 128976 - protein, 264 aa, Oryza sativa
  Clone ID: PAT_MRT4530_31278C.1.pep
MSTAAARPGRRFTVGRSEDATHPDTIRAAISEFLATAIFVFAAEGSILSLGKLYQDMSTPGGLVAVSLAHALALAVAVAVAVNISGGHVNPAITFGALLGGRLSLIRALFYWLAQLLGAVVATLLLRLTTGGMRPPGFALASGVGDWHAVLLEATMTFGLMYAYYATVIDPKRGHVGTIAPLAVGFLLGANMLAGGPFDGAGMNPARVFGPALVGWRWRHHWVYWLGPFVGAGLAGLLYEYLVIPSADAAPHGGAHQPLAPEDY

SEQ ID NO: 128977 - protein, 357 aa, Oryza sativa
  Clone ID: PAT_MRT4530_31279C.1.pep
MGRESAAACSPKPKLRRGLWSPEEDEKLFNHISRYGVGCWSSVPKLAGLERCGKSCRLRWINYLRPDLKRGSFSQQEEELIISLHKILGNRWSQIAAQLPGRTDNEIKNFWNSCLKKKLRQRGIDPATHKPLNDGGAGAGEEHHDDGDKQQLMDDVDDCFAIGGGGSSDSLAPPHSPAVSFDPLSVTNVPTTMMQSSSSPYGAAGGEHSSFRSDTLCDYGGSGGGVDVVSDAGTYSAYTGDSSSNSNSTAWTCGSVVVGGAGELPPPPLLPHMDMFGRVDAEPPPYPPFDVQARFSPWHHHHHHHHEPTLPTPPQRLDGGGGAAASFPIRSLSRDMPESCFDLGRGALDDEFGVDFL

SEQ ID NO: 128978 - protein, 124 aa, Oryza sativa
  unsure (1)..(124): unsure at all Xaa locations
  Clone ID: PAT_MRT4530_3127C.1.pep
PQRKSKNSGVCPRFLVVPPPIPRFSPPNRAPPVGTPSWGPPPKXPIFPKFGPPTRGIKVSLXPAPFSVGPKGKPLLPSGKNPSSPPLSNFCPKPIKNFSPFSSGLRYGQRFLTPGLTPSTQKKV

SEQ ID NO: 128979 - protein, 68 aa, Oryza sativa
  Clone ID: PAT_MRT4530_31280C.1.pep
SENDLVLVGITILGVIILVVLEEGELCVKQLSHTISSTNLFCAFAHNTSLFILEGFCKQFKLLRKMIS

SEQ ID NO: 128980 - protein, 628 aa, Oryza sativa
  unsure (1)..(628): unsure at all Xaa locations
  Clone ID: PAT_MRT4530_31281C.1.pep
EEGGEEAGEGGGGAKRRCTALAAAVPALVVCSILLPLVFLLGLHRPVCSVPYLHAAHLTSCLSFXLNCQQGMDRRSAPRLSSALYDFINTFFPPPSEFKSGSRSKSKNVSTKSKEKLKGVFSLVQLKNETRKNKGKKDTTIDKKENQEVEHEENPKSCELEYGIYCLWSVEYKEVMKDFIVKRLKDQLFMARAHYPSIAKLKNQETFTRELKQNIQEHERMLSDTIADADLPPFFAKKLEKMEHTIERAKSCEVGCTSVERKLRQLLDITEDEAYFHTRQSAFLYHLGVQTMPKTHHCLNMRLTVEYFKSTSIHTVQSNKQKLEDPTFHHYVIFSKNVLAVSTTINSTVMNSKDSGSIVFHLFTDSQNFYAMKHWFDRNMYLEATVHVTDIEDHQKLSKDVDFHDMKLLRPAEEFRVTFRNHSQSFQKQMKTEYISTFGHSHFLLPDLLPSLNRVVVLDDDLIVQKDLSSLWNLNMGGKVVGAIQFCEVKLGQLKAYTEERNFDNNSCVWLSGLNVVELKKWRDLHITSRYEQLLQKVSDSVTSFPLKVLPISLLVFQDLIYPLEDSWVQSGLGHDYGVSQTDIKRSVTLHYNGVMKPWLDLGIHDYKGYWRKYMTNGERFMTECNIH

SEQ ID NO: 128981 - protein, 343 aa, Oryza sativa
  Clone ID: PAT_MRT4530_31282C.1.pep
MLASTFATHPAAAAAARRRGPIRWRLPFCSQIVTVTLRRRFPMARLSITNALASQSLESAPAAPPKHSFPILVNSCTGKMGKAVAEAAVSAGLQLVPVSFSAIEVPDGKVEICDREIYIRDPSEGESILPSIAKDYPDMIVVDYTVPDAVNANAELYCKLGLPFVMGTTGGNRQLLHKTVEDANVYAVISPQMGKQVVAFLAAMEIMAEQFPGAFSGYKLEVMESHQATKLDISGTAKAVISCFQKLGVSFNLNEVKQVRDPQEQLTLVGVPEEHLSGHAFHMYHLTSPDETVSFEFQHNVCGRSIYAEGTVDAALFLHKKIQSGANKKLYDMIDVLREGNMR

SEQ ID NO: 128982 - protein, 204 aa, Oryza sativa
  Clone ID: PAT_MRT4530_31283C.1.pep
LIPSTNHPSAPTGGHGHRPLRRRRQVATAHCSLLWKVVKQVSLGFTMKGHHHHHSLPPSPPPKRRCTALAAAVPALVVCSILLPLVFLLGLHRPAGHGSEERAAVVISTEMGFSKHKHLDGRMKHKLLKDVSRKKIPGSDGILGEKSGSRSKSKNVSTKSKEKLKGVFSLVQLKNETRKNKELHTQRRYQLKDLSWRSKDTTID

SEQ ID NO: 128983 - protein, 509 aa, Oryza sativa
  Clone ID: PAT_MRT4530_31284C.1.pep
SLQRRYQLKDLSWRSKDTTIDKKENQDQEVEHENPRSCELEYGSYCLWSVEYKEVMKDFIVKRLKDQLFMARAHYPSIAKLKNQETFTRELKQNIQEHERMLSDTIADADLPPFFAKKLEKMERTIERAKSCEVGCTSVERKLRQLLDITEDEAYFHTRQSAFLYHLGVQTMPKTHHCLNMRLTVEYFKSTSIHTVQSNKQKLEDPTFHHYVIFSKNVLAVSTTINSTVMNSKDSGSIVFHLFTDSQNFYAMKHWFDRNMYLEATVHVTDIEDHQKLSKDVDFHDMKLLRPAEEFRVTFRNHYQSFQKQMKTEYISTFGHSHFLLPDLLPSLNRVVVLDDDLIVQKDLSSLWNLNMGGKVVGAIQFCEVKLGQLKAYTEERNFGTNSCVWLSGLNVVELKKWRDLHITSRYDQLLQKLQKDSVTSFPLKVLPISLLVFQDLIYPLEDSWVQSGLGHDYGVSQTDIKRSVTLHYNGVMKPWLDLGIHDYKGYWRKYMTNGERFMTECNIH

SEQ ID NO: 128984 - protein, 1247 aa, Oryza sativa
  Clone ID: PAT_MRT4530_31285C.1.pep
MKISTSTRTDRTGDSGQIQPVHVSEFPQIVRNAQANLLQKSFSGKNMLAGGIDKETSLAWMLCGNELFIWSYLASVAKDCLVLEVPSSLMGNKEEKSLCGNQWAVCIVRWGSSGASTRSSGDILHRRSSTGFILCNKRTQAIAYWSDIYAESSDGTSGNCRINSLIAVAVPGGINECIVIASQPTGTLWMFWCSPAAVRRREIHKGTLGVYNADHSQKNSGGRSLAWLPSKASSKAAERTFFLLTSHELQCWSISFGHDINCKKIGSQEIVGSDGDMGIKKDIAGQKNIWLLDMQIDDHGKEIIILVATFCKDRVSGSNYTQYSLLTMLYRPNQKFSSEDNVIKTERFLEKKAPSQVIIPKARVEDEEFLFSMRLKTGGKPSGSVIILSGDGTATIAIYWRGSTRLYQFDLPWDAGKVLDASVIPSSEDRDEGAWVVLTEKAGVWAIPEKAVLVGGVEPPERSLSRKGSCNEAVAEEKRRNQAFNASVVPRRASSEAWSAGERQRPALTGIAQQAVVDEESEMLLNRLFHDFVLSGTVHEALQKLRAAGAFDKEGEMNIFVRISKSIVNTLSKHWTTTREAEFLASTIVSSLTEKQQKHKKFLQFLVLSKCHEELSSKQSIYHPSYDINRTHWFFVIQNSIMNADDNFDGTAMLTVMEHGEKLSGMIQLRELQNALSHQRSSIHLSPQSKNQTTGALWNLIQLVGEQSRRNTVLLMDRDNAEVFYSRVSDIEDLFNCISHQLQYIITGEENPSVQMQRALELSNACMTLVQAALRYREEHKDWYPSPEGLITWNSQPVVRSGIWRVASFAMELLREPGAADMSMKSNLWSQLERLTDILLDAYIGLLTAKFERGDEHGVLIQEYCDRRDELLGSLYDLAKQIVDAKYQETTEVTDNLELKESIFREVTSPILATAKRHEGYQTLWQICYDLSDTGLLRSLMHDSVGPHGGFSFFVFKQLVNRRQHAKLLRLGEEFPEELANFLKERDDLLWLHEICLNRFSSASKTLHTLVSPEEDANLTSNRKSLSFVERRRFLYLSKIAAAAGKDVDYEVKVAHIDADIRILNLQEEIVQHDPEYAPDKYTTKPFRPLELIEMCLKGDRELSLKAFEVFAWTRASFRSSNKGLLEACWMNAADQDDWVSLQEESSGGWSDEVIQESLQGTVLFNASRLCYSPDAVVYDGSFEDVLPVKKEDVHLRGLEGRCLSVEEVLMQHKDFPDAGKLMMTAVIMGKELPYTVSTAEPVDMDS

SEQ ID NO: 128985 - protein, 50 aa, Oryza sativa
  Clone ID: PAT_MRT4530_31286C.1.pep
KKKPPPRGEGFPRNQRIPHFFSFMPKGFSPSFGVLPHRWGGPPHLKKKWV

SEQ ID NO: 128986 - protein, 825 aa, Oryza sativa
  Clone ID: PAT_MRT4530_31287C.1.pep
MDALAHASARRIACHADLPLPSAPPVPRQPPSVTPHRPASPYTSSTAAGLPMPDAVTEGHICRLPLHHVPPRPQPRRHCLLCCTCLVVGSWPSSPERPDLVGGREGGAGSGEKGARSGGPCAGEPRLAVGISTARRRLLRPAACRVDCGLPGKTSYVDDKTKISYAADDGFTDGGSFHNISAEYFAPALSARYYNVRSFPDGARNCYTLRSLVAGHKYLIRATFMYGNYDGLSKLPIFDVYIGVNFWMMVNITDPAGSTLLEAIVVVPDDFVQVCLVNTGTGTPFISGLDLRPLKKKLYPQATETQGLSLFGRWKFGPTSNTEIIRYPDDPRDRVWTPWDSPSNWTEISTTRPVQQTYDDLFEVPTAVMQTAIVPMFATDNIELAWVAYTQPKDPSPGYIAIMHFSELELSPPSRDVREFYINLNGNMMYSKGYKPVYLYAHAIYNTNPFLRYPQYNISINATYNSTMRPFINAMEVYSVFSTTTIGTYGQDASAMMVIKEKYQVKKNWMGDPCIPTEFTWESLTCSYENSKHVIKINLSSSGLSGEISSSFGDLKALQYFDGHGSSMQLENRRFTYKDLEKITNNFQRVLGRGGFGKVYDGFLEEGKRNNGRHLTWRERLRIALESAQGLEYLHKWCNPPLIHRDVKATNILLNARLEAKIADFGLSKSFNLENGTHVSTNTLVGTPGYVDPEYQATMQPSTKSDVYSFGVVLLELVTGKSAVLRDPEPISIIHWAQQRLAQGNIEEVVDACMCGDHDVIGVWKVADIAFKCTAQGYPVQRTSQAPMGRGQWPPISGLESCPSQAVDQLPSKVIDMPVLQRGGQ

SEQ ID NO: 128987 - protein, 558 aa, Oryza sativa
  unsure (1)..(558): unsure at all Xaa locations
  Clone ID: PAT_MRT4530_31288C.1.pep
MDAPRRERRHQHHHRKAAAQVQAAPAIAAVGVGAGGNGAAARAAYGDVFGGPPRFAAPFGGAPADYAEVFGGVAATCSIPFLDLPPVPAVGADYGFFGRAGAGDYGXGIEANGEKRKKSTTTSASVSLRSSESDFTVDQKQHIPAYPPISEKVSANENHKNSNSISTSSNGTPSPDYAFLRVSDVNVQTQTVKPPPPLKQTSKLLKRREILAKGDVHLENHSCPPASSAHAPSNTSTSQAERRDDTALFNNEANPSSAAAAMKEAMEYAEARLRAAKELMERKGDSFKLRKKPSHHRSTRSTEIKVPTESDTFDENLSVKKSTKEEMNSEDSLLDKHQKASAVRTDHCDDSGKRALSLEKPQHMQSCTAPNQTSSKLGKLGNWTSGDEFYELTGEDQKQKTDAAVGEEDKCEVTNPVTKLSKEQKCEVTAADSDLERYEKLWEVNDGRDAGVKHVNPREDNTSPMGKDRVSMILEASTENIDHEKIYNSHFEGPKVVETSNESHDGEDGAVEIPCKSGITISEPNLMKDMHGSFMEASSPGEYVADFGKGTTEESPVA

SEQ ID NO: 128988 - protein, 625 aa, Oryza sativa
  Clone ID: PAT_MRT4530_31289C.1.pep
MSPGEFIANFLIKWNQENYILLRIRVIVAFLISLYALMMLFSGIFLFAMKRSMLSFLDAVTDAILVYVMGVMQAAPFKNQLFPVWALMLVSFRSSINCLSSYGTFFELRNSLKLLAVAYLNITHGSKLWHVPFWLFWSLLALNCCYRILARHVASKSLWNGRSSELLQEYMGANGNESNFNPERCNPETMEGYKYFVYGESQKSRMNGHSLSVKDLRTPITLDKIWQCECDDDMLLSSIKRQGKDLSLSFALSRLLRCRLEGAKLHADTVSMTRKLISKRILAEDPENEQLGIRILELDVEFLRDSLHTSYPMVFCSGFLSLSFTILACLVKFLVVLWLYKDISKCPTMFMRSFGFCSTMFKWEMTPFIKGRNPNESVKARVIQALRSMDLEGHPLSKDLPSPRLSVRAERYWLASVADVPRCSRVILVWHIATCLCEIKFANDSFTGCCLKWMSMLPSTEVDETDDELDKSYAVTYYLSRYCMHLLVSKRKLLPEDILVSKKTLQDTVQCAREMLKGCNSFQSVYDKLMEEPQKALVPDAHDMNLSGNILQQGAIMANALIVNEEDEACRWEILAEVWAHLIVHIAPSSRIEAHAENLKSGSEFITVIWALFSHCGIEKSELWQ

SEQ ID NO: 128989 - protein, 467 aa, Oryza sativa
  Clone ID: PAT_MRT4530_3128C.1.pep
MELTPLLAVVLLLPPPLAVAHMAWTAASRRRRTRCYLLDYVCYKPADDRTLTAELAGAIVQRNERLGMPEFRFLLRLISRAGLGDRTYAPRNLLDGREELAAGQRHAVDEMDACFDGAVPELLARTGLRARDVDVLVVNVSGFFPEPCLASRVVRRYGMREDVAAYNLSGMGCSATLVAVDVARNAMRARSPRPVVALVVSTESLAPHWYAGKDRTMMLAQCLFRCGGAAVLLSSDPAHRGRAKMELRRLVRSTTAASDDAYSCIMQREDDDGLRGVSISKALPKAALRAFAANLQRLLPRVLPAMEIARLAADLAWQNLLQRRRHRGQTKLKINLKAGVDHICLHAGGVAVIDAVKKSFGLEERDVEPSRMTLHRWGNTSASSVWYVLSYMEAKGRLRRGDKVLMVTFGSGFKCNSCVWEVAGDMADKGAWADCIDAYPPESKPSPFLEKFAWVNDEAADESSSPF

SEQ ID NO: 128990 - protein, 197 aa, Oryza sativa
  Clone ID: PAT_MRT4530_31290C.1.pep
MTRRANHTASPSVNATTAAAAAAMITATPSPPPRLPLPNPGNADAGAGAWGPYASSRAFFSNVATILIILACVSLLAFCLHAAARCLIRCLARRRDSGAPALAPALAQAQPPKPSSDDGANTGSSGAASAASGVAMVGGWAEAECAICLSELADGGGERVRVLPACGHGFHGACVDGWLAARASCPTCRAPSRAGEP

SEQ ID NO: 128991 - protein, 50 aa, Oryza sativa
  Clone ID: PAT_MRT4530_31291C.1.pep
MAAAELEDNASGDWRPSLGTARAATATTVLGGCDGNGCAWGRNVFIWVGL

SEQ ID NO: 128992 - protein, 111 aa, Oryza sativa
  Clone ID: PAT_MRT4530_31292C.1.pep
MRGGLLVLLLLTAAVAGGGGHEGSSSCPFHAHDKPHDDHHHGHGHGHGHSCGGGGDDSHHVHHHHHGHGHGHDGGIQRRLLPEELAEEADLELDSFGDHHHHHHHHHEHHH

SEQ ID NO: 128993 - protein, 451 aa, Oryza sativa
  unsure (1)..(451): unsure at all Xaa locations
  Clone ID: PAT_MRT4530_31293C.1.pep
MSRFDGRAADPGSYRDRRSEGAFGGGTRAFAPTSKADSAAAAADLDGLPRFEKNFYVESPSVAGMTEEEVEAYRHLREFALEGCEEDNLVRKGRTGGSGAXGTADTFYAASIARFAMDPIDWLKAPGQNDRLEFADIGPGTTLASSLPAVIHVNAQPILAPGDGPIVLVLAPTRELAVQIQQEATKFGVEIVIATPGRLIDMIESHHTNLRRVTYLVLDEADRMLDMGFEPQIKKIVSQIRPDRQTLYWSATWPKEVEQLARNFLFDPYKVIIGSEELKANHAISQHVEILSESQKYNKLVNLLEDIMDGSRILIFMDTKKGCDQITRQLRMDGWPALSIHGDKSQAERDWVLSEFKSGKSPIMTATDVAARGLDVKDVKYVINYDFPGSLEDYVHRIGRTGRAGAKGTAYTFFTAANARFAKDLINILEEAGQXGHRDRYRGYGGGRSWS

SEQ ID NO: 128994 - protein, 406 aa, Oryza sativa
  Clone ID: PAT_MRT4530_31294C.1.pep
MELQPILDKLAKKVAGWKPRMLSHDGRLCLIKSTMMALPVHTMSVIQLPKWAIKEIERKCRGFLWKGQEEVSGGHCLVAWKNVCMPVENGGLGIKNLEYFGHALRLKWQVTKLQHKNRPWSMVDFQLGGEVEKIFQSMAEFIVGNGQNTKFWTSNWLGGGSIAWRWPILSTYVGRSNLSVAQALTGNRWVRDLRGSLSNEALAQYFELWSELQTIHLSQEEDSIRWKLTPDGQFSSTSAYDLFFKSMELCPVGELIWHAKAPSKIRFFMWLATKGRCLTADNLQKRGWPHSDCCTLCTRESEDCAHLFSKCVYTVRVWSLLRNWINVPFPIPGRSELGLTEWWMQARLRFRHCYRDNFDSVCMLVCWTVWKERNARVFDQRSRIPEQLAEAIKEEVLLWKEAAYWG

SEQ ID NO: 128995 - protein, 112 aa, Oryza sativa
  unsure (1)..(112): unsure at all Xaa locations
  Clone ID: PAT_MRT4530_31295C.1.pep
MEAELTILDTATIEAEWLXELLMDLPVVEKPVPAILINCDNQTLIIKVNSSKDNMKSFRHLKRRLKSVSKQKNSGVIALDYVQIAKNXADQFXGLSRNVIDNTSREMDLRPT

SEQ ID NO: 128996 - protein, 155 aa, Oryza sativa
  Clone ID: PAT_MRT4530_31296C.1.pep
GFLSRRSDCSLAHRRRLRRLCPSSERGGHMASLFRRSSITHHATSAVASAAGAHRAFSPAMGGGIRPDLTNTEIDKLLLQKSAFNKAGIFSARGKITHANVEKGLVLSECLKILRREGEQQSWAKLWCKQIAAVVIFGVLFRSGEPEKHEPNASS

SEQ ID NO: 128997 - protein, 130 aa, Oryza sativa
  Clone ID: PAT_MRT4530_31297C.1.pep
MYHHQQQLQSHNQLLPSRQSFPSERHLLMQGGSVSGESGLVLSTDAKPRLKWTPELHERFVEAVNQLGGPEKATPKTIMRLMGVPGLTLYHLKSHLQKYRLSKNLHAQANAGNVKNALVCTTATEKPSEA

SEQ ID NO: 128998 - protein, 364 aa, Oryza sativa
  unsure (1)..(364): unsure at all Xaa locations
  Clone ID: PAT_MRT4530_31298C.1.pep
EEKRGGEMEIQSSGRPIDVLMEKVLSVNILSSDYFKELYRLKTYHEVIDEIYNQVDHVEPWMTGNCRGPCSAFXHLYKFFTMKLTGWQMHGLLKHPDSPYIRAVGFLYLRYVAEPKTLWSWYEPYITDDXLPILRQVTGHLEKMKLPTKQSGITGDSSRLGSDDTARRPPSVKASLSVSFGQRAPHRASTRDSSPVRKTLPSARDRERSSDGECARSSPRRRRSRSHERDHDSERDRSDRDRGRHKDREHDRHAREDRDRDYRRSSYSSRNVDRQGRERRDRDSDRHGRSSARRSRSRSPNRGRTEGENHRSSPFGRPPEPSNLAKLKDLYGDATNTKDDTGDDKARRDSGTEEVIRLGRARWR

SEQ ID NO: 128999 - protein, 389 aa, Oryza sativa
  Clone ID: PAT_MRT4530_31299C.1.pep
MEAAAAAAAEEEAGNPDGVEGAAVAAVAPEAAAEGPSEPNAGEASREPDAGQASREPGAAGPSREPDVAGPSREPDAAGPSREPGAAGGSREPGAAGGSRQPVPDAAQLAVVPYVEDIDRYLRSLEAEQTRRPMINYVQEIQGGIINMDVRGILVDWMADVAYVFNLQEETLHHAVSYVDRFLSKIAFPGDKLKLLGTTALFVASKYEEIHPPHVRNFSAVTVNTYTTQQVSKMELDILRFLNFDVGSPTVITFLRKFLTSCCGGNNSSNRKLELMCNYLAELSLLDDYYIRFLPSIVAAACLFVGKFTLNPNTRPWFGSVSTITPPENIKGGVEKYMVSRIYMCVFDLPMLFLMETWSSSGVSNHTKLQLKQNMMELPIENPTFISAS

SEQ ID NO: 129000 - protein, 74 aa, Oryza sativa
  Clone ID: PAT_MRT4530_3129C.1.pep
FFFFLTHNGPPCICSLPLYCCQDWTIVPLVPMGRSQQCMWASEIDCPHIMVMLTSKNFRVVRWSDNQQESKGVA

SEQ ID NO: 129001 - protein, 115 aa, Oryza sativa
  Clone ID: PAT_MRT4530_312C.1.pep
SVSCEVYDCTNYSKNKKKSKNYIGMGIRSHLGLEMDEQIDEHACKSSCTLTSSMEVEAEWEEPWVAGSRGSPPSSAPTPPGRRRARAAPSARRARRRRRHSPSSPPPSSRSPRRR

SEQ ID NO: 129002 - protein, 110 aa, Oryza sativa
  Clone ID: PAT_MRT4530_31300C.1.pep
PRGKTSPPCPPTNPPKRAPRGGPGGPPLPRGPPGGDPGGAHPRGGPFPGRGPQKPPGGDAPRPGEAKAPPQPAGGKNFFEGPGPRGPDPGIPFPKPMCQFMIYKKLFPRS

SEQ ID NO: 129003 - protein, 294 aa, Oryza sativa
  Clone ID: PAT_MRT4530_31301C.1.pep
ICGRILIFRLKLTKRNLEECKEDYKVNYTFTPNEKLEMNYVNDKAEEFGQHNFQVKEEPKNESSDDYEMNNHRKTKKERSNMRSTKRSNKEPYITDSDGKTNEKAITIDDDSEESLDDYFDEEYNEKVTQESTKTNPSKRRVTRRFKTSNKEPYITDCEKIANDKPISLDDDFDEEYNKNMVRGKGCGKKSTNMGTCTKSAIENTIQDDEVHDGKIASGTAKRPSRKFIISDSEDEHSSNTKVTGDSTSCNSSKEDINKGRCNYNIENIKVHMNEQSSRCRSTRIRRPPTRYSY

SEQ ID NO: 129004 - protein, 255 aa, Oryza sativa
  Clone ID: PAT_MRT4530_31302C.1.pep
GRAASGSKNDSRWLRQEVKHAQIRRRKSYSSSPPPPPVAFAVPLSPTPPSPHIRMRRAGFRSYEDYLRHQLNKTLDPRLRRVWATRDWHRKVDAFARAFAALLRDDGGGKLLSNASRALCVGARLGQEVAALRLVGVRDAVGIDLAPAPPLVVRGDFHAQPFANDTFDFEFSNVFDHALYPGRFVAEIERTLRPGGVAVLHVAVHRRGDKYSANDLLDVHGLVGLFRRSDVVRISKVDAFGLDTEVILRKKRSSP

SEQ ID NO: 129005 - protein, 365 aa, Oryza sativa
  Clone ID: PAT_MRT4530_31303C.1.pep
MVVDGAVKREPMSLSFQNTQDRPVRIYLHLSRLSDDKPSTENPTPSPPPHTAADDDAPYHRRQPPPPLPQPPPSPATTVSHHRHRHRHRHGHPHPATTVQPPLSAATVASQRRQTPAVQIQPGWHGSEVQREARVAGIMEEGVTGTAFTAGALTRAPRLPRGGEVLDEGRRRGTRRSPPPSSPTSSPLHPPPSPPLATPLPGPRSGGGVDRAHRRSPRPSEETRSGDAVARRWSRGEPTPSAPPPRRPRRHDLAVPPPSSPRPRGGERLEFTITRFVIVYARLIKLYSNRDDLVVACLPCQRQVACTCRLRMTDEILMVFRNRKIKDINMRTRRSKHVNGKVQAQARTTWPERPTAHTERDYVPV

SEQ ID NO: 129006 - protein, 288 aa, Oryza sativa
  unsure (1)..(288): unsure at all Xaa locations
  Clone ID: PAT_MRT4530_31304C.1.pep
SAQEGSSSVNNIVLSAIRPRPPPTVVPAVHGAPAPELLLPRCQTPFPPSHTAAADDAPYHCRQPPPPLPQPPPSPATTVSHHRHRHRHRHGHPRPATTVQPPPSATTVASQRRQTPAVQIRPGWHGLEVXREARVAGIMEEGVTGTAFTAGTLTRAPRLPRGGEVLDEGRRRGTHRSPPSSSPTSSPPHPPPSPLLATSLPGPRSSAGDDRAHRRSPRPSGETRSGDAVARRWSRGEPTPXRPTAVPNSAPSPRRPRRHDLAVPPPSSPRPRQSEPLRFAFSNVLFIY

SEQ ID NO: 129007 - protein, 264 aa, Oryza sativa
  unsure (1)..(264): unsure at all Xaa locations
  Clone ID: PAT_MRT4530_31305C.1.pep
TPSPPPHTAVDDDAPYHRRQPPPPLPQPPPSPAATVSHHHHRHRHCHGHPXVQPPPSSRTVASQRRQTPAVHIXPGWRGSEVQCEARVVGIMEEGVKGTAFTAGALTRVSRLPRGGEVLDEGRRHGTCRSALPSSPTSSPPYPPPSPPLATPLPGPRSGAGVDRAHRRSPRPSGESRSGDAVARRWSRGEPTPSAPPPRRRHAXPRRHDLAVLPPSSPRPRRGEVEPRRMAPLPPSQRVARLCRRRAPVALKHGGGRRRGGGGG

SEQ ID NO: 129008 - protein, 750 aa, Oryza sativa
  Clone ID: PAT_MRT4530_31306C.1.pep
MEPSLLKANIDLTQGKEDERTEYRNIYGPNIYGQTNSLVLNDDHLRTLRKFGTKLRCYGHYYKNSHRDRLIGAGSFKTGTYRAFLTSLQWKKYRTGTFKDTRTGTFKDARTGTYTIDNQQDANTKENSSSIDDFKTLKDDSQHVINKMEQSSSTDEPGTVVTPEEKVSPNVPVGHSEIEIAEDNKIAPHVENGYIDKNERSPNEDGNRNQTAKHLKKCRTYLLLLAILAVSLTYQSGLNPPGGFWTRHEDYHSSGDHILEDTHHPRYIAFFYLNAIAFVASVVMIIMLLNRRMANKVIKRRALQIAMIVILLSLTGAYVMGSCRKTKNSVYISVMVLLVLAYVGIHVLIAIHVIPEGWKRQVAEKLNRLSCRHLWSPLHGSNQTGHGNEKDWERRRNLLLILSILAATVTYQAGMNPPGSVWSDDKDINRTLTGNPVLQENNLRRYNVFYYSNSVSFVSSVVITILLVNKGSCEHGMKFYALRVCLAAGLVGLLIAYAAGSCRKAKQSIYLIIVAVAVLISLMIQVFIMSSTYDKLGKPLCKCMESLLEWIFQTKEVRQDIGSEIQGSPDPGDKSERKRHKYLMLLSILAASITYQAGLNPPGGFWSDDSSDPPKHKAGDPVLHNIHPHRYKAFFCFNAFSFMSSIVVIMLLLSKSVREKNVPLGVLHLIMILDLLALMTAFAAGSCRKFRTSVYVYGLVIGVTIYLLLVTILASSIAKCLRSRKISKNSYEKHHEHPSRVNTLPLKQQV

SEQ ID NO: 129009 - protein, 299 aa, Oryza sativa
  unsure (1)..(299): unsure at all Xaa locations
  Clone ID: PAT_MRT4530_31307C.1.pep
WLCKAFAHDSQSKPTPPIRTRRIVVDQQHCPFSDLAKATTHNTPFPPPHTAADDDAPYHRRQPPPPLSQPPPSPAATFSHHRHRHRHRHRHPRPATTVQPPPSAATVASQRRHTPAVQIRPDWRGSEVQREAWVAGIMEEGDTGTAFTAGALTRAPRLPRGGEVLDEGRRRGTRRSPPPSSPTSSPPHLPPSSPLATPLXPGPRSGAGVDRARRRSPRPSGETRSGSAVARRWSRGEPTPWSAPPPRPTPRRRRXRPRRHDLAVPPPSSLGPRRGERTIFFTAAVVQTFPRLVQASVSI

SEQ ID NO: 129010 - protein, 62 aa, Oryza sativa
  Clone ID: PAT_MRT4530_31308C.1.pep
SALIAVLSAGGCERPIRRRPLRPHHRPERRGCGSPFAASHFALTAVPSAGGCGPLLRRRPLR

SEQ ID NO: 129011 - protein, 251 aa, Oryza sativa
  unsure (1)..(251): unsure at all Xaa locations
  Clone ID: PAT_MRT4530_31309C.1.pep
RPGAGVATMAAGRRGHGDGDGAALGAARRATASPDLVSPLGRGERRWARSTPAPLRRPGRGVASGGDGGGCGGDEVGDDGGGLRRVPRRQPSSRTSPPRGRRGALVNAPAVNTVPVMPSSMMPATRASRCTSDPHHPGRIWTAGVWRRWLATVAADGGGWTGVSVAVAMVADGGGWRRWWLWQWRWRLSTMVXGASSSAAVCGGGEGVWRRGRRSPGAGAPSMVGTIVGCGLCRIEAQTERITNPPTTHHF

SEQ ID NO: 129012 - protein, 76 aa, Oryza sativa
  Clone ID: PAT_MRT4530_3130C.1.pep
NQRGEHLYHLSRRHRPRSGSRRASPKEGVEVKRQKKPQPSCPARYSPDQAPVTRSSLPNKNKRKARGSTTSAGRSG

SEQ ID NO: 129013 - protein, 861 aa, Oryza sativa
  Clone ID: PAT_MRT4530_31310C.1.pep
WWRLDGGGGGGGGGGGGGDGDGGWRWRLATVVAVALAVAAVDGGARPSSGADACDISRFRKKSIPTTEQKKSIPADGAEEVCGTLRIIFGIRSNYMQYYSFADNMAPSNLITALTPKNDRWRIKVKVIRLWDAVNPTMVDEFYGIQMIVLDAEGNSIHVSISKQLANHFRPKIKINSIYTFKNFKVMEHDKYRVLKNNLKILFYHDTIVKETCLYLDVIGLLSGMKPIEQRMLGKNTSRERVCNMREIELLLLEGEKVKITLWGDILANMVDDDLLGKQTVFIATGLLVKEYEKLLSFGVTSSTEVFLDMEIPASMEILSRHNAEKVLPTMIEVDASTQGTIEEQMFYNRKTLKEITELRYSKTTVFYPLTAHCTRYVINLEISDHTTRTTCTIFNEEAERIFGHKSVSTMLEEQNGQIDMIPDTIRQICGRILIFRLKLTKRNLEECKEDYKVNYTFTPNEKLEMNYVNDKAEEFGQHNFQVKEEPKNESSDDYEMNNHRKTKKERSNMRSTKRSNKEPYITDSDGKTNEKAITIDDDSEESLDDYFDEEYNKKVTQESTKTNPSKRRVTRRFKIANKSMLKCNDDYGFTDLQKSEDEFGQHNFQIKEEPKNESSDDYEMNNHRKTKKERSNMRCTKRSNKEPYITDFDGKTNEKAITIDDDCEESLDDYFDEEYNEKVTQESTKTNPSKRRVTRCFKTSNKAKKGKCSEMKTQRNKEPYTTDCEKIANDKPISLDDDFDEEYNKNMVRGKGCGKKSTNMGTCTKSAIENTIQDDEVHDGKIASGTAKRPSRKFIISDSEDEHSSNTKVTGDSTSCNSSKEDINKGRCNYNIENIKVHMNEQSSRCRSTRIRRPPTRYSY

SEQ ID NO: 129014 - protein, 104 aa, Oryza sativa
  unsure (1)..(104): unsure at all Xaa locations
  Clone ID: PAT_MRT4530_31311C.1.pep
MQLNPKARTRRNKTKAKRXWRCTEIVLNVTLSMRGNHLEAYQLNPMMYTESYSWNRLSDSNSADXTVADSDCSRFLLCFHKDLRLRFRFDLIFFSDADITKFGC

SEQ ID NO: 129015 - protein, 41 aa, Oryza sativa
  Clone ID: PAT_MRT4530_31312C.1.pep
PGQAVFTLPLQQHQSLFEVRFPCFASNRTEWPNLSKAFQVW

SEQ ID NO: 129016 - protein, 122 aa, Oryza sativa
  Clone ID: PAT_MRT4530_31313C.1.pep
GAKKIPKTQKAPTLETKQKWKNKMPAPPSRSKNKPGGDKKCPGTANRRNARYPSSPIKARPQKSPPPPKGIGAHRAFKEPQPNPHYNPARGTGKPFPRASWFSRGPWGPYQGPYYWAQESGG

SEQ ID NO: 129017 - protein, 108 aa, Oryza sativa
  unsure (1)..(108): unsure at all Xaa locations
  Clone ID: PAT_MRT4530_31314C.1.pep
MQLNPKARTRRNKTKAKRXRCAEIVLNVTLSMRGNHLEAYQLNPMMYTESYSWNRLYRLALSDSNSADXTIADSDCSRLLLCFRNDLRLRFRFDLIFFSDANITKFGR

SEQ ID NO: 129018 - protein, 190 aa, Oryza sativa
  Clone ID: PAT_MRT4530_31315C.1.pep
MVTTHSILLWLALFILLPAAHSSLAASELRAGPTRASPVEIERCDSGSKRQQTQHRVRVDGHELGADLATSAPPPRQHGKGAQCKAGGVDSDGAGDELRADLAAQHRWCLLLAGGGDWRRVLHLPLPTSLPRQCWRCPVVLIDAGKPLPSPAVSSSLSPHSSSSTLCALFSDKTDETLCTWRGRDYVRTP

SEQ ID NO: 129019 - protein, 873 aa, Oryza sativa
  Clone ID: PAT_MRT4530_31316C.1.pep
LMVVSLIAMTLFFRTKMKRDSVTSGGIYMGALFFGVLMIMFNGFSELALTVFKLPVFFKQRDLLFYPAWSYTIPSWILKIPITFIEVGGYVFLTYYVIGFDSNVGSFFKQYLLMLAINQMAGSLFRFIGGAARNMIVANVFASFMLLIFMVLGGFILAREQVKKWWIWGYWISPMMYAQNAISVNELMGHSWNKIVNSSASNETLGVQVLKSRGVFPEARWYWIGFGAMIGFTILFNALFTLALTYLRPYGNSRQSVSEEELKEKRANLNGEIVGDVHLSSGSTRRPMGNGTENDSTIVDDDTEVTQRGMVLPFTPLSLSFDNVRYSVDMPQEMKAQGVADDRLELLKGVSGSFRPGVLTALMGVSGAGKTTLMDVLAGRKTGGYIEGSINISGYPKKQETFARVSGYCEQNDIHSPQVTVYESLLFSAWLRLPEDVDSNTRKMFIEEVMELVELKSLRDALVGLPGVNVRNTVNTGRTVVCTIHQPSIDIFEAFDELFLMKRGGEEIYAGPLGHHSSELIKYFESIPGVSKIKDGYNPATWMLEVTTIGQEQALGVDFSDIYKKSELYQRNKALIKDLSQPAPDSSDLYFPTQYSQSSLTQCMACLWKQNLSYWRNPPYNAVRFFFTTVIALLFGTIFWDLGGKVTKSQDLFNAMGSMYAAVLFIGVMNCTSVQPVVAVERTVFYRERAAGMYSAFPYAFGQVVIEIPYTLVQATVYGIIVYAMIGFEWTAAKFFWYLFFMVFTLLYFTFYGMMAVGLTPNYHIASIVSSAFYAIWNLFSGFVIPRPRVPIWWRWYCWACPVAWTLYGLVVSQFGDIETPMEDGTPVKVFVENYFGFKHSWLGWVATVVAAFAFLFASLFGFAIMKFNFQKR

SEQ ID NO: 129020 - protein, 1459 aa, Oryza sativa
  Clone ID: PAT_MRT4530_31317C.1.pep
MDAAGEIQKVASMRLGGSMRGDSGSMWRRGDDVFSRSSREEDDEEALRWAALEKLPTYDRVRRAPSLPLGGDDGAGDGGGKGVVDVHGLGPRERRALLERLVRVADEDNEKFLLKLKDRVDRVGIDMPTIEVRFEHLEAEAEVRVGNSGLPTVLNSITNTLEEAGNALGILPNRKQTMPVLHDVSGIIKPRRMTLLLGPPGSGKTTLLLALAGRLGKDLKASGKVTYNGHGMEEFVPERTAAYISQHDLHIGEMTVRETLAFSARCQGVGSRFDMLTELSRREKAANIKPDADIDAFMKAAAMGGQEANVNTDYILKILGLEICADTMVGDEMLRGISGGQRKRVTTGEMLVGPARALFMDEISTGLDSSTTFQIVNSLRQTVHILGGTAVISLLQPAPETYNLFDDIILLSDGQIVYQGPREDVLEFFESMGFKCPDRKGVADFLQEVTSKKDQRQYWARHDKPYRFVTVKEFVSAFQSFHTGRAIANELAVPFDKSKSHPAALATTRYGAPGKELLKANIDREILLMKRNSFVYMFRTFQLMVVSLIAMTLFFRTKMKRDSVTSGGIYMGALFFGVLMIMFNGFSELALTVFKLPVFFKQRDLLFYPAWSYTIPSWILKIPITFIEVGGYVFLTYYVIGFDSNVGSFFKQYLLMLAINQMAGSLFRFIGGAARNMIVANVFASFMLLIFMVLGGFILAREQVKKWWIWGYWISPMMYAQNAISVNELMGHSWNKIVNSSASNETLGVQVLKSRGVFPEARWYWIGFGAMIGFTILFNALFTLALTYLRPYGNSRQSVSEEELKEKRANLNGEIVGDVHLSSGSTRRPMGNGTENDSTIVDDDTEVTQRGMVLPFTPLSLSFDNVRYSVDMPQEMKAQGVADDRLELLKGVSGSFRPGVLTALMGVSGAGKTTLMDVLAGRKTGGYIEGSINISGYPKKQETFARVSGYCEQNDIHSPQVTVYESLLFSAWLRLPEDVDSNTRKMFIEEVMELVELKSLRDALVGLPGVNGLSTEQRKRLTIAVELVANPSIIFMDEPTSGLDARAAAIVMRTVRNTVNTGRTVVCTIHQPSIDIFEAFDELFLMKRGGEEIYAGPLGHHSSELIKYFESIPGVSKIKDGYNPATWMLEVTTIGQEQALGVDFSDIYKKSELYQRNKALIKDLSQPAPDSSDLYFPTQYSQSSLTQCMACLWKQNLSYWRNPPYNAVRFFFTTVIALLFGTIFWNLGGRVKKPQDLFNAMGSMYAAVLFIGVMNCASVQPVVVVERTVFYRERAAGMYSAFPYAFGQVVIEIPYTMVQAPVYGVLVYAMIGFEWTAAKFFWYLFFMVFTLLYFTFYGMMAVGLTPNYHIASIVSSAFYAIWNLFSGFVIPRPRVPVWWRWYCWICPVAWTLYGLVVSQFGDIRHVLDGDTRTVAQFVTDYFGFHHNFLWVVAVVHVVFAVTFAFLFSFAIMKFNFQRR

SEQ ID NO: 129021 - protein, 37 aa, Oryza sativa
  Clone ID: PAT_MRT4530_31318C.1.pep
TLGAYLNSFPSLIPVLSSMPHIHRFAADVLDDPFQMK

SEQ ID NO: 129022 - protein, 57 aa, Oryza sativa
  Clone ID: PAT_MRT4530_31319C.1.pep
METDRRSACCRVGILKIRIRLLYHRTVATVIVAVATVIVATLLPSPVVEMPTRLSGG

SEQ ID NO: 129023 - protein, 603 aa, Oryza sativa
  Clone ID: PAT_MRT4530_3131C.1.pep
MAYTNATAREIPSSIHPFQATTSNSGSTCKEYCSVSNLRKICSLADETTSYLFLHCPFASGLWASLHIDPGSSSSRILLNGCPGNPILHKRGLRQGDPLSPMLFILAMEPLHLIFKAAEEALILKKIDPRRQRFRCSFYADDVALFIPPEAQELTTVKNILHTFARISGLHTNPSKTEVFPIACDNLNVESLLNSFMGNLKTFPCNYLGIPLHTRKLRKIDLQPLVDKVGARIPGWKGRFFTSAGREVLVKTTLTATPIYHLTVLPQMKWVFKKIDRFRRAFLWKGEDPENVNAGSSLINWQEVCKPKNLGGLGILNLEKFARALRLRWLWYNWKDDTKPRVNMSVPCDETDRCLFRAGTKIEIGDGRKTSFWLDNWLDGQTPKDLAPTIFRLAKRKSNSLHADLNNNHWLSLLNPITSLEEVNDLVQLGGRLQNISLQDGLADEIIWRWTENGVYSEKSAYLAQFQGSHTNVFYEPLWTTSAEPKHRFFGCLCRGAFEDATHLAKECPFTNLVWNHVSSWLDIQAPQQHTAPSIEDWWSTLCRIKPKSRRKHILSVLLTTWWNIWLERNRRIFQNSSKSELQVAFLVKENIDLINQSRLYCC

SEQ ID NO: 129024 - protein, 176 aa, Oryza sativa
  unsure (1)..(176): unsure at all Xaa locations
  Clone ID: PAT_MRT4530_31320C.1.pep
VHKQAIFDAILAENLSQIQGTHSTLKKGEVSGGGKKPYQQKHTGRARQGSIRNPHYVGGGIAFGPKPNRNYKIKVNKKVSSLAFKSAITSKVNNNEFLGLVDSIKQDKPSTKAIAKLLKELKVNKKVLIVAFEKNENLEKSSANLPNVSYKLXNQVSVKDLIDANCVLAQKSAINN

SEQ ID NO: 129025 - protein, 2118 aa, Oryza sativa
  Clone ID: PAT_MRT4530_31321C.1.pep
MSAKWRSLQHRHRYTYTSLVFPKQYLEELARVPTEVSSSSFFSQLNNLISLTSTYAQVIAVKDLASAFVQFLSSPAIPDDAVLVATKLYLEILFLENSLPLHRTIISVLAKCKKHCSLISGCFATLCEEYGGSGIKAKKRFLVSRAALSLIGYPKLGFLDESVKKCAEVMALDVVAGLDGVISDIVDGSRPSPVVMEQCQEAMSCMYYLLQRYPSKFTELDKASTVFKHVVRTILTVLKSSAFSRDCLVASGVSFCAAIQVFMSARDICWFLSEGLFSICAEQKDIKESAGHEVLSDFNLCEEIRDISILSRLCLLRGILTAIPRTVLNMRQLHSNGSLWTMLYNGILPELCKHCENPIDSHFNFHALTVTQICLQQIKTSVLADFTDFSGDYEPFSRDVINRILRIIWSNLEDPLSQTVKQVHLIFDLLLDIESCIPSGDPEENSKLFLFNIASDLLRLGPRCKGRYIPLASLTKRLGAKSLLKLKSNLLLETAYAYMDDDVCCAATSFLKCFLETLRDECWKDDGIEQGYDAFRFLCLPPLLRGLVSGNSKLRSNLNTYALPAAIEVDADSIFAMLGFINVGPSAKAIELDVALKNDQCIAALVSLLKVSRNLALVEGDIDLDPDVLSQQVANKCDAVISIRGINVTVPVKWFVLALTHNEESLRIDAAESLFLNPKTSSLPSALELSLLKQAVPLNMRCSSTAFQMKWTSLFRKFFARVRTALDRQVKQGLWLPSSLSGDKDSNSVDTVKATTIKRAEDLFQFMKWLSSFLFNSCYPSGPYERRTIAMELILTLLDVWPICRSEGKNDLYPYSDSITLPDSTISFVGSIIDSWDRLRENSFRILLQFPTPLPGISSSTSIDSVIRWAKKLVLSPRVRESDAENDCLQCYTKSTNDDTELTSQNPVAQYISSLIQWLCAVVEEGEKDLSEACKKSFVHGVLLTLRYTFDELDWNTEVVQSCIAEMRCLVEKLLQLIMRVTSLALWVVSSDAWYMPYDVDDMIDDDSFLSDIIDEDQPGTASEIAETNVKSGHNGKPAEHVVMVGCWLAMKEVSLLFGTIIRKIPLPGCSHSNSSHGDLAENTEETGMTGDILDVEQLEKMGNHFLQVLLKMKHNGAIDKTRAGLTALCNRLLCSNDSRLCKMTESWMELLMDRTVAKGQTVDDLLRRSAGIPAAFIALFLAEPEGTPKKLLPRALEWLIEFAKTSLANFQNDSNQKLDTEKDFLGEPCESQSETTAGVHSNGNLSKSRNEGVVPTVHVFNVLRAAFNDANLATDTSGFCAEATIVAIHAFSSPYWEVRNAACLAYTALVCLVFLCRYPALHPFLLSELNVATGLLADGISSNLGSQIAKAIHPSLCPILILLSRLKPSPISRGTDDSLDPFLLLPFIQRCATQSNYRVRVLASRALIGLVSNERLQHVVGDILHNLPCASHEVTAHRALCLSADMGNGNLTLPAKSFSFNSIHGLLLQLSSLLDNNFRALTDSTKKDQILSQLIEALSKCSWLGSVKLCACPVVSTSYLRVLDLMLDVARTGKSGHTDAIQILLWELSYQCLNNGTSTHYAFHDPTQIELRQQAAASYFSCVGLPKRHDETNDENVQLQILDMTSSIPEMPREVSLYELHKEIASCLVDPAYDVRITALKRILQLAKSARSGDSKKFLHQWAKSNLQHVILKRIFEEEHPKCLYYNLKIIFSWNMECQFNSEEDSSTFLSFWDRLVHLNSTVSHAKTRETILCCMGMCMRQFAKMLRGLLDSKTHEHSTSFVRIDEGKNLSTAILSASSFVNLVKNLSAPSETVNARRAAAEAIIASGLLEEANLFAPSLSNAYLPSEHDENHIEEKCSNATVSELINLYSCKILDLWFICIQLLEDEDTYLRQKLANNVQKIIAKGSANNLCDDSTPLQVDRVIELSFEYLTSLLGHWLKYTEYLLRLVLDTANTLNSRGDLIRQIFDKEIDNHHEEKLLICQICCSSIQKLLQSKYLVETGAEVELFLQNWRESFLHQLISLTSSFLEKEGKTDWIGGIGNHKDVFISVYANLLGLYALAQSQSLEQLKDRHTEYLKNFSDLDGVITPFLKNPLISNLYSLVKESHETFNSPKKQWDQVGSSATESFDPYFLIR

SEQ ID NO: 129026 - protein, 399 aa, Oryza sativa
  Clone ID: PAT_MRT4530_31322C.1.pep
ASRLKELSMPSSGGAMPALPPGFRFHPTDEELIVHYLMNQAASVKCPVPIIAEVNIYKCNPWDLPGKALFGENEWYFFSPRDRKYPNGARPNRAAGSGYWKATGTDKSILSTPTSDNIGVKKALVFYKGKPPKGVKTDWIMHEYRLTGTSANSTTTTKQRRASSMTMRLDDWVLCRIHKKSNDFNSSDQHDQEPEESTVEQLEDIHDNNSSEQPPAPADMNNQQSDFQPMTAMSMSKSCSLTDLLNTIDCAALSQFLLDGSSDAIAEPPAPPSPLIYTTPHPNYQTLNYNINSNSSMPHAFESRLDHHDGYVNNYNVNGLRRKRMMACSATSFDDGSSSNDFVHAVVKKPQLLPSDSRGSGFGGGYCNQQLSETATGFQFQNGNLLSHPFPLNNHLQMQ

SEQ ID NO: 129027 - protein, 66 aa, Oryza sativa
  Clone ID: PAT_MRT4530_31323C.1.pep
HIYKRKPLLFSCGVFAFFITMRPLVVHAPDYWAFYLCLAIFISFFFFALNGTLSPCIKGCSFFFYN

SEQ ID NO: 129028 - protein, 172 aa, Oryza sativa
  Clone ID: PAT_MRT4530_31324C.1.pep
MAARGRGSACNGAAVLGAAAAVVIVGFLVMSAAPLAEAARYTVGDSSGWRFYAEGWAKGKTFRAGDVLGNMPAAARSASVLICVLVWSISIDQFMYACMWHCGWPAEFKYNAVVHDVAAVDLAAYRSCTVPKGVRKMRSGRDKVTLRKGTHYFICTEPGHCKAGMKLAVRAI

SEQ ID NO: 129029 - protein, 151 aa, Oryza sativa
  unsure (1)..(151): unsure at all Xaa locations
  Clone ID: PAT_MRT4530_31325C.1.pep
ILFWDXLWNGSIGSQTHPELCAHSLDRSISVTKLCHKPVEDCFRLPLNEKTYVQFQALQIEVNDLQLLDVNEDKWSYIWNSPNYTSQKFYKMNFLGTTPPRLYIWLWKTNVMKXKVFIRLMFTDRXNTKDMFDRRYCAVGIVCSTAAAVAV

SEQ ID NO: 129030 - protein, 62 aa, Oryza sativa
  Clone ID: PAT_MRT4530_31326C.1.pep
TKKKFKNLIDLLMPITPTTNGMHVSSLLSLSHPTDQEVHTPYPSSSLVIQKLKKKHGGHHHL

SEQ ID NO: 129031 - protein, 142 aa, Oryza sativa
  Clone ID: PAT_MRT4530_31327C.1.pep
RALKHFYFPILFIHSPQRDGPLEVFLPSSGKQSPPPRGQGNCYEQDPYQHPGLKQTRGSKQIPKKKTQGKGHIFFLSPTPPGHPPVLGIFFYPVLFAQGATISPSSFDPRINSGGAAPGGVFLNAPPMGFGRPSAFRARGPP

SEQ ID NO: 129032 - protein, 96 aa, Oryza sativa
  Clone ID: PAT_MRT4530_31328C.1.pep
SRQHQYQLLHPVQQQPIQQMPPRQQVAQPIQQQGLLNASEPNFQNYQGGNLNYQYQPPSPQVQYQQGGSAQPQFAPQYNQFEPVPQQAQGAPQQRP

SEQ ID NO: 129033 - protein, 1014 aa, Oryza sativa
  Clone ID: PAT_MRT4530_31329C.1.pep
MAEKLPASPYLAGKELPPKNRKSDKLTPEQKKELDLMMQQTQHQFLNSFMETCKGTIAQWYKMKLVADVPGTSSSKDGEVQQIPTSTAESGGKGAADGSGDKGDGSQGVQGEDLSLDVITLSNMVKSMVDGSIAEYQAKGPVCLPGGVFPNYRPLITNNQPTVQPIAPNAPPAQPTAPVSAPAPNAPSSTKGQLINPRLLPNVDPVQQQPIQQMPPRQQVAQPIQQQGLLNASAGLRTSDNQPRQHVANQVVPENLVHNVQPDQLVIPQVISEHLVRNIQPNFQNYQGGNLNYQYQPPSPQVQYQQGGSAQPQFAPQYNQFEPVPQQAQGAPQQRPWADMIADVMREQFGLKPKDTGNLYRHPYPEWFERVPLPNRFKVPDFSKFSGQDSVSTYEHKVTLHEQRFAKAKKSFKKINHVCLYMYGSDDDDDDSEVARAEWVRSKKVIPCPWVKSSGKEESHTIPSAKELGKRRHCKWHNSGSHSTNDCKVFRQQIHAAIEGGKIKFDDSKKPMKADGSMTSSSRKSIMKKTMVVLILIGAVSFSDSAGMKSRRFLRNHRGTENRHLKPLYINGFVNGKPMSNMMVDGGATVNLMPYATFRKLGRNAEDLSKTNMVLKDFGGNPSETKGVLNVELTVGSKTIPTTFFVIDGKGCYSLLLGRDWIHANCCIPSTMHQCLIQWEGNKIEIVPADRSVNVVNADLALWEMDDIDCLSGKVWNGDFLKIESPSYYFEGVVQGSNVYTKDTVDDLDDKQGRGFMSADNLEEIDIGPGDRPRPTFIIKNLSSEFRTKLIELLKEFRDCFAWEYYEMPGHSDRLLNIGYCWYFFTTLVEIQFPAMAQKYFWYIMGNCPKCPPTVIGMQSWTSTPKPGSNDARIGSAEPPGGWTAEQASEEGCPSSSGGGCSPCAATGIPKMVDNGTSDRSLDRRRGGAAVAGAEAVGAVVGAEVAGVVGTAAGVLLEETGGVVVGASMTVGIVGNTSNRHCGFISTVHPKPGSNGGEGGSAEPGAGPIQPNFG

SEQ ID NO: 129034 - protein, 88 aa, Oryza sativa
  Clone ID: PAT_MRT4530_3132C.1.pep
MSKPKTSTPNLSEPAQPTSLTQKAHNSRNLLVFSRPAHLDRPYDNRRLDFPGRPLYALPDATRSRKPTTEFVRTPPPASPPATAAQIS

SEQ ID NO: 129035 - protein, 85 aa, Oryza sativa
  unsure (1)..(85): unsure at all Xaa locations
  Clone ID: PAT_MRT4530_31330C.1.pep
EHRXXREXREMSGEEEETRRLKSXRFLRQVLMTRXAIIWTQVRQIQHXSTXPVVEVSRCSEVASXNASPYKSRVXAVXIVSGDXL

SEQ ID NO: 129036 - protein, 124 aa, Oryza sativa
  Clone ID: PAT_MRT4530_31331C.1.pep
PPSPPAEQVWQNFSRQLPPVNNGWCRCGALVPMLSGISRGLGPPGAGPPLAGVFPAPRKGALGRAAATPPAFCPGAPPHGPGGVCPRLGYPGPPGPGPWAPKPTGGDAPGGGPPPRGFPLPGGL

SEQ ID NO: 129037 - protein, 190 aa, Oryza sativa
  Clone ID: PAT_MRT4530_31332C.1.pep
NWNMKQRVAAVLVGGLKLASVGFISSVGAGASSDLLYAARGVLKSSVNAEAGRKRSPIWKSAAVYSCFLGTSANLRYQIIAGLVEHRLGESLATSYNQPLLASLLSFVARTVNSYWGTQQWVDLARYTGLQKTKEVPPVEATAPPAETSQLATPPAETSQLATPPAETSQLEDGRTEVQNLDDNSNQSSG

SEQ ID NO: 129038 - protein, 135 aa, Oryza sativa
  Clone ID: PAT_MRT4530_31333C.1.pep
MALKNFLVLGVFLAALLMFSLDDVAHARELTEANESEGKNVKPTGGPGVEDQKWGGGYYPGGGYGYGGGYGGGYGRPGYGGGYGHPGYGGGYGGGYGRGYGGGYGGSGGGYGGGYGGGYGGGGGYGGGYGGGGWH

SEQ ID NO: 129039 - protein, 67 aa, Oryza sativa
  Clone ID: PAT_MRT4530_31334C.1.pep
KVTKTETTETKKALLILSLKADSAGGIIERDHHGPSLGQAAISITLVGYTPYRTNFTQSRRFSICKI

SEQ ID NO: 129040 - protein, 245 aa, Oryza sativa
  Clone ID: PAT_MRT4530_31335C.1.pep
MDEYRPRRSPASERFIGMFASPSSSPTEPSFVAGDELHEDDFLFSSSPAAPPSSARPGEGPGSPSRVPQGQVGLLAALHEGDKRLLLRRGGGGGGGAAAAAAASAGTLLRRKATIAAAAASASGGGGSLSPTQSPTSAARAIPMTPRPKSAGPAAPYHQSAPVKVPVRPPRRQEMFKWDELDDDDFLRNGDAAMLPPHEMVARASAGGAGPAAPFSMLEGAGRTLKGRDLRRVRDAVLRQTGFLD

SEQ ID NO: 129041 - protein, 94 aa, Oryza sativa
  Clone ID: PAT_MRT4530_31336C.1.pep
KHKSDYWPKISVGGVDYLNFLIRIFYYSHSRTPARKCFLKEKDNQIHVPALLKGKRFPPADELCCLLAIWNKFSTEDNQTILQSGFSVDERTIV

SEQ ID NO: 129042 - protein, 127 aa, Oryza sativa
  Clone ID: PAT_MRT4530_31337C.1.pep
MVEAATVGGGDLAGGREGRGPSGGGVGPSDGGVSSPLSDSPLPGQRWLPPPSLFSLRRRWWRRRWRRRWRWRRPRMDGVGGGHRWMTWWRPRMDGVATTEGGGGNGRGPRWRWPMADPAEGEKSFVM

SEQ ID NO: 129043 - protein, 82 aa, Oryza sativa
  Clone ID: PAT_MRT4530_31338C.1.pep
SPVTAPPPMSLLPQACTSLLPRANSSSHASSAPLSVLLSPQIQNESSSASICMYSSWVDLALLPRVKMNLAQGREEESGNQS

SEQ ID NO: 129044 - protein, 72 aa, Oryza sativa
  unsure (1)..(72): unsure at all Xaa locations
  Clone ID: PAT_MRT4530_31339C.1.pep
MRPKRGGEKRKGSKKTVHVNGGGXTSTLGCQTGGTLFGQRRGFSRLGITPGLPVPKLKGPPWGPKPISRGTP

SEQ ID NO: 129045 - protein, 160 aa, Oryza sativa
  Clone ID: PAT_MRT4530_3133C.1.pep
ESVTGCEDQHLRLHELEENGNLQIFCQLALADLNERSEDYAELQSIGAKIVKKLGGTPAAIKSAAYLLRVRSLESWRRFLHGINNFTVVDVKELLRLTKLRTVIIEDCGNVEEDVVYAMAEVVKNSKSLRLLECSLFKMCHLPDRLSSLMHLRHVKISML

SEQ ID NO: 129046 - protein, 85 aa, Oryza sativa
  Clone ID: PAT_MRT4530_31340C.1.pep
KNSARPSNRSAAPAPAPPPLPSPPMAPPPMPCRRRRRRRRQAGPPRCRSPPAPRRAARTISCPWSPRRPCYGWCRPPRPAPAPRR

SEQ ID NO: 129047 - protein, 246 aa, Oryza sativa
  Clone ID: PAT_MRT4530_31341C.1.pep
MAMQENREQMSSAVHITCTVVHRIRLICTGKINNPRRGGLGAEAAGAAAEGGGGAVGSGAAAASPLGLDGHWRRMHGGAMRWRKKAATRKGRGGASGKGSDSGWLLGTREGRQRRESRGRRADGGARVVARGIDEEDHGGAQSSAAAVKQSKRGNDGAQSSAATSDSDAEAAAEGGGGGGEGWRSDAEAAAEGGGGGYLDVVHPSCTTTGGASASLSCRPCHRHRHHHLRTEAAALSRCPSLPLTE

SEQ ID NO: 129048 - protein, 145 aa, Oryza sativa
  Clone ID: PAT_MRT4530_31342C.1.pep
MASLLSPLPPPQDAIANLVTALATAHAATATGKTDDLPATLTQAQAAQDAITLSDNTITTTPSPSTVVVQPGVRDVVLATTAPTPRAQDAVPTNVTPALPPPQRSKRQDACVCCPRHEKLLYHASVLREKRNGSTYAQLVRANFN

SEQ ID NO: 129049 - protein, 348 aa, Oryza sativa
  Clone ID: PAT_MRT4530_31343C.1.pep
MDPWISTQPSLSLDLRVGLPATAAVAMVKPKVLVEEDFFHQQPLKKDPEVAALEAELKRMGAENRQLSEMLAAVAAKYEALQSQFSDMVTASANNGGGGGNNPSSTSEGGSVSPSRKRKSESLDDSPPPPPPPHPHAAPHHMHVMPGAAAAGYADQTECTSGEPCKRIREECKPKISKLYVHADPSDLSLVVKDGYQWRKYGQKVTKDNPCPRAYFRCSFAPACPVKKKVQRSAEDNTILVATYEGEHNHGQPPPPLQSAAQNSDGSGKSAGKPPHAPAAAPPAPVVPHRQHEPVVVNGEQQAAAASEMIRRNLAEQMAMTLTRDPSFKAALVTALSGRILELSPTKD

SEQ ID NO: 129050 - protein, 143 aa, Oryza sativa
  Clone ID: PAT_MRT4530_31344C.1.pep
MDRFQPEGRFRSPRPLGLPSFPSLSGRPLGSSPYRPLDREAGDELPPLLGIHTGQGKNRYSYKGLATVFESHLKELDAPFHEAPDKAGWFLTTSVAARHWLETKKSAELVAVFSEMQAVLLLDEICYVPARQYSPAIRADITS

SEQ ID NO: 129051 - protein, 439 aa, Oryza sativa
  Clone ID: PAT_MRT4530_31345C.1.pep
MAAAADSGSPPFPPSPLALFSGGGVPGRGRRRGGGTFWGVGDCGMYYRRQRKASSEANANVFMPGGPNEWMQKQKDSSAIIVLDSDDEDEYTEGCEQLTSENNKEQAPSGPTSPYTTWIVSSTKDQVNGTLHVDGVQSTQIVPYGQNAPLINQFPLQTSWQPSIQYERVILQKRPEEQRVQDLVAASHAEKIAETQVLLTLPTLPTERKRRKTEPTTLVDVDGGTNLGKRKRKNHQNQAAVDSNLDLQQNDVPSQSYRTMIEEEKPVKESEGLEDLWKDFSLAAECTKIEYHCAQTHVIFFVQLDTNEDMSNEKDVDDENEMDDDCNHDIRIHEDLGHVCRICGMIVRKAETIIDYQWKKRQLLKPQALDLVILDTTHQEGLVYECSLLDSHANGSDNLRLTRTSNHACMQISVTNTCSHESCSKPAFSKTKSTYAYVI

SEQ ID NO: 129052 - protein, 52 aa, Oryza sativa
  Clone ID: PAT_MRT4530_31346C.1.pep
LNPPLKAFCMPRGNKGTKSFISCDKALKSADLKWENVTLSYDSGAPLGIPLE

SEQ ID NO: 129053 - protein, 958 aa, Oryza sativa
  Clone ID: PAT_MRT4530_31347C.1.pep
MYYRRQRKASSEANANVFMPGGPNDISFPASNRDHDWGYGGVGKEWEASYARKLQLMNFLSSLHQRTANPLVTTRMDANMDTPLEQKQKDSSAIIVLDSDDEDGYTEGCEQLTSENNKQQAPSGLTSPYTTWIVSSAKDQVNGTLHVDGVQSTQIVPYYGQNAPLINQFPLQTSWQPSIQYERVILQKRPEEQRVQDLVAASHAEKIAETQVLLTLPTLPNERKRRKTEPTTLVDVDGGTNLGKRKRKNHQNQAAVDSNLDLQQNDVPSQSYRTMIEEEKPVKESDGLEDLWKDFSLAAECTKLDTNEDMSNEKDVDDENEMDDDCNHDIRIHEDLGHVCRICGMIVRKAETIIDYQWKKASRTRTNYYESRSKDADEIDTGAVKVSEDFIVSDIAIHPRHAKQMRPHQLEGFSFLVKNLVGDKPGGCILAHAPGSGKTFMLISFIQSFLAKYPSARPLVVLPKGILGTWKREFQRWQVEDIPLYDFYSVKADKRVEQLEVLKSWEAQMSILFLGYKQFSRIICGDGDGNIAAACRDRLLMVPNLLILDEGHTPRNRETDVLASLKRVQTPRKVVLSGTLFQNHVSEVFNILDLVRPKFLKMESSRPIARRIMSQVAISGIRSLKGVHDSAFTESVEDTLLNDDNFTRKAHVIRSLRELTKDVLHYYKGDILDELPGLVDFSVFLKLSTKQKEIVHKIEAYEKFKRSAVGTALYIHPCLSEISEGDAADRASNLTDATVDSLIESIIIKDGVKAKFFFNILSLANSAGEKLLAFSQYILPMKFLERLLVKRLGWHVGKEIFMISGDTSADDREVAMDQFNNSADAKVLFGSIKACGEGISLVGASRVIILDVHLNPSVTRQAIGRAFRPGQQKKVFVYRLVAADSPEVKFHETAFKKEVIPKLWFEWSELCTTEDFKLNQVDIDDSEDELLEANAIRQDIKALYRRSAISFSRCACAS

SEQ ID NO: 129054 - protein, 336 aa, Oryza sativa
  Clone ID: PAT_MRT4530_31348C.1.pep
MADICLDKASRTRTNYYESRSKDADEIDTGAVKVSEDFIVSDIAIHPRHAKQMRPHQLEGFSFLVKNLVGDKPGGCILAHAPGSGKTFMLISFIQSFLANVFNALYSEPVIQGRVLNRKGWIYVGEQGDVRKNYIWCKLGTWKREFQWWQVEDIPLYDFYSVKADKRVEQLEVLKYWEAQMSILFLGYKQFSRIICGDGDGNIAAACWDRLLMVPNLLILDEGHTPRNRETDVLASLKRHHAKWSCLTYNESGSNIRYQSLKGVHDSAFTESVEDTLLNDDNFTRKAHVIRSLRELTKDVLHYYKGDILDELSGLVDFSVFLKLSNKLKEIVHCWN

SEQ ID NO: 129055 - protein, 1001 aa, Oryza sativa
  Clone ID: PAT_MRT4530_31349C.1.pep
MAAAGRDPPATPSSRMYYCRQRKASSEVNANVFVPGGQNGISFPASNRAHDWGYGGVREEWEASYARKLQLINFLSSLHQRTANSLITTRMDANMDTPLEQKQKDSSAIIVLDSDDEDEAERCEQLASENNKQQAPSGPTSPCTTWIVSSAKDQVNGTLHVDGVQSTQIVPYGQNAPLINQSPLQTSWQPSIQYERVILQRRPEEQRVQDLVAASHAEKIAETQVFLTLPTLPNERKRRKSEPTTLVDGDGGTNLGKGKRKNHQNQAAVDSILDLQQTVVPLQQNDVPSQSYRTMIEEEKPVKESDGLEDLWKDFSLAAECTKLDTNEDMSNEKDVDDENEMDDDCNHDIRIHEDLGHVCRICGMIVRKAETIIDYQWKKKNLLWGIFSLLKYFLKWESVFITNYIDIDTALEYIASRTRTNYYESRSKDADDIDTGAVKVSEDFIVSDIAIHPRHAKQMRPHQLEGFSFLVKNLVGDKPGGCILAHAPGSGKTFMLISFIQSFLAKYPSARPLVVLPKGILGTWKREFQRWQVEDIPLYDFYSVKADKRTEQLEVLKSWEARMSILFLGYKQFSRIICGDGDGNIAAACRDRLLMVPNLLILDEGHTPRNRETDVLASLKRVQTPRKVVLSGTLFQNHVSEVFNILDLVRPKFLKMESSRPIARRIMSQVAISGIRSLKGVHDSAFTESVEDTLLNDDNFTRKSHVIRSLRELTKDVLHYYKGDILDELPGLVDFSVFLKLSTKQKEIVHKIEAYEKFKRSAVGTALYIHPCLSEISEGDAADRATNLTDATVDSLIESIIIKDGVKAKFFFNILSLANSAGEKLLAFSQYILPMKFLERLLVKRLGWHVGKEIFMISGDTSADDREVAMDQFNNSADAKVLFGSIKACGEGISLVGASRVIILDVHLNPSVTRQAIGRAFRPGQQKKVFVYRLVAADSPEVKFHETAFKKEVIPKLWFEWSELCTTEDFKLNQVDIDDSEDELLEANAIRQDIKALYRR

SEQ ID NO: 129056 - protein, 724 aa, Oryza sativa
  Clone ID: PAT_MRT4530_3134C.1.pep
MGHPVVPDNNMLPNPKTVHHHDLVEVSNVKVPPTPPCVAPTPGHTPCKAATAKLPTPRFHHLHLHHSIHHHVSPLVHSFFPPSLACLHLHLHGRRITTQAHPQQPPPPPPQIALRIRPRAAAAARTRAPEEYGGAFDLIGARRGHAEKKIMWRFNPFGGKVQNGLEGRTIDVGNIKITVRNAIAQGGFSCVYLASDAMHPSKQYAMKHIICNDSELLDLVMEEIQVMNLLKGHPNVVTLVAHDVFDMGRTKEALLVMEFCEKSLVSAMESRGTGYYEEKKALLILRDVCNAVFAMHGQSPPIAHRDLKAENVLLGLDGAWKLCDFGSTSTNHKCFDRPEEMGIEEDIIRKHTTPAYRAPEMWDLYRREVISEKVDIWALGCLLYRICYFKSAFDGESKLQILHGNYRIPEQPKYSAAVTKLIKDMLEASPNDRPDVTQARALIDWPFISMILESQPKSEKDPFNSFVADFEANNLHSGTNVASKESELEAEVSNLKEQLKKTSSEKAEMTAKFEKLSAICRSQRQEIQELKRTLAETTPPSSKVSSRLPDSGPQRKEKIEGTVWELEQGMLANSLPSSEAKTWQAFPDPKSQPAQDITREYCRSDQQAHCSGEFLPEIQLRSSEESGATIRRIRGHPEAGSVPACPAADLGCFPETKTEKEEAHLWISTEPGFPPGTHGKGQSLCPMHEMSLRFATLLQSLLRGKLLIIIDPPTVISECATARV

SEQ ID NO: 129057 - protein, 127 aa, Oryza sativa
  unsure (1)..(127): unsure at all Xaa locations
  Clone ID: PAT_MRT4530_31350C.1.pep
GXXXXPXXXXXXEFXEXXXKXGPASATXGXAXXXATAATGVIPAAAAAGEAXSFXTXSPEDDARXXTARRAAAGEAAFNRRRRRRDGSQRLPEPPGHGQRRRNGGRGGGHGSMEXRAEFGTSSSRIP

SEQ ID NO: 129058 - protein, 102 aa, Oryza sativa
  Clone ID: PAT_MRT4530_31351C.1.pep
QGGDPGGETNSGHVLFLTGIHGISLLCWHNCQTCSCFSAWSMVVPGGFEGFHGMSSNADTETGERLEGMSNEPFTDLATSSYLRSQHLHWICPEMGFFGFAH

SEQ ID NO: 129059 - protein, 78 aa, Oryza sativa
  Clone ID: PAT_MRT4530_31352C.1.pep
VHRGCVAANASAPGALVLHGDEERRDLGFGAERRRRGGFAKWGFCLEARRAKLTYSNTQGRGGDKRGAGGMELLPDLR

SEQ ID NO: 129060 - protein, 118 aa, Oryza sativa
  unsure (1)..(118): unsure at all Xaa locations
  Clone ID: PAT_MRT4530_31353C.1.pep
PPVSLPWPPPXASAPPRRPCTRPPPPSPPPPRSSPPPETPAIKPLPRLKNCTNRSIGHRRRIPSQPKSKKMKENAPSKIAGFTPTLDWIGLDSMPRFLLTSLKKAPARAESTAREAAK

SEQ ID NO: 129061 - protein, 960 aa, Oryza sativa
  Clone ID: PAT_MRT4530_31354C.1.pep
MARIQRTLATTDEHSIRDASERLHLRELQQFAYDAQDAIDLYKFELLRRRMDDPNSHGDGGSSRKRKHKGDKKEPETEPEEVSIPDELAVRVRKILERFKEITKAWDDLRLDDTDTTMQDEEHSMLPLPTTPYVDEPTIFGRDEDKEKIIKMLLSVGGANEGDVSVLPIIGMGGVGKTALVQLVYNDRRILNRFDLMGWVHVSENFDLKSIMRKIIMSFTKKPCQMTQMDQLQYMLIEQVVGRKFLLVLDDVWNERKDIWDALLSAMSPAQSSIILVTTRNTSVSTIVQTMHPYNVSCLPFEESWQLFKQMAFLHQDESMKTDFEVIGRKIVQKCAGLPLAVKAIASALRFEENEEKWNDILESEQWELPTTEDTVLPALKLSYDQMPIHLKRCFVFFALFPKRHVFLKENVVYLWISLGFLKRTSQTNLETIARCLNDLMQRTMVQKILFDGGHDCFTMHDLVHDLAASISYEDILRIDTQHMKSMNEASGSLRRCFSKLFSHHINLTIDNELWSSFRHLRTLDLSRSSMTALPDSIRGLKLLRYLSIFQTRISKLPESICDLLNLKILDARTNFLEELPQGIQKLVKLQHLNLVLWSPLCMPKGIGNLTKLQTLTRYSVGSGNWHCNIAELHYLVNIHGELTITGLGRVTKVDDAQTANLINKEHVQTLRLDWSDGFYSSECDHNSSHIDVKATPELAEEVFESLKPTSNLEELEVADYFGYKYPSWFGGSAYSQLAKITLWKQGCKFLPTLGQLPQLRKLVVIRMEEVERIGQEFHGENSTNRFPVLEELEFENMPKWVEWTGVFDGDFPSLRELKIKDSGELRTLPHQLSSSLKKLVIKKCEKLTRLPTIPNLTILLLMGNLSEEIHNSLDFPMLQILKEWIEWQQSLIDKEDKQQPEFDNASYDQEALGALSDNSEDDVEVFNEDEDDDFYDEMLEVGQSSGTAINDDDGSNDAV

SEQ ID NO: 129062 - protein, 113 aa, Oryza sativa
  unsure (1)..(113): unsure at all Xaa locations
  Clone ID: PAT_MRT4530_31355C.1.pep
MGWICMRGLSESVTRNRHAIRDRMPDSARGYGPVSDDPPMKGRMRSTNPGLINDCQGCGACNRAKCLHHXVCCRRAVAAIHTENCPAGLCSCWRTHSDXLSGARYSRTEIYGA

SEQ ID NO: 129063 - protein, 46 aa, Oryza sativa
  Clone ID: PAT_MRT4530_31356C.1.pep
MSYRTILGRSQSVTLSQSTSKGKQSQHLPQQQQFAVEKDQCLHCKK

SEQ ID NO: 129064 - protein, 994 aa, Oryza sativa
  Clone ID: PAT_MRT4530_31357C.1.pep
MARIQRTLATTDEHSIRDASERLHLRELQQFAYDAQDAIDLYKFELLRRRMDDPNSHGDGGSSRKRKHKGDKKEPETEPEEVSIPDELAVRVRKILERFKEITKAWDDLRLDDTDTTMQDEEHSMLPLPTTPYVDEPTIFGRDEDKEKIIKMLLSVGGANEGDVSVLPIIGMGGVGKTALVQLVYNDRRILNRFDLMGWVHVSENFDLKSIMRKIIMSFTKKPCQMTQMDQLQYMLIEQVVGRKFLLVLDDVWNERKDIWDALLSAMSPAQSSIILVTTRNTSVSTIVQTMHPYNMAFLHQDESMKTDFEVIGRKIVQKCAGLPLAVKAIASALRFEENEEKWNDILESEQWELPTTEDTVLPALKLSYDQMPIHLKRCFVFFALFPKRHVFLKENVVYLWISLGFLKRTSQTNLETIARCLNDLMQRTMVQKILFDGGHDCFTMHDLVHDLAASISYEDILRIDTQHMKSMNEASGSLRYLSLVVSSSDHANLDLRTLPVSGGIRIFQVVNSMDDNRRYFSSFFKNNRRCFSKLFSHHINLTIDNELWSSFRHLRTLDLSRSSMTALPDSIRGLKLLRYLSIFQTRISKLPESICDLLNLKILDARTNFLEELPQGIQKLVKLQHLNLVLWSPLCMPKGIGNLTKLQTLTRYSVGSGNWHCNIAELHYLVNIHGELTITGLGRVTKVDDAQTANLINKEHVQTLRLDWSDGFYSSECDHNSSHIDVKATPELAEEVFESLKPTSNLEELEVADYFGYKYPSWFGGSAYSQLAKITLWKQGCKFLPTLGQLPQLRKLVVIRMEEVERIGQEFHGENSTNRFPVLEELEFENMPKWVEWTGVFDGDFPSLRELKIKDSGELRTLPHQLSSSLKKLVIKKCEKLTRLPTIPNLTILLLMGNLSEEIHNSLDFPMLQILKEWIEWQQSLIDKEDKQQPEFDNASYDQEALGALSDNSEDDVEVFNEDEDDDFYDEMLEVGQSSGTAINDDDGSNDAV

SEQ ID NO: 129065 - protein, 279 aa, Oryza sativa
  Clone ID: PAT_MRT4530_31358C.1.pep
MAKPQDMRSVDSFSQLPFIRPAPPPQQQARDTIRLFGCEFSNDLQLRPTEAGAGSPDAANGSTVTSEGSNGGDGGTKNGGAATAAAERKFECHYCCRNFPTSQALGGHQNAHKRERQHAKRAHLQASLAMHRYMPGHMYGLFNYHHHIGGRFDHHPPPPPPPPPPAHYPMWTSAAPGAFAGPGSMAQPINGSPVQAGLWSVPPPTENFGSTAGRQGADKLATTVAGTPAAGEVACKDEMVPMSLLSSSPSLSSCSSTSPEMLGRCELGQKEGVSLDLHL

SEQ ID NO: 129066 - protein, 116 aa, Oryza sativa
  Clone ID: PAT_MRT4530_31359C.1.pep
RCCCRQPVCLRPAPVKRATPVCQLATGAAQWCQPATVVATAASGSQQTPTGTGRNWTVGPLMPKLSIYLIELHMHACMPIVIIVIFVWELSSLVVNWCVCPICVFDPKKKARLVWL

SEQ ID NO: 129067 - protein, 382 aa, Oryza sativa
  unsure (1)..(382): unsure at all Xaa locations
  Clone ID: PAT_MRT4530_3135C.1.pep
SWKGKHLSVGGRLVLINSVLSSLAMFMISFFEVPKRVLHKIDFYRSRFFWQGDDHNKXYRLTRWDVVCQPKDQGGLGIHNLKVQNKCLLSKWLFKLINEEGVWHDLLKRKYLYNKSITQVDKKQDDSYFWSGLMNVKSTFLNMGSWIVNNRKQIRFWEDKWLRNWAFKDKYPSLYAIARRKTSSIATVMGSVSLNVXFRRVLVGQNLDCWHELCSSIVHIQLNDSFDTFRWNFHQNGLFSVRSMYLALINNGYIDRNKCIWKLKMPLKIKIFMWYLLKGVVLTKDNLARRNWNSSLRCSFCLKNKSIQHLFFDCHVAKFLWRAVQFSFGFNLPVSVSHIFDGWFLEVDKKMSKLILVGASAICWAIWFHRSPKACKTSYIGT

SEQ ID NO: 129068 - protein, 45 aa, Oryza sativa
  Clone ID: PAT_MRT4530_31360C.1.pep
VMQSISVSSSPFLHTLDNLICNVQKKPKIDKLSIPPLPLPLTTAS

SEQ ID NO: 129069 - protein, 247 aa, Oryza sativa
  unsure (1)..(247): unsure at all Xaa locations
  Clone ID: PAT_MRT4530_31361C.1.pep
PRVRPCKPFNPLLGETYEADFPERGVRFFAEXGKGWKFWGDSNLKSKFWGQSIQVDPIGVLTVEFDDGEIFQWSKVTTTIHNLILGKLYCSHHGTMHIKGNRQYSCKLKFKEPSLLDRNPHLVQGFVEDDDGNKPSFLIGKWDENMYYSNLDTXRSRSVDQLKGAVLLWEKNKPSPNPTRYNLXSSFAITLNELSPDLQDKLPPTDSRLRPDQRHLEXNGEYEKANAEKLRVERRXRWSSKLQDMAG

SEQ ID NO: 129070 - protein, 728 aa, Oryza sativa
  Clone ID: PAT_MRT4530_31362C.1.pep
MTQSGGGGGGVHHHLNHHGLCCLSAAALPAPDAPPTPEPEAGGAAVAVAGVLHKWTNYGRGWRERWFSLHDGVLSYSKIRRDASAAADEDGGGGGGGEVRLIGGASARIGGARRPDKPVGVVCLKLSAFRESKSDDRRFYIFSPTKTLHLKTDSKEDRVAWIEALILARSFYSLRSLSGRITFVQSDVSVSTARLRNRMQQEGLNESLIQECEQIVLTEFSSFRKQLKLCYEDQLSLFGSCRHHFEEGKDASIIQGALTRNDFSSSRHGNFSEYSTTESDEFEKQDGGDLTCEDESTFFDAADYFIEPNDRSSAMLSSTSCGEGLLDIQMEDSSHLLPQIKRRSKLPEPTEKERGISLWSIIKDSVGKDLTRVCLPVYFNEPLSSLQKGFEDLEYSHLLDQAYQYGKMGNSLMRILKVAAFAVSGYASSVARPCKPFNPLLGETYEADFPERGVRFFAEKVSHHPMLIACHCEGKGWKFWGDSNLKSKFWGQSIQVDPIGVLTVEFDDGEIFQWSKVTTTIHNLILGKLYCSHHGTMHIKGNRQYSCKLKFKEPSLLDRNPHLVQGFVEDDDGNKPSFLIGKWDENMYYSNLDTSKVKSVDQLKGAVLLWEKNKPSPNPTRYNLSSFAITLNELSPDLQDKLPPTDSRLRPDQRHLENGEYEKANAEKLRLERRQRMSSKLQDNGWKPRWFQKDGEDGTYRFKGGYWEAREHGQWDDCLDIFGEFSET

SEQ ID NO: 129071 - protein, 394 aa, Oryza sativa
  Clone ID: PAT_MRT4530_31363C.1.pep
MDLLSAAYGATSDDDDDGAEATPTPGWAATGYASAAGPPPKRPRWEPPPYLPPPPPYPIPQPARPRAAPPPASTASGRYVSKRERALMAASSSPVDSSSPLPPSAAAQFGSPVDVDEAKEIKVFKEDHAVEVIKFNRTNSNLFLSGWSKGTLRLWDVRSGLVTKEYQRNLGTILDIEFSSDGKQFICSTDTSRSNVSENSIIIWDTLRQVPLSNQQIIFFSLRIFSHSYSYVCILQQFEKQKRYLSLIYYDNHANMLFALHTNNLLLEIKKVYTEAYTCPCVRYHPFEASFVAQSNGNYIAIFSAKSPFKLNKYMRYEGHGVWGFPIKCNFSFSGKELTSGSSDGCIYFYDYKSSRLLSKIQAFKEPCTDVAYHPVIPNVIASCSWAGEIAVFE

SEQ ID NO: 129072 - protein, 63 aa, Oryza sativa
  Clone ID: PAT_MRT4530_31364C.1.pep
EAELELKNRQCGSRTRGLITGNRKAEAISKCQRTVCEISISRFSNPNSMTCSFKLKLCLEVML

SEQ ID NO: 129073 - protein, 420 aa, Oryza sativa
  unsure (1)..(420): unsure at all Xaa locations
  Clone ID: PAT_MRT4530_31365C.1.pep
QARHAVGELVRTVVGGGGRRRQGTTVALWPPPPDPASPPPPLPPAAARSAAAATDAPHPHHPFYYSGPAAAAAAAAAAQQQQQTFMGALAITPVVAEQPQGSSGGGEKKVVAPTTPAAAGAAATTTLAKRPSKDRHTKVDGRGRRIRMPALCAARVFQLTRELGHKSDGETIEWLLQQAEPAIIAATGTGTIPANFSSLNISIRSGAASASSASNPNRASPFPALALHPHHQQHDVSAMLGYHHHLLPPPQQQQESPQDPGGAGAFMRKRYREDLFKETXDRQDPSAPKAREQQPTTPQAAAAAAAAAAMWAVAPNTAAPGGAFWMQPMWSFAGGGGGAATVQAPLQFMSTRVNYPGSAGAGMSDTNLGMLAALNAYNRGGAGDQQPQQQPEMDQQGRNDDDDDDGDDSGDEDNGGANNN

SEQ ID NO: 129074 - protein, 163 aa, Oryza sativa
  unsure (1)..(163): unsure at all Xaa locations
  Clone ID: PAT_MRT4530_31366C.1.pep
MKIAVVARQRRGSRARLCVRARAWRXVRGDVSRDFARELPVFGRGIRADVVGGGCRAHEAKESAAMPDNGTNCLAAPIHPSIDQSMVVTRQSFMSSELVRRATRKPCANRADKNNFGTDIRCSVLHFWSAFPCPFGRRLILVILPRISIFQTPYSLPILSCIC

SEQ ID NO: 129075 - protein, 937 aa, Oryza sativa
  Clone ID: PAT_MRT4530_31367C.1.pep
MASPLCPPTPCPSHPARARRLGEWTAASSEGIGRPLSMHRAVPGFLRRALITRNHPQASRFTSLACCLNNLDHQEPTQSTISGDYRRQCLLPLITLAVRTSNWDGARKISFRECERLYGLSQSIGLFALLIQSFLPRRVIEVRCLIQSIVNYCGNAGPELFELALMLVNNLGGSITLLQVYAALIRVFIELSMFEDALVTYIEAKKIGVELQLCNFLLKSLVKRNQFMYARSLFDDMKSTGPSPNVYSYSVLMSMYTHGDKPCLEEAFDLLCEMKIRGVKPTAATYGTYLYGLCRAKQVESAWDFLQVLRQRGYPCNSYCFNAVIHGFCNDNQVHKAMEVFDEMKKGGVVPDVHSYSILVDALCKQGALSLGSNLLDEMERNRVSPTLVIYSSLLHGLCKAGKVEEALELFERLKYQGFKHDQITYSIVLHGCCRHMDIEVAYGLWIDMVNHNFVPDVYNYTSLIYAFCRHRYLKEALGLFELMLDNKINPNIITCTILVDGFMKEGLISEAFLFLDEVRQFDIVPNLYTYKVIINGLFKGNESDDLWGFFGDMIKRGYIPDVVLYSIIIDGFVKALDLQEAFRLYHKMLDEGTMPNIFTYTSLINGLCHDDRLPEMTPLLKNMILEGLTPDRIMYTSLIACYCKRSNMKKAMEIFREMKNGGISPDTFVYTCLIGGYTKVRAMDFAELLMEEMETKGLTPTVVTYTDLIIGYLKTGDEKSAYRTYHNMIQRVSCVYGCCWVTKVGGSTSKFLWMPKDVKSQNMWNGGAFWLLQESRLQGSDPIVIRLDASTVNAVLADLFSSVDTLTKSPPLTHEEEDDLVLSLHDIAILILVQCSFIGDDFLINTIGPAGKEKVLGNLYDGTPVMISTSLLLFFYLIIQLRCMFLVFCDNLLCEAHEAGDICQKWVMIDRLMKRGGGAPASLPRLSSTGILDLST

SEQ ID NO: 129076 - protein, 81 aa, Oryza sativa
  unsure (1)..(81): unsure at all Xaa locations
  Clone ID: PAT_MRT4530_31368C.1.pep
GVYTSPTATKEVVPRGLYEFEGAYKEDKRYTLIRPTGKAGXRSLTGFCLSDRVAAKKDPENAHRHKITEEIAVSAVAGAGG

SEQ ID NO: 129077 - protein, 34 aa, Oryza sativa
  Clone ID: PAT_MRT4530_31369C.1.pep
MVIGEGVGRLGTQAHLSFTWTMLKVLVIANPEAA

SEQ ID NO: 129078 - protein, 649 aa, Oryza sativa
  Clone ID: PAT_MRT4530_3136C.1.pep
MWRFNPFGGKVQNGLEGRTIDVGNIKITVRNAIAQGGFSCVYLASDAMHPSKQYAMKHIICNDSELLDLVMEEIQVMNLLKGHPNVVTLVAHDVFDMGRTKEALLVMEFCEKSLVSAMESRGTGYYEEKKALLILRDVCNAVFAMHGQSPPIAHRDLKAENVLLGLDGAWKLCDFGSTSTNHKCFDRPEEMGIEEDIIRKHTTPAYRAPEMWDLYRREVISEKVDIWALGCLLYRICYFKSAFDGESKLQILNGNYRIPEQPKYSAAVTKLIKDMLEASPNDRPDVTQARALIDWPFISMILGAYKRTHVMPRRNPPPPPIEQSNSSLSHGSSKAGDAPLGAFWATQHAQGSQVADNRNSLFDEEPIKPSPSSKHNQSRGDISISAPGDRHGRSGQAVRGTPSNSVSNNGLASGANTNLFMESQSSLKTKESQPKSEKDPFNSFVADFEANNLHSGTNVASKESELEAEVSNLKEQLKKTSSEKAEMTAKFEKLSAICRSQRQEIQELKRTLAETTPPSSKVSSRLPDSGPQRKEKIEGTVWELEQGMLANSLPSSEAKTWQAFPDPKSQPAQVRPKVDHSTNGAQNLARNANSRQSPDGWGFGPDSFRTSPGSTAAQINRPTAQGSSSQRFSSGAAKKVEQPSGWAGF

SEQ ID NO: 129079 - protein, 97 aa, Oryza sativa
  Clone ID: PAT_MRT4530_31370C.1.pep
MKEAGRTVLTREAARGIPKVCRFISRLDTTDCTAIINLSTADQTCYPNRISVHHRVPMIADIALGVITIVPSGGGGGVGAIAMDRGNILRSGSTGCG

SEQ ID NO: 129080 - protein, 750 aa, Oryza sativa
  Clone ID: PAT_MRT4530_31371C.1.pep
MATAGGAAAAAAPQAMDEKARRTRDLLASFYNTDPSAAAAAAAASSAARPSPTAASASPLDTINSASFDPDVYMNVLVQQSNLEALLQRHVKMAAEIKNLDTDLQMLVYENYNKFISATDTIKRMKTNIVGMEANMEQLLSKITSVQSRSDTVNTSLFDKRENIEKLHRTRNLLRKVQFIYDLPTRLNKCIKTEAYADAVRFFTGAKPIFEAYGDTSFHDCKKASEEAIDLVTQHLKTKLYSDSEPIESRAEAVVLLKQLNFPVDSLKSNLLEKLEDCLLNFQKEPTQASIGDISKTFRAYLIIFPDSEKRLIELAQALFSKRENNLKVSRSLWEDATAIDEVIPEAALPAFSLELLTLNHKDVLARTPSTSNGKLEESQLQTAMETSKVKVLQGCIDLLQEFHHLIDGNTELLVKLRDLVIDWVQEGFQDFFQKLDGHFHMLSGRSKSPSQEMESVQIDKVPTALVLMLAQLCVFIEQTAIPKVTEELASSFSGGGARSYEYGPPFVPGEICRLYRSSGEKFLHHHKEPREVNMFVDLLLLEFNGVVSEVKQVLPGLIRRHRHSDSTGSTTSSRSNPMREDMLNRSNTHRARSQFLENHLAKLFEQKMEIFTKVEYTQGTENKNAKNFLNMGETTFKPLRQPFFLLDTASSESVISAVLKLCLKSLQEFVRLQTFNRSGFQQIQLDMEFLKTSLKEFVDDEAAISFLLKEVNNAAHERCLDPIPLEPPILDKLISAKLAKIKEQSPNMQ

SEQ ID NO: 129081 - protein, 277 aa, Oryza sativa
  Clone ID: PAT_MRT4530_31372C.1.pep
ALVLMLAQLCVFIEQTAIPKVTEELASSFSGGGARSYEYGPPFVPGEICRLYRSSGEKFLHHYINMKTQKISKLLNKRFTTPVWIKHKEPREVNMFVDLLLLEFNGVVSEVKQVLPGLIRRHRHSDSTGSTTSSRSNPMREDMLNRSNTHRARSQFLENHLAKLFEQKMEIFTKVEYTQESVISAVLKLCLKSLQEFVRLQTFNRSGFQQIQLDMEFLKTSLKEFVDDEAAISFLLKEVNNAAHERCLDPIPLEPPILDKLISAKLAKIKEQSPNMQ

SEQ ID NO: 129082 - protein, 198 aa, Oryza sativa
  Clone ID: PAT_MRT4530_31373C.1.pep
DLQMLVYENYNKFISATDTIKRMKTNIVGMEANMEQLLSKITSVQSRSDTVNTSLFDKRENIEKLHRTRNLLRKVQFIYDLPTRLNKCIKTEAYADAVRFFTGAKPIFEAYGDTSFHDCKKASEEAIDLVTQHLKTKLYSDSEPIESRAEAVVLLKQLNFPVDSLKSNLLEKLEDCLLNFQKEPTQASIGDISKTFRA

SEQ ID NO: 129083 - protein, 632 aa, Oryza sativa
  unsure (1)..(632): unsure at all Xaa locations
  Clone ID: PAT_MRT4530_31374C.1.pep
MDPPKSTHLQQLVPHLHHLWGESPRNLGLRGCXAKEWPRLGIGGGESRWRGTIQGDKRRFARVVRGRMAHQGHCCPGRRVASASSRGEEGRPPAVAHQGGSSQAGSEQSTKAGGGEMRGQMNKGGKLQQYRPVQKEKNQTEEKIATSAVTPQTATQQPTPPPNSRTGMQTNPQRIFCHRCKGFGHMARDCSNVVFCINCAKPTHRTEDCIYDKQPRPMAKLVGYGAPGLGCILIQNTKPDPPKEHNNPLAMISTVFGGELTEAQLEQGFTQQFKWNWVWKAKAMPNGSFQMRFRNKIKFDELANFDYFNVKGTDVQVNVKEWTQKSEAVGKLHIVWVKITGIPEEMKGYQALYEIGSNLGPVLEVDMATFRASNVIRAKVGMMELVRERKQVLVPELMLGEHKIKCAQILRDMELAMQLQKGDWDKENRVSFDMGLNQEDKDKVDPGDSEDYMDSQESKGSFAKRLGINLTEEALGSQDEEMRRSKRLKDKEDKRMKAFEGQAELLRYITAFYKDLFGHSKLNNIKLDMGAEALTVLIQRAEDNKLIEGWWQDILRDKYLKNKNLAGISVKAGDSHFWQGLMEVKNIFYKFCSKKVGDGENTCFWEDNWIGEVGSKSKKIGTGSQTHKAGGK

SEQ ID NO: 129084 - protein, 82 aa, Oryza sativa
  Clone ID: PAT_MRT4530_31375C.1.pep
HDALVTKRRSSLRHTSQKRYLEDCSLTWQIRYRSLAELVKVGSLLDFQDAAVDFLLKSKNLQLFPEDEAFLKAALQDGGEDC

SEQ ID NO: 129085 - protein, 170 aa, Oryza sativa
  Clone ID: PAT_MRT4530_31376C.1.pep
GLRWTGCTAAVHGNERPRSTLSKTDGRDQTVHDRLTADDPDDVSDDVSTGGDSAARARKRRAPTGRGRRSELTGDQNNGGRATDGAGGEKEAAAEIGLAAATELRRSSAAAKGRTRTAATWRPRRRSSRTTATTGATAAHGWSGGDDGGARRHGARALQTTRDEGEGGGG

SEQ ID NO: 129086 - protein, 41 aa, Oryza sativa
  Clone ID: PAT_MRT4530_31377C.1.pep
SRRDLSTGCCEFLDCRRCMCSVESVLQKVALANAAFRTLMG

SEQ ID NO: 129087 - protein, 520 aa, Oryza sativa
  Clone ID: PAT_MRT4530_31378C.1.pep
MAVGVVAGVESQERRGGGAGTGRVTAFVVLSCVTAGMGGVIFGYDIGIAGGVSSMEPFLRKFFPEVHRRMEGDVRVSNYCKFDSQLLTAFTSSLYVAGLLTTFAASRVTAGRGRRPSMLLGGAAFLAGAAVGGASVDIYMVILGRVLLGVGLGFANQAVPLYLSEMAPSRWRGAFSNGFQLSVGVGALAANVINYGTEKIRGGWGWRVSLALAAVPAGLLTLGALFLPETPNSLIQQGKVERCDVEQLLKKIRGADDVADELDTIVAANSATAGVGGGGLLMLLTQRRYRPQLAMAVMIPFFQQVTGINAIAFYAPVLLRTIGMGESASLLSAVVTGVVGVGATLLSMFAVDRFGRRTLFLAGGAQMLASQVLIGGIMAAKLGDDGGVSRAWAAALILLIAAYVAGFGWSWGPLGWLVPSEVFPLEVRSAGQSVTVATSFVFTVFVAQAFLAMLCRMRAGIFFFFAAWLAAMTAFVYLLLPETKGVPIEEVAGVWRGHWFWSRVVGGDGEEEERNNGGKL

SEQ ID NO: 129088 - protein, 94 aa, Oryza sativa
  Clone ID: PAT_MRT4530_31379C.1.pep
PSLLVAQQPCMKKPANTWKRTSTKPSAAQPSSLPRRRREQPKLDQTAPRRNPSRESGALRRRPAYQPRHYLAVYMPTNASSLDKRNLPGIYKQE

SEQ ID NO: 129089 - protein, 959 aa, Oryza sativa
  unsure (1)..(959): unsure at all Xaa locations
  Clone ID: PAT_MRT4530_3137C.1.pep
PIGLWHTRALRRPSARDGLYGWLVTPPLMGDHVFTXGWPSSPPTGVSVCTAGLLSRRCWASTTSPPACLRRRRLVSPPIRSVGHTTIDGHRHLHCRPASVAADWCPRLYGWLVTPPFMGVHVFTXGWPSPPPTGVSACTAGLLCRRCWASTTSPPACLRRRRLVSSPIRSVGHTTVDGHRHLHRRPASVAADWCPRLYGRLVTPPFIGVHVFTXGWPSPTGVSACTAGLLCRRCWASTTSPPACLRRRRLVSSPIRLVGHTTVDGHRHLHRRPASVAADWCPRLYGRLVTPPFMGVHVFTXGWPSPTGVSACTAGLLCRRCWMSTSSPLAHLRCRRLVFPLTRLAYYAAISGHLRFHRPACRHRRRLVSSPIRLIGHTTVVGRLRLHRPAASSAADWCFRLYVCLVTPPLLGVYVFTNRXASSAADWCFRLHGWPIMPPLLGVYIFTDRPPRPPSTGVSACTAGLXMTAVVGRLRLHRPAASSAADWCFRLHCWPIXRRCWASTSSPTGRLVRRRLVFPPARLAYYXPPLLGVYVFTDRPPRPPATGVSACTAGLXYDRCYWASTSSPTGRLVRRRLVFPPVRLAYYXPLLLGVYVFTDRXASSAADWCFRLHGWPIXPPLLGVYVFTDRPPRPPPTGVSACTGGLLCRRCWASTSSPTGRLVRRRLVFPPARLAYYXPPLLGVYVFTDRPPRPPPTGVSACTAGLLXCRCWASTSSPTGRRLVRRRLVFPPARLAYYAAVVGRLRLHRPAASSAADWCFRLHGWPIXDRRCWASMSSPTGRLVRRRLVFPPARLAYYAAVVGRLRLHRXPPHPPPTATTTDGNHRLPSPTXMPPPTGAFIFTTARLHYRFASVAADSCXTSSRQRNFVIMVERLHLYYLRYQQTLLLLLHKFCYFTNHNVFVNLDISACDAVLFYYNKWLSNIHDFYLDIFNTYLQSSNNYSTTRSYSSRLYVQLFPN

SEQ ID NO: 129090 - protein, 154 aa, Oryza sativa
  Clone ID: PAT_MRT4530_31380C.1.pep
LYGICLSLSRWSQIRHPGTSASPVLSCSPIDYSSRETYTQLESCPVFPTGSLLSRPACGVVLSREHVSASCNLSIPFALCTSSFLIVSFGFFHFLDLICSLVYRHISLPPTVSLPTLEGTGGRTKKERKEEITEHTKHPNIRVHAFLIKKKKKK

SEQ ID NO: 129091 - protein, 124 aa, Oryza sativa
  Clone ID: PAT_MRT4530_31381C.1.pep
MPRHLSLPLSLSLTLLLVWWPMMGDAAATCLALVRLADTPGIKRGLESPSAWKSPWFVDMQFQGSYFVSPADRTYDALRLVKQIVIMRRLLLLWQKPGWAWAYDISAYGIPTSALKVCSASFQC

SEQ ID NO: 129092 - protein, 53 aa, Oryza sativa
  Clone ID: PAT_MRT4530_31382C.1.pep
ETVSSILICSSSCWFTTNDSLRSTRCSLTQNLYTHYLMDNYKTTICILNEAGT

SEQ ID NO: 129093 - protein, 867 aa, Oryza sativa
  Clone ID: PAT_MRT4530_31383C.1.pep
MANMNITTILEKRLNKEGFKADQDIEPKLTTTVLQQLEDTSGEVSGLAVKCLAPLVKKVGEDSVVEMTNILCDKLLNGKDQHRDTASIALKTIIAEVTTTTLAEKILVSLAPQLIKGATAGKSAEVKCECLDILGDVLHRFGNLITKDHDCMLTALLSQLSSNQASVRKKSISCIASLAACLSDDLLAKATFEVVQLLKNRSAKSEIARTNIQMIGALSESANEYTDDEDASWKVRRASAKCLYAIIVSRPEMLSKMYLEACPKLIEWFREREENVKSTEPMLAILLLFSPRWLLKQEVPKVVKSINRQLREKSIKTKDKSSTSNLKIEALVFTRLVMASHSPAVFHPYIQALSGPILSAIGDRYDKVTAEALRVCEELVRVLRPNSEPHSPDYRPYIGPIYKAILARLANQDQDQDQEVKECAISCMSLALSTFGDGLQRELPACLPVLVDRMGNEITRLTAVKILESIDDLTLIRYLIKWIPAQPWADGEIYLYSPDTHSWSSQGMKMKFFIMDEKYNMEAKGIYKKIDELCLLCMIRRSVVLFCVIQNLINCLKIGCLLKPFKGRFIPPIWMHLIKDVISYMSNIDNLAASLGSIDSYVLETKPERIKVILFPFESREVNWRKDFATFLIEHLRNKWKSTMLDHFINILQKDFKIGYIQHHPLLQDFNQLSNMIRMTWKESKYLTVERRVLLSSTLNAIRNNIPWTSVTTMDAVVNEYISKATNDSLGLFMEIKKIAAHYIENRRKLNKEKGICNRKQVHPIEIIEEIWPGTFNIVPTDLDGLITTMCFVPPSILLYPIAVFIAMLKDLEYSENHEWVSVEGDYATIGISDHAQILGGAVPTLTTRRVEGIHDCKWDPLHTDII

SEQ ID NO: 129094 - protein, 122 aa, Oryza sativa
  unsure (1)..(122): unsure at all Xaa locations
  Clone ID: PAT_MRT4530_31384C.1.pep
GVKEQLRLLCKVYALHLRYHKHLRDWLPTGXITARQGSXGQNEHLGKXLYAHVRSNAVALGDTFNYTGHYLGYELGRYDGNAYPALYEEASKDPLNXTSVVPDGYQKHLRPLVKQQLKLCRL

SEQ ID NO: 129095 - protein, 206 aa, Oryza sativa
  Clone ID: PAT_MRT4530_31385C.1.pep
WIPRAAGFHPYIQALSGPILSAIGDRYDKVTAEALRVCEELVRVLRPNSEPHSPDYRPYIGPIYKAILARLANQDQDQDQEVKECAISCMSLALSTFGDGLQRELPACLPVLVDRMGNEITRLTAVKEIEHNGQPLGLVKSPSSVVEQNEQSPRELRIQAKAKTRKTLSKASHHYSLNMLIPIAKLFCLQIKLHAMMNIPLVIMPC

SEQ ID NO: 129096 - protein, 1199 aa, Oryza sativa
  Clone ID: PAT_MRT4530_31386C.1.pep
MANMNITTILEKMTGKDKDYRYMATSDLLSELNKEGFKADQDIEPKLTTTVLQQLEDASGDVSGLAVKCLAPLVKKVGEDRVVEMTNILCDKLLNGKDQHRDTASIALKTIIVEVTTTSLAEKILVSLAPQLIKGATASGDLITVITIESFSLLIKFTAFLMVHYTFEGKSAEVKCECLDILGDVLHRFGNLITKDHDSMLTALLSQLSSNQASVRKKSISCIASLAACLSDDLLAKATFEVVQLLKNRSAKSEIARTNIQMIGALSRSVGYRFGPHLAEVVPLLINYCTSASENDEELREYSLQALESFMLRCPRDISPYCEGILNLALEYISYDPNFTDSMEEDTDDEAQDEEDDDESANEYTDDEDASWKVRRASAKCLSAIIVSRPEMLSKMYLEACPKLIERFREREENVKSTEPMLAILLLFSPRWLLKQEVPKVVKSINRQLREKSIKTKDKSSTSNLKIEALVFTRLVMASHSPAVFHPYIQALSGPILSAIGDRYYKVTAEALRVCGELVRVLRPNFEARTLDYRPYIGPIYKAILARLANQDQDQEVKECAISCMSLVVFTFGDGLQRELPACLPILVDRMGNEITRLTAVKAFAVIAKSPLRIDLSCVLDHVISELTAFLRKANRALRQATLGTLNSLVVAYGGQIGSSYETIIAELSTLISDMDLHMTALALELCCTIMVDRKSIQNVGLAVRYKVLPQALILIRSALLQGQALQALQRFFASLVQSANTSFDTLLDSLISTAKPSQSGGLAKQALSSIAQCVAVLCLAAGDQKCASTIEMLKGILKDDSTTNSAKQHMALLCLGEIGRRKDLSNHAQIENIVIESFQSPFEEIKSAASYALGNIAVGNLSKYLPFILNQIDNQQKKQYLLLHSLKEVIARQSVDHTGQSELQDSNIEKILALLFNHCESEEEGVRNVVAECLGKIALIEPRKLIPALKERTSSPAANTRATVAIAIKYSIVERPGKIDEIMYSEISTFLMLIKDSDRHVRRAAVLALSTAAHNKPNLIKGLLPELLPLLYDQTVVKQELIRTVDLGPFKHVVDDGLELRKAAFECVDTLLDSCLDQVNPSSFIVPFLLSGLGDHYDVKMPCHLILSKLADKCPSAVLAVLDSLVDPIEKTINHKPKGDAVKQEVDRNEDMIRSALRAIAALSRISGNDYSMRFKNLMNKIMASPPLADKYNSVRSE

SEQ ID NO: 129097 - protein, 145 aa, Oryza sativa
  unsure (1)..(145): unsure at all Xaa locations
  Clone ID: PAT_MRT4530_31387C.1.pep
MADYTARTVKDVNPHEFGKAYFAHLKRSGKMELPEWVDXVKTARLMELPPYDPDWHYTRSISIERKIYLTQGLAVRCFQTIYGGTSEEXSRPSYLCMSRGTLSRRXLSHLQTMGIIDVDPNGGRLITLQGRRDLDQVSTRVAATI

SEQ ID NO: 129098 - protein, 474 aa, Oryza sativa
  Clone ID: PAT_MRT4530_31388C.1.pep
NGDPDLVLLPTWGTGHLMSLLDAGKRLLGCRGGGGLSLTVLVMQPPRKEYASAVAATVRREEASGLDIRFRHLPAVEPPTGCAGVEEFVSRFVQLHADHVRAAVSGLDCPVAGLVIDFFCTTLLDVARELAVPAYVYFTSNAACLALLLRLPALEGEVTVEFEEMDGEVDIPGLPPVPPSSLPMPVMDKKNPNYTWFVYHGRRFMEANGIIVNTVREIERSVLAAIADGRVTPGVRAPVIHPVGPVISFTPPSDDPPHECVRWLDAQPPASVVFLCFGSMGSLAPPQVLEVAHGLERSGHRFLWVLRGAPAAGGSMNPTDADLDELLPEGFLERTTGRALVWPTWAPQKEILAHAAVGGFVTHGGWNSTLESLWFGVPMVPWPLYAEQHLNAFTLVAAMGVAVAMKVDRKRNNFVEASEVERAVRSLMGGSEEGRKAREKAAEMKAVCRKAVEEGGSSDMAVHKLYEELSTQTA

SEQ ID NO: 129099 - protein, 349 aa, Oryza sativa
  Clone ID: PAT_MRT4530_31389C.1.pep
MSSNYGTARWCDAMARSSPKLRLSNNMFEGVFPPIIFQHEKLTTINLTKNLGISGNLPTSFSGDSSLQSLSVSNTNFSGTIPGSISNLRSLKELALGASGFSGVLPSSIGQLKSLSLLEWSLMTKSSVTDETPVTDNPSLTDALQVLSLKDNHLTGELPDNIKEGCALSALDFSGNSIQGQLPRSLVACRNLEILDIGNNKISDSFPCWMSKLPQLQVLVLKSNKFIGQILDPSYTGGGNNCQFTKLQFADMSSNNLSGTLPEEWFKMLKSMIMDTCDNDMLMREQHLYYRGKMQSYQFTAGISYKGRRVVASAYPILTSLTVQAPCSTFCPGEPSEFGQVTVYVGAML

SEQ ID NO: 129100 - protein, 95 aa, Oryza sativa
  Clone ID: PAT_MRT4530_3138C.1.pep
HFRTLFPPQSIPLPSPPLPLGEWRGATKPPVAMDSTGGNSGKLFDGMHLCLSEQGSPRTQSPAAVDPSLDRSGVLLKSYVLLHTFLVVGDVCYGA

SEQ ID NO: 129101 - protein, 256 aa, Oryza sativa
  Clone ID: PAT_MRT4530_31390C.1.pep
MLTGLTHLDLSNTNFAGLVPAGIGRLTSLNYLDLSTTFFVEELDDEYSITYYYSDTMAQLSEPSLETLLANLTNLEELRLGMVMVNMSSNYGTARWCDAMARSSPKLRVISMPYCSLSGPICHSLSALRSLSVIELHYNHLSGPVPEFLAALPSLSVLQLSNNMFEGVFPPIIFQHEKLTTINLTKHLGISGNLPSSFSGDSSSQSLSVSNTNFSGTIPGSISNIRSLKELALGASGFSGVLPSSIGQLKSLSLYR

SEQ ID NO: 129102 - protein, 133 aa, Oryza sativa
  unsure (1)..(133): unsure at all Xaa locations
  Clone ID: PAT_MRT4530_31391C.1.pep
AADPVRARAXEXPXXSSRFRXTTXXSXTQEPXESGEXQXXXNFPCEEEXMGXQKYHXXGRXXXALXXIPRSPRSVCXLDVXDRXLIPFXSSSXGCXLPVCPQXGHXPXXXXSLFDEGHRXERSXSPXRMXXGX

SEQ ID NO: 129103 - protein, 169 aa, Oryza sativa
  Clone ID: PAT_MRT4530_31392C.1.pep
MEDADALQVLSLKDNHLTGELPDNIKEGCALSALDFSGNSIQGQLPRSLVACRNLEILDIGNNKISDSFPCWMSKLPQLQVLVLKSNKFIGQILDPSYTGGGNNCQFTKLQFADMSSNNLSGTLPEEWFKMLKSMIMDTCDNDMLMRDQHLYYRGKMQSYQFTAGISYK

SEQ ID NO: 129104 - protein, 101 aa, Oryza sativa
  Clone ID: PAT_MRT4530_31393C.1.pep
IVHFQVLLRLQLRYPAWLDGNGVMPALQLQGRWSDRLIRSVIIKVITTISVQIMIFTNTRYYHRSFKDHGCTAERCYVLRRSEDERVRLLPCCLSCALPSK

SEQ ID NO: 129105 - protein, 123 aa, Oryza sativa
  Clone ID: PAT_MRT4530_31394C.1.pep
MDQDLLSLYGQYQSTKVDHMDVEKALDFVMNWKHLFSISIYLVHIFVSCVLGRNSISKEKVLEDFFNLSLADSPRYLDLPPPRSKLSSPAPLAGPEASSPLTDSSDSVKMKVISQKIGLSKTS

SEQ ID NO: 129106 - protein, 141 aa, Oryza sativa
  unsure (1)..(141): unsure at all Xaa locations
  Clone ID: PAT_MRT4530_31395C.1.pep
YSRAAAGATLADSAQHGCGRGDDGRLRAGDAAARPLSLIWRDGGHDVGGSGAARLRAXGDGRLRVGGEEVAHAAAAPRPTRTNLXGSCTGDGGRGRDXATAGRRQGGGGSGRHSAPMRTTRPPQRRARTLMDMEEQRWRPP

SEQ ID NO: 129107 - protein, 121 aa, Oryza sativa
  unsure (1)..(121): unsure at all Xaa locations
  Clone ID: PAT_MRT4530_31396C.1.pep
RRRRRRRRGGRCGRRGSCAWCASRPXRRPCRRRCRGTTRRRWPGPPYGGPARPPATARASRAVPRGQSGGKSPPPPPPPPPXPPTSTSTEQPPPPPPPPPPPSPPATTKRTEHRRRNQHKN

SEQ ID NO: 129108 - protein, 200 aa, Oryza sativa
  Clone ID: PAT_MRT4530_31397C.1.pep
MGSDGPAHSKTTENSGRLGRRPQALDGRHELDTKDLNDLLRQPRGEGARTGSTGVGPTRQPHGPRWTGRTRITPTGAVGPRRQLHPRAWAADGRAIRGSRSVRPGEGRPLRLDRREAAPSPRWSPPATTGTAEQWPREGRERGKRTALFFTLPSSFFLGMVAPLDLAKTDYPIPGPALHGVQDFHWSLHVGQVFANFNLL

SEQ ID NO: 129109 - protein, 140 aa, Oryza sativa
  Clone ID: PAT_MRT4530_31398C.1.pep
MATPASEPAGAGTPEPAAPFSADWKERILLPAAVAGVVGAGFGLLSRHRARLGAARATVTYAVNLAIVAGCYGGARELARDARASTPDDPMNSVVGGLASGAVLGRLQGGHFGAVKYAVTFAAGGTALDYAALKLSPQIM

SEQ ID NO: 129110 - protein, 207 aa, Oryza sativa
  unsure (1)..(207): unsure at all Xaa locations
  Clone ID: PAT_MRT4530_31399C.1.pep
MARGPGPWEWGPRGSLTVHGGPDTPGLTPTGAVGPTRQLHPRARAADGRAPPGGHTARPEAATSAWPAGGVTTGNNPTGVPYVRAXNPCPRRQAAGRARRRPRRHSRREAXTRTPMVAADGDGSVPAIGDRNGEVDEVGEVAANPKKATPKREKLVFTLPSSFFLGVVAPLDLAKMDYPVPGPAFHCVQDFHWPLHVGQVFANFNLL

SEQ ID NO: 129111 - protein, 60 aa, Oryza sativa
  Clone ID: PAT_MRT4530_3139C.1.pep
HVILEPEGVADPSEDQDPQNYEQGKSSLFFKHVDPNCETILFTNKIACNDEHPTCDYAMP

SEQ ID NO: 129112 - protein, 106 aa, Oryza sativa
  Clone ID: PAT_MRT4530_313C.1.pep
MMVAAGPPNNESSGGDGNNEVIATWQAHPWQWQLRGVCNDGGLSTVVEATSSGDGKLISSGAFMSTTNCNGTTYFGSSWLDPPFLRPNLVTALTRVPWMAIVGLGT

SEQ ID NO: 129113 - protein, 73 aa, Oryza sativa
  Clone ID: PAT_MRT4530_31400C.1.pep
ARKPFLKLPFRERGKEFPQVSPAIQQFFEGKRTPGIAGLKTKVHPWGVGSRPFPKRGGTSFLLVVEAPSNRHM

SEQ ID NO: 129114 - protein, 38 aa, Oryza sativa
  Clone ID: PAT_MRT4530_31401C.1.pep
GELPNTLRLKKGVKVNGPKDGGAPEDYIQFEGEDIAKI

SEQ ID NO: 129115 - protein, 41 aa, Oryza sativa
  Clone ID: PAT_MRT4530_31402C.1.pep
MARWNTANNNNNDAEEACSKPRVGARAKACGLQIPSSSTTG

SEQ ID NO: 129116 - protein, 236 aa, Oryza sativa
  Clone ID: PAT_MRT4530_31403C.1.pep
MAAVAAAEQSAEQFRGQAKLLFLPVADAVPRLSSFRPPATDAATPGSDSSYPTPTSIPPPPTSLPSTPTPVAVWRTVASVDNASPPSRLRSGTPTALMPTAPLRLQIDAADAHHTHHQGYVFIKENKGKLEIRNSTVPISSRLYFECQQTYSCIMADITNKLLLPNYRRTIDDKLFQRKVPGGIMRGFFLMVLSSRRHFSYAGFEQQPKKFVSPKIRLLNIEQELKYEKENAEIRL

SEQ ID NO: 129117 - protein, 57 aa, Oryza sativa
  Clone ID: PAT_MRT4530_31404C.1.pep
KLCGFNRHSCGFCRYIRLAGFSSSTFCSAIFCFKKPSESLAVPFNYEKSGAPRGALF

SEQ ID NO: 129118 - protein, 164 aa, Oryza sativa
  Clone ID: PAT_MRT4530_31405C.1.pep
MAQVCRELRVPRGDPEESAAGYIPWLNGACTQLEGVGKRIDEALKQECRRSSRYAGGHVLACVRDHRPQLHLEFLHEGFTHSQRTPAEIDHLAKSMAPLAEKVFHRLSRTLSLAPSLVVGGYFSGDKALRPLTCLGSDKTLSALGVPSRGSLRFLGGLVRTVYG

SEQ ID NO: 129119 - protein, 760 aa, Oryza sativa
  Clone ID: PAT_MRT4530_31406C.1.pep
MWRLGVRGIFLAFPFLSKAKSTFWLLFFTHPSSSSLLSPNQSPSRILLLRKPSPDVVSDTQRLCLISARHLSSSSCCARACFFFPLSQRAVLGAGEAPRSPSSSSCDSAKSLEPGMAALMNGFGSLQCKATVHVEKGHMQASGMAFFSPVNRCAQVHISSIPHFIGAKSVSASQLRMRHKVGSIRASAASCLQDETTKYFDFVVIGSGVAGLRYALEVSKYGSVAIITKAEPHESNTNYAQGGVSAVLCPSDSVESHMQDTIVAGAYLCDEETVRVVCTEGPERVKELIAMGASFDHGEDGRLHLAREGGHSHNRIVHSADMTGREIERALLQAVDNDDNISLFGHHFAIDLLTCQSNGEIYCYGVDSLDAETQKAIRFISKVTLLASGGVGHIYPSTTNPPVATGDGIAMSHRAQAVISNMEFVQFHPTALSDEGLPIKPATRRENAFLITEAVRGDGGILYNQSMERFMTSYDDRAELAPRDVVARSIDDQLKKRGEKYVLLDISHKPREKVLAHFPNIAAECLRHGLDITQQPIPVVPAAHYMCGGVRAGLQGETNVKGLYVAGEVACTGLHGANRLASNSLLEALVFARRAVQPSIDHMVDADVDPSFAKKWARPVLSVSLRDSILSDIIEKTKQARMELQSIMWEYVGIVRSTNRLKHAEWKISDLESEWEEFLFRRGWKPTMVGVETCEMRNLFCCAKLVVKSALARHESRGLHFTEDFPYLEESKRKPTVIFPTHIQELTWSSKPLQKQLQCK

SEQ ID NO: 129120 - protein, 40 aa, Oryza sativa
  Clone ID: PAT_MRT4530_31407C.1.pep
CHTKIIRYTTRPLVLNPRLLSFRTILSSFHYPGAKPFELC

SEQ ID NO: 129121 - protein, 143 aa, Oryza sativa
  unsure (1)..(143): unsure at all Xaa locations
  Clone ID: PAT_MRT4530_31408C.1.pep
MRGAFPPFALPATEYATHNDSNVTNKQMHKQSLLQSHLLLQIQVLIPFFELLRQQHNILITPFCQPATFQLINNQLIQQQCCQQLKLVTQQSHYQAINSVHAIVHQLHLHHDDVFYFIRLXAQTQAMLDLNFPYIYGIYPNYY

SEQ ID NO: 129122 - protein, 508 aa, Oryza sativa
  Clone ID: PAT_MRT4530_31409C.1.pep
MAATPPSSQHRRPLSSSASAASLAGKPRGGGLLLGRYELGRLLGHGTFAKVYQARSADSGEPVAIKVLDKEKAMRHGLVPHIKREIAILRRVRHPNIVRLFEVMATKSKIYFVMELVRGGELFGRVAKGRLKEDTARRYFQQLVSAVGFCHARGVFHRDLKPENLLVDEHGDLKVSDFGLSAVADQFHPDGLLHTFCGTPSYVAPEVLARRGYDGAKADIWSCGIILFVLMAGYLPFHDQNLMAMYRKIYRGEFRCPRWFSKDLSSLLNRILDTNPETRITVKEVMESRWFQKGFRPVRFYVEDDQVHSLADGDNDMPELEPSEPPPPPPFPPPPPQQDDDGEESGWESDSSVASCPATLSSEERRQRPLGSLTRPASLNAFDIISFSKGFDLSGLFEERGSEVRFISAEPMQTIITKLEEIAKVKSFFVRRKDWRVSIEGTREGLKGPLTIGAEIFELTPSLVVVEVKKKAGDKEEYDDFCNRELKPGMQHLVHHMGSVPNIPSDTE

SEQ ID NO: 129123 - protein, 523 aa, Oryza sativa
  unsure (1)..(523): unsure at all Xaa locations
  Clone ID: PAT_MRT4530_3140C.1.pep
LDSAAPTAAVARRVLAAVAARARKRLSSPASLDAIPPNPAQGVDSRSRVDALTAGNRPLVTLSLFPPFLSAGCRRRNPPPSNIPVCSPSRRLVFPSAWLAYYAAAVGRLRLHRRPASVAAEWCLRLHGWPIMPPLLGVYDFTAGLPPSPPIGASAYTAGLLCRRCWASTTSPPACLHRRRLVPPPTRSVGHTTVDGHRHLHRRPASVAADWCLHLHGWPIMPPLLGVYDFTAGLPPLPPSGASVCMAGLLSRRCWASTTSPPACLRRRRLVSPPIRSVGHTTVDGHRHLHRRPXPSSPPTGVFIVIDGRLCSHIGHFCHHQGEYYKAKIQIQICIKGIHGFKLISYAPGMDQSEHHHRLASTAADWCFRLHGWPIMPPLLGVYVFTDRLAFAAANWCFRLHGWPIMPPLLGVYVFTDRXPSPPPTGVSACTAXYYAAVVGRLRLHRPAASTAADWCFRLHGWPIMXRCWASTSSPTGRLVRRRLVLPPARLTYYXPLLGVYVFTDRPPHPPLTGVTACTAGLL

SEQ ID NO: 129124 - protein, 101 aa, Oryza sativa
  unsure (1)..(101): unsure at all Xaa locations
  Clone ID: PAT_MRT4530_31410C.1.pep
GHHLMLLSPTRFXFPLSSPLLSIXSAATLHHSNSPTPPPSQXMAAAAAVRSVAISLFVVALAVAAFAWSPSSLAGGAXPTCGLEEVAAPPGXARRGHXRIW

SEQ ID NO: 129125 - protein, 78 aa, Oryza sativa
  unsure (1)..(78): unsure at all Xaa locations
  Clone ID: PAT_MRT4530_31411C.1.pep
CSLSLSIPLPPQPPPTRRGGARLGCGGGGGVGHGGGGGGEWTXKXHLTSEQYKRLSDNTEPPNGQREHEPSRSRRGND

SEQ ID NO: 129126 - protein, 504 aa, Oryza sativa
  unsure (1)..(504): unsure at all Xaa locations
  Clone ID: PAT_MRT4530_31412C.1.pep
MATDASPKPAPPRLNVPPAMAGGLRLDPAVASPARLLLDVPKTPSPSKTTYSDRFIPCRSSSRLHNFALLDRDRASPSSTTDDAPYSRLLRAEIFGPDSPSPAPSSPNTNLFRFKTDHPSPKSPFAASAAATAGHYDCTAGSAESSTPRKPPRKVPKTPHKVLDAPSLQDDFYLNLVDWSSQNTLAVGLGNCVYLWSASNCKVTKLCDLGPRDSVCAVHWTREGSYLAIGTSLGDVQIWDSSRCKRIRNMGGHQTRTGVLAWSSRILSSGSRDKNILQHDIRVPSDYISKFSGHRSEVCGLKWSHDDRELASGGNDNQLLVWNQRSQQPILRLTEHTAAVKAIAWSPHQQGLLASGGGTADRCIRFWNTVCNLAWCKNVNXACEHSWVFPKPNHGVEVPIYVKGCYSNWTHAASALPCNVTXGQTIVTGAGDETLRFWNIFPSMKTQIGAELPMQMQEAIQSSIQFKCNQIEMECESNYSKEQRLNGDSLVFDLDDRRRRRLID

SEQ ID NO: 129127 - protein, 49 aa, Oryza sativa
  Clone ID: PAT_MRT4530_31413C.1.pep
GEKSRLVVIKKAGHAVNLEKAKEVAKNIVEYLQEPILSPLNGEKEVQLH

SEQ ID NO: 129128 - protein, 60 aa, Oryza sativa
  unsure (1)..(60): unsure at all Xaa locations
  Clone ID: PAT_MRT4530_31414C.1.pep
LWKVTYLXRVTEVVCAGARVARRGYCEVGAGSAPVSGQALLLVHIVWLFVLGAAVLLGFL

SEQ ID NO: 129129 - protein, 340 aa, Oryza sativa
  Clone ID: PAT_MRT4530_31415C.1.pep
MAKPRASAAAAKAPASTPPKTVHSALVTYASMLSLLSLCPPFVILLWYTMVHADGSVVRAYEHLREHGVLEGLKAIWPMPTMAAWKIIFGFGLFEAALQLLLPGKRFEGPVSPSGNVPVYKGHLAPSSSDSGSSGNVIIDFYWGMELYPRIGKHFDIKVFTNCRFGMMSWAVLAVTYCIKQYEMNGRVADSMLVNTALMLIYVTKFFWWESGYWWGLSRHFHYVPEILSAFFWTVPALFDHFLPYFYVIFLTILLFDRAKRDDDRCSSKKISPSRENPSTGDLVCDSCTAARVVWSEATGPEISTTDAAATVVNQEGCSRQYHIGRGLSITSCQCFVTAK

SEQ ID NO: 129130 - protein, 57 aa, Oryza sativa
  Clone ID: PAT_MRT4530_31416C.1.pep
FQRILGVLSFFFLFFSVHTCICFQSFLAAGSLQSPAPHQVTYPHLAVTHLRICKVLS

SEQ ID NO: 129131 - protein, 210 aa, Oryza sativa
  Clone ID: PAT_MRT4530_31417C.1.pep
MAKPRASAAAAKAPASTPPKTVHSALVTYASMLSLLSLCPPFVILLWYTMVHADGSVVRAYEHLREHGVLEGLKAIWPMPTMAAWKIIFGFGLFEAALQLLLPGKRFEGPVSPSGNVPVYKANGLQAYAVTLITYLSLWWFGIFNPAIVYDHLGEIYSALVFGSSEFCIFLYIKGHLAPSSSDSGSSGNVIIDFYWGMELYPRIGKHCDI

SEQ ID NO: 129132 - protein, 155 aa, Oryza sativa
  unsure (1)..(155): unsure at all Xaa locations
  Clone ID: PAT_MRT4530_31418C.1.pep
AYRPPRGIAQDQEKSDALKIQMEELRTNVQGVEDKIRRTEKSLADLRRLQQEINSSTSARTTYFTLQQQQYAALSEENEDTDDELKEWQTKFEGXMALLQNKVSKLERDVDDENTTSSFLSKAINDLMRETGRLQAEADAHMSVKHERDSAIRKI

SEQ ID NO: 129133 - protein, 108 aa, Oryza sativa
  unsure (1)..(108): unsure at all Xaa locations
  Clone ID: PAT_MRT4530_31419C.1.pep
PGGVLGGLAPPPPQSRRQGFVLGGGPFSLPAPPDTPASSPPTFSPPPWAFFVPGXRVFCNPSPLVRAPPPRGLRLFGFAPPVLRGAPWGILPFGPRRWGPPPPCSCDE

SEQ ID NO: 129134 - protein, 691 aa, Oryza sativa
  unsure (1)..(691): unsure at all Xaa locations
  Clone ID: PAT_MRT4530_3141C.1.pep
ILSYFVDTEWIAFVAADWCLRLHSWPXLCRRCWASTTSPSACLRRRRLVPLPTRLASYAAVVGHLRLHRQPPSAAADWCLRLHGWPIMPPLLGVYVFTDRPPRLPPTGVSACTAGLLCRRXCWASTSSPTGLPSPPPTGVSAYTAGLXYAAVVGRLRLHRPACLRRRRLVSPPTRLAYFAXPLLGVYVFTDRSSRLPPTGVSACTTGLLCLXVVGRLRLHRPACXTAADWCLRLHGWPIMPPLLDVYVFTDRLAFTAADWCLRLHGWPIMPPLLGVYVFTDRLAFAAADWCLRLHGWPIMPXRCWASTSSPTGXLRRRRLVSPPTRLAYYAAVVGRLRLHRPACXAAADWCLRLHGWPIMPXLLGVYVFTDRXPSPPPTGVSAYMAAYYAAVVGRLRLHXPAASSTADWCHRLHGWPIMPLLLGVSVFTDRPPRMTPTTTTTDGHHRFHCXAALSDADWLVHLHGRTLSSSFYFFRRRLXFVTMVERLHLYYLRHRQTLLPLLRKLCYFTNHDDYKSFNTLAYVNKYNAMLFYYNKWCSNIQXISTRTSSMRIFTQAMTNRRQEATVLDSMFSCFSTNQRVGGYTNTRLFSFDELDNSIYFPPIIXLHGXPTMQTLMSVFVIIIGCYTAIDWIIDIVIFINIPLQHSLFNIAYSIAVXDGQLRHHSRSSLLLLIIITVGCVCRRRLFSSSS

SEQ ID NO: 129135 - protein, 57 aa, Oryza sativa
  Clone ID: PAT_MRT4530_31420C.1.pep
MAWSLALGKMMLRWRHAMICLEVPNLGGSGSSSILTFEKAGVLEDDVVASLEGATRE

SEQ ID NO: 129136 - protein, 163 aa, Oryza sativa
  Clone ID: PAT_MRT4530_31421C.1.pep
STGLCRSHHTGYGGAQASLQIHVGREGERQETANNLVAERLKALLPSLVVARELGPLRPLIVEERRHGAGTRSGRRGDNRRLHGLLRRLELEEKDDRRVETERRQHNLVVLGENGADLGLETGRRRTAVAVAAAHEAGLQVLGTRLGGRGRLLEQVEHGDSLA

SEQ ID NO: 129137 - protein, 353 aa, Oryza sativa
  Clone ID: PAT_MRT4530_31422C.1.pep
MASSSSAASGKSRPECINSSNPFHECSDYCLRKIAEAKERIEDEQRPPVDRTVHPDCINASNPYHVCSEYCFKRIADAKSGLERAEQEPPSADAGKSDAAQAEGGGGDDDAEQEDAGSDDGYPQMTEKQKKLFELRLKMNEAMKAFLFLVLQNEARKANQQAMVAEKKRMEPRAESRGVSKQKWLEDRKKKIGKLLDSNGLDMTKSYMLDTQESAEAKYKKWEKEPAPYGWDVFNQKTLYDAYKKRTKNIEVDMEAYNKAKEADPEFYRDASSLQYGKVSKVPEENIDRMVNELKERDEKRKAFSRRRKFHEDKDIDSINDRNEHFNKKVERAFGKYTLEIKNNLERGTALPD

SEQ ID NO: 129138 - protein, 203 aa, Oryza sativa
  Clone ID: PAT_MRT4530_31423C.1.pep
VDRTVHPDCINASNPYHVCSEYCFKRIADAKSGLERAEQEPPSADAGKSDVGEGGGGDDDAEQEDAGSDDGYPQMTEKQKKLFELRLKMNEARKANQQAMVAEKKRMEPRAESRGVSKQKWLEDRKKKIGKLLDSNGLDMTKSYMLDTQESAEAKYKKWEKEPAPYGWDVFNQKTLYDAYKKRTKNIEVDMEAYNKAKEADPE

SEQ ID NO: 129139 - protein, 37 aa, Oryza sativa
  Clone ID: PAT_MRT4530_31424C.1.pep
KKTSRIPVYPITLLRMFGSDINLLCDGWRKIIMKLLC

SEQ ID NO: 129140 - protein, 52 aa, Oryza sativa
  Clone ID: PAT_MRT4530_31425C.1.pep
MARDGAALNPRWLGREPPQSAAAAAAADWDAEKRRQREKGDGGRLTMDPYVD

SEQ ID NO: 129141 - protein, 414 aa, Oryza sativa
  Clone ID: PAT_MRT4530_31426C.1.pep
MAKLGDPSTRPEEEYFIPTPHATEVELKDWESTAIIPWAAKAPASITPRDVEAIFKEEFHLREADVFVSRHHPEAFLIKFEHQRHCVEALRKGFVKRHGVELHYVKWRSLKSALGVALMFRVRLYLDGIPRHAWEADIVERTVAKTCALESIETSLIHPPDTRWISVWAWTGNPSSIPKRIWLIFTNSTRGKKPGLVSFSDKPLERWQHGVKYCVYVHLKEIHDYTSATVTLDENAAVTPAKRRLPPWHLGVADGEPAPERVFPQFPHHPPPPQGLFHPGAGRDEGGKMEKDRGSRNRGDRRNVDRRDVNRRGRDDDTRDRFGRERDGRDKDSRRHYNDDHPDFDRGLGWRRRDDDEARRENVIDVIRIARHTTQCVVRHRTRSDRAVGDSLHYCHAVNIRTGLMDALVLITEP

SEQ ID NO: 129142 - protein, 305 aa, Oryza sativa
  Clone ID: PAT_MRT4530_31427C.1.pep
MGCSSSRDVRGGAAKPPAVAAPAAESRRHSLRPSRTALVLTSLAFCRGRRDDAVHAYSSLPLEEPPAKGAHVSVDFDFRALPGEEDAKRGLKAALEDAAPARRCASFNASSPPAAAKEAEVRALPGFDQGIMSGLRGIVAAEPSRSPERENPTTPKASEEEAAAAAAAFDDMGTPAARDIPEFREKIEKKRKAVKAADKKALDVAPPPPRRPERVTKASAVVVVYFTSLRGVRRTFEDGRAVRAILRGHRVRVDERDVSMHAAFRAELRGLLGDGFAGPPPLPRVFVGNGRHDLGVDSKIWSFHS

SEQ ID NO: 129143 - protein, 314 aa, Oryza sativa
  Clone ID: PAT_MRT4530_31428C.1.pep
MAQRHERWMAKHGRAYADDAEKARRLEVFRDNVAFIESVNAAASQHKFWLEENQFADLTNAEFRATRTGLRPSSSRGNRAPTSFRYANVSTGDLPASVDWRGKGAVNPVKDQGDCGCCWAFSAVAAMEGAVKLATGKLVSLSEQQLVSCDVKGEDQGCEGGLMDDAFDFIIKNGGLAAESDYPYTASDDKCATAGAGAAAATIKGYEDVPANDEAALLKAVANQPVSVAIDGGDRHFQFYKGGVLSGAAGCATELDHAITAVGYGVASDGTKYWLMKNSWGTSWGEDGYVRMERGVADKEGVCGLAMMASYPTA

SEQ ID NO: 129144 - protein, 75 aa, Oryza sativa
  unsure (1)..(75): unsure at all Xaa locations
  Clone ID: PAT_MRT4530_31429C.1.pep
DERNPNHLEILFTFESYVCNRNYLYFHALVISALMMSHCSSPTLQQENIFIMSEQNSVLFFDHQEIXFLIYTWWX

SEQ ID NO: 129145 - protein, 39 aa, Oryza sativa
  Clone ID: PAT_MRT4530_3142C.1.pep
FVGSFKLQGNSASLIPTITILSRLTAQYKYSNLLESHLL

SEQ ID NO: 129146 - protein, 44 aa, Oryza sativa
  Clone ID: PAT_MRT4530_31430C.1.pep
RHSCVVFMGSQVPCLFVRYFMYSLYVPLFSLWFISSRCYLVPSL

SEQ ID NO: 129147 - protein, 229 aa, Oryza sativa
  Clone ID: PAT_MRT4530_31431C.1.pep
MEKVKGLLKPRPTPQQQLREWQRKLRNECRVLDRQIRDVQREEKNVEKSIREAAKRNDIGSAKALAKELVRSRRAVNRLYENKAQLNSVSMHLGEIVATARTVGHLSKSAEVMKIVNNLMKAPELAATMQEFSKEMTKAGVMEEMVNDAVDSALDSEDMEEEIEEEVDKVLASVAGETASQLPDAVRKQRINQASTSRVPEERQAVAEGADDDEEDLEEIRARLAKVRS

SEQ ID NO: 129148 - protein, 162 aa, Oryza sativa
  Clone ID: PAT_MRT4530_31432C.1.pep
NTMAMRMWLLLLVVARRNRKRKRDGNGGGGIFSKLMSGSPDSLPASVEAEENEREGGDQGGEKAGILSTVASKIGIAMSGADGRENHGNEDDAKIRNGNAADHGKAEEKRDEPNGGGIVKQIMSNLPAGTVHHCQSLAAICTCSDHKTDLQQVLCFRQILFL

SEQ ID NO: 129149 - protein, 90 aa, Oryza sativa
  unsure (1)..(90): unsure at all Xaa locations
  Clone ID: PAT_MRT4530_31433C.1.pep
TNPENDPFXGVRVDGAIVQQEGASLSGAVLLPPWRVDAEKHTRINHRKVKLKWMKYVTCKIFQSSTEKLLALKTQSCKRNLEVLISPNPE

SEQ ID NO: 129150 - protein, 112 aa, Oryza sativa
  unsure (1)..(112): unsure at all Xaa locations
  Clone ID: PAT_MRT4530_31434C.1.pep
EGIYIRKLAYNAYFMWSIKFAPWKXIWKSWASXRCKLFTWLAXNNWCWMVDRLAKRGLSHPNACPFCDQDDESIRHFLISCVFPRHVWTCILQKLNMLASVPRSTACLSSWW

SEQ ID NO: 129151 - protein, 102 aa, Oryza sativa
  Clone ID: PAT_MRT4530_31435C.1.pep
MKTISPSLPLSGGSIDYPRGTGRLPVRIDLAGHRCYPSSPRCGLTLRIYGQCGGARGDTNDMYKLCADMAMQRGDEEEWAAGEDIGHDAAEQPPINEEVILP

SEQ ID NO: 129152 - protein, 831 aa, Oryza sativa
  Clone ID: PAT_MRT4530_31436C.1.pep
MVIERMEARWKERAKFWFTLNPTVRSSSVPGNQGINSTILPSAATLEGCPRSCGNLSFDYPFGIGSGCFRNPDFNLTCDNTAQPPRLFLQGGTEVIEDIDAIVYGSTSNYLFMYVTVDFSHAIPVSPGTKDYNMSWKAPGRSFTLDNALLNITGCDFDIYLLDQDRNSAVRLCTVTCPNEEITEKVARQNCNGTGCCTIELFEATLSAFQFKFVQHSKGGLEAQTNRSSLWDRINITTIYASLSWSIVDQPTCASTRDNRTNYACASSKSKCCESYGLPDLGYLCGCDSGYWGNPYIPNGCQRDNGYIPAQQKANCSRSCGNISVPFPFGLEEGCFARKLFQLNCTSATSSSLQFDDEHQVTYINISEGLVGIRYTSNYEQEEFKVYVPKQPDLYIGSGESSSVRWAVANLTCQEAKQNYSGYACVSINSTCLGVNSTDGYIGYRCKCLPGFQGNPYVQNGCQGIIIGLSVGFGILLVSLSATFICRRWKRDIQKQLRRKHFQKNQGLLLEQLILSDQNATDKTKIFSLEELEKATNNFDSTRILGRGGHGMVYKETEVPLLVYDFIPNGSLFGVLHSGSSSDFSLSWDDCLRIAVEAAGALCYLHSAASVSVFHRDVKSSNILLDVNYTAKVSDFGASRLVPIDQTHVVTNVQGTFGYLDPEYYHTGQLNEKSDVYSFGVVLVELLIRREPIFTTVSGSKQNLSNYFLWELKVKPIKEIVAAYVHEEATEDEINSVASLAEKCLMLRSEDRPTMKQVEMTLQFLRTKKLNSCHATPENDEELQQLLPRRSEASCEQVAVNLGNSANSESRNSLKCYSLEQEFISSVGLPC

SEQ ID NO: 129153 - protein, 387 aa, Oryza sativa
  unsure (1)..(387): unsure at all Xaa locations
  Clone ID: PAT_MRT4530_31437C.1.pep
PCCPSHAKPTPLLLLPQPCVHAARVSRVHAAVPPLCPASFSLKPSTPNACAAPTPTASPQCRLLLSFSPKPPSSLPSPRSHCNRIRHKRHLTHHPPPFASHSPPPPLPPRHRPEHRPAHGRRLRDPLPPLPPPQKPPXSRRLHPPPGWRRAAPAVVVAPWPPPPSSAPRPPRPLRQPPSSPPCLDRAAAPPGLSTEGATASSRAVSQAPTAGPLSTAPPPSPAYKMLPTPPLSRFPQLPSFPAPEIMLATPSLCTATCCRTPVAASRRPSHRRAVPPPPPSLATARPQLRFPPPQPKHCPLHPPPAGHCRHPSHRHPMRPPPPTPPRPDAPRPPLRRTQSLPQPSPPCQGELYPMSPLSAVILGCPSPSTEATEAPSAPSSRGRRRH

SEQ ID NO: 129154 - protein, 54 aa, Oryza sativa
  Clone ID: PAT_MRT4530_31438C.1.pep
ISAVMNSESLIKINRKAVVSRPYFFPKIHILLKKFSRRLAPNELALINWQTYKQ

SEQ ID NO: 129155 - protein, 108 aa, Oryza sativa
  Clone ID: PAT_MRT4530_31439C.1.pep
CQQLQAQCKPIIGSSSCRTDVSTCSWATAGHTLTFSSSRSNSYSWSHTFRCSSFDIPLSPLTSYCAIAPELAVLDVAASKKVLVVAKAGTAGHNTDSPHRGCALTSPP

SEQ ID NO: 129156 - protein, 632 aa, Oryza sativa
  unsure (1)..(632): unsure at all Xaa locations
  Clone ID: PAT_MRT4530_3143C.1.pep
MSSPTGWPSPPIGASAYTAGLLCRRCWASTTSPPACLRCRRLVSSPTRLAYYAAAVGRLPLHRRPASVAADWCLRLHGWPIMPPLLGLRRRRLVSSPTRLAYYAAAVGRLRLHRRPASVAADWCPRLHGWPIMPPLLGVYDFTAGLPPSPPIGASAYTAGLLCRRCWASTTSPPACLRRRRVVPPPTRLAYYAAAVGRLRLHRRPASVAAEWCHRLHGWPIMPPLLGVHDFTAGLPPLPPSGASAYTAGLLCRRCWASTTSPPACLRCRRVVPPPTRLAYYAAAVGRPRLHRRPASVAAEWNGSVXNITPGSPRPPPTGVSACTAGXLCRRCWASTSSPXPACLRRCRLVFPPARLAFMPLLLGVYVFTDRXASSAADWCFRLHGWPLCCRCWASTSSPTGXLRRCRLVFPPARLAFMPPLLGVYVFTDWLAFAAADWCFRLHGWPLCRRCWASTSSPTGXPRLPPTGASACTAGLYAAVVGRLRLHRPACLRRRRLVFPPARLAXMPPLLGVYVFTDRPPRPPPTGVSACTAGLXYAAVVGRLRLHRPACLRRRRLVFPPARLTFMPPLLGVYVFTDRLAFAAADSCFRLHGWPLCRRCWASTSSPTGLPSPLPTALIGLIFFTAGRLVCC

SEQ ID NO: 129157 - protein, 116 aa, Oryza sativa
  Clone ID: PAT_MRT4530_31440C.1.pep
LIFIFGKPQGLHRGSANWEKHLPLKRGGFTNWGGPNKHGWVSTKKRGYDHFFMNQERLRKAWPWGPFFLGLPPLGGLKMGPASLWVPHVKKGGTLLSFFWGGAPPKDWSAPGGGGK

SEQ ID NO: 129158 - protein, 290 aa, Oryza sativa
  Clone ID: PAT_MRT4530_31441C.1.pep
MCRTTGFAPIVELFALLFTASASTKDVHTPAGPKKSVFGSKWLYIDNPCAANSDNAGRLRFRHLHISINSKPNVDDWGIEVKEDKKKLGLPSLVFPEWTNQADTNKIIGGLTTAEYGWLLQCQLDGRANQVHDGELPAWVNPAKVDEGASASKKCKRAVPKAVPGAKKLPMATPLLAPAHLRFAKRTSRGENSSGDRQGYAEERWSKWREEAGEGRDEGRGVDSLRFHGQRVLFAKHAHFASAPSSRDKECGVAVAKDGCEVWRKDGPWAAMASAESKWNNMILKLQDPN

SEQ ID NO: 129159 - protein, 251 aa, Oryza sativa
  unsure (1)..(251): unsure at all Xaa locations
  Clone ID: PAT_MRT4530_31442C.1.pep
MAPRKPTQDGAIDDGPGSLGNNWTCYLGKSKVNDSDVAAMVLVGVTAEGHASQPSNDIVLAPGDGRTVVFASFFDVDFWLPCDNFLPSMCRTTGFAPIVELFALLFTASASTKDVHTPAGPKKSVFGSVNFNLRPERSDSWPKWLYIDNPCAANSDNAGRLRFRHLHISINSKPNVDVIGTLEXRLILLRKVARRLSTRDLCKKHCMLRIAPLAQDWGIEVKEDKKKLGLPSLVFPEWTNRKPFATDRVSF

SEQ ID NO: 129160 - protein, 141 aa, Oryza sativa
  unsure (1)..(141): unsure at all Xaa locations
  Clone ID: PAT_MRT4530_31443C.1.pep
WGGDRRRKXMAAADTGGDGNGGPTTPDHGGAAAEGRQDLGKLLERLGREIGDRSGENTTPERRGMVGLTGDREIPRSGGFPAMNNGDRGAARRCEARGEDGATRRRXGDGGGGSGCTVEAVLRGWKREMEWMPRCARWLRC

SEQ ID NO: 129161 - protein, 543 aa, Oryza sativa
  Clone ID: PAT_MRT4530_31444C.1.pep
MSYDVVVVGAGPAGLAAAIRLKQLCRDADTDLSVCVLEKGSEVGAHVLSGNVFEPRALDELIPKWRQEDTPIRVPVSSDKFWLLTKNKAWTLPSPFDNKGNYVISLSQMVRWMASKAEELGVEVYPGFAASEILYDENQIVTGVATNDVGIAKDGSKRETFQPGVELRGDYLENAGRMTLLAEGCRGSLSEKIIRNHKLRESGQGQHQTYALGIKEVWEIEEGKHKPGSVIHTVGWPLDSKTYGGSFMYHLDDRQLAIGLVVALNYQNPFMSPYDEFQKFKQHPAVRTILDGGTVLQYGARTLNEGGFQSIPNPVFPGGAIIGCSAGFLNVPKIKGTHTAMKSGMLAAEATFKTLVEGSSMELYWENLKKSWIWEELYRARNYRPAFEYGFIPGIALSALERYVFKGKSPFTLKHGIPDHEATDMASLHSPIQYPKPDGQISFDVPTSLYRSSTNHEHDQPPHLRLRDPTVPERVNLPLYAGPESHYCPARVYEYVTDEKGDQKLHINAQNCLHCKACDIKDPKQNIEWTVPEGGGGPGYTVM

SEQ ID NO: 129162 - protein, 58 aa, Oryza sativa
  unsure (1)..(58): unsure at all Xaa locations
  Clone ID: PAT_MRT4530_31445C.1.pep
WRRLWSKNGARRRVVQAPGQRRLRXRVQGEDYLSKEDDFVLTSSPPRGPRKPFRPIKP

SEQ ID NO: 129163 - protein, 98 aa, Oryza sativa
  unsure (1)..(98): unsure at all Xaa locations
  Clone ID: PAT_MRT4530_31446C.1.pep
PQPRCNDPTPQXSVDNCMAQQLDGTNNEXGWCKHKLDANAIMTESLAISKXAISEHPLYQHIAYLAGYKHXVCTVPAFNVINXDGSHAGYKLAMQEFM

SEQ ID NO: 129164 - protein, 386 aa, Oryza sativa
  Clone ID: PAT_MRT4530_31447C.1.pep
MIRCTRDGHVDRKPDDHELEGKTADQTADEQDDGTAEGIQEEGQGAGEAKQDAGGKEGIMPNKAIGDGAKHRPKTSEAQPTLLQQSVGQEIIQSYNKDAHAIQLLIELAICPTARPHFTLQQGVIKYKGRIWVGDLTELQDKLIDALHDSPMGGHSGFPATYQRVKSLFAWTGMKKKWFQQRKLMQQLLQHHLNRAQQQMKHMADKKRSFREFQVGDWVYLKLQPYVQSSVAVRANHKLAFRYYGPYQILHRVGAVAYKLLLPAATTDATWEDMQDLHSRFPHAPAWGQADFQAWGLVRPPLKTQDCHNHRKPDDHELDGKTADQTADEQDDGTVEGIQEEGQGAGEAEQDAGGEEGIVPIQETAPSIGPRRRRPNPRYFGNQWAK

SEQ ID NO: 129165 - protein, 466 aa, Oryza sativa
  Clone ID: PAT_MRT4530_31448C.1.pep
MRKSWGLGRPSGDRRWLLPFAASLLVSATLFLAAACGLFSPPSLADGDDDSILIDVATWDTASAAESEIKNRLLDSNSDSDDGDNPDDAAVNSDASSADPPRIAYLLEGTKGDGARMRRALQAIYHPRNQYILHLDLEAPPRERIDLAMYVKGDAMFSEVGNVRVIAKGNLVTYKGPTMVACTLHAVSILLKEGLEWDWFINLSASDYPLVTQDDILHVFSSLPRNLNFIEHMQLSGWKVISRAKPIVVDPGLYLSKKFDLTMTTERRELPTSFKLYTGSAWIMLTKTFLEYCIWGWDNLPRTLLMYYVNFISSPEGYFHTVICNSDEFRGTAVGHDLHYIAWDYPPKQHPNMLSMKDFNKMVKSGAPFARKFPKDDKVLDKIDRELLHRSEGQFTPGAWCDGSSEGGADPCSSRGEDSVFEPSPGAERLRGLMKKVLSWDYRNGSCSSLGYDQTKRDWYVPKGRG

SEQ ID NO: 129166 - protein, 91 aa, Oryza sativa
  unsure (1)..(91): unsure at all Xaa locations
  Clone ID: PAT_MRT4530_31449C.1.pep
HIMASSDTPTHEETLSFEPSVWGDFFINYEPQPLQRSEGWMQERAEKLRGQIRTLFGTCHDMSARMNLVDSVQHLGINHLXPREIEDALTS

SEQ ID NO: 129167 - protein, 1012 aa, Oryza sativa
  unsure (1)..(1012): unsure at all Xaa locations
  Clone ID: PAT_MRT4530_3144C.1.pep
MESAPATTTSSSTQHGGGGGHIFLLAFPEAHGHVNPILQLGRHLAAHHGLLPTLVTTRHVLFTLPPPPAPFRVAGISDGFDFGGMAACGDAREYTRRLAEVGSETLRALLRSEADAGRPPRVLVYDPHLPWAGRVARGACVPAVAFFSQPCAVDVIYGEVWAAIDAGHGLEASQLSGRSAASPLRRLVLATAIADNNNDFTAGLPPSPPIGASAYTAGLLCRRCWASTTSPPACLRRRRLVPPPTRLAYYAAAVGRLRFHRRPASVAADWCPRLYGWLVTPPFMGVHASAYTAGLLCRRCWASTTSPPACLRRRRVVPPPTRLAYYAAAVGRLRLHRRPASVAAEWCLRLHGWPIMPPLLGVYDFTAGLPPSPPIGASAYTAGLLCRRCWASTTSPPACLRRRRLVPPPTRLAYYAAAVGRLRFHRRPASVAADWCPRLYGWLVTPPFMGVHASAYTAGLXMPPLLGVYDFTAGLPPSPPIGASAYTAGLLCRRCWASTTSPPACLRRRRLVPPPTRLAYYAAAVGRLRLHRRLASVAADWCLRLHGWPIMPPLLGVYDFTAGLPPSPPTGASAYTAGLLCRRCWASTTSPPACLRRRRLVSPPIRXLVTPPLMGIVIFTXRPASIAADWCLRLHGWPXLCRRCWASSLSPSTAFVAADWCLHCYXGRLCSHEWISQNITTGXPRPPPTGVFACTVGLXYAAVVGRLRLHRPACLRRRRLVFPPARLAXMPPLLGVYIFTDRPPRPPPTGVSACTAGLXMPPLMGVYVFTDRPASIAADWCFRLHGWPXLCRRCWASTTPPPACLHRRRLVFPSARLAYYAVVVGRLRLHHRPASIAADWCFRLHGWPXLCRRCWASTXSTTGLPPSPPTATTTDGHHHLPSPTDYAAADLCFYLHNCASSLPVCFCCRRLVFTSLRQYNFVIMVERLHLYYLRHRQTLLLLLRKFYYFTNHDVFVNLDISACNAMLFYYNKWLSNIQDFYLDIFNTYLQSSNDYSTTRSYSSRLYVQLFPN

SEQ ID NO: 129168 - protein, 44 aa, Oryza sativa
  Clone ID: PAT_MRT4530_31450C.1.pep
CMMFRIRYTRRISARLTPPTPMTDSHRLQITIWNPQFDRATWIP

SEQ ID NO: 129169 - protein, 988 aa, Oryza sativa
  Clone ID: PAT_MRT4530_31451C.1.pep
MESGVPPCAACGDDAHAACRACSYALCKACLDEDAAEGRTTCARCGGEYGAPDPAHGQGAVVEEEVEESHEPAAGGVRERVTMASQLSDHQDEGVHARTMSTHARTISSVSGVGSELNDESGKPIWKNRVESWKEKKKEKKASAKKAAAKAQAPPVEEQIMDEKDLTDAYEPLSRIIPISKNKLTPYRAVIIMRLVVLGLFFHYRITNPVYSAFGLWMTSVICEIWFGFSWILDQFPKWCPINRETYVDRLIARYGDGEDSGLAPVDFFVSTVDPLKEPPLITANTVLSILAVDYPVEKISCYVSDDGSAMLTFESLAETAEFARRWVPFCKKYSIEPRAPEFYFSQKIDYLKDKIHPSFVKERRAMKRDYEEYKVRINALVAKAQKTPEEGWIMQDGTPWPGNNPRDHPGMIQVFLGETGARDFDGNELPRLVYVSREKRPGYQHHKKAGAMNALVRVSAVLTNAPYILNLDCDHYVNNSKAVREAMCFMMDPSVGRDVCYVQFPQRFDGIDRSDRYANRNVVFFDVNMKGLDGLQGPVYVGTGCCFYRQALYGYGPPSLPALPKSSVCSWCCCCCPKKKAEKSEKEMHRDSRREDLESAIFNLREIDNYDEYERSMLISQMSFEKSFGLSSVFIESTLMENGGVPESANPSTLIKEAIHVISCGYEEKTEWGKEIGWIYGSVTEDILTGFKMHCRGWRSIYCMPIRPAFKGSAPINLSDRLHQVLRWALGSVEIFLSRHCPLWYGYGGGRLKWLQRLSYINTIVYPFTSLPLIAYCCLPAICLLTGKFIIPTLSNAATIWFLGLFISIIVTSVLELRWSGIGIEDWWRNEQFWVIGGVSAHLFAVFQGILKMIAGLDTNFTVTAKATDDTEFGELYVFKWTTVLIPPTSILVLNLVGVVAGFSDALNSGYESWGPLFGKVFFAMWVIMHLYPFLKGLMGRQNRTPTIVVLWSVLLASVFSLLWVKIDPFIGSSETTTTNSCANFDC

SEQ ID NO: 129170 - protein, 79 aa, Oryza sativa
  Clone ID: PAT_MRT4530_31452C.1.pep
KNTFCLIPSRLVNAILHPTQFPTFLFPFGSGPRLFLGPPFSFFKAKTALFLTLPPFSFPPSSPFVPPPFPVCAFFPLQG

SEQ ID NO: 129171 - protein, 69 aa, Oryza sativa
  unsure (1)..(69): unsure at all Xaa locations
  Clone ID: PAT_MRT4530_31453C.1.pep
FYERLLSLNNERTNFHVFSPHSIYKHSYYMQDEELAQHQVSMXAXXCSYLXXKNXFXSPSXFGTQVLTG

SEQ ID NO: 129172 - protein, 40 aa, Oryza sativa
  unsure (1)..(40): unsure at all Xaa locations
  Clone ID: PAT_MRT4530_31454C.1.pep
VISAYFYRTRLVGESSGSYRYSSKLLVWRLTSGGKSFTXT

SEQ ID NO: 129173 - protein, 40 aa, Oryza sativa
  Clone ID: PAT_MRT4530_31455C.1.pep
MEMMKMQSVGQHVEVDNWIIGTNNFIELNERNRSQGLQRC

SEQ ID NO: 129174 - protein, 46 aa, Oryza sativa
  Clone ID: PAT_MRT4530_31456C.1.pep
KVGTGDKKRKSAMTLPRNSKQELRQILHSVIDAALVPCTYKSLSFR

SEQ ID NO: 129175 - protein, 514 aa, Oryza sativa
  unsure (1)..(514): unsure at all Xaa locations
  Clone ID: PAT_MRT4530_31457C.1.pep
MNCTKGGGFPLLFCAVICLMAQQGACNVVLIANNTTLSFDDVEATFTPEVKDSGVNGAIYAVEPLDACSPLRKKAANGPVSPFALVIRGGCQFDDKVRNAQNAGFKAVIVYDDEDSGVLVSSNFTVAGSSSGIYIYAVFLSKASGEVLKKYSGQSDVEVWILPVYENSAWSIMAISFTSLLAMAAVLATCFFVRRHQIRRDRGRIPVTREFHGMSSQLVKAMPSLIFTKVQEDNSTSSSCAICLEDYSFGEKLRVLPCRHKFHATCVDMWLTSWKTFCPVCKRDASAGTSKPPASESTPLLSSVIHLSAESTALSSFRSTVAVSPPRPIRRHPSSQSTSRAYSISSAPRNYNLQRYYTNSPYISTSRSNVDLANMSSQWSHTPHQASMHSLRSGHLSLPINIRYTIPHVSRSDYGSASLGLSHDSCSHHGSPSYYHSSLGQQRSYLMHRTESGPSLSTMVLQSPQXVSSSTMANQEKSISCGLTRSLRQAYVQHCLDSDGSLSAVTSDQSLPRC

SEQ ID NO: 129176 - protein, 124 aa, Oryza sativa
  unsure (1)..(124): unsure at all Xaa locations
  Clone ID: PAT_MRT4530_31458C.1.pep
SAGEEEETEGGEEGEEDGIWDWSRAGACCSMANICAAWCSGFFAQDIVVSKIEDRISLWSFLPKENGESIQVLKYGVNRSGSIKEEPXSSSGAHRLATIXMYLSDVSKXGEXLFPRSEMRMLQL

SEQ ID NO: 129177 - protein, 534 aa, Oryza sativa
  unsure (1)..(534): unsure at all Xaa locations
  Clone ID: PAT_MRT4530_31459C.1.pep
MIRCTHMAGRGGMVEWEVGRRRDSEDVIVLXPGPPARRRPPPVKAVEPESGGFAYEPPEKLFYKTRVCETFVTSGRCMFEDGCTFAHGDEELRPSLTACAGGWRKPSPSLSAAAPPVAVAPTPPPAQVVHELLARGSGSGGGGHRAITKVCFEFRDKGICYFGETCAFPHVSAAEIRQGSRLSSMSSSSWEMPARRSVAVTVPRTFVSVPPVAPPPPPPHYRVNNSSSYNAASMAAAAPAASDANLVAQQPPPEQGGRKMTRLEMLSLKKMTGIYGDWLXGGERDADLVFFSAGEEEETGGGEEGEEDGIWDWSRAGACCSMANICAAWCSGFFAHSYNNIEDIVVSKIEDRISLWSFLPKENGESIQVLKYGVNRSGSIKEEPKSSSGAHRLATILMYLSDVKQGGETVFPRSEMKDAQAKEGAPSQCSGYAVRPAKGNAILLFNLRPDGETDKDSQYEECPVLEGEKWLAIKHINLRKFDYPKSSLASEDECTDEDDRCVSWAASGECDRNPVFMIGSSDYYGSCRKSCRVC

SEQ ID NO: 129178 - protein, 893 aa, Oryza sativa
  Clone ID: PAT_MRT4530_3145C.1.pep
MRGGAGMCFASMEAAGSRGMGKGASRRRTARSTAPVGALVERVVVAPAPVEQQRGAGRPEAHPQSVAARAVVTVRRRRKEDAKDRFAEQLDALADRVGRSVLLELVSTETDPRKGTPKKSKPSALVGWFDKKDVKAERVVYTAEFAVDAGFGEPGAVTVLNRHQREFYIESIVVEGFPTGPAHFTCNSWVQPTRVSRDRRVFFSNRPYLPSETPPGLRELRLRELADLRGDGTGERRITDRVYDYDVYNDLGNPDKGVASARPVLGGEQMPYPRRMRTGHASADSGGRASRRPATWPPCSPPVVWLCSAQDAALNFGQYPLGGYIPNRVSPDIRDFAGFHDVDNLFKEGLRLKQALHDQLFQKIPFVRKIQENSEGLLRYDTPDIIKKDKFAWLRDDEFARQALAGINPVNIERLQAFPPVSKLDPAVYGPPESAITEEHIIGHLDGMSVQEAVEGSRLYMLDYHDIFLPFLDRINAQDGRKAYGTRAVFFLTAAGTLKPIAIELCLPPMTDGCKRAKRVFTPPADATSNWLWQLAKAHVCSNDAGVHQLINHWLRTHACMEPFIIAAHRQMSAMHPIFKLLKPHMRYTLKINALARQILINGDGVIESGFTPGNVCMEMSAFAYRELWRLDQEGLPADLIRRGMAVEDPSQPHGLRLLIEDYPYAADGLLLWSAISRWCEAYVAAYYPSDEAVQADYELQSWYAEAVQSGHADKRGAPWWPRLSTPGDLASLLTTLVWLCSAQHAALNFGQYPLGGYIPNRPPLMRRLVPAEGDPEYAHLVADPHRFFLSALPSLTQTTTFMTVIDTLSTHSADEEYLGERPDEAWTADPAALAAAREFAADVRRAEEEIERRNADPSRRNRCGAGVLPYELMAPSSGPGITCRGVPNSVTI

SEQ ID NO: 129179 - protein, 54 aa, Oryza sativa
  unsure (1)..(54): unsure at all Xaa locations
  Clone ID: PAT_MRT4530_31460C.1.pep
RPXXPSTPRPPTRPPTRPPTRXQTLRLTLYLRLDLSQFWASIHTNFTFLNFNFS

SEQ ID NO: 129180 - protein, 72 aa, Oryza sativa
  Clone ID: PAT_MRT4530_31461C.1.pep
HSLYLQLCTGNKHSEHLLRFYLNTNSTSKISGNRQTKEFSERDIRHERHSFPAKILRKMPFLMQLVISSRRT

SEQ ID NO: 129181 - protein, 158 aa, Oryza sativa
  unsure (1)..(158): unsure at all Xaa locations
  Clone ID: PAT_MRT4530_31462C.1.pep
RRLPSRRASAVAQAAFCRRPRTRVACRRRRSRADADAXHVPPVAATATPPATAATACHRRRVAAHARCPRMLPTQTLPQPVVAVVGGWGRRWGAATCXPRRRAARPRPATAALRRCRSPPPPASGRTHRPSSSRPRRPSSSVVVPQPPPPATAVARRR

SEQ ID NO: 129182 - protein, 58 aa, Oryza sativa
  Clone ID: PAT_MRT4530_31463C.1.pep
CAQCLHEGGPSVWPPNGKWPSAIGPSPSIVAWGAPVVSPATTHHTCVSGPCVVPLHLW

SEQ ID NO: 129183 - protein, 128 aa, Oryza sativa
  Clone ID: PAT_MRT4530_31464C.1.pep
MADPELEAIRQRRMQELMAQHGAANPQNAGQQKAQEDAKQEAEERRQMMLAQILSSEARERLSRIALVKPDKARGVEDVLLRAAQSGGISEKVSEERLISLLEQINTHTSKQTKVTIQRRRSVLDDDD

SEQ ID NO: 129184 - protein, 71 aa, Oryza sativa
  Clone ID: PAT_MRT4530_31465C.1.pep
MTCGFVEVAAGLAVIAAMPTEETAGFGDHGVDCKASPEIKTWRWFGPCEAEGSDGAGRGRPKRRRDVAAGG

SEQ ID NO: 129185 - protein, 55 aa, Oryza sativa
  Clone ID: PAT_MRT4530_31466C.1.pep
MRAAKMHEVRSRGRRWEDASYPSVFSCFTAVGFLASLSTHSLPASITYILRWHGG

SEQ ID NO: 129186 - protein, 102 aa, Oryza sativa
  Clone ID: PAT_MRT4530_31467C.1.pep
MASGQKVVKPMEVSVEAGNAGEAAWLDDDGRARRTVTFWTASAFFITAVIGSGVLSLAWAIAHLRWVAGPAVMLLFGFVFYYTSTLLGECCRTGGPWPGGPY

SEQ ID NO: 129187 - protein, 68 aa, Oryza sativa
  Clone ID: PAT_MRT4530_31468C.1.pep
FHLHIFSRFVDVFAPRPTRQNQREIFLSRSIDPSSLVTVSTNLAAGHRQPRRRAPPLRRPMPPQLAAA

SEQ ID NO: 129188 - protein, 52 aa, Oryza sativa
  Clone ID: PAT_MRT4530_31469C.1.pep
SLMGSSHGILTGGHTLEHIHYVSHVHLQRNHAAAVAASVGDDVNGVRVHLLV

SEQ ID NO: 129189 - protein, 270 aa, Oryza sativa
  Clone ID: PAT_MRT4530_3146C.1.pep
MASDGSSKKLRVVLIPFFATSHIGPFTDFAVRLAAAWPDAVEATLAVTPANVPVVRSLLERHGPAGAGSVAIATYPFPAVDGLPAGVENLSKAAPGDAWRINAVADDEALMRPAQESLVRELRPDVIVTDAHFFWNAGLADELGVPCVQFYAIGAFSTIAMAHLVGAVKEGAKEAAGKPFLWVVRTDMWAPPDGWKERVGDRGMVIRGWAPQKAILAHPSVGAFVTQCGWNSVLEAVSAGVPVLTWPMVFEQLDFSHFGPFEKLISQIDP

SEQ ID NO: 129190 - protein, 130 aa, Oryza sativa
  Clone ID: PAT_MRT4530_31470C.1.pep
CLSAAAAAHGDGGAVVAAWRQQRRCGGGGTGSGGRRPSPHGYRGGAATATTARRWRRGIRRAVMTTRRAWRPVGGGRRRRGGGGREPRHRRANLGFSFFVKFYSILLDFCFSRAGDISTRMRKSRFSQTP

SEQ ID NO: 129191 - protein, 80 aa, Oryza sativa
  Clone ID: PAT_MRT4530_31471C.1.pep
REIASVKHVVLHVFVGWLAVKQYELFELWKLYVLFVLMLSKFNYVTGEKPLVSMYYNMCKCWLLPRVISFPANIYVFFVL

SEQ ID NO: 129192 - protein, 49 aa, Oryza sativa
  Clone ID: PAT_MRT4530_31472C.1.pep
AMVKMGGLKVKTGTTQGEVRLNCRVVNKRNAHPKLDLPPMDYGDQVATT

SEQ ID NO: 129193 - protein, 217 aa, Oryza sativa
  Clone ID: PAT_MRT4530_31473C.1.pep
MEINCKAIKDMLGSTDVLDFWCYQKVLPVTFEAALFSQVFLGWWNFNSLCNFFDNGDNPSPYIEMHTAYCFTLPNEGTSPRGTDNAECSETSSDRSNSESIKPEECAMPSSIFDKKISIKKKLRLLSRMAILKDDGTVEVDIPTNAEAASLDLSSNDYCNEAFSGEPLASSDFQHRPPMQIVMLIVGTRGDVQPFIAIGKRLQWYRQYLVLILVLTQ

SEQ ID NO: 129194 - protein, 404 aa, Oryza sativa
  Clone ID: PAT_MRT4530_31474C.1.pep
MTGGAAGLRRRSKRDSELRVDGDDGALVDFGFGEMAAGLLLTAAMLTVDTARSGDHGVDGKASPEIKTWQRFGLHGDGDFRRDSFNSCCSGSLLKADPKSQIHRNQPPPSPSERKYHRVPRLPLASASAAGAWLGCCVGGGGRAGSAAWCHATAAGSMAAALELEAIRWGTAKLQGAGKRHPPLPLARPSSAEAASCRGTGVTAGQVAPRRTSSQPSSDLKKCSMIAAFIAEPVMGAGGVIAPPKTYFEKCEEAEEETTSKTLAPLNEDVKKTLEDISHRLESSLDNLVADCGSIQARFAEIQALISDDSANTISPASNIDRLEARKIDLIAQLQECNAELDLEKQKLANLPNAVEEQKSRLKSAIKNVADMTKSIKVIPGTDAQDIQAIEEVDQIREQAVSAI

SEQ ID NO: 129195 - protein, 271 aa, Oryza sativa
  Clone ID: PAT_MRT4530_31475C.1.pep
MATLGAEAKKVLVSKGGGQRRARRSSAPEPPSTAAAHTIAIVVVVRGGALGDGDNELAVGVVGGGHGGERAWREAESPPVELERAAAPSSPLTPAERFRTTGEGERHGRDVAGEGERSRADSAVMSDKTETATRWRTGMEARSMGVLLGHDGDADAEAVSAAPSSIATTAAVAADTAKLPSIVAADYICYTFSIGNNVSQVTRMTDFIFWCTTATRWRTGMAADTAKLPYFLAAASPHPLPPPPLRVATCAALPRCCLASSAACRCGAVRV

SEQ ID NO: 129196 - protein, 121 aa, Oryza sativa
  Clone ID: PAT_MRT4530_31476C.1.pep
MDDVDDKDFSPHQATTKESMMRRAGRERTCAGSGRRPCACCLFMRHRHDEYSDDDDDDHGDGDDGDERWCAGRALAASARWRAGVSASTSIGQCVATSVGWCGWSAREGSGAAGGDSRLEC

SEQ ID NO: 129197 - protein, 57 aa, Oryza sativa
  Clone ID: PAT_MRT4530_31477C.1.pep
MALLLAMAGKWMHGEEAGHVVASISEFLQMATCVSSGHAFRIGMEGRSRSILGWLFS

SEQ ID NO: 129198 - protein, 129 aa, Oryza sativa
  unsure (1)..(129): unsure at all Xaa locations
  Clone ID: PAT_MRT4530_31478C.1.pep
RSRLATILIDDKKIYIGEILSEQSGTEEPTCIKVADKLKSDYDYXHTLYDIHLTRGEAVVERPSVRLCKLYDELAGDSTDFVRYCLXKFIDSFSSRKVGIFDKIPDSHPDLLKEFQSSGAMAMLFMNYP

SEQ ID NO: 129199 - protein, 72 aa, Oryza sativa
  unsure (1)..(72): unsure at all Xaa locations
  Clone ID: PAT_MRT4530_31479C.1.pep
XXXXAXEXXHNDXKASNTSXWRTLHXXATAMXGRIXXXTXXXXSLLRFXLXLXLXXPXXVXTVXIGXXXXAD

SEQ ID NO: 129200 - protein, 584 aa, Oryza sativa
  unsure (1)..(584): unsure at all Xaa locations
  Clone ID: PAT_MRT4530_3147C.1.pep
PAACSGGLTNRPPRCRRLVSPPARLAYYAAVVGRLRLHRPAASSAADWCSRLHGLMVTPLLLGIYIFTAGLSXVAADWCPRLYGWLDTPPFMGVHVFTNRLAFTAADWCLRLHGWSVTPSKLGIYTFTAGAIVIAADWCFRHHXWTILFPHRSPLSSPTGSPSSPPTGVFAYTVGWSHHRCWASMSSXADLPSPPPTGALAYTDGWSHHRCWASTLSPXGLPSPPPTGVSACTVGLLCRRCWASTSSPXGCLRRCRLVSPPAWLAYYAAVGGCLRLXQPATFATADWYLRLHGWPIMLLLMGVYDFTTGLPPSPPTGVLAYTVGWSHHCSWAFTSSPTGLPSPPPTGVSAYTAGLLCRRFWASTSSPIGRHVCRRLVSPPARLAYYTAVVGRLRLHXRPPRMTPIDXYSLHGWPXSPSPLIGVIIFNSSYLRLLPTATTTDGCHHLHCWPPCLTPTXFSGADRSIYLHNYMSLPPVRFCRRRLVFTSSRLCNFVTMVELLHLHCLRHRQTLLLLLRKFCYFTSHDVYRSFDISEYDAVIFYYNKWCSNIQDLYLDILNTYIHSSDGYSTMRSYSSRLYDQLLSN

SEQ ID NO: 129201 - protein, 91 aa, Oryza sativa
  Clone ID: PAT_MRT4530_31480C.1.pep
HSLDSHALQRRGDNGGVGGGHAAGGEQVLGEGADRDGGSRILLTARTTMEAKGTPMTTHWGVSMLAKKIGRANQGLAKPHSFWSPPKKEGD

SEQ ID NO: 129202 - protein, 56 aa, Oryza sativa
  Clone ID: PAT_MRT4530_31481C.1.pep
FIRVYPWIIVTNQSVTQHLAQKNRHLDCQYITGRNLLILNSLVITLISNYVREGSF

SEQ ID NO: 129203 - protein, 182 aa, Oryza sativa
  Clone ID: PAT_MRT4530_31482C.1.pep
LLSSPPPPPPPPHRSSSSSSSSSSSSSSSSSSSPPSARPFASSCGSRRSSSSSSSPPAPARRGPGARAWMFFPHGTSSLRRCCCCCCRRRAARRREACSRSRGGRWREASPTTSSGSCPVAPRRRPARPGSTTPLEPRTKATHEFDCRERERERERERERERERERERDQSCIDIIEINLLG

SEQ ID NO: 129204 - protein, 155 aa, Oryza sativa
  unsure (1)..(155): unsure at all Xaa locations
  Clone ID: PAT_MRT4530_31483C.1.pep
MASRARVRSYLYSRGIDYPVDGQIVLDVHAIDLTSLTYARAAPRRAAFIVVVVVNDDQTDRRRPAIRRSARRSSAPLPGRRPTMPVLMXPRQYDAAAAPRRTTVTIDDSEAALLERLLRRMEEXDDAAAAGGDQTRANDRRCFSVKAGCRFVRVT

SEQ ID NO: 129205 - protein, 498 aa, Oryza sativa
  Clone ID: PAT_MRT4530_31484C.1.pep
MASKPSSRAESNQAAAAVPSLYGRALPSPPAVEFASAEGRRLFAEALQGGTMQGFFSLVSVFQTQSEPAFCGLATLAVVLNALRIDPGRRWKGPCRWFDESMLDCCEHLDTVRAEGITFGKVACLAHCSGADVRTFRAAQATLADLRRHLLRCASSQDCHLVASYHRKLLGQTGTGHFSPIGGYHAGQDMALILDVARFKYPPHWIPLPLLWEAMNTIDEATGLLRGFMLISRNTEAPLLIRAVNCRDESWQSMAKYCIEVVPNLLRDNSVDNVLTILSRLVNHLPPNAGNFIKWVIEVRRQEEGGSSPSKEANEMPFLKEKVLQQIRDTKLFQLVHKLQCSKQPCCSCSSLTDEDSISQIAASVCCEATALLSGNLSSRDGLFFSETCSGCTQVNDEGLKNVITGKVVSEGNGHVDKLSPISSTETCFCNSTLSNETVNYPSNTDILTVLLLSLHPSTWLCIEDEKLKAEFQSLVSTDDLPDPLKLEVCCLTPRTLH

SEQ ID NO: 129206 - protein, 73 aa, Oryza sativa
  unsure (1)..(73): unsure at all Xaa locations
  Clone ID: PAT_MRT4530_31485C.1.pep
PKTVRKLSGFRTYFXKRNLTVGIFRKRKRXKYFLVNGIENDKGSFRSNSESVGNFPKIFSEFLEFFSEFPKIL

SEQ ID NO: 129207 - protein, 153 aa, Oryza sativa
  unsure (1)..(153): unsure at all Xaa locations
  Clone ID: PAT_MRT4530_31486C.1.pep
AYXGAVTXVTXEXLTGRXQXCGQQMWRXAQQHHRKVRAPMSAVXHDSKCSLMQGEGVSXHXRHVPDXVXSXXXXXXCTVXTAAXXPXXLXXXSXLXSVXXXIXXFXXXXXNTXWGVSGXXXRXSXXXFXXXNXXXNKKKKKKLEGGPGTQFAL

SEQ ID NO: 129208 - protein, 191 aa, Oryza sativa
  Clone ID: PAT_MRT4530_31487C.1.pep
MATDGGGATPSPAAKKANLLDPYSIKHLLDETVSEVAKSKGYPEDARLSNRRLAVGAAVIAVALLAQFYPRKFPENRDVLLACIALYAALNVALQIVTYTKEKNAILFTYPPAGSFNRTGLVISSKLPRLSDMYTLTIASADPHSKSSSEPVHFTKSVTKWFTKDGVLVEGLFWKDVEKLIDDYNSDHRSK

SEQ ID NO: 129209 - protein, 118 aa, Oryza sativa
  Clone ID: PAT_MRT4530_31488C.1.pep
AREFPLSIPGPPAAADDETLALRIDRRRRPWRAGQAGWAPASPPPSSPPSSAAPASTSPPTTTTTSPTPTNPRTAPSCSPTPTPTPTPTPIPIPPPPPPTPTSTRTTSSRPYDYATVT

SEQ ID NO: 129210 - protein, 199 aa, Oryza sativa
  unsure (1)..(199): unsure at all Xaa locations
  Clone ID: PAT_MRT4530_31489C.1.pep
MRSRSLLLVALATLLLHASASASDDDLDYLIDNADDIPANDPDGWLQEGSPDDDDDDDLFHHGQAQDHPIDETHVFLLSAANFSDFLASHRHVMVEFYAPWCAHCQALAPDYAAVAGDLSPLAHQVALAKVDATEDTDLAQKYDARTLISPRCSTAGASPPILFLIDRVXKGYNGARTKEAIGAAAPPSSRPGGYSPPR

SEQ ID NO: 129211 - protein, 47 aa, Oryza sativa
  Clone ID: PAT_MRT4530_3148C.1.pep
MAVRMDAVLRVGLGAPGADGCGSVDSADECGALGRAQGTWVAAQMKA

SEQ ID NO: 129212 - protein, 570 aa, Oryza sativa
  Clone ID: PAT_MRT4530_31490C.1.pep
MDAAAPEATGGFCGGGGGLSTGRKLVPWSSWAEWRHVRDGLFSASPAAALRRIAAWRSRGTLPVPVDVTAAFVEIRLRDPFFRLVNGFVENPHKKTGYSISELAEAVGIPRVLVDIRHESSHRTLPSLRLLRLAAIKAFDWLKCIYWDSQTNAIPDVQVEVRSKLHEINNFMKGKDSMKAKSGSKRKRSEKMISRNIKYVRRLYYACPSEVAFVILDFFQRGAPESSENSDVLETDKDVDQSSDIHSEISNNDMRTIITKLSEKEPRLLLGILKSVIETIETMEDLENKGEYNASLPAKVELLSSHVLWLVTKLKELKDSGCIGVVHEIGVLSSDRNAVPRFCLAKLLRKLLSLSIIDERCIIDAALVLIEMATNNVQEKLRKLPMLSLGKVARDSTLPEPTKETESVEEATEKLEMFKSRLKQKDLRLAENDTGASLNTIMPEKRNRWSTAKSWTPCPIGMIPCSFSSVAVLPTLDVVDHESRDEILEQHVSVEPDDHTERIGYYSDPEKQLDAERIPELSRPSPEECEISDMPELAFPLKGRLLVGGVWKMVSEEELLFIKSKMKILL

SEQ ID NO: 129213 - protein, 155 aa, Oryza sativa
  unsure (1)..(155): unsure at all Xaa locations
  Clone ID: PAT_MRT4530_31491C.1.pep
MGSRKKAKPSRSRKKAKPSPDQAVALDYVRAWAHPAASAPPPEPSAADAAGDDFLPHQAARMASGGGGSVLFELHSHSNHSDGFLSPSELVERAHRNGVKVLALTDHDTMAGIPEAVSAAHRFGMRIIPGVXISALYSXKEIAGTGEQCHIXAYY

SEQ ID NO: 129214 - protein, 468 aa, Oryza sativa
  Clone ID: PAT_MRT4530_31492C.1.pep
MGSRKKAKPSRSRKKAKPSPDQAVALDYVRAWAHPAASAPPPEPSAADAAGDDFLPHQAARMASGGGGSVLFELHSHSNHSDGFLSPSELVERAHRNGVSTRSGLSSVCLVADVKSYHVHATILNGRKRRRVRMAKLYMSVLQVKVLALTDHDTMAGIPEAVSAAHRFGMRIIPGVEISALYSPKEIAGTGEHVHILAYYGMCGPSRFDDLERMLSNIRDGRYLRARNMLAKLDRLKVPIKWEHVTKIAGEGVAPGRLHIARAMVEMGHIENIRQAFNKYIGDDGPAYATGSEPFAETVVQLINRTGGISALAHPWALKNPDAVIRALKGAGLNALEVYRSDGKVDGFSELAEKYDLLKIGGSDFHGRGGKDESDIGTVKLAITTLCSFLKMARPIWCSAMKDILLKFAEEPSTTNLGKMVLFGELINFNGFSSTGSGMDIVNLCLSSWLSNNGMEEVELEELVKSCT

SEQ ID NO: 129215 - protein, 64 aa, Oryza sativa
  Clone ID: PAT_MRT4530_31493C.1.pep
AFCGKLCSLRMGVKSTAGFHSHVSNDVYRDEILVSYGLNMYIFTGVATHNHIFIVQAKWFGVAT

SEQ ID NO: 129216 - protein, 81 aa, Oryza sativa
  Clone ID: PAT_MRT4530_31494C.1.pep
RSEARDDASTDIPRRPSHGHIPLPFSQLDFARTVADLPPTARPTRCESGVDLAAPSTAVAKSHRDNPVDVGGGPRHSSSGR

SEQ ID NO: 129217 - protein, 72 aa, Oryza sativa
  Clone ID: PAT_MRT4530_31495C.1.pep
GTKQQLRRKGKREGENGVLWAGRTWVGRGSFRTRPNDFLGLEAQTLVGNSIKAFTQVSDCIAYIVVLPRPKV

SEQ ID NO: 129218 - protein, 301 aa, Oryza sativa
  unsure (1)..(301): unsure at all Xaa locations
  Clone ID: PAT_MRT4530_31496C.1.pep
IFEKEKRDLLRQRLGFAVDRAHDSGSRERTAEIDXSKTDGRDRSVHVRLTADGHDDVSGDVIAGGGSGSAAWRLXAQACRRTTVRRRERRAPTGSGRRGELTGDQRNGGGDLRLDDGDGAPAVFSDGEGADEDGDATATTKATSXRATAATGATAAHGWSGGNDGGARSHGARALPTARDEGEGGDGGXEAVAKAHGDRRRDGKXRARRKRETDPNRPRIKHFPSDFSRXFHKRKGREDPEDCFPSIDFTGSGKERWAPPVSDRARARLRTXRLEPGGERERVLGRLSAQSQKRLLKTFFN

SEQ ID NO: 129219 - protein, 77 aa, Oryza sativa
  unsure (1)..(77): unsure at all Xaa locations
  Clone ID: PAT_MRT4530_31497C.1.pep
KKGIFFFGMKXLSKKGQFPLRADPSLGKSTKKGPAPPQRFPPKKLPSDQRKARFFEKMNALHPSAGADDDAREEDFE

SEQ ID NO: 129220 - protein, 53 aa, Oryza sativa
  Clone ID: PAT_MRT4530_31498C.1.pep
APACRALVERGGGRIPKSSVHWRKSSGDEPCHAVATTTSFVAGNTWFCFPRLT

SEQ ID NO: 129221 - protein, 187 aa, Oryza sativa
  unsure (1)..(187): unsure at all Xaa locations
  Clone ID: PAT_MRT4530_31499C.1.pep
RHRRRRQRLGGLAARARKLAGERRCGGANGEHPRVADGAANSPVTKETAEEQRTVTATRLKRRRPSAXRRRRCSGGLQRRRRGGRGRRRDGDHEGDLPERRQQLERRRRTAGAAATTAARGPTALGLFRRRETKARVATGRGDTGDPFKGARRRWRRPTATGGGMESSGSEKERDRSESTSNQTLSK

SEQ ID NO: 129222 - protein, 905 aa, Oryza sativa
  unsure (1)..(905): unsure at all Xaa locations
  Clone ID: PAT_MRT4530_3149C.1.pep
LQQRLHHRPASVAADWCSRLHGWPIMPPLLGVYDFTAGLPPSPLSGASAYTAGLLSRRCWASTTSPPACIRRRRVVPPPTRLAYYAAAVGRLRLHRRSASVAADWXPPPTRLAYYAAAVGRLRLHRRPASVAADWCLRLHGWPIMPPLLGVYDFTAGLPPSPPSGASAYTAGLLCRRCWASTTSPPACLRRRRVVPPPTRLAYYAAAVGRLRLHRRPASVAADWCLRLHGWPIMPPLLGVYDFTAGLPPSPPSGASAYTAGLLCRRCWASTTSPPACLRRRRVEWISQNITDRLAFAAADWCFRLHGWPXMPPLLGVYVFTXGLPSPLPTGVSACTAGXLCRHCWASTSSPXPACLRRRRLVFPPARLAXYAAVVGRLRLHRPXAFAAADWCFRLHGWPXMPPLLGVYVFTDRPPRPPPTGASACTAGLLCRRCWASTSSPXPACLRRRRLVFPPARLAXYAAVVGRLRLHRPXAFAAADWCFRLHGWPXMPQLLGVYVFTXGLPSPPPTGVSACTAGXLCRRCWASTSSPTGRLVRRRLVLPPARLAYYAAVVGRLRRHRPATSTAADWCFRLHGWPIMLPLLGVYVFTDRLAFAAADWCFRLHGWPLXPPLLGVYVFTDRXPSPPPTGVSACTAGLYAAVVGRLRLHRPAASSAADWCFRLHGWPIXRRCWASTSSPTGXLRRRRLVFPPARLAFMPPLLGVYVFTDRXPSPLPTGVSACTAGLYAAIXWASTSSPTGXLRRRRLVFPPARLAFMPPLLGVYVFTDRXASSAADWCFRLHVWPIMPPLLGVYVVTDRPPRPPPTGVSACTAGLLFCRCWASTSSPTGLPSPPPTGVSACTAGLYAAVVGRLRLHRPACLRRRRLVFPPAWLAFMPPLLGVYVFTDRPPRPPLTGVTACTAGLL

SEQ ID NO: 129223 - protein, 60 aa, Oryza sativa
  unsure (1)..(60): unsure at all Xaa locations
  Clone ID: PAT_MRT4530_314C.1.pep
SLHACRSTLEDPRVPSSNSPXGVTQLNRLAAHPPFASWRNSEEARTDRPSQQLRSLNGEW

SEQ ID NO: 129224 - protein, 70 aa, Oryza sativa
  Clone ID: PAT_MRT4530_31500C.1.pep
YILIYAAIHFLCTCMPDLLFIQNPATNFRNSMAYATWQLSCFAVLPKDKICSKTIVIYGLQLASNQYCSF

SEQ ID NO: 129225 - protein, 460 aa, Oryza sativa
  Clone ID: PAT_MRT4530_31501C.1.pep
INSFRVSNKKRIISCCQIGIYEEEIREVEAEEGVVSSSRSKRVRPKRPKKVMTPMEAVERRKLKREEQEERRKVKKEKRRIRRLMETEAAGEVGEAAAEEEEEEHEAETEGEEEAAAEEQKVYVGGIPYYSSEDDIRSFFEACGSITSVDCMTFPESGKFRGIAILTFKTDAAAQRALALDGADMGGFFLKIQPYKSVREKEDFAPKMIEGYNRVYVGNLAWDITEDDLKKFFSDCKISSIRFGTDKETGDFKGYVHVDFSEGTSVAVAMKLDQKVIKGRPVRIRCAVPKKDNQKLNGNANPDSSNNKIRICYECGTPGHISSSCPNKKASEAISDEKKANVDSVTASSKKRRTCYECGIPGHLSSACPNKKAGDAVSSDKGPDDETKSAPSITPEDNKIGEESNSAPSKKRRKCYESTSDGNKASDDTNPVPAKKKKRRTCYECGIAGHLASECPNKTT

SEQ ID NO: 129226 - protein, 59 aa, Oryza sativa
  Clone ID: PAT_MRT4530_31502C.1.pep
FLEFALWKMHAGAKKGGNTVMDSGLRAMQYMTDKSMVIATICITLCLHVLNGTRLLVTA

SEQ ID NO: 129227 - protein, 49 aa, Oryza sativa
  Clone ID: PAT_MRT4530_31503C.1.pep
PYGGGANELAAGYSTGTGLAAEIIGTFVLVYTVFSATDPKRNARDSHVP

SEQ ID NO: 129228 - protein, 664 aa, Oryza sativa
  unsure (1)..(664): unsure at all Xaa locations
  Clone ID: PAT_MRT4530_31504C.1.pep
MATLSLPLHSQIALWRQRRRRHDLFERISSCHQFKHAGWRLQVSYKGLETLYDDGYQKAKDLDYYYRSLGELVEHDSGPPRLFCPVDAGSPIEDAPLMLYLPGVDGMGMGLFMHHKALGRIFELRCMHIPFHDRTPFEELVEMVEDVVRAEHATSPNKPIYLLGTSFGGCIALAVAARNPCIDLVLVLVNPATSFEKSDIKQLLSVSSPLSDRARIAITSLLNYNIDNEVDMALSSMKSGRHPLEALNRLTSNISSFLKHSNILNKIPEDTLGWKMKLIQQAASYANCRLESVSAEVLLLVSCADRLLPSKSEADRLQRMLPKCKVFFFENHGHSLLLEYGVHVSSIIKCTSLYRHSRRYHRVFDYIPPSATELKEVEKAGSDLRARTCPAMFSTMGDGVVVRGLAGVPEEGPVLLVGNHMLLGIELISLATEFLRRKGRVLRGIAHPLLFPNKTKTWSEGHDFFDFLNLWGGVPMTYKYIYQPLVSGECVLLYPGCQCVNLHCKGEVLRLLKSNQSQFVQKEAQLKDAIVPCGVIGRDYLMVLFSMFEDIMNARFGKETMEGQVNHLKKQDIDHEVFISGVSLFMPGRFYXLFGKANPTKVMQAVMTYXQADGELYLLVMSEVVPMIYYLLEKREEDKFRSILPRILYQLGCGHDSEIPSFDP

SEQ ID NO: 129229 - protein, 71 aa, Oryza sativa
  Clone ID: PAT_MRT4530_31505C.1.pep
MERSLNNKMKGPISFHIFFVLLKILTSHFLAKESQHDQIHISHGQTAAGESTKGEFEEEEIEKIGKIQKTR

SEQ ID NO: 129230 - protein, 52 aa, Oryza sativa
  Clone ID: PAT_MRT4530_31506C.1.pep
MADQAPIFTRAWQIKHSFLVRGAFRGSSGRHPLCLPLISPEWDAHSRMDRAQ

SEQ ID NO: 129231 - protein, 113 aa, Oryza sativa
  Clone ID: PAT_MRT4530_31507C.1.pep
HSEISSHSNFRLSPFCSKYGFRPLIRTRGLRPHVHNVHHVKQALSHQAFVPKSLLFLPKLALSLCIDSHPFLFIVPWVVHMALSALPNLVLSLIDDHLLCQYCWTQCVLHIPL

SEQ ID NO: 129232 - protein, 59 aa, Oryza sativa
  Clone ID: PAT_MRT4530_31508C.1.pep
SSSVYQPQEIGILAHQTDEKDLAVLNERVSQEMFDGIIREVVEETGVPSNSLSLSSLEF

SEQ ID NO: 129233 - protein, 118 aa, Oryza sativa
  Clone ID: PAT_MRT4530_31509C.1.pep
MAYPHEDGETPRSPSRRPSGDAADEGGVAGRWGSLVGFFHNHNHGAWANNRSIPVGVDSTRDCRRSRRRGATARNPGGVFALGDDAEWHVIGSRGGRVLLLSPTRLRLLVLEPMLGRR

SEQ ID NO: 129234 - protein, 332 aa, Oryza sativa
  unsure (1)..(332): unsure at all Xaa locations
  Clone ID: PAT_MRT4530_3150C.1.pep
DAWAHSSPPNRRSQRPLSSPSLSPHRSSEPVAAVVPVAVAPPLVGAGGHRRGGGGDDEELGDRXGEQEGERERGRGGRCRRRGSRRWLRTPAAEEDDDGAASARVALKLASLAAPLWLPALVGLLIGCPASPTTGFATASSTLRLADHRIRAPPRSPAPPRGCLLLSLLLLQATGTRYHGYQVPCITGTRYQDTRYQVLRVSNTRYHGYQVPGTRVPGTKCIRRYQRYQVPDTQGTKYQDGEEETTGFLCFCGGGGVATCAHWQGGGGSSGQGRRRPWRGARGRRGEAPVPAATRAPVEEAAPQRVEAAPQRAEDDVVEDPDPDMHKRDSWL

SEQ ID NO: 129235 - protein, 137 aa, Oryza sativa
  Clone ID: PAT_MRT4530_31510C.1.pep
KGSLNGTRQAPRAAACWAPGESWRGGPRSRSPLAAREDPREKGGGSDKGDTSSTDWDKAWSTFKKKGKKTLFSEFSPNKYVSWNPRRSEYPLSEEVDPIRRTERSNLMLWTSPKFTLVMAIVIVSTLLIYTIVVPPK

SEQ ID NO: 129236 - protein, 125 aa, Oryza sativa
  unsure (1)..(125): unsure at all Xaa locations
  Clone ID: PAT_MRT4530_31511C.1.pep
GRRGGAVVGVAESSENVEGWLVTLAVLLLPPHLTCLHHVSLVSSRFRRMLTSRRFLCQFNDLHGGAPGAPLXGFFHNHNHGAWANNRSIPVGVDSTRDCRRSRRRGATARNPGGVFALGDDAEWH

SEQ ID NO: 129237 - protein, 74 aa, Oryza sativa
  Clone ID: PAT_MRT4530_31512C.1.pep
PVGYRLIGKRPKVWNPIFGPKVPKKTGFQEFRNGSLKKHLSTGEGHRTARLSPGRKGSGRQLESYGGAGGAAGG

SEQ ID NO: 129238 - protein, 471 aa, Oryza sativa
  Clone ID: PAT_MRT4530_31513C.1.pep
RLPLLPPSPSTAPPPLPRWRSGVVFLGFTHRRWRLRAQRLGGEGGGAGEMKGSAIPAVAIMPSPLFLWRFKVVLFLLWGLCCCKIGWDSVMRMSADLRDLFLYEAFLYYNPLLLVALMIWLWGVNLWVFAQSSVNYARVFDLAQTHLSHREIWRCATWLTLIVPTSMTAYLYLYSHGEVSLAASQPVLLYAILLIVLLSPFDMFYLSSRFYFLRTVWRIMLPLQAITFPDFFLADIFTSMSKVFSDLERSVCRMVNRQVATTAWLEADSICGSHSVAIPLVLVFPYLCRLFQCLRQYKDTKEKTCLLNALKYSTAVPVIFLSALKYHVFPDKWVSFYRPLWLMSSVINSLYSFYWDIKRDWDLSILTRIFMFKNPSTWTNLLYGQIWVYYWVLASNLVLRCTWTYKLSAHLRHNYLTVFTIAALEILRRFQWVFFRVENEWNKMTAKQSLEMSSDMPSEGDRLLDSNSHTV

SEQ ID NO: 129239 - protein, 71 aa, Oryza sativa
  Clone ID: PAT_MRT4530_31514C.1.pep
RTSCNIGITFLYITSRKAFVLLFNRHYSLILHSGFLSQLKNCKTSWNRLFPVNALVHMLCSQYDKHLMCLL

SEQ ID NO: 129240 - protein, 54 aa, Oryza sativa
  Clone ID: PAT_MRT4530_31515C.1.pep
RSTDLMQLYNFKSLLRNPYDQHGGRSYYFLLHNLTQRKLLEHLPSRVSSHTHRF

SEQ ID NO: 129241 - protein, 132 aa, Oryza sativa
  Clone ID: PAT_MRT4530_31516C.1.pep
TSSAHLIQPWRAPHCKKQHSAATVSSSHRRFNFLQWKSHQFVQYLHPNLNLQEIYSSSSSKPASICYGFHQLRSICISHTEINQAQIVHTEPRKKKIKTYRNNIHRSTNAQRGGNLGFGRRTRTSRADEPTF

SEQ ID NO: 129242 - protein, 104 aa, Oryza sativa
  Clone ID: PAT_MRT4530_31517C.1.pep
ARGSNSRLKNKPSGGNQNRLDKVIIQDCCANEDNYDKNNHENNLLQNAMQQDIGSPTTLWNVSVLCFSLSWMNLVKCQISYISFCTVNLEYRALMELDCIITYC

SEQ ID NO: 129243 - protein, 179 aa, Oryza sativa
  Clone ID: PAT_MRT4530_31518C.1.pep
MRWRVSKKVKCNSICDAFILEVGGMATITVPVPGDEVLRTSNARRFFYSTEASIGLTHLLRVGDEALDQQQATAHRGKSMSILRRKAEQKGSSSSSQTASQPTDTGTGEIDRSIDQVRRGVPRPTRGSGSVHRSANASPGARAATGAVSQNARRNAIQPPPDRGAQKRRSGWRNERVTH

SEQ ID NO: 129244 - protein, 504 aa, Oryza sativa
  Clone ID: PAT_MRT4530_31519C.1.pep
MTMSSPPPRASKHLKSAYRLAAIAVPVVAAAVVVIVVLLRAAQLGPGELLAGRLGAARHVHLFLAALVVVPSAVATLLRLVRRPHSVYLVDYACFRPQPSNRLPFATFAEHFRLSPHIDDGSFRFVTRMMERSGLGERTYVPRGNLYLPPRTGMEEARDEAEIVVFAAVGDLLARTRIRPEEIDVLVTNCSVFSPTPSFADMVVNRFKLRGDVRAVHLSGMGCSAGLIAVEVARNLLQAAAPRGAHALVVSTETTSFSHYAGTSRSMLLPTALFRMGGVAMLLSTSRSSATTTTSRFRLAHIVRTLNAAEDRAYRCAYHEEDGDGNLGVNLSKDIVPVAGEMLKANIATVGSRVLPLSEKLLYALSLLARKVAGSRRRKAIKLHVPDFRTAFEHFCIHAGGRSVIDAVQSGLGLADEDVEASRMALHRFGNTSSSSVWYELAYVEAKGRMRRGDRVWMICFGSGFKCNSAAWECISLPARDADGPWADSIHQYPVAITTTTKMC

SEQ ID NO: 129245 - protein, 117 aa, Oryza sativa
  Clone ID: PAT_MRT4530_3151C.1.pep
LPQLVCLHLLNLHCEGLTPITLRFYQLFLQFRARIEGGHLLLLSVLLQLEFEPILWDCCGSVAKSDDTRRAGGGDPRSRDQKDGNRIGTEPNRIVRKKVKDRSVTPVLVSHKPQPPF

SEQ ID NO: 129246 - protein, 180 aa, Oryza sativa
  unsure (1)..(180): unsure at all Xaa locations
  Clone ID: PAT_MRT4530_31520C.1.pep
ARSPHARAASPRPATLPPVALPXRRSPPPPAPRPPHTINFLSFSFPDPKLSSXSLSPALFLLPPATAAGCGGGWPSDPPPTSPQQPPATAAGRGGGWPSDLPPTTPLQPPATAAGRGGGQPSVPPPTMSPCLRQGRVVGTACCLQCRRWAATSPVAGAQIHLPLGSMAGIGQLSGDRQRC

SEQ ID NO: 129247 - protein, 141 aa, Oryza sativa
  unsure (1)..(141): unsure at all Xaa locations
  Clone ID: PAT_MRT4530_31521C.1.pep
WSASQKIIFDFALLDIAACSDSAHHDAVRQSYRKHQLQATVLLQQQVLSPYQEFVRQQNGITASPXSQSAAMQLRNNQCWQQLSLMAQQSYYHDINIGQAITQKLQLQXLGDLYYDRNLAKAQALLPYNVPSRYRIYPRNY

SEQ ID NO: 129248 - protein, 74 aa, Oryza sativa
  Clone ID: PAT_MRT4530_31522C.1.pep
SFRRRRRRLGGFTSPDPEEDTDGDPSPPPTVLDGLVTTLLSQNTTDAISRRAFAALKAAFPTWDQVWWPHPGSF

SEQ ID NO: 129249 - protein, 76 aa, Oryza sativa
  Clone ID: PAT_MRT4530_31523C.1.pep
TRKGKGGSFREALPFFPLVGLNLVSTVHTARSEKLAAVFSPSIAPDIYKVVDADINSVDLLAGIQKPSVARIPAIR

SEQ ID NO: 129250 - protein, 183 aa, Oryza sativa
  Clone ID: PAT_MRT4530_31524C.1.pep
MLLAKGWRGRKDDSGGASRQPARAARGVTLGGGGSNHQIHTASAGSGGVAAGSEEGIVNSGGDGDDDGNVSAARGGGDGDSDGDGGSGGDRRSGGRALGFGTPTPDPTGGGTSVPAQPGKRMAQPWVTVATGRRDAATRPGRLVAMAATVGSRREERRGPAGRPAPAEAVRTRRRRRGPRDSR

SEQ ID NO: 129251 - protein, 48 aa, Oryza sativa
  Clone ID: PAT_MRT4530_31525C.1.pep
LKIHFSLNFNHLQETNPFDSMLTFPYPFNPIDYIISRHHRYNIYNERI

SEQ ID NO: 129252 - protein, 548 aa, Oryza sativa
  Clone ID: PAT_MRT4530_31526C.1.pep
MKCFLLTAAAAAAAIVVVTSAAASYDSPASLPAGVLSSPSFLWIAANVIVVWLVSSYRGHTAAGDGDGVGESGGGGVDVGLYTSSSGHGHDHDHDDMFAVAAVAADLVVVAAAPVVTTTVAKKKPSREARAAKRSTTDRPRARKAAASAASGETTPARPGDCSPRDVSKALAGVVLQTPRGAAAAVGAALMDTVDVKRPIIVEEEWLTWDLAATAAEATAKPDVKKSVVDEEWPDWAFFVDDDAKNPLVGEEEWSAWVLACTEEAKPAVVEKKPVVADEPWPSSWTIAATDVKMAVKKPVVVEDPWRPPPSSWTIEAPADGDKWAITLATDFSTPKPDVVAGAGAGDDDDDVSMDSMWQTILQSGRARPVTVPKSETWATTTDEQQPRRRERAAAAAVARREIRKSATATNMTPPPSPPHVRAPPAPARRPWRTRDVLPAMPNDELMRRAESLIRRHHEQLRLQRQESEQRQALELQRRRPLIRVEDVAMVDEGNQWKLKPILVKEDGDHEQRRFYKSSAGIAELARRQSSASADIAWQSLAKLCVDG

SEQ ID NO: 129253 - protein, 163 aa, Oryza sativa
  unsure (1)..(163): unsure at all Xaa locations
  Clone ID: PAT_MRT4530_31527C.1.pep
VKXGXGNLVNPDKPIFPPRXPAYDHDLRPSSXINPSLKGTKAGAPPAVAAALELVDPXGCRNSXPGKENHGVRMKGKGRGEGIEPSASFGDPLLSGSKHGPGFKGNRKKGCCCFFLHGRHXHWSSLVLFXLAEMGIGNFILTPSPGRPKVNFCPRKKKKKKKK

SEQ ID NO: 129254 - protein, 78 aa, Oryza sativa
  Clone ID: PAT_MRT4530_31528C.1.pep
MALGDDSPASYIHMVQHLIEKCMTFGMSMEECMETLSKRADVQPVVTSTVWKELEKENKEFFDKYKQLRSEKGGVSSS

SEQ ID NO: 129255 - protein, 98 aa, Oryza sativa
  Clone ID: PAT_MRT4530_31529C.1.pep
GWCLECGWCFHCELCTGAHSCRLSEKMVHPLVQYGSSKLICSLLRIPCVSAVLCNVLFGAYVSAVVRCTFLFSLVWASSVLDPLNKIYFQYKLERLPT

SEQ ID NO: 129256 - protein, 656 aa, Oryza sativa
  unsure (1)..(656): unsure at all Xaa locations
  Clone ID: PAT_MRT4530_3152C.1.pep
CCLICYARTSVASAVTVGVLHRHCXVSLTSPPVRLHRRRVMFSPTRMVSHTTVVGHLRLHCRPASVAADWCFRLHGXPIMPPLLGIYNFTDWLPXSPPTGAFAYTVXWSHQRCWASTSSPTSYLXSRRLVFSPTRLAYYAAVVRRLXLHRRPASLAADWCFRLYGWLVTPPFIGVHIFTADXPRLPPRLVFSLPLMDXLCSRCLGAMTSRTECLNVRRGEIHIYKFLKYLNFSRVLYXHQILLILYVCSAGSIXICIKGIHGFKLISYAPGMDQSEHHRLXPPPPPTGVSACTTGLLCRCCWASTSSPTGLPPLPPTGVFACMTGLXIPPLLGIYVFTDRLASAAADWCLRLHGXPIMPPLLGVYVFTXRLAFVAADWCFRLHGWPIMPPLLGVYIFTDRLASAAADWCLRLHGWPIMPPLLGVYVFTAXLASAAADWCLRLHGWPIMPPCLRLHGWLIMPPLLDIYIFTDRPPRMTPAGAIVFTAGHVAATTNRRHHLQRKLSTSAADWFLHFDGCMILPVLIGLIVFIAATTTDGHHRLLSSTGYAAADWCFYLHSCASSLPVCFCCRQLVFTSSRQCNFVIMVERLHLYYLRHRQTLLLLLRKFCYFTNHDVFVNLNISACDAVLFYXNKWLSNIQDFYLVIFNTYLQSSNDY

SEQ ID NO: 129257 - protein, 110 aa, Oryza sativa
  Clone ID: PAT_MRT4530_31530C.1.pep
FFSYPHLPPCPTAPLISPHRRRPSPTGGAPSPPSPPLSAPSHFVRVPASPRSSLDLASRRLPGGAVTRDWLLPLPPGISLAQRRRGYGRNWRRSRWICKKGFVNCFRLQC

SEQ ID NO: 129258 - protein, 234 aa, Oryza sativa
  Clone ID: PAT_MRT4530_31531C.1.pep
MGSELPAAAPPQPKRSTAAAAVARRRIGRELWQFWLDPPPYCRPGPSPVKDHFHWEVVIDGPAATPYAGGVFPVDVWFPYDYPFRPPKLFFKTKVYHPNIDGKGRMALDIFQDNWSPALTINKLLLCFVSVLFDPLLDRPTNRCIAKQYKHEYEAYEEKARAWTQKHSSTPIVSHYPPYAVIGSTPPAVPHFPATAARRKAAASSASGSVSSSRIPLLMKDESIWRRTMKFFQG

SEQ ID NO: 129259 - protein, 548 aa, Oryza sativa
  unsure (1)..(548): unsure at all Xaa locations
  Clone ID: PAT_MRT4530_31532C.1.pep
MAIECLVLGAGQEVGKSCVVVTFGGGKRVMFDCGMHMGHRDSRRYPDFDRLLADGAADYTAAISCVVITHFHLDHIGALPYFTEVCGYHGPVYMTYPTKALAPLMLEDYRKVMVDHRGEEEQYSYEDILRCMRKVIPLDLKQTIQVDKDLSIRAYYAGHVLGAAMIYAKVGDAAIVYTGDYNMTPDRHLGAAQIDRLKLDLLITESTYAKTVRDSKHAREREFLKAVHKCVSGGGKVLIPAFALGRAQELCILLDDYWERMNLKIPIYFSAGLTIQANMYYKMLIGWTSQKIKNSYTVHNPFDFKHVCHFERSFINNPGPCVLFATPGMISGGFSLEVFKKWAPSEKNLVTLPGYCVAGTIGHKLMSGKPTRIDIDKDTHIDVRCQIHQLSFSPHTDSKGIMDLTEFLSPSHVILVHGEKPQMAFLKERIESELGMQCCYPANNETVSIPTSQNLKINATEKFIVSFSEPEFWWRHATRLQDXGVAEGVLLMEKSKTPKILREDELLHSLGMETHFVHFEPLHPSSIEVKHTGESAERAKGLHVNILE

SEQ ID NO: 129260 - protein, 695 aa, Oryza sativa
  unsure (1)..(695): unsure at all Xaa locations
  Clone ID: PAT_MRT4530_31533C.1.pep
MILSALATSVGINLGLTVLLAAAYTLLRRRPPYVAVYSPRRPYAPPEPWLPAAWRRTEADVHAAAGLDGVVFLRIFVFSIRVFAAAAVVGVGVLMPVNFMGDQLRQIDFSDLPNKSVDLFSVSNVQDGSNKLWLHFSAVYIITGITCYLLYYEYKYISGKRLEYFMTSKPLPQHFTVLVRAIPVTNGVSVSDAVDKFFKEYHSSTYLSHTVVHQTGKLRRLLNDAENICTKLANLKSVRRTSGDPPGKFLGIFGRNDLVGKYQKRLEDLEENVRMEQSDTTRSRQEVPAAFVSFRSRYGAANAIYIRQSDKPTEWQTEHAPDPHDVYWPFFSTSFMDRWISKFVVSVAXILLILVFLLVSAFVQGLTYMEQLETWLPFLRNILEMSVVSQLVTGYLPSVILHFLSSYVPSIMKLFSTMQGFISVSGIERSACNKMLRFTIWSVFFANVLTGSVLGQLEIFLDPKEIPKRLAVVVPAQASFFITYVVTSWTSIASELTQTAALLFHLWGSCAKCCKRDESKPPSMHYHSEIPRVLLFGLLGLTYFIVSPLILPFVLVYFCLGYFIYRNQLFNVYSPKYDTGGRFWPIVHGGTIFSLVLMHVIAIGVFGLKKLPLASSLLVPLPVLTLLFNEYCRNRFLPIFEAYSTESLIKKDREEESKPEMAEFFSNLVNAYCDPAMKPIQHSSNSDERTTPLLS

SEQ ID NO: 129261 - protein, 572 aa, Oryza sativa
  Clone ID: PAT_MRT4530_31534C.1.pep
MAIECLVLGAGQEVGKSCVVVTFGGGKRVMFDCGMHMGHRDSRRYPDFDRLLADGAADYTAAISCVVITHFHLDHIGALPYFTEVCGYHGPVYMTYYDCAALVYPFQQYPTKALAPLMLEDYRKVMVDHRGEEEQYSYEDILRCMRKVIPLDLKQTIQVDKDLSIRAYYAGHVLGAAMIYAKVGDAAIVYTGDYNMTPDRHLGAAQIDRLKLDLLITESTYAKTVRDSKHAREREFLKAVHKCVSGGGKVLIPAFALGRAQELCILLDDYWERMNLKIPIYFSAGLTIQANMYYKMLIGWTSQKIKNSYTVHNPFDFKHVCHFERSFINNPGPCVLFATPGMISGGFSLEVFKKWAPSEKNLVTLPGYCVAGTIGHKLMSGKPTRIDIDKDTHIDVRCQIHQLSFSPHTDSKGIMDLTEFLSPSHVILVHGEKPQMAFLKERIESELGMQCCYPANNETVSIPTSQNLKINATEKFIVSFCMDETENDPQKQNLNFGGDMPQGCRTEGVAEGVLLMEKSKTPKILREDELLHSLGMETHFVHFEPLHPSSIEVKHTGESAVQQSSLEHLDCE

SEQ ID NO: 129262 - protein, 148 aa, Oryza sativa
  unsure (1)..(148): unsure at all Xaa locations
  Clone ID: PAT_MRT4530_31535C.1.pep
RPQTVAEEAAWPLPSLPPSLLDLTEERGHLQWRRPPTGGSHRQQWRRRRDPSPPPRSSGGGVGASRGADGPTPPLPPSLPDPAKGGXAGSGRGGTSPPLPSPPSLLDSAEGEGRWRRPQQVEEEGAGSGRGGTTPPLSLPPSLPPSQI

SEQ ID NO: 129263 - protein, 37 aa, Oryza sativa
  Clone ID: PAT_MRT4530_31536C.1.pep
FVTLRSNHGLIMAFIKKIKIGSQLNKENLVELIGRVV

SEQ ID NO: 129264 - protein, 92 aa, Oryza sativa
  unsure (1)..(92): unsure at all Xaa locations
  Clone ID: PAT_MRT4530_31537C.1.pep
RRSRMIEQEIVSVGARYKQTSTRTRMKEMMTSGNLIPSXTSPLLRLLSGISLAEWGPHRQRGFLGPHGNMLTGQEITCYTLQAAVTRELTTD

SEQ ID NO: 129265 - protein, 64 aa, Oryza sativa
  Clone ID: PAT_MRT4530_31538C.1.pep
RQRKRGLNNKVKDWGVVLPELVLNFLNPVDFNPLHSLHLYHLIKLWATKMLLRPQHFKGWQWGN

SEQ ID NO: 129266 - protein, 429 aa, Oryza sativa
  Clone ID: PAT_MRT4530_31539C.1.pep
MAPSLLASAASQILAAPRRGGRGRRRLVIACSAGAGAPPKLVTFLGKGGSGKTTAAAVAAQYYASEGLKTCLVIQSQDPTAEQLMGCKIGNSLTECAANLSTMKLETSKMLLEPLDRLKKVDSQINLTQGVLEAVVGEELGVLPGMDSVCSVLALQKLLNFFSTQRNSSQEEFDVVVYDCNNTEEILRLIGATERARSYLRYVKDLAEKTDIGRLASPSAMRLIYDSARPNGKTSEGRLSSELWNDIEQLIQRISVWFADPSKFACFLIMDPRRSISVSSALRYWGCTTQAGGNICGAFGYTEQRFEIHQGVAEKFLPMTFSFLPFLPTDSSADWSRVLNSLSQNAKDLLRNTSNKVYPSVSFDSVQKSVTLFMPGFDKSEIKLYQYRGGSELLIEAGDQRRVVKLPPAMQGKVGGAKFVDRNLIVTIR

SEQ ID NO: 129267 - protein, 83 aa, Oryza sativa
  unsure (1)..(83): unsure at all Xaa locations
  Clone ID: PAT_MRT4530_3153C.1.pep
GLALPHPPPAPPGPRPPHPLLPAPPRLPPPXPAPPPLRRGRRLSRRLPXPYPNKQPAPNGARVKAQKPPAAAAAPPLPKFPDS

SEQ ID NO: 129268 - protein, 68 aa, Oryza sativa
  unsure (1)..(68): unsure at all Xaa locations
  Clone ID: PAT_MRT4530_31540C.1.pep
VGDAGILQEYHMXRSTIVGTRXHEHLRGTNKDPCTSSCMYRAKGRIYLYPCLLFRASKAMNGANYGRT

SEQ ID NO: 129269 - protein, 69 aa, Oryza sativa
  Clone ID: PAT_MRT4530_31541C.1.pep
YAMHNIVYLCWTRALPADDEDGDADAHTCATWHHMSTSNISSMWLLLDQTLVTCTLVIRCCNTIRVAKH

SEQ ID NO: 129270 - protein, 73 aa, Oryza sativa
  unsure (1)..(73): unsure at all Xaa locations
  Clone ID: PAT_MRT4530_31542C.1.pep
YIIRALTYTEXAQGAPNITLPGGVQPFSXGEQLLAPMGVCNNPRXHQLWXQGRLPQNGQLPGSRGTYPPGVIN

SEQ ID NO: 129271 - protein, 155 aa, Oryza sativa
  unsure (1)..(155): unsure at all Xaa locations
  Clone ID: PAT_MRT4530_31543C.1.pep
MPSSPRSCSASAVAKRRRGWWWQLPATSSPPPHRPSPPDAASPASXPCTPPPPPPAPTAPPPPAPPSTAPPPPPPSPAPXPPPPSTARSPPPSSTARPAPPSSTAPRPMPPSSTVRRQPPSSTARRPTPSSTAPRPAPSSTAPWPTPTPPSSTAP

SEQ ID NO: 129272 - protein, 136 aa, Oryza sativa
  Clone ID: PAT_MRT4530_31544C.1.pep
MAADAQEETCLQMAESFDTTVMDHELCTAYRDPADRLRRIKVLNQSVLSHLPCQPLYPSCFCSKQAERTHGFLLICILQASWVFEMFKLQTLRRPLDHQHYRMRKDIRSHISGFLPSPNHRLLSLDRCLNHERMTR

SEQ ID NO: 129273 - protein, 420 aa, Oryza sativa
  Clone ID: PAT_MRT4530_31545C.1.pep
MLRVVSTLPALRPLLAGSTLLLNARPLLRSRLTRRPFRAVSSSTASPSSSSSGARDFGGVDFGDERLLRCAAAGRAPLRVAVLVSGGVDSSVALRLLHAAGHRCTAFYLKIWFQEDFRNFWSECPWDDDLKYAQAVCDKIDVPLEVVHLSDEYWNHVVSHIINEYRSGRTPNPDVLCNTRIKFGAFLEAIENLGFDYIASGHYAHVVHPSPDDVEGPSVLQLSKDKVKDQTYFLSHLSQTQLRRLLFPLGCITKDEVRRLAAQMDLPNQDRKDSQGICFLGKVKFSEFVERQIGEMEGVLLEAETGDYLGTHRGFWFYTIGQRQGLRLPGGPWYVVEKGVQNNVVFVSRNYYSLDKRRRTFRVGSLNWFSNSGPTNNEQLKCKGDATKIVDLDDPGALDLDFRVDTSVVGLTDALAYPEN

SEQ ID NO: 129274 - protein, 66 aa, Oryza sativa
  Clone ID: PAT_MRT4530_31546C.1.pep
RNEKILHITWCILTERTFFSKITTSKITPCIITIHILKLELYSNTRIPHVTVILSYYLTKHITQML

SEQ ID NO: 129275 - protein, 762 aa, Oryza sativa
  Clone ID: PAT_MRT4530_31547C.1.pep
MASSSSGRRVGGPRGGGESSPSPAAGAGAAASGGRRILRTQTAGNLGESIFDSEVVPSSLVEIAPILRVANEVEGSNPRVAYLCRFYAFEKAHRLDPTSSGRGVRQFKTALLQRLERENDPTLKGRVKQSDAREMQSFYQHYYKKYIQALQNAADKADRAQLTKAYQTAAVLFEVLKAVNVSQKIEVDQAILETHNQVEEKKKLYLPYNILPLDPDSANQAIMRYPEIQAAFHALRNTRGLPWPKDHEKKPDADLLGWLQAMFGFQKDNVSNQREHLILLLANVHIRQIPKPDQQPKVSLLLNVHIGACVILVLDDRALDTVMKKLFKNYKRWCKYLGRKSSLWLPTIQQEVQQRKLLYMGLYLLIWGEAANLRFMPECLCYIYHHMAFELYGMLAGNVSPTTGENVKPAYGGDEEAFLKKVVTPIYKVIEKEAERSESSERSERSKTTKSKHSHWRNYDDLNEYFWSRDCFRLGWPMRADADFFKTPDYAYHDEVSGENRRVGSGQWMGKVNFVEIRSFWHIFRSFDRMWSFLILSLQAMIIIAWNGGTPSDIFDAGVFKQVLSIFITAAILKLGQAILDIILSWKARRSMSLAGKLRYILKLISAAAWVVILPVTYAYTWENPTGLARTIKSWLGDGQNQPSLYILAVVIYLAPNMLSAVLFLFPVLRRALERSNLKVVTFMMWWSQIKPLVRPTKDIMKEPIRTFQWHEFFPHGNNNIGIVIALWAPIILVYFMDTQIWYAIFSTLIGGIYGACRRLGE

SEQ ID NO: 129276 - protein, 47 aa, Oryza sativa
  Clone ID: PAT_MRT4530_31548C.1.pep
TVLESDSFLRVPSTRTLSRQGSFFFVSFVITYDLRCFGVSDAVYIHT

SEQ ID NO: 129277 - protein, 654 aa, Oryza sativa
  Clone ID: PAT_MRT4530_31549C.1.pep
MAIHVLVPDAGGRHHRHGCPPFTCGNLSSVSSPFRRRGDPSECGVLSYELNCADDKATIQIDNGTYYVTGINYTDSTFLIVDADISDSPSSCPLPRWNSLREPRFQSLEPSCGYLAMTPLGGRDSVAPVNESLSLSYADVVKSMRKGFRVQFPFRYRTGSFKQCPMDSIPICLADLEDDCRFLLTPLAVLVFLAHKYWKTRVTIDAVEKFLRMQQMLGPTRYAYTDITAITGHFREKLGQGGYGSVYKGVLLPGDLHVAVKMLNGNSNCNGEEFISEVATIGMIHHVNVVRLVGFCSEEMRRALVYEHMPRGSLDKYIYLSERSFSWDKINEIALGIARGINYLHQGALRGTVGYMAPEMVSRSFGVISSKSDVYSFGMLLLEMAGGRRNVDPNADSSKSKAYYPSWVYDQLIADQQFDEISNVANMHELERKLCLVGLWCIQMKSHDRPTMSEAIEMLEGGVDALQVPPRPFFCDGDGIGNGMPPPQILHYDIKPHNILLDDNFVPKVADFGLAKLYPRDNSFVPLGALRGTIDTGGRRNLDMHAENSSQAYYPSWVYDRLTEQQVSAGEISDATAADMHELEWKLYIIGLHCIQMKSHDRPTMSEVIEMLEGGVVGLQMPPRTFFCDDESMSPMMDSYQFSSGLTEILEEDE

SEQ ID NO: 129278 - protein, 93 aa, Oryza sativa
  Clone ID: PAT_MRT4530_3154C.1.pep
LKFMMLKLLLMCFVMLRAVLVKINLKAWYSQISKLLFMAGLRIYQNFSMPTLFYDEDNGDDIDLLLDLQGFHCPILRCGIIYPRPPPIPLDQA

SEQ ID NO: 129279 - protein, 74 aa, Oryza sativa
  unsure (1)..(74): unsure at all Xaa locations
  Clone ID: PAT_MRT4530_31550C.1.pep
QAHHTHARHITSTQAPPXXFNLHPTHRTRSPAASHTPHHPTKLASSPSLRPRSPXXXXAPHSPSTTSPAPIPTS

SEQ ID NO: 129280 - protein, 462 aa, Oryza sativa
  Clone ID: PAT_MRT4530_31551C.1.pep
MAAMVVGALRRGTATAGGSSRSFARSLPRPVSTLVVAEHEGGFVKPSSLSALAAAEAIGKDDNRVSLLLGGSGPGLHKAAEHAASSHPLVSEVLVADSDVFAHPLAEPWAELLRSVQHKGGYSHVIASSTSFGKNLLPRAAALLDVSPVTDVTSISEPRVFVRPIYAGNALCTVRYTGEDPCMMSIRSTSFSPTEAMSEAKVAPITQVDLSFLSEGSSGKSAWVNLKSQDTERPDLANAPVVVTGGRGLKSAENFKVLEQLAEKLGAAVGATRAAVDAGFVPNELQVGQTGKIVAPELYMAFGVSGAIQHLAGMRDSKVIVAVNKDADAPIFQVSLKVQYRTAKQVRQSPASRMPHGRSGSAQPPAASGLGAERRTPTCRLQLCSACSCSADGLEQPPAWLPPGPLQAAAPAAARGTPSPVGHGLGGQGARRVGNWGKIANGLICGPIRPQVERKEGGEWKI

SEQ ID NO: 129281 - protein, 101 aa, Oryza sativa
  Clone ID: PAT_MRT4530_31552C.1.pep
MPKAAAPAKRATRTKRAKKDPNAPKRGLSAYMFFANEQRENVREENPGISFGQVGKLLGERWKALNEKQRAPYEAKAAADKKRYEDEKQAYNADQEEEESS

SEQ ID NO: 129282 - protein, 83 aa, Oryza sativa
  Clone ID: PAT_MRT4530_31553C.1.pep
MMSRNPSYYYSGEGELSLAVQRQDSLYRDASRAGQHEQAHGEGWARTLRLAFQCFGVLYGDIGTFPLYVYFTNFRRQSATTDD

SEQ ID NO: 129283 - protein, 1420 aa, Oryza sativa
  Clone ID: PAT_MRT4530_31554C.1.pep
MEFYAYSMLLILPLILYMSYHLTRTLAEKKPTTHGLKAHPLLGHLPAFVKNSHRFLDWSTELIAGSPEMRIGLWIPGMRSGIVTGNPADVEHILRTNFANYPKGQHAIGTLEDFLGHGLFNSDGEQWLWQRKNASYEFSKRSLRKFVVDVVQAEVANRLLPLLRRAAGDGVGGDAVVLDLQDVLQRFGFDTICMVAFGHDPRCLADGGVLEEAKSEFMHNFGEALDLVIGRFMDPIEVSWKIKKWLNIGTERRLKKAIADVHAFAMDIVRARRQSASVKDRDDVLSRFVASDEYSDEVLRDIVLSFLVAGRETTSSGLTWFFWLLSSRPDVVARIADEVRAVRKATGTRPGEPFGFDALREMHYLHAALTESMRLYPPVPTDPQSCAADDTLPDGTFVRAGWFVNYSAYAMGRLAAIWGEDCMEYRPERWLGDDGAFQPASPFRFTVFHAGPRMCLGKEMAYVQMKSIVANVIEELVVDVVKEVAGGGVPEHVFSISLRMKGGLPVKIRRKGHMRGTVRPSIQAAAPGPRWLRLAATLRPISPATAAVRYPLFPLACGHQVSAVTMAKEVDRFVELVVVRHGETSWNSSRIVQGQMDPELNEIGKQQAVVDGGESLNQLSEQGISYLNKVAQNHIGERVIVVGHGAAILELCRHTDPPNSSIRRKIPNTSLNIFRISGVTGRWILERCGDVGHLSENGFLENAFGGRPIGCCFSPPRFLTPPPQPQPPPPPSPSPSPSPSPSPPPQPQPPSPSPSPSPPPRRLRFMFRLLPRITPLPRRRLRRSHNPNPLISPAVAASLAGVLATRSTNPTWARSLAALLPSPLSDAHLAAAVSSLPDPDLAVALLSWSQSPDHHVALQDPTPLAHSTLLRLLARSRRFDAVDDTLQSMSLAGAAPTRACLGALVAAYADAGMLGKATEMCERVREQYGSLPEVTHCNRLLKLLVEQRRWDDARKLYDEMLGKDSGADNYSTCVLVRGLCLERRVEEGLKLIEARWGAGCIPHVVFYNVLIDGYCRRGDMGRGLLLLGEMETNGFLPTLVTYGSLINWLGKKGDLEKIGSLFLEMRKRGFSPNVQIYNSVIDALCNCRSATQAMVILKQMFASGCDPDIITFNTLITGLCHEGHVRKAEHFLREAIRRELNPNQLSYTPLIHGFCMRGELMVASDLLVEMMGRGHTPDVVTFGALIHGLVVAGKVSEALIVREKMTERQVFPDVNIYNVLISGLCKKRMLPAAKNILEEMLEKNVQPDEFVYATLIDGFIRSENLGDARKIFEFMEHKGVCPDIVSCNAMIKGYCQFGMMSEAILCMSNMRKVGCIPDEFTYTTVISGYAKQGDTDSAEGLFANMQAEALSPNVQLEVERSGTFIVPSNWRSGINMTKSPAEISTQSVSNGHSTTVDAIVTLQARLFGRMRRCKSDCNVA

SEQ ID NO: 129284 - protein, 110 aa, Oryza sativa
  Clone ID: PAT_MRT4530_31555C.1.pep
PHPTRPAWRPQQKNPLLTRPARRPQQRNPRYPARPTQKPRQKNLQRPARPTRRPRSRNLQPAKAMHPPWLRNPRQVRPRHPPRQRNPQQTRPTQRRPALPVEATNTSISS

SEQ ID NO: 129285 - protein, 476 aa, Oryza sativa
  Clone ID: PAT_MRT4530_31556C.1.pep
MDSYYCSMLFFLPPILYVSYHLTRILADKKKPTTHGLKAHPLLGHLPAFVNNSHRFLDWTTELIGEHAIGMLEDFLGHGLFNSDGEQWLWQRKNASYEFSKRSLRRFVVDVVQAEVADRFLPLLRRAAGDGRGGDIVVLDLQEVLQRFGFDTICMVAFGHDPRCLADGSVMEDARSEYMHTFGEAQDLVVGRFFDPIEVSWKIKKWLNVGTEHRLRKAIADVHAFAMDIVRTRRQSASVQDRDDVLSRFVASDEHSDEVLRDIVLSFLIAGRETTASGLSWFFWFLSSRPDVVARIADEVRAVREATGTRPGEPFGFDALREMHYLHAALTESMRLYPPAPIDSQSCAADDTLPDGTLLRAGWSVTYSAYAMGRLAAIWGEDCLEYRPERWLGDDGAFQPASPFRFTVFHAGPRMCLGKEMAYVQMKSIVANVLEEFEVDVVKEIAGGGVPEHVLSVTLRMKGGLPVKIRRKTEAY

SEQ ID NO: 129286 - protein, 542 aa, Oryza sativa
  Clone ID: PAT_MRT4530_31557C.1.pep
MNTPLASIHRSTCRQPSLLPSLSMAMDTYYYSMLFVLPPILYMSYHLTRILADKKKPTTHGLKAHPLLGHLPAFVNNSHRFLDWTTELIVGSPEMRMGFWIPGMRTGIITGNPADVEHILRTNFANYPKGEHAIGMLEDFLGHGLFNSDGEQWLWQRKNASYEFSNRSLRRFVVDVVQAEIADRFLPLLRRAAGDGGGDGDVVVLDLQEVLQRFGFDTICMVAFGHDPRCLADGGVMEDARSEFMHTFGEAQDLVVGRFFDPIEVSWKIKKWLNVDTERRLRKAIADVHAFAMDIVRARRQSASVNDRDDVLSRFVASDEHSDEVLRDIVLSFLIAGRETTASGLSWFFWFLSSRPDVVARIADEVRAVREATGTRPGEPFRFDALREMHYLHAALTESMRLYPPAPIDSQSCAADDTLPDGTLLRAGWSVTYSAYAMGRLAAIWGEDCLEYRPERWLGDDGAFQPASPFRFTVFHAGPRMCLGKEMAYVQMKSIVANVLEEFEVDVVKDVAGGGVPEHVLSVTLRMKGGLPVKIRRKTEAY

SEQ ID NO: 129287 - protein, 515 aa, Oryza sativa
  Clone ID: PAT_MRT4530_31558C.1.pep
MEFYAYSMLLILPLILYMSYHLTRTLAEKKPTTHGLKAHPLLGHLPAFVRNSHRFLDWSTELIAGSPEMRIGLWIPGMRSGIVTGNPADVEHILRTNFANYPKGQHAIGMLEDFLGHGLFNSDGEQWLWQRKNASYEFSKRSLRKFVVDVVQAEVANRLLPLLRRAAGDGVGGDAVVLDLQDVLQRFGFDTICMVAFGHDPRCLADGGVLEEAKSEFMHNFGEALDLVIGRFMDPIEVSWKIKKWLNIGTERRLKKAIADVHAFAMDIVRARRQSASVKDRDDVLSRFVASDEYRDEVLRDIVLSFLVAGRETTSSGLTWFFWLLSSRPDVVARIADEVRAVRKATGTRPGEPFGFDTLREMHYLHAALTESMRLYPPVPTDPQSCAADDTLPDGTFVRAGWFVNYSAYAMGRLAAIWGEDCMEYRPERWLGDDGAFQPASPFRFTVFHAGPRMCLGKEMAYVQMKSIVANVLEELVVDVVKEVAGGGAPEHVFSISLRMKGGLPVKIRRKGECV

SEQ ID NO: 129288 - protein, 65 aa, Oryza sativa
  Clone ID: PAT_MRT4530_31559C.1.pep
MLILFIELINILIYDFCLGKKNALQADNAKSSRAISMSSAVCSLVVLLSDEHYFLGSSMDGSVSA

SEQ ID NO: 129289 - protein, 52 aa, Oryza sativa
  Clone ID: PAT_MRT4530_3155C.1.pep
MNCTRRVTSSRRKIPTAHFTASTFVLRMLMSAVIQPELRHKYNLRSILSGWR

SEQ ID NO: 129290 - protein, 227 aa, Oryza sativa
  unsure (1)..(227): unsure at all Xaa locations
  Clone ID: PAT_MRT4530_31560C.1.pep
RGLLLLGEMETNGFLPTLVTYGSLINWLGKKGDLEKIGSLFLEMRKRGFSPNVQIYNSVIDALCNCRSATQAMVILKQMFASGCDPDIITFNTLITGLCHEGHVRKAEHFLREAIRRELNPNQLSYTPLIHGFCMRGELMVASDLLVEMMGRGHTPDVVTFGALIHGLVVAGKVSEALIVREKMTXRQVFPDVNIYHVLISGXCKKRMLXAAKNILEEMLEXNVQPD

SEQ ID NO: 129291 - protein, 44 aa, Oryza sativa
  Clone ID: PAT_MRT4530_31561C.1.pep
MPSPVRHLAAARHRSCLRHWSLYLKIGASDPVYNLMFCTVAVLH

SEQ ID NO: 129292 - protein, 288 aa, Oryza sativa
  Clone ID: PAT_MRT4530_31562C.1.pep
MRGTVRPSIQAAAPGPRWLRLAATLRPISPATAAVRYPLFPLACGHQVSAVTMAKEVDRFVELVVVRHGETSWNSSRIVQGQMDPELNEIGKQQAVVVARRLARKARPAAIYSSDLKRAAETVKIIAKVCDVSNLVLIEALRERHMGYLQGLTWDDAMNKSPGVFKGFANFEVKNGLDFDGRNHEFPDGGESLNQLSEQGISYLNKVAQNHIGERVIVVGHGAAILELCRHTDPPNSSIRRKIPNTSLNIFRISGVTGRWILERCGDVGHLSENGFLENAFGGDGASA

SEQ ID NO: 129293 - protein, 109 aa, Oryza sativa
  Clone ID: PAT_MRT4530_31563C.1.pep
THPGKGGRDGAGWALRRPLSLSDSPRHERGLPAALRGVGVKPEVWCVWLEGVMRRVLSRPLSDVDLYVNFVVCVPWPVLDRGFNAHSAWNSIREFLGVTRELDLDATVM

SEQ ID NO: 129294 - protein, 137 aa, Oryza sativa
  Clone ID: PAT_MRT4530_31564C.1.pep
ARSNNTCLGGDDGEAFKRTWWPSSVSSLVDGDDASSHSLHANQGDVVAGKVVVVVPPSTDSTLAVGDVGGGEVILPSLYPRSLSSGMPTTSEVDERRRRRGHRTSSVTSKLVVGGAAAGEVVVVSSPSIVRLYGERR

SEQ ID NO: 129295 - protein, 130 aa, Oryza sativa
  Clone ID: PAT_MRT4530_31565C.1.pep
MAAVRGVGLASSLLLLIIIIVSAPHLLLASLPPRDASAAASGSTTTAAAAATTPVAASSFPSEEADHGKKLLHDHGESATSNSYDVVPFQPHCCSNHDLPGQLRAVKYRVLCGNHPGPCPHPKTHKDIRF

SEQ ID NO: 129296 - protein, 44 aa, Oryza sativa
  Clone ID: PAT_MRT4530_31566C.1.pep
SFHVCYQTEECSHSPSLPSGVTPNLHLLCLCYILLKIKLTILST

SEQ ID NO: 129297 - protein, 79 aa, Oryza sativa
  unsure (1)..(79): unsure at all Xaa locations
  Clone ID: PAT_MRT4530_31567C.1.pep
GRPFXXDFIFTGGTPIFFFFHSSFINIFFFNFFLHIVSQQHNGRTQASLILPQEILPHIKHPKTNAGLLTPNPNAYKTK

SEQ ID NO: 129298 - protein, 106 aa, Oryza sativa
  unsure (1)..(106): unsure at all Xaa locations
  Clone ID: PAT_MRT4530_31568C.1.pep
PPHPARRSPARRRRRAGSWVAVSPSLPCWPVPASFALWLPPCSGSGIVCXPLGSLRRRRRRLVPSVCXYVQLKLEXIYNEAVESGSSCSGKSXTAGGKSNLDCFGL

SEQ ID NO: 129299 - protein, 45 aa, Oryza sativa
  Clone ID: PAT_MRT4530_31569C.1.pep
MAEVDRDELQYGRRRKKTWQAGRGSCSGGDFGGGSRAAASSGRGQ

SEQ ID NO: 129300 - protein, 82 aa, Oryza sativa
  Clone ID: PAT_MRT4530_3156C.1.pep
KKEMPKLGGAQKWQYLGVEILGFWGAKWGVLKAAQMGELGKTPPAQKGPLKFRRFPKRAVFKRAPWSWGRGMFFKMKPKILL

SEQ ID NO: 129301 - protein, 691 aa, Oryza sativa
  Clone ID: PAT_MRT4530_31570C.1.pep
MPIIPEQAMEFLSRTWSPSSSDFFQAFVSVCELRPDNLKYVEAADSKKMGTVLASAAALVATVCAEAAELAGTNRSGVTSAVKTGVESCSSAELLTLTATAATCLRGAAALKLRADVRGIGSNNNSVGTSTTSIHKDTTLRVRLPCGSVRLRKVAVFPQCDRVVLRLGKKHLHGAFSTYKNYEVLDVSSNGGDVVVDGMVLFPLVLRTAAGVVQLLLDSQMHCKVWKNAIEGILSDQNGWQLGPSEGHRPTPTPSLQLPPAAAAAASRVPHRHRWRHLRDPLLKWRRRSVRGRRRWRMDWSNLGGEGPAGLIAERVLANDVADYIRFRAVCRLWRLRSVDPLSRALDCRFLPRRWIMLDKAAPPRCRRFLYLSTGECIRTDLPELESHTLVALAPEGLLLLLHQRTLLLRLLNPLTRHLTDLPPVTALLTPEQLRSWHSDGGLEDDPLLARGVGLASATTVALFLCRPKLIAVAKPGDECWAVVVADKNRPYIDSALPFAGRFYCAIGGSVMVLDSSPSSDQIIEGGRGWSPPLSRASPCISPGCQELFTLWTMVGSLMLVYRKIRQSNVDDESRQGAAKYEMKYDVYRVDFDAGDLIPRLAADTLYLGFDCREKTQMNEIDGYNVADGSSEPCHLDSIFREMSQQDGYSVADGSSEPCHLDCIFLQMLQQPYSFVNCLSHCIQGIGDHLA

SEQ ID NO: 129302 - protein, 60 aa, Oryza sativa
  Clone ID: PAT_MRT4530_31571C.1.pep
MVNNIRPFHFGCGFGSYDLNETGGAEAWLGWAGARAQAMQQGVAPAADSIAYFMHQTTSN

SEQ ID NO: 129303 - protein, 291 aa, Oryza sativa
  Clone ID: PAT_MRT4530_31572C.1.pep
MASASRLLPPTPPPHSAASPPARHRHPALAAPRSRRPINPPRLRCRAAAGAAATTTTTTGGGGGGGALVLEGSGAGAVAVREFVTLDELRAAVRLRIRTFYEYATDSYGAEDLRKSLADREYDALQDRISGKMINFQRVSCINGTVPLLPSLVSAEELCSTCKFVEDGEERVVVGSLDLNQCLWLPDELTGKRPGVNESSHTRAYLSNVCVAKELQRNGLGYALVDKSKKLAREWGITDLYVHVAINNEAAQKLYNKCGFVYESEEPAWKARFLGRPRRLLLWLDLKKDAL

SEQ ID NO: 129304 - protein, 129 aa, Oryza sativa
  Clone ID: PAT_MRT4530_31573C.1.pep
DDIISQIDNRHTLQLKNRITHDLVHLIQLDHNIKQNSTCSCADDNLDLVPSMKHCYKQVSLSQGTKINKEIKVADMSSFFLTSCCLSATRLDALLCPALRIVPFSSSSLPHRAFSLGRISLPLAIIVWM

SEQ ID NO: 129305 - protein, 81 aa, Oryza sativa
  unsure (1)..(81): unsure at all Xaa locations
  Clone ID: PAT_MRT4530_31574C.1.pep
KKELQFVGIEHVFTLSREXVKTIVSLVKATGDGLIKTYGVRHGHFGRVSKFVKSPLQESTVLGGNRAKAFSNGTPVEASEV

SEQ ID NO: 129306 - protein, 151 aa, Oryza sativa
  unsure (1)..(151): unsure at all Xaa locations
  Clone ID: PAT_MRT4530_31575C.1.pep
RGEGSRRRRPAPSPLPPASPPTAVLPVVFVDGDQTVDLGTVTVQPFLGVRKLRVVVADRVGLVRQQILASLARPCRARRVPFKEGTELTAAVXHEGSGFYVLAVLHRKRRGGRSGRRLPRRAAVLRLEGRRRGHPQAPPVDRRGPPLLFPP

SEQ ID NO: 129307 - protein, 40 aa, Oryza sativa
  Clone ID: PAT_MRT4530_31576C.1.pep
MASVIAASLNEKPNLVSVESTSGDLLENKSQFLYHEISIF

SEQ ID NO: 129308 - protein, 185 aa, Oryza sativa
  unsure (1)..(185): unsure at all Xaa locations
  Clone ID: PAT_MRT4530_31577C.1.pep
EIPVDAVFQXDEPAGIIGVTKGKGYEGVVTRWGVTRLPRKTHRGLRKVACIGAWHPARVSYTVARAGQNGYHHRTEMNKKVYKIGKSGQESHAACTEFDRTEKDITPMGGFPHYGVVKGDYLMIKGCCVGPKKRVVTLRQSLLKQTSRLALEEIKLKFIDTSSKFGHGRFQTTDEKQRFFGKLKA

SEQ ID NO: 129309 - protein, 34 aa, Oryza sativa
  Clone ID: PAT_MRT4530_31578C.1.pep
WWQVMTLRGVGVRGGIDGVTDGLGLADHLCNGYV

SEQ ID NO: 129310 - protein, 103 aa, Oryza sativa
  unsure (1)..(103): unsure at all Xaa locations
  Clone ID: PAT_MRT4530_31579C.1.pep
FFFFFFFFFFFFFFFFFFPDKXDLPFYFITQYYYWXXTYTIYLEXSIHMXXFPKHTLIXXSXKXXXKGHFVXSKNYXKATLIPILSTHSSTITXHXLSSXXSR

SEQ ID NO: 129311 - protein, 85 aa, Oryza sativa
  unsure (1)..(85): unsure at all Xaa locations
  Clone ID: PAT_MRT4530_3157C.1.pep
CVEPRPEAFVSGRKEPSFAEPESKPAISXSLTKESSLEPSPDSKEXQAPGCTPKFRDDPHSDYDKTLIGIPLVDLAEKANPFCRE

SEQ ID NO: 129312 - protein, 53 aa, Oryza sativa
  Clone ID: PAT_MRT4530_31580C.1.pep
MARTAEASGRQQGWCRRKRTSAPVLVPSRCDSGARRVGDSGLVTIKVQRINDT

SEQ ID NO: 129313 - protein, 136 aa, Oryza sativa
  Clone ID: PAT_MRT4530_31581C.1.pep
FGGLTDDSSDRRQGGGQTGGSEATGVFQALGRGKKEDDGRVKDDDVNKKKNMKEKEKKKHCMQWLIQELIKVFDGSEDEDEGKGDSMPRESICGDGPGVGLVARQAISAVRPEFDLGQTSVFQALDRCNYFELKEE

SEQ ID NO: 129314 - protein, 268 aa, Oryza sativa
  Clone ID: PAT_MRT4530_31582C.1.pep
MKDIVAGNEAQRQGLEKQMLDQGEHLESIRDALRKNYTSLHQLVEELGAKVTIPPHGDETMLVSSLCDLVKEMEKIPGKHVAKVAENTCTGLRTGACHVLACVRLAHPEIDLNEVLTRGGAVDTREDMMSEVAELGETQGGRPNTSNVVPNTVIEAPVPDVEENLFTRFVQGYEAKDRQMVDMIHRYWPARCSQISLYYVPGQGGLKYDGWEKAKYPFYHPNAIRESSGLSLPNPKSDGCGSGIGDIELAFNSRQQNPPTLISLLVPE

SEQ ID NO: 129315 - protein, 61 aa, Oryza sativa
  Clone ID: PAT_MRT4530_31583C.1.pep
FADVERTQPTVQTKSWLTPLSAAELLNATAAMNLSFQSGKPNKCHTQKLIFCFDSKKRRTL

SEQ ID NO: 129316 - protein, 50 aa, Oryza sativa
  Clone ID: PAT_MRT4530_31584C.1.pep
PFGFGLPINSSQPGFSGVPRLKNRNGGIIYVVLSLVLSVKLMQASGIGIF

SEQ ID NO: 129317 - protein, 62 aa, Oryza sativa
  Clone ID: PAT_MRT4530_31585C.1.pep
VYLPLHKVRQGLLWLSVDGLRMQFNTGRFCEVLSFDKFNTQFRLAQSGALEGSWCSLMIIDN

SEQ ID NO: 129318 - protein, 47 aa, Oryza sativa
  Clone ID: PAT_MRT4530_31586C.1.pep
YKYSYFFVRHLICAVIFLSPSPLLNLSRNSITPTQKNFPIRIQSITQ

SEQ ID NO: 129319 - protein, 37 aa, Oryza sativa
  Clone ID: PAT_MRT4530_31587C.1.pep
SKQLVKQSIQESIELCSRRQNQRPLLWTGGYLILEIT

SEQ ID NO: 129320 - protein, 51 aa, Oryza sativa
  Clone ID: PAT_MRT4530_31588C.1.pep
IRPTDPLSVSSDNKDPVFSSFVTVWSIVIACSLCKLPGSACQPCWQSSRLF

SEQ ID NO: 129321 - protein, 67 aa, Oryza sativa
  unsure (1)..(67): unsure at all Xaa locations
  Clone ID: PAT_MRT4530_31589C.1.pep
TGNNLFSSWFRMVYSWFGDTTVQPGWLFRMVGPMQQSMLYSVGLILFNYYLTVFLNSXMFAKCCFCK

SEQ ID NO: 129322 - protein, 60 aa, Oryza sativa
  Clone ID: PAT_MRT4530_3158C.1.pep
SFQMSRERTEEKGGSGSVVGRGTRGRVVRRFPRTRRHPRGCRLRSTSTGERDREVVEPAS

SEQ ID NO: 129323 - protein, 61 aa, Oryza sativa
  Clone ID: PAT_MRT4530_31590C.1.pep
QQIGKTPRISLIILGTLHTTGIPSKCPTTETDHYTFILADLAETAMAGPSPGAQNFLRLPR

SEQ ID NO: 129324 - protein, 1129 aa, Oryza sativa
  Clone ID: PAT_MRT4530_31591C.1.pep
MAASSGIGDSGFARRGWQTSSTAGSPRQTEASFTDDAFPSGSVDGRGKEGAVAAYADDLFTSSRGGRRKQLGPWPRRSTEFPEEGIWSEVGEFGFEQGGRQYNHRVPKLDFPKFDGTDPQDWRMRCEHYFDVNNTYPGLWVRVATIYFYGRAASWLRSSRAHVRFPVWDDFCIAVSTKFDRDQHDVLIRQMDTIRQSRTVWEYYEKFDELMNQLLSYDPVISKKYLVHRFTEGLRREIRNAVLLQRLHDLESALAIVSLQEEVLEAPPESGVKDSKGGMHIRSNSVLKGALPLPLPPGKGVLSAVGKVDDKKGIDGGRPVGGSNKMGKEVLILVDSGSTTSFLSSKVADQLSGVQLVLATTQCSPMSVDWVQKSLVICWQGKSVTLQGIVPELQQCQMISTQQLKEFDDRRAVAHFVQLCSLDDKESSEQIPVKIQHVLQEFASVFDEPMGLPPTQSFDHTIPLIPGAVPVNVRPYRYTPAQKDEIEQQVREMLDKGIIQPSSSPFSSPVLLVKKKDGTWRFCVDYRHLNAITVKNKYPLPIIDELLDELSRAQWFTKLDLRAGYHQIRMKMSDEHKTAFKTHSGHYEFRVIPFGLTSAPATFQGGMNSILSPLLRRCVLVFVDDILIYSATLEDHVNHLRQLFQILVKHQLKVKQSKCSFAQQRLSYLGHIITPNGVSTDDDKIRVVQNWPVPGSVKELRSFLGLTGYYRKFVCHYGILSKPLTNLLRKGQLYIWTSETEAAFQALKQALITAPVLAMPNFSEPFIVETDASDKGIGAVLMQHQHPIAFLSKALGPRHQGLSTYEKKSLAIMLAVEHWRPYLQHAEFFIRTDHRSLSFLDDQRLTTPWQHKALTKLLGLRYKIIYKKGTDNGAADALSRYPSSATLELSALSVAVPDWIQEVVSGYSLDPDACSKVQTLCISASAVPNFSLRNGVLYFKDRIWIGTNTAVQQKILANLHTTAVGGHSGIHVTYHRVKQLFAWPRLRSTVLERVGEVAYRLVLPSSSLIHLVVHVSQLKQALAPSETASPRLPVLRPTTEASPVPLQVLDRRFVHKGSKMVEQVLIKWSGGEPAAVTWENEQELRRRFPTTTTWGQVATQGGGDVTAASEQGVQPETATAAQQQDRSKG

SEQ ID NO: 129325 - protein, 77 aa, Oryza sativa
  Clone ID: PAT_MRT4530_31592C.1.pep
HQSSHLPFLVHVIPRPYECGPRVCFLSLNSKGALSIYSAPGSLYNSACNHVFFYVFLCSLANSISLIPTGNSVVVQV

SEQ ID NO: 129326 - protein, 1383 aa, Oryza sativa
  Clone ID: PAT_MRT4530_31593C.1.pep
MSLNNKQAETQAVVAKLDAGVGGWQPQVESAIQDLCDEVGELRQQLDFLGKSMQASPTTLSPRVPLTDEERKAPLLPTPPTSSHQVAAEGGSNWAHGHGAQQNFRRRASGVVTTLIPTLDKATFESHSVPLHSLENFKSDSEVGEFGFEQGGRQYNHRVPKLDFPKFYGTDPQDWRMRCEHYFDVNNTFPGLWVHVATIYFYGRAASWLRSSRAHVRFPVWDDFCIAVSTKFDRDQHDMLIIQMDTIRQSGTVWEYYEKFDELMNQLLAYDPVISKKYLVHRFTEGLRREIRNAVLLQHPRDLESTLAIASLQEEVLEAPPESGVKDSKGGMHIRSNSALKGALPLPLPPGKGVLSAVGKVDDKKRELMVLHAVQELFSVLDAIGESSFSESAELITSEEQVVMVVPVHAIQGAEHVGSMRILGYIQGKEVLILVDLGSTASFLSSKVADQLSGVQLIPTIAQCSPMSVDWVQKSLVICWQGKSVTLQGIVPELQQCQMISTQQLKEFSDKRAVAHFVQLCSLEDRGSSEQIPVKIQHVLQEFVSVFDEPMGLPPARSFDHTIPLVPGAVPVNVRPYRYTPAQKNEIEQQVQEMLDKGIIQPSSSPFSSPVLLVKKKYGTWRFCVDYRHLNDITAKNKHPLPIIDELLDELSGAQWFTKLDLRAGYHQIRMKMSDEHKTAFKTHSSHYEFRVIPFGLTNAPATFQGVMNSILSPLLRRCVLVLVDDILIYSATLEDHVNHLRQVLQILVKHQLKVKQRYYCTFVRHYGILSKPLTNLLQKGQLCIWTSETEAAFQALKQALITAPVLAMPNFSEPFIVETDASDKGIGAVLMQQKHPVAFLSKSLGPRHQGLSTYEKESLAIMLAVEHWRPYLQHAEFFIRTNHRSLSFLDDQRLTTPWQHKALTKLLGLQYKIIYKKGTDNGAADALSRYPSSATLELSALSVALPDWIQEVVSGYSLDPDACSKVQTLCISVGAVPNFSLKNGVLYFKDCMWIGTNTAVQQKILANLHTAAVGGHSGIHVTYQRVKQLFAWPRLRSTVTQFVNSCDICQHAKSEHVRYPGMLQPLPVPEHAWQMVSLDFIEGLPRSDSFNCILVVVDKFSKYSHFVPLAHPFTALDVAEAYMQYIHKLHGLPQSLISDRDRIFTSTLWTSLFKLAGTQLRMSSSYHPQTDGQTELTAACQSTELADWLHEREKMQTLIRDHLLRAQTRMKFQADNRRSERVFVVGDWVYMKLQPFEQQSVVLERVGEVAYRLALPSSSLIHPVVHVSQLKQALAPSETASPRLPVLRPKPEASPVPLQVMDRRFVRKGSKMVEQVLIKWSGGEPATVTWENEQELRRRFPTTTTWGQVATQGGGDVTAASEQGIQTETSTAAQQQDRPKRM

SEQ ID NO: 129327 - protein, 61 aa, Oryza sativa
  unsure (1)..(61): unsure at all Xaa locations
  Clone ID: PAT_MRT4530_31594C.1.pep
FTFAYHHVEEEYQSVLHIPISLAHVQLLVFLQGPLVIRASFRYAASNLAAXFLESLYSVAS

SEQ ID NO: 129328 - protein, 39 aa, Oryza sativa
  Clone ID: PAT_MRT4530_31595C.1.pep
MNRANPGEKPVAGNPGKTSEQKAAKAPNRKKPRCWRFSK

SEQ ID NO: 129329 - protein, 1592 aa, Oryza sativa
  Clone ID: PAT_MRT4530_31596C.1.pep
MGISAAARGSGVGSSVPEAPVFRPTEEEFGDPLAYVARIRPLAEPYGICRIVPPPSWSPPPALDVCTLSFPTKRQPIHRLLARLAPADPDTFLLDYRRFLHRHRGRKKPKPKLPALSDGRPLDLCRLFHAVKRFGGYDGACAGKRWADVLRLVDDKAPRHAFSVSEHVIAQLYYEHLYQYEHFTNRLPSQSHDDQPPVSASSANISIRRQKKRLRKTSNTMGHCGGSTSAKTAASAPKQKRRKVDATATVVNEAMDQVCEQCNSGLHGEVMLLCDRCDKGWHLYCLSPPLESVPPGNWYCSECMNSDRNCFGFVHRRKTCQVETFRKFEERVRKRWFGHKNPSRVQVEKQFWEIVEGKVGELEVMYGSDLDTSIYGSGFPRLCDPVPSSVDPVMWHKYCSSPWNLNNFPNLPGSVLQTVRDNIAGHLMSNHRAAVSASLFHLHSYSMHVGEPKCWYGVPGAEANAFEKATLRLVMLEYLTFCDLQVMRNALPDLFDAQPDLLFHLVTMLSPSILQANGVPVYSVIQEPGLNCAEAVNFAPADWLPHGGIGAELYRLYRKAPVLSHEELLYVVAKNGVDNESLPYLQGEIERLFVKEKKCREELWITGIVKSNLMPPKNNPNFIGSEEVDLLVYRHLMSCDIDSALIPLILAKFIKSIFSFSQHWKHLCECSPEKHRLLYRHTLAELGDLVCEVSKANLPRENVKQNSLLHSDVFLPTRKDKDQYMSYTQLAEDWLSKADHILHMPFLDTAYATALEDAEQFLWGDHNMDSVRNMSAKLIEGRKWASSVRKCLSQIDGFLHCKENCSEKVNYVEIKELAAVRCKPCYEPSLAQLQVYVDKGEIMINEINNALSSRSKVDYLETLYSRALEFPVELTETSALSCEISSAKSWLKKACDCLEQNKRGIVDIDFLNELKSEELESFLLVVDGANFSIPELNILMQRYSGACSWVNHANNIVGKLLERNDYDNIVEELTGILKDGESLGVKGMLFEEFSVVEEELKKSFCRKQASEALATQTSMEVVKEVLKEASILTIEEEQPFVDLSHNLKAAITWEEKASFILEHSAALPEFENHILCSENIHVILPSELDMKAEVATAKLWMDKCQAYLRPRSDKPASGGFLNVDDLKDLIGQPASMKVILDTSAINSVLNNVIEWEHNSLSLIHSSRSLLDSNVIDSTIDPLKRKLEELQDKINAEIEKGLSLGFEFKVVHELKDSFFTLGWILNALSFCGVTPLLQDAEKLIQQAVNLPASLSDCSLAELLVRGSSWLRKALMFLPGSEMSETSRLLNVENILAEYKASISKFKLIYLIFHALVGDQEIAVPYPMMIAKLEDAINKHNSWAEQCNAFFMFPDHQSWDGLLSLRDSGQSVAFDCTEMDKVVAEIKKIEEWLTHCHCTLFPDGNNSDSLLSALLKIRGSMDNACMLYSDCNQKGLCAICSCDVGDHITPRCMICQARYHSSCVEPLPASTQVTREWTCPFCFHLESGDPLQNRLQEKISKGNRPALPALIGLRSFAKGFYSGIEELDLLEEIAEKAHKFKSYLMQILHDADSYHGEDLSVMHRSLLIALKATSAAGINDRQFSYRFDSLAHED

SEQ ID NO: 129330 - protein, 48 aa, Oryza sativa
  Clone ID: PAT_MRT4530_31597C.1.pep
VTPFLAYYFICTGVKIPAAEQDFCFFGWKDCVVLLMLHGKIELSPRVR

SEQ ID NO: 129331 - protein, 247 aa, Oryza sativa
  unsure (1)..(247): unsure at all Xaa locations
  Clone ID: PAT_MRT4530_31598C.1.pep
MASEMSKNVKVTDDQEVTSQERDQSGGTKVGGEEEIAPLARQSSILSLTLEELQNSLCEPGRNFGSMNMDEFVANIWNAEEFQATTGGCKGAMEEAKVVDSGSGSGDAGGSGLCRQGSFSLPLPLCQKTVEEVWTEINQAPAHTSAPASALQPHAGSGGVAANDRQVTLGEMTLEDFLVKAGXWSRGSFTGQAAMGSGMVNGPVNPMQQGQGGPMMFPVGPVNAMYPVMGDGMGYPGGYNGMAIVPP

SEQ ID NO: 129332 - protein, 40 aa, Oryza sativa
  Clone ID: PAT_MRT4530_31599C.1.pep
KHRVSNSTKNGKISIVWGGCISNAYVKWYDLIIHGQIGAN

SEQ ID NO: 129333 - protein, 229 aa, Oryza sativa
  unsure (1)..(229): unsure at all Xaa locations
  Clone ID: PAT_MRT4530_3159C.1.pep
MEPQSIFQLSAPQGEFYEPPPSSEPILTPGNEIRLEFIRMVREKSFYGLGQENRYIICRXIRGMKQETVRWKLFPFSLHGRAKQWYIFTVGCANSDWEKLRDRLCLPFFPVTRITTLRVEILSYRESAFYLDITVGGSFMHKTPXEGKEILDRISENTSFAGXCVEPRPEAFVSGRKEPSFAEPESKPAISXSLTKESSLEPSPDSKEXQAPGCTPKFRDDPHSDYDKT

SEQ ID NO: 129334 - protein, 85 aa, Oryza sativa
  Clone ID: PAT_MRT4530_315C.1.pep
ARLGRRRRRTTTHSGSGGSEEATRRLGRSAAAAVAARQRGGKARQRRHGSALGHEGFLTRERKPERDDDGVGGGSGGNTQDRRRR

SEQ ID NO: 129335 - protein, 249 aa, Oryza sativa
  Clone ID: PAT_MRT4530_31600C.1.pep
MSWWHVSTRKRVVGLCLAVSELSDAGEKTPLALPKQTPPTLAAPAHFSRKKKTAVKKKSAAAPSKPAPPPPPPPSPPIQQMSSDRTPSAIGSHNIEEEEQSAAPAIPDYFDEEAEEETTSKALAPLDETVEKTLEDISLRLQSSLDNLVTDCGSIRARFAEIQALIPDDLVNTITPAVFLEQYQFKLEKAKQRIADRQERKDIEATIQANRQLVHEEKAKLDQLSVGPIQSNIDLLEARKIDLIAQLEE

SEQ ID NO: 129336 - protein, 380 aa, Oryza sativa
  unsure (1)..(380): unsure at all Xaa locations
  Clone ID: PAT_MRT4530_31601C.1.pep
ILCQQKFFWDKSETYEFDEVLTEFASQKRVYESVFCILQSVLEGYNGTVMAYGQTGTGKTFTLGRLGEEDTAARGIMVRAMEDILAXIAIVEDPRTGDVSLPGATVVEVRDQKSFVDLLRIGEAHRVAANTKLNTESSRSHALLMVILVGSLRPPIVRKSKLVVVDLAGSERIDKSGSEGHTLEEAKSINLSLSALGKCINALAENSPHVPVRDSKLTRLLKDSFGGTARTSLVVTIGPSPRHRGETTSTIMFGQRAMKVENMVKLKEEFDYKSLCRRLDIELDKLIAENERQRKYFDDEIERITAEAQLRVTEAERXYKISLENEKAKYHQEYLDSIKILEEKWKIHQSPKKLIKETEPTSEVGEVQNFTADEKVCAIC

SEQ ID NO: 129337 - protein, 240 aa, Oryza sativa
  unsure (1)..(240): unsure at all Xaa locations
  Clone ID: PAT_MRT4530_31602C.1.pep
MDRAWMYDTKRTHPACLKETSKFVDQAKTHALRENRRTXFCPCFDWKNEKMLQDPKDIFGHIVEREFKDDYKVWTCHGEVAVRNEEVDFFLLXSGENFIIEDMSQGTILEFGCYGIDDANIDFDMEDMLRHVEPEVLTGTKRGLDNXEALEKAMKDLLYDESKGCDSDSTVLACXRSVLELLRLNAIHGXLTLISFNDLMDLLRDMLLKPNLLPTSIYQAKKLICLLALGVQKIHSCVNY

SEQ ID NO: 129338 - protein, 81 aa, Oryza sativa
  Clone ID: PAT_MRT4530_31603C.1.pep
MPKMHLSFELLIEWNFALETFLGEVRIRFVWILIGLGLTWFTCYWFSEELIFLLAKPFLTLPLDSYFVCHKLILFKDMMSF

SEQ ID NO: 129339 - protein, 136 aa, Oryza sativa
  unsure (1)..(136): unsure at all Xaa locations
  Clone ID: PAT_MRT4530_31604C.1.pep
MRRGSSSSSGFGGHLLWLVLVLWSWRIAAAQAQQAPKTDPIEVSALNTIMGRWGLTAPSEWNISGEPCSGVASDNSDWDNYPKDPAIKCDCSSNDNTICHIIKLCTYKVFDAICLKXELQNLTFLQDLNLNQNYLT

SEQ ID NO: 129340 - protein, 1326 aa, Oryza sativa
  Clone ID: PAT_MRT4530_31605C.1.pep
MASIKYDLPLLDYKTRFSLWQVKMRAILAQTSDLDEALESFGKKKSTEWTAEEKRKDRKALLLIQLHLSNDILQEVLQEKTAAELWLKLESICMSKDLTSKMHIKMKLFSHKLQESGSVLNHISVFKEIVVDLVSIEVQFDDEDLGLLLLCSLPSSYANFRDTILLSRDELTLAEVYEALQNREKMKGMVQSDASSSKGEALQVRGRSEQRTYNDSSDRDKSQSRGRSKSRGKKFCKYCKKKNHFIEECWKLQNKEKRKSDGKASVVTSAENSDSGDCLVVFAGCVASHDEWILDTACSFHICINRDWFSSYKSVQNGDVVRMGDDNPREIVGIGSVQIKTHDGMTRTLKDVRHIPGMARNLISLSTLDAEGYKYSSSGGVVKVSKGSLVYMIGDMNSANLYVLRGSTLHGSVTAAAVSKDEPIKTNLWHMRLGHMSELGMAELMKRNLLDGCTQGKMKFCEHCVFGKHKRVKFNTSVHRTKGILDYVHTDLWGPSRKAYLGGARYMLTIIDDYSRKVWPYFLKHKDDTFAAFKEWKVRIERQTEKEVKVLRTDNGGEFCSDAFDDYCRKEGIVRHHTIPYTPQQNGVAERMNRTIISKARCMLSNARMNKRFWAEAANTACYLINRSPSIPLNKKTPIEVWSGMPADYSQLRVFGCTAYAHVDNGKLEPRAIKCLFLGYGSGVKRYKLWNPETNKTFMRRSVVFNKSVMFNDSLPTDVIPGGSDEEQQYPQDEPIAHRRTKRSCGAPVRLIEECDMVYYAFSCAEQVENTLEPATYTEAVVSGDREKWISAMQEEMQSLEKNGTWELVHLPKQKKPVRCKWIFKRKEGLSSSEPPRFKASIVAMHDLELEQLDVKTAFLYGELEEEIYMDQPEGFIVPGKEDYVCKLKRSLYGLKQSPRQWYKSGSPIYLLLYVDDMLIAAKSKEQITTLKKQLSSEFDMKDLGAAKKILGMKITRDRNSGLLFLSQQSYIKKVLQRFNMHDAKPVSTPIAPHFKLSALQCASTDEDVEYMSRVPYSSAVGSLMYSMVCSRPDLSHAMSLISRYMANLDLDKRRSLTGYVFTIGSCAVSWKATLQPVVVQSTTEAEYMAIAEACKESVWLKGLFAELCGVDSCINLFCDSQSAICLTKDHMFHERSKHIDIKYHYVHDVVAQGPVFNDHLYPTARCYTEDRFQGHLKHIWEARPYAMEYLEKHHTRIWYICGFSKMKTKGLKGLLVHEMVDGIREMIMEKFALRRDCGKKMEDGILPNMMKELNNSTGNLKVIKMPRNDDVFAEVTLVESDNSTKRHIVDLDSQHCSCRVWQVTRKPCKHALAWICTNRGKIQAM

SEQ ID NO: 129341 - protein, 500 aa, Oryza sativa
  Clone ID: PAT_MRT4530_31606C.1.pep
MAPPPSLLATALLLLLLAIAGGPNAAAVAEAVRYQTLVATPLSPHPYTATAVEDDGLFQGSLAADEGGAAASTVGLRVVHRDDFAVNATAAELLAHRLRRDKRRASRISAAAGGAAAANGTRVGGGGGGSGFVAPVVSGLAQGSGEYFTKIGVGTPVTPALMVLDTGSDVVWLQCAPCRRCYDQSGQMFDPRASHSYGAVDCAAPLCRRLDSGGCDLRRKACLYQVAYGDGSVTAGDFATETLTFASGARVPRVALGCGHDNEGLFVAAAGLLGLGRGSLSFPSQISRRFGRSFSYCLVDRTSSSASATSRSSTVTFGSGAVGPSAAASFTPMVKNPRMETFYYVQLMGISVGGARVPGVAVSDLRLDPSTGRGGVIVDSGTSVTRLARPAYAALRDAFRAAAAGLRLSPGGFSLFDTCYDLSGLKVVKVPTVSMHFAGGAEAALPPENYLIPVDSRGTFCFAFAGTDGGVSIIGNIQQQGFRVVFDGDGQRLGFVPKGC

SEQ ID NO: 129342 - protein, 1229 aa, Oryza sativa
  Clone ID: PAT_MRT4530_31607C.1.pep
MKYDLPLQDYKTRFSLWQVKMRAVLAQTSDLDEALESFGKKKTTEWTAEEKRKDRKALSLIQLHLSNDILQKVLQEKTAAELWFKLESICMSKDLTSKMHIKMKLFSHKLQESGSVLNHISVFKEIIADLVSMEVQFDDEDLGLLLLCSLPSLYANFRDTILLSRDELTLAEVYEALQNREKMKGMVQSDASSSKGKALQVRGRSEQRTYNDSNDRDKSQSRGRSKSRGKKFCKYCKKKNHFIEECWKLQNKEKRKSDGKASVVTSAENSDSADCLVFFAGCVASHDEWILDTACLFLICINRDWFSSHKSVQNGDVVRMGDNNPREIMGIGSVQIKTHDGMTRTLKDVRHIPGMARNLISLSTLDAEGYKYSGSGGVVKVSKGSLVYMIGDMNSANLYVLRGSTLHGSLTAAAVSKDEPSKTNLWHMRLGHMSELGMAELMKRNLLDGCTQGNMKFCEHCVFGKHKRVKFNTSVHRTKGILDYVHADLWGPSRKPSLGGACYMLTIIDDYSRKVWPYFLKHKDDTFAAFKEWKVMIERQAEKEVKVLRTDNGGEFCSDAFDDYCRKEGIGRHHTIPYTPQQNSVAERMNRTIISKARCMLSNARMNKHYWAEAANTTCYLINRSPSILLNKETPIEVWSGVKGYKLWNPETNKTFMRRSVVFNKYVMFNDSLPIDVIPGGSDEEQQYVSVQVEHVDDQETEIVSNDVNDTVQHSPPVLQPQDEPIAHRRTKRSCGAPVRLIEECDMVYYAFSCAEQVENTLEPATYTEAVQEEMQSLEKNGTWELVHLLKQKKPVHCKWIFKRKEGLSPSGPPRFNARLVAKGFSQIAGVDYNDVFSPVVKHSSIRTFFCIVAMHDLELEQLDVKTIFLHGELEEEIYMDQPEGFIVPGKEDDVCKLKRSLYGLKQSPRQWYKRFDSFMLSHGFKRSEFDSCVYIKFVNGSHIYLLLYVDDMLIAAKSKEQITTLKKQLSSEFDMKDLVASKKILGMEITRDINSGLLFLSQQSYIKKVLQRFNIHDAKPVSTPIAPHFKLSALQCTSTDEDVEYMSRVPYSSVVGSLMYAMVCSRPVLSHAMSLVSRYMANPGKEHWKAVQWIFRYLRGTADACLKFGRTDKGLVGYVDSDFAADLDKRRSLTGYVFTIGSCAVSWKATLQPVVAQSTAEAEYMAIAEACKESVWLKGLFAELCRVDSYINLFCDSQSVICLTKDQIFHERTKYIDIKYHYVCDVVA

SEQ ID NO: 129343 - protein, 273 aa, Oryza sativa
  Clone ID: PAT_MRT4530_31608C.1.pep
MPSPRRAVNLRWSSLETEVEAAIAVEGGCGVDLAMVGRALGLDPATVRLNGYFVSRGRGHVSSAVTWRALLDFFAARGLPTGDAPAAPVAVHGKPAPPPPPPPVSDCTINVCPKRKFGLVSDCTTEICPKRKFGLVSDFTTEVCPKRKFGLASDCTTEVCPKRKFGLVSDCTTEVCPKRKFGLYAGKSLKKSKNSEDGVLSRTGADILSDEITLGLKRRLKLDDANPAKKMKQIECNTETQQPVKFSCSFINGHGKRSRDEEMITSFSCKRVR

SEQ ID NO: 129344 - protein, 77 aa, Oryza sativa
  Clone ID: PAT_MRT4530_31609C.1.pep
IRRHCNPPCRRRPLLTRAGGRRREGGRNGEELSSERGEQEGEWERGAVEPERGAVAAASSMAGSKRICYIVGDEDLH

SEQ ID NO: 129345 - protein, 283 aa, Oryza sativa
  Clone ID: PAT_MRT4530_3160C.1.pep
GWRRLNPLSCNDLPKVRNTGEEGKMLPQRASISRSLSNQPTSLPPRASTSRSMWRFNQLTSWSSSFSPPTSMSSSSSCSHHHPSLSGSLRRPAQKHHIHLHHSGQAMNRGQLHRIHHRKPLSPWKGRQTPQIHPSSATTLGQPRPQTPPPPSSSPIAMKQHRRNSKRDKPELQEDLTTEELRPNLLYTSTGRWPGPSFGPHRRRTTGIGGKRGRGGGFYYRSLFSHKLSRDFCLTLSLLFGDSAAMRRPVGQIEASICRTLRDLSSTNQHRGIEKIVVDYVRA

SEQ ID NO: 129346 - protein, 172 aa, Oryza sativa
  Clone ID: PAT_MRT4530_31610C.1.pep
MANPVKEHWKAVQWIFRYLRGTADACLKFGKTDKGLIGYVDSDFAADLDKRRTLTGYVFTIGSCASTTEAEYMAIAETCKEPVWLKGLFAELCGDDSCINLFCDSQSAIYLTKDHERTKHIDIKYHYVRDVVAQGKLKVYKISTHDNPADMMIKHVPVAKFEFCSSLVGIVV

SEQ ID NO: 129347 - protein, 264 aa, Oryza sativa
  Clone ID: PAT_MRT4530_31611C.1.pep
CLTERHRFEETSGSTFLLAKKMGRGRLISPWMVPGFQMLLPIGWMALGFPSPDASPHRRIAGCRVQTLLPHRRIATQLPITTSYCDRDERGPHHHLRAIAASCDRAPCPHRHLRAIATRWASARVRRTTPLLLCSGTCLHHDHDVLTTSPEIQAARSIIILSAAAAITDRPSSIYTFGFVIFLSCSFSMAANFVCFFAGLCIGISIQANDEEQQRRRRLVELERRGEEREKQVAEMVSREEDRERERKKNLDKLDQIVQILRNL

SEQ ID NO: 129348 - protein, 356 aa, Oryza sativa
  unsure (1)..(356): unsure at all Xaa locations
  Clone ID: PAT_MRT4530_31612C.1.pep
QIAGVDYNDVFSPVVKHSSIRTFFSIVAMYDLELEQLDVKTTFLHGELEEEIYMDQPEGFIVPGKEDYVCKLKRSLYGLKQSPRQWYKRFDSFMLSHGFKRSEFDSCVYIKFVNGSPIYLLLYIDDMLIAAKSKEQITTLKKQLSSEFDMKDLGAAKKILGMEITRDRNSGLLFLSQQSYIKKVLQRFNMHDAKPVSTPITPHFKLSALQCASTDEDVEYMSRVPYSSAVGSLMYAMVCSRPDLSHAMSLVSRYMANPGKEHWKAVQWIFRYLRGTADACLKFGRTDKGLVGYVDSDFAVDLDKRSQSAICLTKDQMFHERTKHIDIKYHYVRDVVVQGKLKGXRIDSCYKKEFVS

SEQ ID NO: 129349 - protein, 537 aa, Oryza sativa
  unsure (1)..(537): unsure at all Xaa locations
  Clone ID: PAT_MRT4530_31613C.1.pep
MASMKYDLSLLDYKTRFSLWQVKMRAVLMQLXDLDGALETFGKKKTTGXTAEEKRKDRKXTAAELWLKLESICMSKDLTSKMHIKMKLFSHKFQESGSVLNHISVFKEIVADLMSMEVQFDDEDLGLLLLCSLPSSYTNFCDTILLSRDEVTLAEVYEALQNREKMKGMVQSDASSSKGEALLVKGRSEQRTYNDSNDRDKSQSRGRSKSRGKKFCKYCKKKNHFIEECWKLQNKDNRKSDGKASVVTSAENSNSGDCLVVFAGCVASHDEWILDTACSFHICINRDWFSSYKSVQNGDVVCMGDDNPHVRHIPGMARNLISLSTLDAEGYKYSGSGGVVKVSKGSLVYMIGDMNSANLYVLRGSTLHGSVTAAAVSKDEPSKTNLWHMRLGHMSELGMAELMKRNLLDGCTQGNMKFCEHCVFGKHKRVKFNTSVHRTKEWKVMIERQTEKEVKVLRTDNGGKFCSDAFDDYCRKEGIVRHHTIPYTPQQNGVAERMNRTIISKARCMLSNTRMNKRFWAEAANTAYYLINRSPSI

SEQ ID NO: 129350 - protein, 59 aa, Oryza sativa
  Clone ID: PAT_MRT4530_31614C.1.pep
MIPNPQQLFTKHRQSKLRNRTATKTIFRGGHFGSSLAEFRAATKQRPVKINIFASGYQL

SEQ ID NO: 129351 - protein, 1097 aa, Oryza sativa
  Clone ID: PAT_MRT4530_31615C.1.pep
MASMKYDLPLLDYKTRFSLWQEKTAAEFWLKLESICMSKDLTSKMHIKMKLFSHKLQESGSVLNHISVFKEIVADLVSMDVQFDDEDLGLLLLCSLPSSYAIFRDTIFLSRDELTLAEVYEALQNREKMKCMVQSDASSSKGEALQVRGRSEQRTYNDSNDRDKSQSRGRSKSRGKKFCKYCKKKNHFIEECWKLQNKEKRKSDGKASVVTSADNSDSGDCLVVFAGCVASHDEWILDTACSFHICINRYWFSSYKSVQNGDVVRMGDDNPREIVGIGSVQIKTHDGMTRTLKDVRHIPGMARNLISLSTLDAEGYKYSGSGGVVKVSKGSLVYMIGDMNCANLYVLRGSTLHGSVTAAAVSKDEPSKTNLWHMRLGHMSELGMAELMKRNLLDGCTQGNMKFCEHCVFGKHKRVKFNTSVHHTKGILDYVHADLWGPSRKPSLGGARYMLTIIDDFARKVWPYFLKHKDDTFDAFKEWKVMIERQTEKEVKVLRTDNGGEFCSDAFDDYCRKEGIVRHHTIPYTPQQNGVAERMNRTIISKARFMLSNARMNKRFWAEAANTTCYLINRSPSIPLNKKTPIEVWSGMLADYSQLRVFGCTTYAHVDNGKLEPRAIKCLFLGYGSGVKGYRLWNLETNKTFMSMSVVFNESVMFNDSLPTDVIPGGSDEKQQYVSVQVEHVDDQETEIVSNDVNDTVQHSPPVLQPQDEPIAHRRTKRSCGALVRLIEECDMVYYAFSCAEQVENTLEPATYTEAVVSRDLIKHSSIRTFFSIVAMHDLELEQLDVKTAFLHGELEEEIYMDQPEGFIVPGKEDYVCKLKRSLYGLKQSPRQWYKRFDSFMLSHGFKRSEFDSCVYIKFVNGSPIYLLLYVDDMLIAAKSKEQIITLKKQLSSEFDMKDLGAAKKILGMEITRDRNSGLLFLSQQSYIKKVLQRLNMHDAKPASTPIAPHFKLSALQCASTDEDVEYMSRVLYSSAVGSLMYAMVCSRPNLSHAMSLVSRYMANPGKEHWKAVQWIFRYLRGTADACLKFGRTDKGLVGYVDSDFAADLDKRRSLTGYVFTIGSCAVSWKATLQPIVAQSTTEAEYMAIAEACKESV

SEQ ID NO: 129352 - protein, 39 aa, Oryza sativa
  unsure (1)..(39): unsure at all Xaa locations
  Clone ID: PAT_MRT4530_31616C.1.pep
QDDSQNLGPLKIPILYIYRYEIASSKSFMSTRSYMXELY

SEQ ID NO: 129353 - protein, 132 aa, Oryza sativa
  Clone ID: PAT_MRT4530_31617C.1.pep
MPIAAKSKEQITTLKKQLSSEFDMKDLGAAKKILGMEITRDRNSDLSHAMSLVSRYMANPSKEHWKAVQWIFRLRGTADACLKFGRTDKGLVGYVDSDFAADLDKRRSLTGYVFTISSCAVSWKATLQPVVA

SEQ ID NO: 129354 - protein, 1223 aa, Oryza sativa
  Clone ID: PAT_MRT4530_31618C.1.pep
MKLFSHKLQESGSILNHISVFKEIVADLVSMEVQFDDEDLGLLLLCSLPSSYANFRDTILLSRSELTLAEVYEALQNREKMKGMVQSDASSSKGEALQVRGRSEQRTYNDSNDRDKNQSRGRSKSRGKKFCKYCKKKNHFIEECWKLQNKEKRKSDGKASVVTSADNSDSGDCLVVFVVCVSSHDEWILDTTCSFHICINRDWFSSYKSVQNGDVVRMGDDNPREIVGIGSVQIKTHDGMTRTLKDVRHIPRMARNLISLSTLDAEGYKYSGSGGVVKVSKGSLVYMIGDMNSANLYVLRGSTLHGYVTAAVVSKDEPSKTNMWHMRLGHMSELGMAELMKRNLLDGCTQGNMKFCEHCVFGKHKRVKFNTSVHRTKGILDYVHADLWGPSRKPSLGGARYMLTIIDDYSRKVWPYFLKHKDDTFAAFKEWKVMIKRQTEKEVKVLRTDNGGGFCSDAFDDYCRKEGIVMHHTIPYTPQQNGVAERMNRTIISKARCMLSNARMNKRFWAEAAKTACYLINRSPSISLNKKTPIEVWSGMPANYSQLRVFGCTAYAHVNNGKLEPRAIKCLFLGYGSGVKGYKLWNPETNKTFMSRSVVFNESVMFNDSLPTDVIPGGFDEEQQYVSVQVEHVDDQKTEIVGNDVNDTVQHSPPVLQPQDEPIAHRRTKRSCGAPVRLIEECDMVYYAFICAEQVENTLELATYTEVVVSGDREKWISAMQEEMQSLEKNDTWELVHLPKQKKPVHFVKHSSIRTFFSIVAMHDLELEQLDVKTAFLHGELEEEIYMDQPEGFIVPGKEDYVCKLKRSLYGLKQSPRQWYKRFDSFMLSHGFKRSEFDSCVYIKFVNVSPIYLLLYVDDMLIAAKSKEQITTLKKQLSSEFDMKDLDAAKKILGMEITRDRNSGWLFLSQQSYIKKVLQRFNMHDTKPVSTHIAPHFKLSALQCASTDEDVEYMSRVPYSSVVGSLMYAMVCSRLDLSHAMSLVSRYMANPGKEHWKAIQWIFRYLRDTANACLKFGRTNKGLIGYVDSDFAADLDKRRSLTGYVFTIGSCAVSWKATLRHVVAQSTTEAEYMAIAEACKESVWLKGLFAELCGVYSCINLFCDSQSAICLTKDQMFHERTKHIDIKYHYVRDVVAQGKLKGKGWIVHLGTPGGVRQPLLFAPVLKIFADLGISLHGARITTIGERVEDLFIIATADRRALNNELQQEVHQRLTEALNPNDKG

SEQ ID NO: 129355 - protein, 1150 aa, Oryza sativa
  Clone ID: PAT_MRT4530_31619C.1.pep
MASMKYDLPLLDYKTRFSLWQVKMRAVLAQTSDLDEALESFGKKKSTEWTAEEKRKDRKALSLIQLHLSNDILQEVLQEKTAAELWLKLESICMSKDLTSKMHIKMKLFSHKLQESGSVLNHISVFKEIVADLPSMEVQFDDEDLGLLLLCSLPSSYANFRNTILLSRNELTLAEVDEALQNREKMKGMVQSDVSSSKGEALQVRGISEQRTYNDSNNHDKSQSRGRSKSRGKKFCKYCKKKNHFIEECWKLQNKEKRKSDGKASVVTSAENSDSGYCLIVFAGCVASHDEWILDTACSFHICINRDWFNSYKSVQNGDVVRMGDDNPREIVGIGSVQIKTHDGMTRTLKDVRHIPGMARNLISLSTLDAGGYKYSGSGGVVKVSKGSLVYMIGDINSANLYVLRGSTLHSSVTAAVVSKYEPSKTNLWHMRLGHMSELGMAELMKRNLLDGCTQGNMKFCEHCVFSKHKRVKFNTSVHRTKEWKVMIERQTEKEVKVLRTDNGGEFCSDAFDDYCKKEGIVRHHTIPYTPQQNSVAERMNRTIISKARCMLSNARMNKRFWAEAANTACYLINRSPSIPLNKKTPIEVWSGMPADYSQLRVFGCTAYAHVDNGKLEPRAIKCLFLGYGSGVKGYKLWNPETNKTFMSRSVVFNESVMFNDSLPTDIIPGGSDKEQQYVSVQPQDEPIAHRRTKRSCGAPVRLIEECDMVENTLEPATYTEAVVSGDREKWISAMQEEMQSLEKNGTWELVHLPKQKKPVRCKWIFKRKEGLSPSEPPRFKARLVAKGFSQIAGVDYNDVFSLVVKHSSIRTFFSIVAMHDLELEQLDVKTAFLHVELEEEIYMDQPEGFIVPGKEDYVCKLKRSLYGLKQSPRQWYKRFDSFMLSHGFKRSEFDSCVYIKFVNGSPIYLLLYVDDMLIAAKSKEQIATLKKQLSSEFDMKDLGAAKKILGMEITRDKNTGLLFLSQQSYIKKVLQRFNMHDAKPVSTPIAPHFKLSALQYASTDEDVEYMSRVPYSSAVGSLMYAMVCSRPDLSHAMSLSTTEAEYMAIAEACKESVWLKGLFAELCGVDSCINLFCDSQSAICLTKDQMFHERTKHIDIKYHYIRDVVAQGKLKVCKISTHDNPADMMTKPILVAKFELCSSLVGIVV

SEQ ID NO: 129356 - protein, 111 aa, Oryza sativa
  Clone ID: PAT_MRT4530_3161C.1.pep
MVAVVFVAVAVPVSLLIWTAAGLLSTSRVCAVSDAIPAASLKMDGSGAFGVLSMATRACGGGSGAAGLGSLLGQSDGGGCGVSGPAVSGSLTRTDGVGCKSCCCCSCSLVG

SEQ ID NO: 129357 - protein, 403 aa, Oryza sativa
  Clone ID: PAT_MRT4530_31620C.1.pep
MAGEAILFSDDIIANILAWLPPKNAARMRLVCKQWHAVTSEHHFMHTNFSRSRDGHSVAGFFLSNELHKKFSYNPLRDSSATHPAAPDLSFVPESGSTVPRKINVTSSCNGLLLCRRPMDSSVASGARWCCYYVCNPATKRFVEIPTPPDGRGRHLNLAYDPSRSPVYKVVALGLAGVHVYSSQARSWRAALRYERGSNPFAGIHHSRGVHWNGSLVWVTSRSRSLLRFAVDDGEGELSSLPMPPARHLQPENRWICGYLGVGESAGAGRGHLRMIGYTEEEKLAARFDVVGMAGDCREWRVLYRVDLTRMKELYPDIQRKTRKHHLIWPRRARLVDCLDLWPLHVAEHGSLLLFGIPGKIMAYGMEDQAISVVWEDAAPPQPRFFRYAWFDFYPYTAGLFAV

SEQ ID NO: 129358 - protein, 215 aa, Oryza sativa
  Clone ID: PAT_MRT4530_31621C.1.pep
MLRKVAVAFLACAALYLAFAAYSRRESLGEVRLPAVTNRVYLDVEIDGQHIGRIVIGLYGDVVPKTVANFRALCTGEEGIGHKGKSLHYKGSRFHRIIPGFMIQGGDIVRGDGKGSESIYGGTFPDENFIVKHTHPGVIAMANSGPDSNGSQFYITTIKTSWLDGEHVVFGRVIQGMDYVYAIEGGAGTYNGKPRKKVVITDSGEIPKEKWAEEV

SEQ ID NO: 129359 - protein, 197 aa, Oryza sativa
  Clone ID: PAT_MRT4530_31622C.1.pep
MLIADKSKEQITTLKKQLSSEFDMKDLGAAKEILGMEITRDRNSVLLFLSQQSYIKKVLQHFNMHDAKPVSTPIAPHFKLSALQCASTDEDVEYMSRVPYSSDVGSLMYLRGIADAFLKFGRTDKELVGYVDSDSAADLDRRSQSAICLTKDQMFHERTKHIDIKYHYVRDVVAQGKLKGEGLFNATRKNLFQGGVC

SEQ ID NO: 129360 - protein, 47 aa, Oryza sativa
  Clone ID: PAT_MRT4530_31623C.1.pep
PKDSCCLLSMGNHLPVVTLSEDSIVKIFNRTMTNLTLSITVIQLACF

SEQ ID NO: 129361 - protein, 173 aa, Oryza sativa
  Clone ID: PAT_MRT4530_31624C.1.pep
MADQLTDDQIAEFKEAFSLFDKDGDGCITTKELGTVMRSLGQNPTEAELQDMINEVDADGNGTIDFPEFLNLMARKMSSGGEKSGSGGGGGGAVKTPSDFLKSIRGRPVVVKLNSGVDYRGILACLDGYMNIAMEQTEEYVNGQLKNKYGDAFIRGNNVLYISTSKRTLTDGA

SEQ ID NO: 129362 - protein, 463 aa, Oryza sativa
  Clone ID: PAT_MRT4530_31625C.1.pep
MKNQIFAVEFDSIKNIEFQDINNNHVGFDINSLISVDSYPAGFYDDKDGIFSNLTITSSEAMQVWVDYNGDIAQISVTMAPMGMAKPLKPLGSANRNLSSVLSEMAYVGFSSAAGRDNTRHYILGWSFGLNSAAPSIDITSLPKMPHFEPKARSKILEIILPIATAVSILSVGTIILLLVRRHLRYSEVREDWEVEFGPHRFSFRDLFHATEGFKDKNLLGIGGFGRVYRGVLPASKLDIAVKRVSHDSKQGMKEFVAEVVSIGRLQHRNIVHLLGYCRRKGITSGLVYLHEEWEKVVIHRDIKASNVLLDAEMNGRLGDFGLARLYDRGVDAQTTRVVGTIGYMAPELASSSKATPLTDVFSFGIFVLEVTCGKRPIKEDVNGNQIMLVDWVLEHWQKGSLTDTVDTKLQGNYDVDEASMALKLGLLCSHPFADARPKMQQVMQYLEGEVPIPEDMPPHLSF

SEQ ID NO: 129363 - protein, 232 aa, Oryza sativa
  Clone ID: PAT_MRT4530_31626C.1.pep
MSLEVRHPARPGCMLTLHGDADAMAFQCTGCMETGKGPRYTSGDHVLHTYCALATPTLQHPLVEGIMELRLVAPTGGDAVRCDACYDAVRGFHYHSSTSGVDLHPGCAKMPRSITLRGGTIFDLRTEVSHRCTSCKAMEGFYRPWFYRSENNPDQRMYLHVKCIKEIQDAGDDDEVRMMVRLQERAGRNVRLERRVCKTLVIMVRIVFRLLIGDPTPILTEGVNAIVSMAMQ

SEQ ID NO: 129364 - protein, 98 aa, Oryza sativa
  Clone ID: PAT_MRT4530_31627C.1.pep
HVDVPHPARVGSVVAAAVAQQQSAAEQGEMAVDERRPRHAGEDGDEPQRGQQANRDLLHPLRQALLPTTAFRRGFDQLPIQDPRTNHHTKPHARLSME

SEQ ID NO: 129365 - protein, 60 aa, Oryza sativa
  Clone ID: PAT_MRT4530_31628C.1.pep
YYYKGAPNSALADGSDGARCLQWIVRFNYKTLLLQLWTTMFITSSLFLLIHWLLQFKPVG

SEQ ID NO: 129366 - protein, 45 aa, Oryza sativa
  Clone ID: PAT_MRT4530_31629C.1.pep
DQDQLRHDDLNYHKERRQRAALRATRYQQSLRRYHQCNVRAWRGI

SEQ ID NO: 129367 - protein, 28 aa, Oryza sativa
  Clone ID: PAT_MRT4530_3162C.1.pep
GGRSTMDRDHAGGSPPVHGTGGPDRPPS

SEQ ID NO: 129368 - protein, 57 aa, Oryza sativa
  Clone ID: PAT_MRT4530_31630C.1.pep
METFASADLYVEVASMPPQQQQVVPTALAPTVTFNQDMLLQLLQFIIKDGYTATAFI

SEQ ID NO: 129369 - protein, 74 aa, Oryza sativa
  Clone ID: PAT_MRT4530_31631C.1.pep
MASEEEDVDGDGDDGGEAAGAEEGSGPFFPILLFPRRHGKNREAINPIQYPFSNPNSQLLIETNKQRRTDGYRD

SEQ ID NO: 129370 - protein, 47 aa, Oryza sativa
  Clone ID: PAT_MRT4530_31632C.1.pep
SPTGWRAHAHAGEKAEPWQSSHGSDYSYVYCRQSDNRGEPGEASSST

SEQ ID NO: 129371 - protein, 153 aa, Oryza sativa
  Clone ID: PAT_MRT4530_31633C.1.pep
VTAPSEPASALEPAKMHSSSMKEDNFMCFVKEEILMHGMEVEDVPNIQERPLLMLEKVEKVRTTLADLFAAEAFSSSDAEDKCYPKIVIVAGASTSKPTSCMEKMHHKKPTKPTSKPLKATRKLSRVMRKMLGKKIHPEQLNGRSNAEGPVTA

SEQ ID NO: 129372 - protein, 302 aa, Oryza sativa
  Clone ID: PAT_MRT4530_31634C.1.pep
LVDPRAAGWFHIGSREMALKVFNWLNRKKHSNVEYCTINENKVAMEEKEDSLRASVTEQDTEALLLRDVLINGILAIGTLGHNVNSLCPESCIEQDEPIIMCDEKVEQEKCEEEKAEAKQDTPVTAPSEPASALEPAKMHSSSMKEDNFMCFVKEEILMHGMEVEDVPNIQERPLLMLEKVEKVRTTLADLFAAEAFSSSDAEDKCYPKIVIVAGASTSKPTSCMEKMHHKKPTKPTSKPLKATRKLSRCATSYTYVLPYSYNWSKHYASSQSLVVMRKMLGKKIHPEQLNGRSNAEGPVTA

SEQ ID NO: 129373 - protein, 121 aa, Oryza sativa
  unsure (1)..(121): unsure at all Xaa locations
  Clone ID: PAT_MRT4530_31635C.1.pep
MQLNPKARTRRNKTKAKRWRCAEIVLNVTLSMCGNHLEVPQSNPTSHIKLYCXDRLHQLTXSDPDSADLIVADLDSSRSLLCFRXDLCLRLRFNLIFRSSETLSSLSPAIPPTQKRLPGDF

SEQ ID NO: 129374 - protein, 65 aa, Oryza sativa
  Clone ID: PAT_MRT4530_31636C.1.pep
RTRGSKKLIGNKNQNISQVYSYITMSLLVHKRQEKKVLHILDSELSVLTASTSNEGKEAPGEFEV

SEQ ID NO: 129375 - protein, 239 aa, Oryza sativa
  unsure (1)..(239): unsure at all Xaa locations
  Clone ID: PAT_MRT4530_31637C.1.pep
MVAEAFTVDLNEPLVFQVGHLGEQYQEWVHQPIVSKEGPRLFANDVLEFLTRTEWWAIPLIWLPVVCWCLTKSVEMGHTLSEVALMVVFGICLWTLIEYIMHRFLFHINTKSYWTNTAHYLLHGNYHKXHPTDGLRLVFPPAAAAILCFPFWNLIRLITTPTTTHGVFGGGLLGYVMYDCTHYYLHHGQPSSDPGKHLKKYHLNHHFRIQNKGFGITSTLWDHVFGTLPSTKTIDKKSS

SEQ ID NO: 129376 - protein, 64 aa, Oryza sativa
  Clone ID: PAT_MRT4530_31638C.1.pep
VYWFQMSNDDIAELRKSSAKHLKLTRTTNGLHISIKCPPRPPPWRSGRAVQEAAKRKGGEEPRA

SEQ ID NO: 129377 - protein, 42 aa, Oryza sativa
  Clone ID: PAT_MRT4530_31639C.1.pep
NYSNLIRSVLLKLSFINDQISIDTKKICLASHTPWMDTRMAR

SEQ ID NO: 129378 - protein, 134 aa, Oryza sativa
  Clone ID: PAT_MRT4530_3163C.1.pep
MTMKPNEVLVLVLVLAVVTSPGTVCGASRTAPAAATKCDPLALRPCAAAILWGEAPSTACCAGLRAQKRCLCRYAKNPDLRKYINSQNSRKVAAACSVPAPRCRLYAPQTNYDDPPYRLSCLITDVRNTIAELI

SEQ ID NO: 129379 - protein, 1248 aa, Oryza sativa
  unsure (1)..(1248): unsure at all Xaa locations
  Clone ID: PAT_MRT4530_31640C.1.pep
MASMKYDLPLLDYKTRFSLWQVKMRAVLAQTLDLDEALESFGKKKTTEWTAEEKRKDRKALSLIQLHLSNDILQEVLQEKTAAELWLKLESIYMSKDLTSKMHIKMKLFSHKLQESGSVLNHISVFKEIVADLVSIEVRGRSEQRTYNDSNDRDKSQSRGRSKSRGKKFCKYCKKKNHFIEDCWKLQNKEKRKSDGKASVVTSAENSDSGDCLVVFAGCVASHDEWILDTACSFHICINRDWFSSNKYVQNGDVVRMGDDNPREIMGIGSVQIKTHDGMTRTLKDVRHIPGMARNLISLSTLDAEGYKYSGSGGVVKVSKGSLVYMIGDMNSANLYVLRGSTLHGSVTAAAVTKDEPSKTNLWHMRLGHMSELGMAELMKRNLLDGCTQGNMKFCEHCVFGKHKWVKFNISVHRTKGILDYVHADLWGPSRKPSLGGARYMLTIIDDYSRKVWPYFLKHKDDTFAAFKEWKVMIERQTEKEEGIIRHHTIPYTPQQNGVAERMNRTIISKARCMLSNARMNKRFWAEAANTACYLINRSPSIPLNKKTPIEVWSGMPADYSQLRVFGCTAYAHVDNGKLEPRAIKCLFLGYGSGVKGYKLWNPETNKTFMSRSVVFNESVMFNDSLPTDIIPSGSDEEQQYVSVQVEHVDDQETEIVGNDVNDTVQHSPPVLQPQDEPIAHRRTKRSCGAPVRLIEECDMVYYAFSCAEQVENTLEPATYTEAVVAMQEEMQSLEKNGTWELVHLPKQKKPVHXFKRKEGLSPSEPPRFKAXVVKHSSIRTFFSIVAMHDLELEQLDVKTTFLHGELEEEIYMDQPEGFIVPGKEGYVCKLKRSLYGLKQSPRQWYKRFDLFMLSHGFKRSEFDSCVYIKFVNGSPIYLLYVDDMLIAAKSKEQITTLKKQLSSEFDMKDLGAAKKILGMEITRDRNSGLLFLSQQSYIKKVLQRFSMHDAKLVSTPIAPHFKLSVLQCASTDEDVEYMSRVPYSSAVGSLMYAMVCSLPDLSHAMSLVSRYMANPGKEHWKAIQWIFSQSAICLTKDQMFHERTKHIDIKYHYVRDVVAQASQWRWWCELNRQNQPVVLAGVVHWLMDASRSSHYILTYDIATAEEGKMDLPTDYCGCKEIRLGSSPEGRLRLLVLHQHLSLSVWLFSGSGSGWTRHIMIETESRLRCVYPSWSVDLELPWSCTWERSDTVLLRPMDYSGSGWTRCPLGLLVLDVTMGEMRTVNNRSDQLVLYAVDLPSRISAMKTY

SEQ ID NO: 129380 - protein, 573 aa, Oryza sativa
  Clone ID: PAT_MRT4530_31641C.1.pep
MAKPLDLPLLLIPVMVVILISVSFAQTNVTSGASVQAVAGAGWSSPSGHFVFGFYATDGGLAVGVWLATAPSITVTWTASRNDTPATGGALRLTYDGRLLWTGANGQDRTVAAPPQPAVAAAMRDDGNFVLYAANATVAWSTFAAPTDTLLAGQDLAPGAQLFSSVSATSRATGKYRLTNQLNDGNLVMYPAGTMNVAAAAYWDTGTFQIGFPLTLRLDASGVLYLVGNNGSYTKNLTKASAAQAVEQAHYHRVTLDPDGVLRSYRHGLLSSGGWKTDVEWIGPSDRCHVKGACGFNSYCVLDRDAQPSCLCPPGFDLIDAGDAAGGCTASSGAGECTGGREPTLAACMSDCFCVAALLDTNDGTCTKQQLPLRYGRAGGGYTMFVKTGGAASPALGGGGGGNHHHHRFRRASTVALVCVGLLTFVALCALLASARLLWLNQRMVRRRVALADAEALDEEAPLRSYSYEELEHATYSFRHPLGRGAFGTVFKGTLRRGGERTVAVKRLEKLVEDGEREFQREESGSVLNHISVFKEIVADLVSMEVRGRSEQRTYNDNNDRDKSQSRGRSKSR

SEQ ID NO: 129381 - protein, 56 aa, Oryza sativa
  Clone ID: PAT_MRT4530_31642C.1.pep
VVMFLFTAGSLCFDHRPSLLSKSVSARYMLLGWQCPQYWSSAIYFNKKKKRRRLRI

SEQ ID NO: 129382 - protein, 86 aa, Oryza sativa
  unsure (1)..(86): unsure at all Xaa locations
  Clone ID: PAT_MRT4530_31643C.1.pep
PXPXHPSRSTHASERRTEATTRAPRPLSHNLAKKLIFFFSFLLPSSASHQSTSISDQIPVHFPFLASNPDYQIITILLQNQKKKSR

SEQ ID NO: 129383 - protein, 1125 aa, Oryza sativa
  unsure (1)..(1125): unsure at all Xaa locations
  Clone ID: PAT_MRT4530_31644C.1.pep
MASMKYDLPLLDYKTRFSLWQVKMRAVLAQTSDLDEALESFGKKKSTVWTAEEKRKDHKALSLIQLHLSNDILQEVLQEKTAAELWLKLESICMSKDLTSKMHIKMKLFSHKLQESGSVLNHISVFKEIVADLVSMEVQFDDEDLGLLLLCSLPSSYANFRDTILLSRDELTLAEVYEALQNREKMKXGEALQVRGRFEQRTYNDSNDRDKSXVEAVISLENKEKRKSDGKASIVTSADNSDSGDCLVVFAGCVASHDEWILDTACSFHICMNIDWFSSYKSVQNGDFVRMGDDNAREIVGIGSVQIKTHDGMTRTLKDVRHIPGMAXNLISLSTLDAEGYKYSGSGGVXGSTLHGSVTAAAVSKDEPSKTNLWHMRLGHMSEFGMAELMKRNLLDGYIQGNMKFCEHCVFGKLKRVKFNTSVHRTKGILDYVHADLWGPSRKPSLGGARYMLTIIDDYSRKVWPYFLKHKDDTFAAFKEWKVMIERQTENEVKVLRTDNGGEFCSDAFDDYCRKEGIVRHHTIPYTPQQNGVAERMNRTIISKARCMLSNARMNKRFWAEAANNACYLINKSPSIPLNKKTPIEVWSGMPADYSQLRVFGCTAYAHVDNGKLEPRAIKCMFLGYGSGVKGYKLWNPETNKTFMSRSVVFNESVMFNDSLPTNVIPGGSDEEQQYVSVQVEHVDDQKTEIVGNDVNDTVQHSPPVLQPQDEPIANRRTKRSCGAPVRLIEECDMVYYAFSCAEQVENTLEPATYTEAVVSGDLVKHSSIRTFFSIVAMHDLELEQLDVKTTFLHGELEEEIYMDQPEGFIVPGKEDYVCELKRSLYGLKQSPRQWYKRFDSFMLSHGFKRSEFDSCVYIKFVNGSPIYLLLYVDDMLIAAKSKEQITTLKKQLSSEFDMKDLGAAKKILGMEITRDRNSGLLFLSQQSYIKKVLQRFNMHAAKPVSTPIAPHFKLSALQCASTDEDVEYMSRVPYSSAVGSLMYAMVCSHPDLSHAMSLVSRYMANPGKEHWKAVQWIFRYLRGTANACLKFGRTDKGLVRYVDSDFAADLDKRSQSAICLTKDQMFHERTKHIDIKYHYVRDVVTQGKLKVCKISTHDNPADMMTKPVPIAKFELCSSLVGIVV

SEQ ID NO: 129384 - protein, 62 aa, Oryza sativa
  Clone ID: PAT_MRT4530_31645C.1.pep
MPGSGGDTRSGGGGIITARMPRFDASVGGRFLAAATSISATVRINPIHRSSPVTVPPVTCPA

SEQ ID NO: 129385 - protein, 1222 aa, Oryza sativa
  Clone ID: PAT_MRT4530_31646C.1.pep
MASMKYDLPLLDYKTRFSLWQVKMRAVLAQTSDLDEALESFGKKKTTEWTAEEKQKDRKALSLIQLLLSNDILQEVLQEKTAEELWLKLESICMSKDLTSKMHIKMKLFSHKLQESGSVLNHISVFKEIVADLVSMEVQFDDEDLGLLLLCSLPSSYANFRDTILLSRDELTLAEVYEALQNREKMKGMVQSDPSSSKGEALQNKEKRKSDGKASVVTSAENSDSGDCLVVFAGCVASHDEWILDTACSFHICINRDWFSSYKSVQNGDVVRMGDDNPHEIVGIGSVQIKTHDGMTRTLKDVRYIPGMARNLISLSTLDAEGYKYSGLGGVVKVSKGSLVYMISDMNSANLYVLRGSTLHGSVTAAAVSKDEPSKTNLWHMRLGHMSELGMAELMKRNLLDGYTQGNMKFCEHCVFGKHKRVKFNTSVHRTKGILDYVHADLWGPSRKPSLGGARYMLTIIDDYSTKVWPYFLKHKDDTFATFKEWKVMIERQTEKEKEGIVRHHTIPYTPQQNGVAERMNRTIISKARCMLSNARMNKRFWAEAANTACYLINKSPSIPLNKKTPIEVWSGMPADYSQLRVFGCTAYAHVDNGKLEPRAIKCLFLGYGSGVKGYKLWNPETNKTFMSRSVVFNESVMFNDSLPTDHSPPVLQPQDEPIAHRRTKRSCGALVRLIEECDIVYYAFSCAEQVENTLELATYTEAVVSGDREKWISAMQGEMQPLEKNGTWELVHLPKQKKPVRCKWIFKRKEGLSPSEPPRFKATLVAKGFSQIAGVDYNDVFSPVVKHSSIRTFFSIVAMHDLELEQLDVKTTFLHGELEVEIYMDQPEGFIVPGKEDYVCKLKRSLDGLKQSPRQWYKRFDSFMLSHGFKRSEFDSCVYIKFINGSPIYLLLHVDDMLIAAKSKEQITTLKKQLSSEFDMKDLGATKKILDLSHAMSLVSRYLANPGKEHWKAIQWIFRYLRGTADACLKFGRTDKGLVGYVDSDFAADLDKRRSLIGYVFTIGSCAVSWKATLQSVVAQSTTEAEYMAIAEACKESVWLKGLFAELCGVDSCINLFCDSQSAICLTKDKMFHERTKHIDIKYHYVRDVVAQGKLKVERLQNGAQSQAEGKSSNRASQHSLARHMQRAAPASARRCTRTCTGLAGVTAPPEYLPCSHPAPDLLVLLQAAVSVPTDRRRRASREEQPARRRQRRGAWWSSAGYVGDEGWRRLQGHNSQQLNL

SEQ ID NO: 129386 - protein, 769 aa, Oryza sativa
  unsure (1)..(769): unsure at all Xaa locations
  Clone ID: PAT_MRT4530_31647C.1.pep
MECNREEAFSAREIAVKKLENRDFVGARKIAIKAQRLFPELENISQLLTVCEVLSSAEAKISGELDWYGVLQVDKMADETVIRKQYNILSYRLHPDNNTLFGAEAAFRFVSEAHAVLSDHAKRSLYDTERQRASREVAKEATQPPNKTEANINNLAGSMPPSASTRSRRDTQTQPTQISTXNKEKTNAKEIRTEAEGEGVTQICPHCQKQSLYYQRNFLARCNDCGKFFAIKLREQSVPSRILSTAAKSPNQHGNQHQQGKCLVTRSEAIQFSAMKQTNTEETDESIKQYGWAGDMEGKGLVTRSDRVQFSEISQAKSHVPPADNDMPGTLVPRSPDPNSIAVQNLTGESVSAGTNAPGSSSLQILGRRKLCDSSDSSRAMNSNIERKRKYNSPSDADWSNEQICNDDVAVTENQFAKQHVPIEVDSEEEGNEKHGDNQQSHRKDDTDTSSQRPDSANPVIAYSSPDFFNFDKSRDVSQIAVDQIWAVYDGHDCMPRAYARINHVDPSNLKVQFTWLVHNTVNEQNSKSTNEKLPFACGNFCLGETDVLHNPSRYLSHSVSSTGKNGNSCDINPNNGEGWXVWALYKGWSMQFVDVADRYQSYGYDIVQVLSSGSMDDGVTVSPLVRIAGVVSLFAKAKNESCFSISSCEVLRFSHSIPFYRTNGNERVGVAEGFLELDTAALPSDLDSAFTSITLESYMALDKKTNIELICYACPDSEFYNIEQDRSHDKFEAGQIWALYSDADKFPNIYGWVSKVPWLHWRVHLADL

SEQ ID NO: 129387 - protein, 1159 aa, Oryza sativa
  Clone ID: PAT_MRT4530_31648C.1.pep
MASMKYDLPLLDYKTRFSLWQVKMQAVLAQTSDLDEALESFGKKKSTEWTAEEKRKDLLQEKTVAELWLKLESIYMSKDLTSKMHIKMKLFSHKLQESGSVVFKEIVADLVSMEVRGRSEQKTYNVSNDRDKSQSRGRSKSRGKKFCKYCKKKNHFIEECWKLQNKEKRKSDGKASVVTSAENSDSGDCLVVFAGCVASHDEWILDTACSFHICINRDWFSSYKSVQNGDVVRMGDDNPREIVGIGSVQIKTHDGMTRTLKDVRHIPGMARNLISLSTLDAEGYKYSGSGGVVKVSKGSLVYMIGDMNSANLYVLRGSTLHGSVTAAVVSKDEPSKTNLWHMRLGHMSELGMAELMKRNLLDGCTQGKMKFCEYCVFGKHKRVKFNTSVHRTKGILDYVHTDLWGPSRKAYLGGARYMLTIIDDYSRKVWPYFLKHKDDTFAAFKEWKVRIERQTEKEVKVLRTDNGGEFCSDAFDDYCRKEGIVRHHTIPYTPQQNGVAERMNRTIISKARCMLSNARMNKRFWAEAANTACYLINRSPSIPLNKKTPIEVWSGMPADYSQLRVFGCTAYAHVDNGKLEPRAIKCLFLGYGSGVKGYKLWNPETNKTFMSRSVIFNESVMFNDSLPTDPQDEPIAHRRTKRSCGAPVRLIEECDMVYYAFSCAEQVKNTLEPATYTEAVVAMQEEMQSLEKNGTWELVHLPKQKKPVRCKWIFKRKEGLSPSEPPRFKAKLVAKGFSQIAGVDYNDVFSPVVKHSSIRTFFSIVAMHDLELEQLDVKTAFLHGELEEEIYMDQPEGFIVPGKEGYVCKLKRSFYGLKQSPRQWYKRFDLFMLSHGFKRSEFDSCVYIKFVNGSPIYLLYVDDMLIAAKSKEQITTLKKQLSSEFDMKDLGAAKKILGMEITRDRNSGLLFLSQQSYIKNVLQRFNMHDAKLVSIPIAPHFKLSVLQCASTDEDVEYMSRVPYSSAVGSLMYAMVCSRPDLSHAMSLVSRYMANPGKEHWKAVQWIFRYLRGTADACLKFGRTDKGLVGYVDSDFAADLDKRRSLTGYVFTIGSCAVSWKATLQPVVAQSTTEAEYMAIAEACKESVWLKGLFAELCGVDSCINLFCDSQSAICLTKDQMFHERTKHIDIKYHYVRDVVHKGEGLIHATRRNLSRGGVC

SEQ ID NO: 129388 - protein, 81 aa, Oryza sativa
  Clone ID: PAT_MRT4530_31649C.1.pep
LRNNQVWQQLGLGGQQFPYQDINIVQAKGQQVQLQQFGDFPFDRKLGQGQALLAFNGPSKNGIPPRDYGAPRTISPLGGVL

SEQ ID NO: 129389 - protein, 57 aa, Oryza sativa
  Clone ID: PAT_MRT4530_3164C.1.pep
FMTRRDYTVCAMKGPNNPQYLPCVWHTNQAIPRDSLVRTTIDTGRRTVSVSTRRRSY

SEQ ID NO: 129390 - protein, 1160 aa, Oryza sativa
  Clone ID: PAT_MRT4530_31650C.1.pep
MASMKYDLPLLDYKTRFSLWQEKTAAEFWLKLESICMSKDLTSKMHIKMKLFSHKLQESGSVLNHISVFKEIVADLVSMDVQFDDEDLGLLLLCSLPSSYAIFRDTIFLSRDELTLAEVYEALQNREKMKCMVRGRSEQRTYNDSNDRDKSQSRGRSKPRGKKFCKYCKKKNHFIEECWKLQNKEKRKYDGKASVVTSADNSDSGDCLVVFAGCVASHDEWILDTACSFHICINRDWFSSYKSVQNGDVVRMGDDNPRGIMGIGSVQIKTHDGMTRTLKDARHIPGMARNLISLSTLDSEGYKYSGSGGVVKVSKGSLVYMIGDMNSANLYVLRGSTLHGSVTAAAVSKDEPSKTNLWHMRLGHMSELGMAELIKRNLLDGCTQGNMKFCEHCVFGKHKRVKFNTSVHRTKDILDYVHADLWGPSRKPSLGGACYMLTIIDDFARKVWPYFLKHKDDTFDAFKEWKVMIERQTEKEVKVLRTDNGGEFCSDAFDDYCRKEGIVRHHTIPYTPQQNGVAEHMNRTIISKARCMLSNARMNKRFWAEAANTACYLINRSPSISLNKKTPIEVWSGMLADYSQLRVFECTAYAHVDNGKLEPRAIKCLFLGYGSGVKGYKLWNLETNKTFMSRSVVFNESVMFNDSLPTDVIPGGSDEKQQYVSVQVEHVDDQETEIVSNDVNNTVQHSPPVLQPQDEPIAHHITKRSRGAPVRLIEEYDMVYYAFSCAEQVENTLEPATYTEAGVSGDREKWISAMQEEMQSLEKNGTWELVHLPKQKKPVRIKWIFKRKEGLSPSEPPRFNARLVAKGFSQIADVDYNDVFSPVVKHSSIRTFFSIVAMHDLELEQLDVKTAFLHGELEEEIYMDQPEGFIVPGKEDYVCKLKRSLYGLKQSPRQWYKSKEQIITLKKQLSSEFDMKDLGAAKKILALQCASTDEDVEYMSRVLYSSAIDFLMYAMVCSRPDLSHAMSLVSRYMANPGKEHWKAVQWIFRYLRGTADACLKFGRTDKGLVGYVDSDFAADLDKRRSLTGYVFTIGSCAVSWKATLQPIVAQSTTEAEYMAIAEACKESVWLKGLFAKLCGVDSCINLFCDSQSAICLTKDQMFHERTKYIDIKYHYVRDVVAQGKLKVCKISTHDNPADMMTKPVPVAKFELCSSLVGIVV

SEQ ID NO: 129391 - protein, 193 aa, Oryza sativa
  Clone ID: PAT_MRT4530_31651C.1.pep
MHAYTFAWSRDKNIRVQVLSVYFLVVFAIRISEFCLGSIHDSATATCCLFRGFCMHMLGGAKEENNAMWAAMQKRNGHCSLGIQRDANCHRLSCRSAFSSIGFTNRFFRTTRSHEQSIQCIVHPGATQDISGYRPMDRHGSMELTRPQCKVLVIASTWAVRERERERGEIRRVGHAAHIVSFGLARYRGYGPL

SEQ ID NO: 129392 - protein, 264 aa, Oryza sativa
  unsure (1)..(264): unsure at all Xaa locations
  Clone ID: PAT_MRT4530_31652C.1.pep
MALSSLVVLSVSGCLSAPRSRPVVDNTNNDGGLGAETTAAREPEFRLLVGVLTTPSRYERRGILRLAYALQPAPGAQVDVRFVLCDVTDAADAVLVAAEAARHGDILVLDGCSTENMNDGKTHAYLSSVPRLFAPCPYDYVMKADDDTYLRVAALADELRGKPRXDVYLGRGYAVGDDPMPFMHGMGYVVSWDVARWVSANEXSGRNRYNLKPRMYDINWDMDEFRPNTIAVHRLKNNRRWAAVFRHFNVTVGIKPSTAARPHN

SEQ ID NO: 129393 - protein, 1389 aa, Oryza sativa
  Clone ID: PAT_MRT4530_31653C.1.pep
MVSMKYDLPLLDYKTRFSLWQVKMRAVLAQTSDLDEALESFGKKKSTEWTAEEKRKDRKALSLIQLHLSNDILQEVLQEKTAAELWLKLESICMSKDLTSKMHIKMKLFSHKLQESGSVLNHTSVFKEIVADLASMEVQFDDEDLGLLLLCSLPSSYANFRDTILLSRNELTLAEVYEALQNREKMKGMVQSDVSSCKGEALQVRGRSEQRTYNDSNDRDKSQSRGRSKSRGKRFCKYCKKKNHFIEECWKLQNKEKRKFDGKASVVTSAENSDSGDCLVVFAGCVASHDEWILDTACSFHICINRDWFSSYKSVQNGDVVRMGDDNPREIVGIGSVQIKTHDGMTRMLKDVRHIPGMARNLISLSTLDAEGYKYSGSGGVVKVSKGSLVYVIDDMNSTNLYVLRGSTLHGSVTAAAVSKDEPSKTNLWHMRLGHMSELGMAELMKRNLLDGCTQGNMKFCEHCVFGKHKRVKFNTSVHRTKGILDYVHADLWGPSRKPSLGGARYMLTIIDDYSRKVWPYFLKHKDDTFATFKEWKVMIERQTEKEVKVLRTDNGGEFCSDAFDDYCRKEGIVRHHTIPYTPQQNGVAERMNRTIISKARCMLSNARMNKRFWIEAANTACYLINRSPSIPLNKKTPIEVWSGMFTDYSQLRVFGCTAYAHVDNGKLEPRSIKCLFLGYGSGVKGYKLWNPETNKTFMSRSVVFNKSVMFNDSLPTDIIPGGSDKEQQYVSVQVEHVDDQETEIVGNDVNDTVQHSPPVLQPQDEPIAHRRKKRSCGAPVCLIEECDMNTLEPATYTEAAVSGDREKWISAMQEEMQSLKKNGTWELMHLPKQKKPVCCKWIFKRKEGLSPSEPPRFKARLVAKGFSQIAGVDYNDVFSLVVKHSSIRTFFSIVAMHDLELEQLDVKTTFLHGELEEEIYMDQPEGFIVPGKEDYVCKSKRSLYGFKQSPRQWYKRFDSFMLSHGFKRSEFDSCVYIKFVNGSPIYLLLYVDDMLIAAKSKEQITTLKKQLSSEFDMKDLGAAKKILGMEITRDRNAGLLFLSQQSYIKKVLQRFNMHDAKPVSTPIAPHFKLSALQCASTDEDVEYMSRVPYSSAVGSLMYAMVCSRPDLSHAMSLVSRYMANPGKEHWKAVQWIFKYLRGTADACLKFGRTDKGLVGYVDSDFAADLDKRRSLTGYVFTIGSCAVSWKATLQSVVAQSTTKAEYMAIVEACKESVWLKGLFAELCGVDSCINLFCDSQSAICLTKDQMFHERTKHIDIKYHYVRDVVVSRKVRAPSKMILLSTLTFTKRCSVGAPLSATTRPSRGLPQRRTARSSTVPLIDHRCHLHQHHRLQIGRLAALREQSMQSRTREADAAKAKGLEACLELVENVGHRTGGLVWYDTCRLF

SEQ ID NO: 129394 - protein, 104 aa, Oryza sativa
  Clone ID: PAT_MRT4530_31654C.1.pep
WVRFMTCPLLSVGLPLQADSPQSIRAYRQRDQELLENPHGQDSHHHSKKKTNSPSSGPTDLCRLTCTPVITDGDDQRMDDTSAAAAEKASRLRAVTIEDRGPAW

SEQ ID NO: 129395 - protein, 287 aa, Oryza sativa
  unsure (1)..(287): unsure at all Xaa locations
  Clone ID: PAT_MRT4530_31655C.1.pep
MALSSLVVLSVSGCLSAPRSRPVVDNTNNDGGLGAETTAAREPEFRLLVGVLTTPSRYERRGILRLAYALQPAPGAQVDVRFVLCDVTDAADAVLVAAEAGAXGDILVLDGCSTENMNDGKTHAYLSSVPRLFAPCPYDYVMKADDDTYLRVAALADELRGKPRXDVYLGRGYAVGDDPMPFMHGMGYVVSWDVARWVSANEDIVRRSGTRGHEDRLVGRWLNAGGRGRNRYNLKPRMYDINWDMDEFRPNTIAVHRLKNNRRWAAVFRHFNVTVGIKPSTAARPHN

SEQ ID NO: 129396 - protein, 61 aa, Oryza sativa
  Clone ID: PAT_MRT4530_31656C.1.pep
MPELVASGHILRIEQVLLCLGTTPKLVTGGRILRERGTSPIGLTTMTKPCAARWRHYPRPA

SEQ ID NO: 129397 - protein, 191 aa, Oryza sativa
  unsure (1)..(191): unsure at all Xaa locations
  Clone ID: PAT_MRT4530_31657C.1.pep
NAAXRXSLPGIHHLKLQTTTXSSXIXKPXTCNAQQQQQQGDHPIYRRNPPPTPSQQPPSPPIRQFPAGIHEDVNRNPHIPSSITPLPQEPKLPDPTRCTPQPKHETNPLSXRYAVVAAPSTNRIPSDDDGDDEAGGGEREGYGERGDSGRSAGERSHXIGRSARPPRAAAAAAATAAVAVEWGRRGSEERL

SEQ ID NO: 129398 - protein, 100 aa, Oryza sativa
  Clone ID: PAT_MRT4530_31658C.1.pep
MKAPPAAGSDLARDKLYSHSLRSRARANPSPPHRRRASPVKQTPGGASATTTLAVGHGAAGKARLAAAATPSSHQGAVAGSEPRLSEVNHCLSSSPSGKR

SEQ ID NO: 129399 - protein, 145 aa, Oryza sativa
  unsure (1)..(145): unsure at all Xaa locations
  Clone ID: PAT_MRT4530_31659C.1.pep
RSPRDAGGRFGREGKPVGAIVLPPSPPRTPSAAVGSSHSLPPPEFLSASPIPSPAVGPLLRRRPSSVPGXPNPPGXSPLPPRRLAPPPPPLCPGAPPTARRARXTPAPSRAALPAPSPRALRRRRGPRGLVPRRQPPSPGRPPPP

SEQ ID NO: 129400 - protein, 115 aa, Oryza sativa
  unsure (1)..(115): unsure at all Xaa locations
  Clone ID: PAT_MRT4530_3165C.1.pep
LIPLRYVQDCSHHKNEEXKMAAAGAAPKDAXDYRKEEKHXKHMEQIAKLGAAAXAGAYAMHEKKQAKKDPEHARSHKMKEGIAAAVAVGSAGFALHHHHEKKEAKKHRRHAHHHH

SEQ ID NO: 129401 - protein, 95 aa, Oryza sativa
  Clone ID: PAT_MRT4530_31660C.1.pep
ERVAGPRLPDAPQLPDRPRRQGRRLTVPVRAPFSLRDHRAYPVHRCGSKVYLKADTAEDVEEAARKNLAICMRRNGVGVWHVGYSIQRRRFFRPS

SEQ ID NO: 129402 - protein, 130 aa, Oryza sativa
  Clone ID: PAT_MRT4530_31661C.1.pep
HTTQGALRGGAQFPIQRGDRGAFPTKQQTHAGGRGTTFFHPNSIGGANPNFPPKKYKFLPKRGPIFSTRGFHPGHTTTHTWGPFCGATPAGFGQGPPDGAIIKNPNKGCFPPGGGGVGSNYRGGGGPTLH

SEQ ID NO: 129403 - protein, 1306 aa, Oryza sativa
  unsure (1)..(1306): unsure at all Xaa locations
  Clone ID: PAT_MRT4530_31662C.1.pep
MALLGDPRTRPLDDDCIILSSFVLQEERREWETTAAVTWAMRAPAAMTAKDVENAIKEEFRLHSGDVEVTHHHPEAYLIKFSRRSHCADALWKGFVKRRGIEVHFIKWRCLKDAMGAALMFRVKLFLDGVPRHAWQPEIVDKIVARRCGVEKIETNLVHPSHTRYISLRTQDADADSVVVTESPPDHWQYGAKYPVLIYVEEIHDYTTATIDLSNPDAACEPTKRQLSAWHLGVVDGEQPPPRAFDGPHPLPPRTQDREEDERRNDECGCDRTRGVDRDRERGNSRRNEGRRYNDDHPDELRGQGWRRHDRDDDRDGRDGGDTRGGNSSRRAGLNGVRHRTCSPRRRDSVGGNCYGRRHHEGARDPVEAAEPLAPVSEAKRADREVTQTGGRGDEGWSKGHSTKTEHTIPASRAFWRIKQAAQRPPSIREVDDALRRWEENGEAALVVPSPLASRGASPTVVGDNLPLTVDKGEFSDPASAYLALVNAAAQGDKEHGDMVAAAVHGADAVHDTVAVAHDAAAARDEAAVVAAAAALADDVERGTAACGTAVHDVERGTAAAHDVAVDAAAAHDVAMEAAAAHDVAVADDDTADKEQDEAAAAATAVAVAHDVAMVHDDTTSKAQVEVAAAAAMATATVQDDEAVADKGEAPVEDAEDEAASGDMTTMPHDRVAVVTRSAVLLPGDMDHAALDDMAVVIPPAAMLLQDGEQAPTTPTSPVVPSTPTIRAAVDGAMSVLFKPLEPALLTIPLEEQQVQQNEVQAEDGARRSARLAMKPLAGIPMVVKAQINVCRQMGFLPVGGVLTNQTLADYKAMFNTPLPQDAIDALNTLFNLNNEHMQERDEAMAAYLGPVDAEAVMEGAECIADYRPISLIHGVVKLISKTLANRLQPFMNSVVSHAQSAFIKKRSIHDNFMYVRNLARKFHQTRKPSLLLKLDITKAFDTVRWDYLLDLMQQKGFPTRWRDWITNILRSSSSRVLLNGAPGPPIRHGRGLRQGDPLSPLLFVLAIDPLHLLLEKATSEGLLTKLNGRAARLRTSLYADDAAIFIYPSVQDMTNLAQILTHFGEIMGLNTNLAKSQIVPIRCENINLQNITEIFPAQVTHFPMKYLGLPLALSKLKKSPLGQQRDTITWKLTLIGEYTTKSAYRLQFLGAAKSFFNETIWKCWAPPKCKFFAWLVMQNQVWTADRLQKRGWRNQQYCPLCHTTLETAVHLLAHCRFSQRIWLDIQRWTGLNLNIHNWDRCASVEDWWYLLMHSRQNPTKAVKTLIILISWELWCTNLLTXGSPPTAVVNKIKGEVATWVLAGAS

SEQ ID NO: 129404 - protein, 106 aa, Oryza sativa
  Clone ID: PAT_MRT4530_31663C.1.pep
GTYKRGGFLNRGITIEKTIGFTTERQIGTLDAIICQDWQVHREFLASSENLSFAGAWNTSIFKAMLRVFYFLLTGLLISRLHTFTLTLTTKITGMYDGTIIMGWAI

SEQ ID NO: 129405 - protein, 103 aa, Oryza sativa
  unsure (1)..(103): unsure at all Xaa locations
  Clone ID: PAT_MRT4530_31664C.1.pep
ERIGFILYRARFIVSGFYLETKVTYGVKGXTPSEGFRSSNHSANTPAKVYXAGGRETYSPXISSNHLDKDLADXIYYLTRGLNQYNLCLLVCLMSYRVDPRTN

SEQ ID NO: 129406 - protein, 60 aa, Oryza sativa
  Clone ID: PAT_MRT4530_31665C.1.pep
SAAKQQRHIQVCQQLALVALQSYYDDSSIVQVIEQYIQLHQFGDLYWDRKVLQAQSLLGF

SEQ ID NO: 129407 - protein, 428 aa, Oryza sativa
  Clone ID: PAT_MRT4530_31666C.1.pep
MWIPPHGVLHFVLSVSWCRLEMWGVQELGLVVGRIGGASALITAHFMGEEAPEFRVESVALESKDCLQNAIDIGDKTYVISRSDDPKSSITIKILDKLTQTWVVPTVLGAPPNPTSSHSAVLVNNEKILIIEKGVPLNDSIWFLEVDTPFVKQQSKIKGTVVVAWSKGVIGEGQKPIVISGPSGVGKGTLIAKLMKEYPSKFGFSVSHTTRAPREKEIDGVHYHFTERSKIEEEISEGKFLEFAHVHGNVYGTSVEAVESVTDEGKRCILDIDVQGARSVRASSLEAIFIFVCPPSFEELEKRLRARGTETEEQIQKRLRNARAELDQSNSPGLFDHLLVNDDLEACYENLKKLLSLDDDHEDSNDSFIKDGKETACYSILSKTNSEILLQSETNEAEKGTTNLLSLDLSLSGGAPGRTRGLKISPVN

SEQ ID NO: 129408 - protein, 443 aa, Oryza sativa
  unsure (1)..(443): unsure at all Xaa locations
  Clone ID: PAT_MRT4530_31667C.1.pep
MRGRSDGGQSKRPILLLCVMCLCPCGSNGQAGSAXLEYGTXSRSLGWGSRGRIXGTADDVELXFPVCDDRFPGEXNRRATPPPERRLXCLIPPPHGYKVPIKWPKSRDIVWKANIPHTHLAHEKSDQNWMIDAGEKIKFPGGXHFHHGADKWIAXLDGGGYLLSSNEYLCLWHALDRGIPCPHTSRRHVXWFSFRINMLGHHTNQSSSWDFSATCHSHFCSAYDQCRNXKRRVGLASSIHLVVQMECIIHLPVCDLYVTADTFEKDKERVRYLXCLKPKIKPDTIRNIMDMKANFGSFAAALKEKDVWVMNVVPHDGPSTLKIIYDRGLIGSTHDWCEAFSTYPRTYDLLHAWTVFSDLDKRGCSAEDLLLEMDRIVRPSGFIIVRDKDTVIEFIKKYLNALHWEAVTTVDAESSPESEENEMIFIIRKKLWQPGGSQDPNPK

SEQ ID NO: 129409 - protein, 189 aa, Oryza sativa
  Clone ID: PAT_MRT4530_31668C.1.pep
MPAGLSRAARACARCFASPAGGVYRENEAWEATVSQKSWGRKSVVSAQSEERLGGGAARSEERCGRRKGRTAGGGRWVHLPPPPGESISLLLPLMARRHHHPVSAKGRRERRRDGGGAAGHRGGGVKGAAARAETSSGGDGGDLTARSLPLCLYSGDLHLQIRSAGALFFTSMRQKGDRGPNRGAAGML

SEQ ID NO: 129410 - protein, 53 aa, Oryza sativa
  Clone ID: PAT_MRT4530_31669C.1.pep
VLTTTRVLDLGGTFKSPGELRNHVRTLRHRCVRIINKNTGGSTHYSGFTNTLL

SEQ ID NO: 129411 - protein, 70 aa, Oryza sativa
  Clone ID: PAT_MRT4530_3166C.1.pep
MSPVCPWTTAAMYRRRWGPRQAGGGAWGEADDFWLDLGKMPPAEEQVEAVANNLYTTTCLAGAFVAPPRE

SEQ ID NO: 129412 - protein, 60 aa, Oryza sativa
  Clone ID: PAT_MRT4530_31670C.1.pep
MGVFEWHFHVFWGGVELWSSKNPAPPRSSFSRSSFANSTQKMEDLDRLAQLRLQGFINYV

SEQ ID NO: 129413 - protein, 83 aa, Oryza sativa
  unsure (1)..(83): unsure at all Xaa locations
  Clone ID: PAT_MRT4530_31671C.1.pep
APRRRRVAATTPRQRRCRCLAPCAAAETEGAADPGEGQDPQDLEQGKSSLFFDHVDPNCEIXFLFTNKIACNDEHPICDYAMP

SEQ ID NO: 129414 - protein, 175 aa, Oryza sativa
  Clone ID: PAT_MRT4530_31672C.1.pep
MAWMTPDPWISLLEEEEEACVSVNKRPKGEDTVTSDGEGEAACANKRLKVEATVTSDGAVVRQRHEAAVAARGYGDRMPLVPQPFLRVRQITEMPDRYRFLDRFTDEQLATMPESLHATLVRIEGGFKKSWVESELRRMEMYKNLPRLSIVNQLQSPNRTDIFLKIPKPDDSSMS

SEQ ID NO: 129415 - protein, 45 aa, Oryza sativa
  unsure (1)..(45): unsure at all Xaa locations
  Clone ID: PAT_MRT4530_31673C.1.pep
RRLMILPLYANVWRRXCGGYSQRDPFTILLDKRQYIEWIKWRSRH

SEQ ID NO: 129416 - protein, 68 aa, Oryza sativa
  Clone ID: PAT_MRT4530_31674C.1.pep
QLTFFQLSTGVVLFQKSKNSVFHGICEPIFAGLVLYTKGCPALSAYLGAPNVRMHFHLVLFLNSQYTQ

SEQ ID NO: 129417 - protein, 180 aa, Oryza sativa
  Clone ID: PAT_MRT4530_31675C.1.pep
MKFSLADLLPVAGALAAPTPPGIPSDSTARSLLSGLTVSGPTNSDTYNTDLFPHWQTYEGTCNTREFVLKRDGTNAATNSACAATSGTWKSPYDGATWTQVSDIDIDHMVPLKNAWISGAASCTTAKRTQFAIDVTRPQLWAVTDNVNQSKSDKSPDSGNPPLTSFYCTYAKSWIQVKSY

SEQ ID NO: 129418 - protein, 815 aa, Oryza sativa
  Clone ID: PAT_MRT4530_31676C.1.pep
MAANNNSDPILDEGGGGGVKHEAVGEAGEGKGGGGGAAATQAPAAMLPRSGSRPQLDLSGAAIHGNLEDRNPTILLPNQSDDISHLALDIGGSLIKLVYFSRHAEHSSEDKRKLSTKRRLGMLNGGRRSYPVLGGRLHFVKFETGKLNECLDFISSKQLHRGGVDSPSWRSGAQPDNIVIKATGGGAFKYADLFKERLGVSLEKEDEMDCLVAGANFLLKSIRHEAFTHMDGQKEYVQIDQNDLFPFLLVNVGSGVSIIKVDGHGKFQRVSGTNVGGGTYWGLGRLMTKCKSFDELLELSQRGDNSTIDMLVGDIYGGLDYSKIGLSASTIASSFGKTISDDKELSDYRPEDISLSLLRMISYNIGQISYLNALRYGLKRIFFGGFFIRGHAYTMDTISFAVNFWSKGEAKAMFLRHEGFLGALGAFMSYEKHGLDDLRIHHLVERFPMGAPYVGGKIHGPPLGDLNEKASTSTLDHGMGGFERPTAKGDILRSDASAALNVGVLHLVPTLDVFPLLEDPKMYEPNTIDLDLNEYKYWFKILSDHLPDLVDKAVASEGGTDDAKRRGDAFAHAFSAHLARLMEEPAAYGKFGLANLLELREECLREFQFVDAYVSIKQRENEASLAVLPDLLMELDSMNEIDDFDMFKKRMLADKKGQPYKRALLFVDNSGADVVLGMIPLARELLRNGTEVVLVANSLPALNDVTANELPGIVAEAAKHCGILRKAAEAGGLIFDAMAGIQDDLKDEPVSVPLMVVENGCGSPCIDFRQVSSELAAAAKDADLLILEGMGRSLHTNLNARFKCDTLKVLVSANS

SEQ ID NO: 129419 - protein, 62 aa, Oryza sativa
  Clone ID: PAT_MRT4530_31677C.1.pep
MGKTGSSPRTGFPEMVHGKSRDKNILRVGEGDATSSNDVLKGGDGVPEVLINPELHSIHSRL

SEQ ID NO: 129420 - protein, 869 aa, Oryza sativa
  unsure (1)..(869): unsure at all Xaa locations
  Clone ID: PAT_MRT4530_31678C.1.pep
MAANNNSDPILDEGGGGGVKHEAVGEAGEGKGGGGGAAATQAPAAMLPRSGSRPQLDLSGAAIHGNLEDRNPTILLPNQSDDISHLALDIGGSLIKLVYFSRHAEHSSEDKRKLSTKRRLGMLNGGRRSYPVLGGRLHFVKFETGKLNECLDFISSKQLHRGGVDSPSWRSGAQPDNIVIKATGGGAFKYADLFKERLGVSLEKEDEMDCLVAGANFLLKSIRHEAFTHMDGQKEYVQIDQNDLFPFLLVNVGSGVSIIKVDGHGKFQRVSGTNVGGGTYWGLGRLMTKCKSFDELLELSQRGDNSTIDMLVGDIYGGLDYSKIGLSASTIASSFGKTISDDKELSDYRPEDISLSLLRMISYNIGQISYLNALRYGLKRIFFGGFFIRGHAYTMDTISFAVNFWSKGEAKAMFLRHEGFLGALGAFMSYEKHGLDDLRIHHLVERFPMGAPYVGGKIHGPPLGDLNEKASTSTLDHGNLNGFISWMEKFVQKGTQITAPVPVGFPVTTGMGGFERPTAKGDILRSDASAALNVGVLHLVPTLDVFPLLEDPKMYEPNTIDLDLNEYKYWFKILSDHLPDLVDKAVASEGGTDDAKRRGDAFAHAFSAHLARLMEEPAAYGKFGLANLLELREECLREFQFVDAYVSIKQRENEASLAVLPDLLMELDSMNEIDDFDMFKKRMLADKKGQPYKRALLFVDNSGADVVLGMIPLARELLRNGTEVVLVANSLPALNDVTANELPGIVAEAAKHCGILRKAAEAGGLIFDAMAGIQDDLKDEPVSVPLMVVENGCGSPCIDFRQVSSELAAAAKDADLLILEGMGRSLHTNLNARFKCDTLKLPMFTNQXLAEKLFNGNIYDCICKFEPVP

SEQ ID NO: 129421 - protein, 88 aa, Oryza sativa
  unsure (1)..(88): unsure at all Xaa locations
  Clone ID: PAT_MRT4530_31679C.1.pep
HACVFFFEEIEDQRKVNSQLESXEEAEAAAAAAAAAVAEEEGGETADSDDSGERTSGGLTHTIXTRSKPVLEGYRRDIQDLSLGLQLK

SEQ ID NO: 129422 - protein, 60 aa, Oryza sativa
  Clone ID: PAT_MRT4530_3167C.1.pep
FNANSVPSYNIENNRFLWESSLKHAHSISVPALAKQVNFTHQDGMKQLFHCHIKRHYIKS

SEQ ID NO: 129423 - protein, 111 aa, Oryza sativa
  Clone ID: PAT_MRT4530_31680C.1.pep
MDRGGGGGDASVAALLLPSAPMAYAVVTDPGTVDTPDMPSYQPYVRDCDVRVVVPMGDQVASGGGQRRSVAGGGRAPPGYSARRVIVVLTIGRAIIPYGAHHHPLCRHHPR

SEQ ID NO: 129424 - protein, 33 aa, Oryza sativa
  Clone ID: PAT_MRT4530_31681C.1.pep
YHPKFYIAHMKIYELVINLRTTLLLRLITRHRQ

SEQ ID NO: 129425 - protein, 185 aa, Oryza sativa
  unsure (1)..(185): unsure at all Xaa locations
  Clone ID: PAT_MRT4530_31682C.1.pep
MEALREAEAELTVYVHPSNAADVRRAVSRQLSTTLFSYEDRFEGVLLAHEVVVNGDRAKILNGLVPYFGVPVHANLLLYSPQPDMILEGKVELLXKESIHAIVLGVFSAAIMADDINEKFKFKRKGDGGKFISRSDRHHVIRKGSMIRFSVKRVDTEMNCHITGSLLPPHTGSMPWLSTHDAEYA

SEQ ID NO: 129426 - protein, 43 aa, Oryza sativa
  Clone ID: PAT_MRT4530_31683C.1.pep
SLLHALYTMSDNVTAQRKLVISSRALSAPSRTRVILPRFIMLI

SEQ ID NO: 129427 - protein, 386 aa, Oryza sativa
  Clone ID: PAT_MRT4530_31684C.1.pep
SRRRSSLSLSGKSARMEMFFGSFLNESASQEYFSGRPNVERCPFLRNINGATTFSFSSALPVAARGAKGPIFEDGPGFDSAFKLFHGRDGIVPLSGKSYVPDENNSESVDAKPEPALPFNPLAARAATISLSAFGPFGFNFFNGKGKRQNKKLNNLNQSNKKPSNPNQNSMKQKGGNSSSHEAMSNEWLENGQCPLARSYRAMSGILPLVAKALQPPAGVKLKCPPAVVAVRAALARTELVKSLRPQPLPAKMVAIALLGMAANIPLGVWREHTKKFSPQWFAAVHAAVPFIGMLRKSVNMPKTAMAFTIAASIVGQTIGSRAERIRLKALAAKSDADSTTVADMYPNKTGNCSDTEGKAWDPLAMKMMAGRASGGAAAPTPSMCF

SEQ ID NO: 129428 - protein, 102 aa, Oryza sativa
  Clone ID: PAT_MRT4530_31685C.1.pep
IPPWTDDKPSIMDPCAPPPPPPAASKYQSSSSSGAGACAARNPAPPAAAAAIAMRCWSWWCCSCPGGAACPCSWSPHAVVLHPHGAVKPRQHRRGGNGGGVG

SEQ ID NO: 129429 - protein, 387 aa, Oryza sativa
  unsure (1)..(387): unsure at all Xaa locations
  Clone ID: PAT_MRT4530_31686C.1.pep
WGLICSWFLYFWFGASXMEMFFSSFLNESASSENLFGHPNVERCPFLRNINGATTYSFSSALPVAARGGNGPIFEDGPGFDSAFKLFHGWDGIVPLSGKSYLPDESNSESIDANPEPALLFNPLAARAATISLSAFGPFGFNFFNGKGKRQNKKPNNLNQSNKKPSNPNQNSMKQKGGNSSSHEAMSNEWMENGQCPLARSYRAMSGILPLVAKALQPPAGVKLKCPPAVVAIRAALARTELVKSLRPQPLPAKMVAIALLGMAANIPLGVWREHTKKFSPQWFAAVHAAVPFIGMLRKSVNMPKTAMAFTIAASIIGQTIGSRAERIRLKALAAKGDADSTTVADMYPNKSGNCSDTEGKAWDPLAMKMAGRASGGVAAPTPSMCF

SEQ ID NO: 129430 - protein, 56 aa, Oryza sativa
  Clone ID: PAT_MRT4530_31687C.1.pep
CSRSQPHRQWNALLGFLRLPKFLYTTVVDHASQFQNLNRCLESLVAKQNRINYMHE

SEQ ID NO: 129431 - protein, 90 aa, Oryza sativa
  Clone ID: PAT_MRT4530_31688C.1.pep
LLMLQVNIYQDAVLYLVNILRVLRQGETDNQIVVSSFRSKWRCWWIIVKFASLRIHECLKNRKEEIFIILECYMHVNLDVVIISASYKSG

SEQ ID NO: 129432 - protein, 116 aa, Oryza sativa
  Clone ID: PAT_MRT4530_31689C.1.pep
VDPRAAGLSRRRPIAGNSAHITGETRRLGVAAPLAGLLLPTAPHPFLPPARSVPPQNRPSPSSPAPPAAGSAADASSAGLSLIPYSPVTTFTPPDRACRGGQIEVGKENDHSSRRR

SEQ ID NO: 129433 - protein, 960 aa, Oryza sativa
  unsure (1)..(960): unsure at all Xaa locations
  Clone ID: PAT_MRT4530_3168C.1.pep
WASTTSPPACLRRRRVVPPPTRLAYYAAAVGRLRLHRRPASAATDWCLRLYGWLVTPPLLGVYVFTDRPPRPPPTGVSACTAGLLCRRCWASTTSSPACLRRRRLVPPPTRLAYYAAAVGRLRLHRRPASVAADSCLRLHGWPIMPPLLGVYDFTVGLPPSSPTGVLAYTVGWSHHRSWAFTSSPXPAGLRRRRLVFLPTRLAYYAAAVGRLRLHHWLGSTGADWCFCHYXGLLYSHIGYFCFTTGSPRPPPTGVSACTAGXLCRRCWASTSSPXPACLRRRRLVFPPARLAXYAAVVGRLRLHRPXAFAAADWCFRLHGWPLCHRCWASTSSPTGRLVRRRLVFPPARLAFMPPLLGVYVFTDRLAFAAADWCPRLHGWPIMXPPLLGIYIFTDRLAFAAADWCFRLHGWPIMPPLLGVYVFTDRXPSPPPTGVSACTAGLYAAVVGHLRLHRPACXAAADWCFRLHGWPIXRRCWASTSSPTGXLRHRRLVFPPARLXIMPPLLGVYIFTDRPPRPPPTGISACTAGLLCHRCWASTSSPTGRLVRRRLVFPPARLAFMPPLLGVYVFTDRLAFAAADWCFRLHGWPLXPPLLGVYVFTDRXPSPPPTGVLACTAGLXYDRRCWASTSSPTGLPSPPPTGVSACTAGLXYATVVGRLRLHRPACLRRRRLVFPPARLAFMPPLLGIYVFTDRXPSPPPTGVSACTAGXLCRRCWASTSSPTGXLRRRRLVFPPARLAXYAAVVGRLRLHRPACXAAADWCFRLHGWPLCRRCWASTSSPIGRLDRRRLMFPPARLAYYAAVVGRLRLHRXPPHPPTATTTDGHHHLPSPTXMPPSTGVFIFTTARLHYQFASVADDSCXTSSRQCNFVIMVERLHLYYLRHWQTLLLLLRKFCYFTNHDVFVSLDISACDAMLFYYNKRLSNIQDFYLDIFNTYLQSSNDYSTTRSYNSRLYVQLFPN

SEQ ID NO: 129434 - protein, 49 aa, Oryza sativa
  Clone ID: PAT_MRT4530_31690C.1.pep
PRCPPPSRPPPSPPITPPAPRARPPPPLLPPPLPTLRLPPPTPPPPPPP

SEQ ID NO: 129435 - protein, 79 aa, Oryza sativa
  Clone ID: PAT_MRT4530_31691C.1.pep
MDIHLADPTGGGRPAVATAPVEGSREKGFGLGWPWDGGNSQHWQAGQSRACGYEAAVMSNGEPLETGKMVVQGHLAAGG

SEQ ID NO: 129436 - protein, 60 aa, Oryza sativa
  Clone ID: PAT_MRT4530_31693C.1.pep
GFMVPGGDVAALWWGDGGFFQNTVVRMFKYRFRDPRFGHVWLACGVKVRNSLFHICVSPR

SEQ ID NO: 129437 - protein, 168 aa, Oryza sativa
  Clone ID: PAT_MRT4530_31694C.1.pep
DAWAAIDLSSLIVVDGKVCWDLYIDGLVVSSDGNLLDALAAAIKVALSDTGIPKVNVSLSATTDEEPEVNVSDEEFLQFDTSSVPVIVTLTKVGKHYIVDATSEEESQMSSAVSVSVNRHGQIRGLTKRGGAGLDPSVIFDMISVAKHVSRQFISVLDSETLAAEAAE

SEQ ID NO: 129438 - protein, 64 aa, Oryza sativa
  Clone ID: PAT_MRT4530_31695C.1.pep
NTGGTKKKFIPLEYWPSKIYHLTYPLTHAFKTMHAGNNYHNTHRKVEFYHNHLFFFPPPNLLTF

SEQ ID NO: 129439 - protein, 241 aa, Oryza sativa
  Clone ID: PAT_MRT4530_31696C.1.pep
MTWRPEAPRPLLRLARCGVGPDCRATWLDGKHVLDSSAPNIEEHRSTVLQVLQQIGVSQDKINSMIEVWNKIDIVDNNDNDVTDDIEDEIFLTEGEEDKEEELFSENDVPAEESSFESLDDGTDSEYLSEENLEGNNGEISSSLEPSEMRAMNSVSSSSKDCFGELCGPETISTDSCSSTQPMSTCHVKTSAVTGTGLQELLELIDKKLTERQTIVERSYGPFDRKWRPSSSVVGEKAAEQ

SEQ ID NO: 129440 - protein, 55 aa, Oryza sativa
  Clone ID: PAT_MRT4530_31697C.1.pep
MPPKQGFEEDEGDSSNNSTRGLISGLVAKSMANVEEVAANMAKVVVSTAEAKSTD

SEQ ID NO: 129441 - protein, 504 aa, Oryza sativa
  Clone ID: PAT_MRT4530_31698C.1.pep
MASARASDPLASRDPPTLPLYLPPPPPPPLPSPSPHHRLLPAPMAPILLHLHPAFLAQMDSRRTTSLLQFLKDEGGIPSPEADKKREQVIRKLNKIVMDWAKVVAYEQRVPPRRATATVLTYGSYTLGAHGPESDIDALCVGPCIATLQYHFFIVLRQILEDRPEVSELQTVESAKVPLMRFRFSGISVDFTYAQLPVIDASEASLFCNQYVVTRAIITSNPHLLQKLDSLSWRSLSGVRVNEQIVQLVPNAQKFQILLRCIKLWAKRRGIHCHLLGFFAGIHLAILAAYVCQRYPYGTINGLFTIFFDIFAHWNWQIPVSLHGQPTNCRRPDGSFMPILLPCTPPEFCTSNMTKGTFKKIREELMRGYALTKEPWRHDFEWVWLFAPFPYATKYEEFLRIALCAPTSEELRDWAGWVKSRFNLILKLESIGVECDPDSTEEVDHTVFEPSIVCHWGLIYKTSTHIDISSLGEDFMKDVINDVYGKVKGHESNGECTVDFSWQI

SEQ ID NO: 129442 - protein, 113 aa, Oryza sativa
  Clone ID: PAT_MRT4530_31699C.1.pep
MDAFFLLVLLLCTPKLSQATTVTWQLPNLPLGVPVLENRASKQWHIDRRAREEKKRARREGDLGMKRAGRNRAAKPRLSNAPCPCFSTLPRLDSAEERVTKFGHTRSRFVGQR

SEQ ID NO: 129443 - protein, 566 aa, Oryza sativa
  unsure (1)..(566): unsure at all Xaa locations
  Clone ID: PAT_MRT4530_3169C.1.pep
IGRGDLRRRSGTTLADWCFRLHGWPIKPPLLGVYDFTAGLPPSPPIGASAYTAGLLCRRCWASTTSPPACLRRRRLVPPPTRLAYYAAAVGRLRLHRRPASVAADWCLRLHGWPIMPPLLGVYDFTVGLPPSPPSGASAYTAGLLCRRCWASTTSPPACLRRRRLVPPPTRLAYYAAAVGRLRLHRRLASVAAEWCLRLHGWSIMPPLLGVYDFTAGLPPSPPIGASAYTAGLLCRRCWASTTSSPACLRRRRLVPPPTGLAYYAAISGHLRFHRRQPSSPPTGVFIVINGRLCSYIGHLCHHQGEYYKAKIQIQICIKGIHGFKLISYAPGMDQSEHHQPAASSAADWCFRLHGXLIMPPLLGVYVFTDRLAFAAANWCFRLHGWPLMPPLLGVYVFTDRXPSPPPTGVSACTAGLYAAVVGRLRLYRPACLRRCRLVFPPARLAFMPPLLGVYVFTDRPPRPPPTGASACTAGLLCCRCWASTSSPTGRLVRRRLVLPPARLAFMPPLLGVYVFTDRXASTAADWCFRLHGWPIMLPLLGVYIFTDRPPHPPLTGVTACTAGLL

SEQ ID NO: 129444 - protein, 51 aa, Oryza sativa
  Clone ID: PAT_MRT4530_316C.1.pep
MPNNVDVTIKPYRQKHRSAAMRQPVSEVVDAQQRRHNRRKHHSTAMKANRR

SEQ ID NO: 129445 - protein, 189 aa, Oryza sativa
  unsure (1)..(189): unsure at all Xaa locations
  Clone ID: PAT_MRT4530_31700C.1.pep
PSPATCSASHAAGRRPAAASPAPCSTSSRCSAPAPPPISPPPXGPQPPPPPPPXPPPPDPPPRPPSLSRSTSSTPAASPAPRRSKHPRSSPTSGRPPSPTPCSPSSPASASPAPTSPPSSPPSRSCSAPGPTTSPAASPPCATAWACRTPRSAASSSRAAPRASTRVTSPRGWSSGSPSWDPSRRSSGS

SEQ ID NO: 129446 - protein, 534 aa, Oryza sativa
  Clone ID: PAT_MRT4530_31701C.1.pep
MASIRSCVSVKPAAAVSPVKYKSARVGAAGLDPKGLRISCSSSSSSLAAGGGDGCRDAGCASSSGRGSGVVGSVGDGWWGRRGGQRERAVAAMCSAGMEGVRHGAAAVASVPAASASALPERAKVVALVAAVMLLCNADRVVMSVAVVPFAAQYGWSSSFLGIVQSSFLWGYVFSSMVGGALADRYGGKKVMAGAAALWSLATFLTPWAASQSTIMLLAIRALFGLAEGVAFPTMSTFLPKWFPTHERATAVGISMGGFHLGNVISFLATPIIMSHIGLAGTFAFFASLGYLWLSVWLFNVESDPLDSRTISKSELQLILAGRSASKIQGSKFPSLREILSKIEMWAIIVANVVNNWGYFVLLSWMPVYFKTVYNVNLKQAAWFSAIPWAVMALSGYVAGASADFLIKSGFSVALVRKIMQSIGFIGPGVSLLCLRFAQTPSVAAVLMTIALSLSSFSQAGYFCNVQDIAPKYAGSLHGLTNGIGTVAAIVSTIGTGYFVQWLGSFQAFLTLTAVLYFSATVFYNTYAHRRPNF

SEQ ID NO: 129447 - protein, 201 aa, Oryza sativa
  Clone ID: PAT_MRT4530_31702C.1.pep
LREILSKIEMWAIIVANVVNNWGYFVLLSWMPVYFKTVYNVNLKQAAWFSAIPWAVMALSGYVAGASADFLIKSGFSVALVRKIMQSIGFIGPGVSLLCLRFAQTPSVAAVLMTIALSLSSFSQAGYFCNVQQDIAPKYAGSLHGLTNGIGTVAAIVSTIGTGYFVQWLGSFQAFLTLTAVLYFSATVFYNTYATGDLIFD

SEQ ID NO: 129448 - protein, 190 aa, Oryza sativa
  Clone ID: PAT_MRT4530_31703C.1.pep
DSFEAISGNTVYFRGILLKNSLSDYFRGIAKCEVISGNTVLFWDDMWNDQIRSITYPHLCGHAIARNDSLAVTCAKPFEDCFKLPLTQEAYTEFLLLKGELDALSLASQQGDNWSFIWGRNNYTSKALYKLNFAAMQPPIPFRWIWKTKYAGASKIEISEKRILGDLFHCMLAHLEAKEWKDFPEYRSFF

SEQ ID NO: 129449 - protein, 332 aa, Oryza sativa
  Clone ID: PAT_MRT4530_31704C.1.pep
MAIIDKTIAHIMDKQDDNKIKSSNYWNPIRPPATVLNSNGRQMCIRAPFWVHEYLIESSRSRLSNGSTLIAKFLLSGLQLQKQGVASPIMGQVGPMWGVPQPGIRLICTGKINNPQIGVSIAKAQHNNPYSKCLPRYRYIQTPLGCLAELVYVTIPLALDCARGYEMVMLNIGFFTIDERCQLLDKMHMSGLKECNENTMRRFFKGLSSEVQVIHHIQQKRENGVLEKKEDEAPVVSEESLQGEGEDDVTMATIDTTIAHIMDEQDDNKIKSSNYWNPIQPPATVLNSNGRQMCIRAPFWVHEYLMESSRSHLSNGSNLIAKFLLSGLLLQK

SEQ ID NO: 129450 - protein, 65 aa, Oryza sativa
  Clone ID: PAT_MRT4530_31705C.1.pep
YKYTLCTTSVQLSMQLCHITKALGSRMFLWLPNHSIIIITSSPLPDDVCSILELFLSIGLDPHII

SEQ ID NO: 129451 - protein, 1391 aa, Oryza sativa
  unsure (1)..(1391): unsure at all Xaa locations
  Clone ID: PAT_MRT4530_31706C.1.pep
MALLPPLAPPTETAQFPEGAGMAAWFSEAAGTVWSCGLEMAPFPAAARAVALSRSLPSREMDEKVEIFVVDLTEVSEQYEFLALDFIRSEPGGGRHFCKRKQGRELVPELFLQKNWMVTKTRSNETILDMEELNEFRVDMANLKKEGLLLELCKQKNVEEVDGDTDAAVAAVAAEKANKTVSSDTGGAGPSNPTAGNPPEVRFAIEHNTISVEGVGSSRGPQDAAAVMNGWVFDTSMGTHRPNVFGNGSQQGFDRVGGIPRRFQGNSGGRALKWYRGIGLPWQVITWPQWCAMVCTSFSAADVHEAMELFQNVKQHGQIVEHYIDKFEEYMDLVRRDHPYLQEQYLNSCFIGGLRSDIKHDEAWFPGHQCKVKKALNALLLEEEEYEGTEEVGREKKAQEKVLEETEHAPEEIDQEELMYVSQNAMQGATRPDTFSVIIQINGRRAVGLVDSGSPSTFMDQEYAIRNDCPLVSTDSKKVVVAGGGELKSEVQVPDILDVEESISIPDDIQDILQRFPTVLEKPKGLPPQRGCDHVITLKDGAIPPNLRPYRVPHHQKEAMEKIIAELIESKEIQVSNSPYSSPAVMVRKKDGSWRLCVDYRQLNAQTVKNKFPMPIIEDLLDELNGAKIFTKLDLMSGYHQIRMSRPDIPKTAFRTHLGHYEYQVMPFGLTNAPATFQSLMNQVLAPFFRKFVLVFFDDILIYSKDREEHKEHIRLVLQVLKANNLVIKPKKCAFGLSSVSYLGHIISQNGVATDPGKVEKIVSWPIPKNVTDLRKFLGMTGYYRRFIQGYVLICRPLHDMLKKEGFQWGEKQTEAFKFLKQKMCSSPVLTLPDFSKEFTIEADACGTGIGAVLMQGDRPIAFYSKSLGPKAAAQSIYEKEAMAILEALKKWRHYFLGSKLVIKTDQQSLKHMMNQRLVEGIQHKLLLKLMEYDYIIEYKAGKDNVVADALSRLPQDQLQTEICNAITVVIPKWIIDVQNSYEGDVQAHKILSMIGTNSDPDQHYSFEXWNFKIQGKNIWMRATHHRIKALFYWPGLKKTVEMFIRECPVCQITKVEHIHIPGLLNPLEVLDMAWTHITMDFIEGLPKSKWKDAILVVVDRLTKYAHFLALSHPYSVEQVVEIFMNNIHRLHGMPMAIIIDRDRIFTSQLFQEIFKSMKVQLRFSTSYHPQTDGQTERVNQCLESYLRNMTFQEPHQWYSWLSLAGWWYNTTYHTSLQMTPFQALYGYPPPQINEFSISCNVSAEARTERSLNVGDMVYIKLQPYRQTAFGIRGSLKLRSKFYGPFKVLEKIGQVAYKLQLPEDASIHPVFHVSQLKKHLGQRAVPMSNLPSMGPDGQIKTQPVAVLQRRMIPRNGVAVTQWLILWENLGPADATWEDAAVIQSMYPTFHP

SEQ ID NO: 129452 - protein, 150 aa, Oryza sativa
  Clone ID: PAT_MRT4530_31707C.1.pep
EIKGWAVRAAEPIPQGTFVCEYIGEVLKMKDDGAIRHVEREAKSGSSYLFEITSQIDRERVQTTGTTAYVIDATRYGNVSRFINHSCSPNLSTRLVSVESKDCQLAHIGLFANQDILMGEELAYDYGQKLLPGDGCPCHCGAKNCRGRVY

SEQ ID NO: 129453 - protein, 938 aa, Oryza sativa
  Clone ID: PAT_MRT4530_31708C.1.pep
MASRGRGGGQERHEEEADAGRGRQQWGAKEGVAAAAGRYRRERSMRTRALPPRASPPRRPRDSDPAESNGGGAPKPGGDNGGDRSPRRARVPDAEEEGGDRRRRPSRVSDDDKEGGRRRRRRSTDSDDERGDRHRRRHRRRSPSSESSDGGRSRRHRRDESSRRQRDERRRDRGGREERRRSPDRKEPTPPLPPPPPLLPELIPGRTGGIYIPPFRMAQMMREVEDKSSPEYQRLSWDALKKSINGLVNKVNATNIKNIVPELFAENLVRGRGLFCQSCIKSQMASPGFTDVFAALVAVVNTKFPEIGRLLLVRVVLQLKRAYKRNDKPQLLAATKFIAHLVNQVVAHELVALELLTVLLENPTDDSVEVAVGFVKECGAMLQDLSPQGLHAIFERFRGILHEGEIDKRVQFLIEGLFAIRKAKFQGFPAIRPELDLVEQEDQFTHEISLEDELDPETNLNVFRANPNFAEDEKAYENLKRSILGAESSDDEEGSDDASDEDAEEESDDEEDEEQMEIRDQTETNLINLRRTIYLTIMSSVDFEEAGHKLLKIKLEPGQESFGSVPMGTEIAAVPNISEGLAKISKKMMDLAAQLQVLAAQSAEQAMPLGAAERSDRRAMTFLRPRQQDFKRRLRSRMRHMQQPKMELCIMLLECCSQERTYLRYYGLLGQRFCMINKVYQENFEKCFVQQYSMIHRLETNKLRNVAKFFAHLLGTDALPWHVLAYIRLTEEDTTSSSRIFIKILFQELSEHLGIRLLNEKLNDPNMQDSFDSIFPKDHPKNTRFSINFFTSIGLGGITETLREYLKNMPRLIMQQQKPASSESGSSDSGSASDSSSSESESSSDESDKKRSKRRKSNWHGYQGRFVDMQVYGDIVNITRIFCSIKRCNIQKYPPTSTTRPSFPPTSTTSPSFLGRGQSSLACPRKVRQQLSVLIGYN

SEQ ID NO: 129454 - protein, 79 aa, Oryza sativa
  unsure (1)..(79): unsure at all Xaa locations
  Clone ID: PAT_MRT4530_31709C.1.pep
LEPNDERXRPATRSSGGAASVDGFGAPAIGGFGAPAAGLLHTSAHLTAVTATGGDDGGDGTTRMELGRRRRRGGARGGG

SEQ ID NO: 129455 - protein, 460 aa, Oryza sativa
  Clone ID: PAT_MRT4530_3170C.1.pep
MAQPPEFQDVQSRAAGAVAFLGNVKARFRRRPAVDPAAPAAPVLRRTAELLRGHPDLVAEINAVIYPRNRVELVPAADDDDGDHAAAAAAARTRRRSDAQRRRPDDAAVAESSAAAERRAKVSKAEQFLASLKIVGGVELHDRVEHVIHDVNKDKGLDAHQVYARLEEVLAAEHPYLLHGIDEFFPRPKHQPPPHAAADGEPDVGHRPSSSSSKCAAAVDINQNGDATRPSKARATQLLTAAIFDLQINHVDLHVNKNSDAVRPKKKPRAADPQTSKSALDGGGDDDDDDDGAVLPSRAAKKPRAADIKIKRRHPLDDGEESDACWQVTTTDNPHDAARTFRKTLEFIAWYSKLVTTMRRAEELERREPHPHGALKDLFPSSDCHEILEELYGGGWRTVQVALDDGGGGRAGRTTLAAMLVSLRQRENAAVELARRRADKTRYGEEPAAAWGSRRRRRQP

SEQ ID NO: 129456 - protein, 192 aa, Oryza sativa
  unsure (1)..(192): unsure at all Xaa locations
  Clone ID: PAT_MRT4530_31710C.1.pep
MELKNGHGSLRRKTVTEAGAGAGAAAVDLVQVLNYDVIMATMDTTIAHIMDQQEDIKIKSSMCWNSIRPPTTLLTSNGRQICIRALFLVREYLMESSPRPLSNGSNLIAKFCLSELQLKKQDVASPIKGLWACNFVWDPDSSGAXMWGVPQPVIRLICTGKINNSRRGVSIAKAQHNNVYHQLIERSGQQQP

SEQ ID NO: 129457 - protein, 1201 aa, Oryza sativa
  Clone ID: PAT_MRT4530_31711C.1.pep
MVCSTNILYQRNNPRKWNGGQMEPENKHGCELIDTSFAISEGLIHSETRVPSSNRPIVSRITIHWPSFYNVVTGKTLALPNLIALQHIPLSPAGVIAKRRRGEAHFSQEDDANLNTLSEDPNKSNLPSISIIHEAVGPLESRDQNKTAAFPSTSGVQDTGEPNSALHNVRHELDSFKSSRQCSAYIEAKGRQCGRWANDGDIYCCVHQSMHFADHSSREDKSLTVETPLCGGMTNLGRKCKHRAQHGFIFCKKHRFQTNPDAMSSDSLLSSSEGRKWEESQKSVEKMSSSNATCSVGSEQANNFQVAVHMKVTPTMAVETTSDKVNVSENADLCYPMSTSMENSNLDASICIGIRSHDNIAECQDYAVRHTLYCERHIPKFLKRARNGKSRLISKDVFINLLKCCTSRKEKLCLHQACEFLYWFLRNNLSHQRPGLGSDHMPQILAEVSKNPDVGEFLLKLISSEREKLSHVWGFGTDSSNQMHSENQDGSVMVLREDGTHPSPGLKCKICSQEFSDDQGLGLHWTEVHKKEVRWLFRGYSCAVCMDSFTNRRVLERHVQEKHGAQYLQYSTLLRCISCNSNFLNTDLLWQHIVSDHSRDFSLLDHVPRRPRGQSIKRTERASDELLYDNHNLGKDDGLQKFTCRLCGMMFDLLPDLGHHHQVAHTNSGTVSDIPSGREKYQFNRGRHYYSAFKKSLRPSGSLKKRTSSGVEKHFKAQSLDLSMDTSHIVESETTTLGRLLDFQCSDVALTLFSKIQKTRPHPSNLDILSIARSVCCKTSLRAALKAKYGILPDNIFVKAAKLCSDVGIQIDWHQEEFFCPKGCKSRSSSNSLLPLQPTQVDFVMSPPIGDEIWGMDEYHYVLDSEHFGWNLKNEMVIVCEDVSFGREKVPVVCAIDVDAKEFPYMKPGEILQSENSLPWQGFHYVTKRLMDSSLVDSENTMVGCACSHAHCSPEECDHVSLFDSIYENLVDLHGVPMRGRFAYDENSKVILQEGYPIYECNSSCTCDASCQNKVLQRGLLVKLEVFRTENKGWAVRAAEPIPQGTFVCEYIGEVLKMKDDGAIRHVERLEIYWNFSGAFHKLIRKLLDLREAKSGSSYLFEITSQIDRERVQTTGTTAYVIDATRYGNVSRFINHSCSPNLSTRLVSVESKDCQLAHIGLFANQDILMGEELAYDYGQKLLPGDGCPCHCGAKNCRGRVY

SEQ ID NO: 129458 - protein, 74 aa, Oryza sativa
  Clone ID: PAT_MRT4530_31712C.1.pep
LRSVPAVLFFFFGFFFFFFLEQNIKFLNCNSWFKPPRGINIGFFQKFFKFTNRLKLTGMARPPLEKQFYFKKAG

SEQ ID NO: 129459 - protein, 38 aa, Oryza sativa
  Clone ID: PAT_MRT4530_31713C.1.pep
IEQCCATNTQCAREPSRKSNEQTVNPPMGRLMHAMMGA

SEQ ID NO: 129460 - protein, 418 aa, Oryza sativa
  Clone ID: PAT_MRT4530_31714C.1.pep
MGRLVTTLLVLCLIYVTTCSLSTRTAAFRAHDLRRGLEQAMRGRLLADATPAGGSAVPIHWSRHLYNVANFTIGTPPQPASAIIDVAGELVWTQCKQCSRCFKQDTPLFDPTASNTYRAEPCGTDACKSIPTSNCSSNMCTYEGTINSKLGGHTLGIVATDTFAIGTATASLGFGCVVASGIDTMGGPSGLIGLGRAPSSLVSQMNITKFSYCLTPHDSGKNSRLLLGSSAKLAGGGNSTTTPFVKTSPGDDMSQYYPIQLDGIKAGDAAIALPPSGNTVLVQTLAPMSFLVDSAYQALKKEVTKAVGAAPTATPLQPFDLCFPKAGLSNASAPDLVFTFQQGAAALTVPPPKYLIDVGEEKGTVCMAILSTSWLNTTALDENLNILGSLQQENTHFLLDLEKKTLSFEPADCSSLIS

SEQ ID NO: 129461 - protein, 124 aa, Oryza sativa
  Clone ID: PAT_MRT4530_31715C.1.pep
MDHKGAHPTAHIGQELDGGDRCVEDNGDHGDGGAGPANEGVAGPQCLLATLAVARGSRKQWNGGGGKVAQRSGLRERNSGQGALRLGETGGGNGMAPHGLERQCKGGGSAQLEIGNGQRITGSS

SEQ ID NO: 129462 - protein, 143 aa, Oryza sativa
  Clone ID: PAT_MRT4530_31716C.1.pep
MEEHRLGGGGGGGGGGGRPPIPGAAGRKLPGLSRHASFVRSPANSTKSGTEKTFENMDAVAYMPVVRSGGWADIGSRHTMEDVFICSDNLMKEFGVESFEDGPSAFYGVFDGHGGKHAADFVCSNLARFIVEDEDFPREIEKA

SEQ ID NO: 129463 - protein, 153 aa, Oryza sativa
  unsure (1)..(153): unsure at all Xaa locations
  Clone ID: PAT_MRT4530_31717C.1.pep
PRVRAHASGGSGGAAGGGRSDDGRREAGGVARALRGRRFPLLPPLSWHLWQSAIRRQERWVGGGSXQATGDDETMAVAGGAARDEAPSRGGRRRRRASWACSGGGDATTEEGERRSGGAAAAAATGVSSESGSFPSLLASGHSPSFTGSTGYV

SEQ ID NO: 129464 - protein, 362 aa, Oryza sativa
  unsure (1)..(362): unsure at all Xaa locations
  Clone ID: PAT_MRT4530_31718C.1.pep
MEEHRLGGGGGGGGGGGRPPIPGAAGRKLPGLSRHASFEQAGPRYFASRSKTSTILILEGVRSPANSTKSGTEKTFENMDAVAYMPVVRSGGWADIGSRHTMEDVFICSDNLMKEFGVESFEDGPSAFYGVSDGHGGKHAADFVCSNLARFIVEDEDFPRXIEKALSSAFLQTDDXLVANAGDCRAVLCCRGKAIEMSRDHKPSCNRERFRMESTGWSGYDGYLNGQLNVARAIGDWHMEGMKACDGLGPLSAEPEVMIRNLTEEDEFLIIGCDGIWDVFRSQNAVDFARRKLQEHNDPVTCCKELVDEAIKRKSGDNLSVVVICFNSRPPPVLTTPRPRVQRSISAEGLRELQSFLDSLAD

SEQ ID NO: 129465 - protein, 96 aa, Oryza sativa
  Clone ID: PAT_MRT4530_31719C.1.pep
MAGMLADHPLDTLRIRQQQPSSPAIRHQSSCPDRKRACAEPEEERKEWEEEAAAGGHSLDHQGYPPLYEEFPRKCPQLVRAPIECPWLCMPITLEY

SEQ ID NO: 129466 - protein, 407 aa, Oryza sativa
  unsure (1)..(407): unsure at all Xaa locations
  Clone ID: PAT_MRT4530_3171C.1.pep
FPDLIVAGLPPSSSPPACLRRRRPVSSPIRLVXTPPFMGVHVFTDRPPRPLPTGVSACTAGLXYAAVVGRLRLHRPAXLVRRRLVFPPARLAYYAAAVEHLRLHRRPASAATDWCFRLYGXRTPPPLMGFIIYTTGLVPLAPTGVFVTIDGLLRSHIGYFCCHRGNTTKLSRHLFYSLYDILPFPLPHYINWFAVDXESGATDIQICIKGIHGYKLISYAPGMDQSAHHHRLAVIAWVVTPFLLGVYTFTNRPPCPPPTGVLAYTVRWSHRRCWASTSSPTGLPSPPPTGVSACTAGLLCRCCWASTPSPTGRLIRRRLVSPXARLAYYATVVGRLHLHRPATSYDANWRYRLHGWPXSPPSLIGVIIFNXKLSTSAADWFLHFHGCMILLVLIGLIVFTVGHLVCS

SEQ ID NO: 129467 - protein, 469 aa, Oryza sativa
  Clone ID: PAT_MRT4530_31720C.1.pep
MLSLSHPHPHPASTTAAAAARHHHRRNAPFAPHHRRRRRFAHLTTSAVILGPDGRPIGGGPRDNKLPFTPPPTAPPDQLYQPFHPPPSPLPDKYKDLDLGQRLAVLRDRLGLWHEYAPLISALSREGFTPSSIEEATGISGVEQNSVVVATQVRDSLVADEGGFPAELLRYFDSYGGPELLYELRFLNARQRADAARHAIDRRLEPRGVRELARSMKDFPQRRGDDGWEAFTRDNPGDCLAFARFRQSREAIDAEDSVAELERALEVVDTEPARARVEAELDRARRKAAGEEVDDEDGAANAAAAASRPAVPVVRLMYGEVAEATTVLLLPVVREGDGGEALAHAPRRTRTDADLGMVEVDKGWTRWAVVPGWGPVAEVAGEAVVIELADGRTLPWRSAEAERVLVVANRGRREVVEDGIYVVEREGRLVVEKGRKLAAEGVGEAAAEVLVVVRPPRDEDDMISDDEWD

SEQ ID NO: 129468 - protein, 77 aa, Oryza sativa
  Clone ID: PAT_MRT4530_31721C.1.pep
LCMVGLLPFGGSCLKGGVPFYARNRKTWNLPSRGRGISIVATGEGRAIEGGARHRDTWAGAHVRVLHAVNDPLVDFS

SEQ ID NO: 129469 - protein, 168 aa, Oryza sativa
  Clone ID: PAT_MRT4530_31722C.1.pep
MALSHYLKSQFDLDAAREWEESRPTAPAGEGAKSEEGGRPHPPVAAPLPGADSVWIGPENHVLSLHRLSCLAPPSSGPATALHRRSHDHRRLASSPRLALLDASEEIEERDEKRGETEKMTCHSDMWGPHGSHAESAATWDKIGVKTAEGLIVTSFVSWGTLDVRFYG

SEQ ID NO: 129470 - protein, 470 aa, Oryza sativa
  unsure (1)..(470): unsure at all Xaa locations
  Clone ID: PAT_MRT4530_31723C.1.pep
PARPHALVIPFPAQGHVIPLMEVAHALADRGVAVTFVNTEFNHGRVVAAMPSPGKLGMGRNRIRLVAVPDGMGPDEDRNNLVRLTVLMQEHMAPPVEELIRRSGDEEAAVDGGXIRCVVADYDVGTWALDVARRTGVKSAAVWPASAAVMASLLSVPELIRDKIIDAHGKRKRQEAFQLSPDMPMMQPAHLAWNCIGNDQGQELLFSCVLAGVRAVDECDYILCNSFRDAEAATFARFPKILPIGPLLTGERPGKPVGHFWRPEDGACMSWLDVQPARSVVYVAFGSFTVFDRRQFQELALGLELTGRPFLWVVRPDIVHGDAHEYPDGFLDRVVASGNDGGRGKVVAWAPQQRVLAHPAVACFVSHCGWNSIMEGVRNGVPFVAWPYFADQFVNRAYICDIWRVGLPAVADKKSGMVTKEHLAGRVEEVMGDASMRERIEAMMVVAHESVQEGGCSHGNFDMFVESIMS

SEQ ID NO: 129471 - protein, 61 aa, Oryza sativa
  Clone ID: PAT_MRT4530_31724C.1.pep
ATRAANKQVQKRLMTEASTTKTTKWGGGNSIRHMLIHIYWQLKTPRCRAPNVRGVSLLTYR

SEQ ID NO: 129472 - protein, 40 aa, Oryza sativa
  Clone ID: PAT_MRT4530_31725C.1.pep
MATVLFRCSQADKPSRQRLEEKYGCEDGQTGTYRMTLADG

SEQ ID NO: 129473 - protein, 121 aa, Oryza sativa
  Clone ID: PAT_MRT4530_31726C.1.pep
MWKIRGFRFGDIAIAWHGDSVFTPRAYPSCQTTSPSISPQSRVLASPFPHARPKRRQATAPQRVGRGPGGCLVASPPLARVRPPPRASWEPPPRQAGEAPTTAPLRLGRGPGGRFASPRPR

SEQ ID NO: 129474 - protein, 210 aa, Oryza sativa
  Clone ID: PAT_MRT4530_31727C.1.pep
MAVGWRPAMLVVVVAVAAWRGEALSVTVTDTECIHEFVPYEGDTVSGNFVVVDHDIFWSSDHPGIDLTVTSPGGNTVYTLKGKSGDKFEFKAPRGGMYKFCFHNPYGAPETVSFYIHVGHIPNEHNLAKDEHLDPINVKIAELKEALESVTAEQKYLKAREARHRHTNESTRRRVMFYTIAEYLAFMGASALQVVYIRRLFSKNVAYNRV

SEQ ID NO: 129475 - protein, 79 aa, Oryza sativa
  Clone ID: PAT_MRT4530_31728C.1.pep
FLLFYPSNNELKLPSWLGPQLTQPRFALLGWSMLWRFELLPEAHGPPPGGPRGRGGPPREGALEAQGGPPAVGFPAGGD

SEQ ID NO: 129476 - protein, 184 aa, Oryza sativa
  Clone ID: PAT_MRT4530_31729C.1.pep
MEERDQLQGARRSAVGDYLEQQQQQDGVYLIHSQVMRIKKEEEEARELLLKLQLLETRPAGGGRCPATTLRASRSLSPLRRAGGAIPDAELRRLRVEHGAVWSAAQRRRRRRPVPRLRRIRRMLGNTIRFLAGTARAMGEAAASGVGGVTGCSDEGSLQLRPVRKKCVTKNANFNLENNVQWMI

SEQ ID NO: 129477 - protein, 198 aa, Oryza sativa
  unsure (1)..(198): unsure at all Xaa locations
  Clone ID: PAT_MRT4530_3172C.1.pep
MGVHIFTDWLAXRRRLVSPPTRLAYYAAVVGRLRLHHRPASXSPPTGVLTYTDPDLXICIKGIHGFISYAPRMDQSEHHHRLAVVAADWCPRLYGWVVTPPLLGVVVFTDRPPRPPPTGVFAYIVGWSHHHCWASTSSPPACLHRRRLVSPPARLAYYAAVVGCLRLHRPTASFAADWCFCLHGWPIMLPLLDVYIFT

SEQ ID NO: 129478 - protein, 100 aa, Oryza sativa
  Clone ID: PAT_MRT4530_31730C.1.pep
MAAATAVPIGAATATPGGTATTAPIEDGCRLAAHRRSLPAAPGSEWRCAWWLANGAGGGWRTAARAAPGGLATGDARDSVGWLYSRVTVPAPVIPMVRGF

SEQ ID NO: 129479 - protein, 149 aa, Oryza sativa
  Clone ID: PAT_MRT4530_31731C.1.pep
SVLGKPLYLASNAGRLSKYPLHRRYCSFRGEVAEGRSHGRQMAAATAVPIGAATATPGGTATTAPIEDGCRLAAHRRSLPAAPGEDGFRRRAARRRVDEGGRRRQLQSPGEKAASGGARGGWRTAPEVAGERRRARLPADWRPATHVTR

SEQ ID NO: 129480 - protein, 75 aa, Oryza sativa
  Clone ID: PAT_MRT4530_31732C.1.pep
ERPSEPSATTANHASRTSGTTEATRSTQAKLQAYKEAITIHKKKTKYIETVHGSTEADPMCQPRQVAHKRTPLDT

SEQ ID NO: 129481 - protein, 75 aa, Oryza sativa
  Clone ID: PAT_MRT4530_31734C.1.pep
GCLLLPLTLGSGGSGGTCRRCSSPPRAKFLRRRKTARLGRLTGRREFPPGSPPFKQQDNTFPKPTIPPRTGRPQE

SEQ ID NO: 129482 - protein, 203 aa, Oryza sativa
  Clone ID: PAT_MRT4530_31735C.1.pep
MSEADGGEGAKPKRPAPRLNERILSSLSRRSVAAHPWHDLDTGADAPAVFNVVVEISKGSKVKYELDKKTGFIMVDRVLYSSVVYPHNYGFIPRTLCEDNDPMDVLVLMQEPVIPGCFLRARAIGLMPMIDQGEKDDKIIAVCVDDPEYRHYNDLSELSPHRVQEIRRFFEDYKKNENKEVAVNEVLPVTAARDAIQYSMYTF

SEQ ID NO: 129483 - protein, 1885 aa, Oryza sativa
  Clone ID: PAT_MRT4530_31737C.1.pep
MAEPAKAHDLSPSMSGDDGEPNPRRRARTPPPPPRQSPRREKALERAEGSATSTSTGGGEGRRDGERRLLVYGDGSTPQGALQAAGALLRHPPVVHDPESPAQRWLDDVAKLVMTARQRLGAGGRSSATKASGAATTGSASSRRRARRAAAAVRHSAATPSSTPSTREDLRGGPDARTSIERRRNDRRAAHATEGASSSRVSPQHGRGNQPSVPPVGGVGCRAFVASLRNVRWPPRFRPTIAEKYDGSVNPAEFLQVYTTGIEAAGGDDRVMANFFPMALKGQARGWLMNLPPASVHSWEDLCQQFTMNFQGTYPRPGEEADLHAVQRRDDESLRSYIQRFCQVRNTIPCIPAHAVIYAFRGGVRHNRMLEKIASKEPQTTAELFQLADRVARKEEAWTWNPSGSGVAASAAPGSAAQTGRRDRRRKKRSAHTDDEGHVLAVEGAPRATRKGRPAGDKKKEAGAPSRERPTGKWCTVHNTSLHDLADCRVVKSLAERTRKWEEERRQERREGKSPAVPSGNRRSEAKQKAPAEDIDDGDDDLGFQEPGATIATVDGERAALNILSPAAFDAIKAPGMMLRPSQPIIGVTPGHTWPLGHIDLPVTFGGPANFRTERVNFDVADLSLPYNAVLGRPALVKFMAAVHYAYLQMKMPGPDGPISVHGDLKVALACMEQRADRLAVVTKPEGGDERFGTSAPAAPRQREDALVSFLRANADVFAWRPADMPGVPREVIEHRLAVRPGARPVRQKVLRQAPERQAFIREEVARLLEAGFIREVIHPEWLANPVVVPKANGKLRMCIDYTDLNKACPKDPYPLPRIDQIVDSIAGCDLLCFLDAYSGYHQIRMAREDEEKTAFITPIETYCYTTMPFGLKNAGPTFQRTTRISLGSQLGRNVEAYVDDLVVKTRNQETLLSDLAETFESLRSARIKLNPDKCVFGVPAGKLLGFLVSARGIEANPEKIRAIERMRPPSKLRDVQCVTSCMAALSRFISRLGEKALPLFKLLKHSGPFTWTEEAERALTQLKAYLSSPPVLVAPEPNEPLLLYLAATPQVVSAALIVERDEDNLHSAHPHPVLAWPGREQGGEAPEPDGGPRPPTTGAGPLPACQTVPGAPDPQDGPEATAGRPHLSPSDLEANPVPIRPGREQGEEAPEPNGGLRLLTTGVGPLPACPTTPGAPDPQDGPEATVGRPPLSTSDPEVVGTEDECAPRGRLGEERLRDAAPSEEDRPHRKVQRPVYFVSEALRDAKTRYPQAQKMLYAILMASRKLRHYFQAHRVTVVTSYPLGQILHNREGTGRVFDGSLSLQGAGAGVTLTSPSGDVLRYLVRLDFRATNNMAKYEGLLAGLRVAAGLGIRRLLVLGDSQLVVNQVCKEYRCSDPQMDAYVRQVRRMERHFDGIELRHVPRRDNMMADELSRLASSRAQTPPGAFEERLAQPSARPNPLGETDAPDRPPRPVGVQASGPEGSAPSSLRLIAWIAEIQAYLTDKTLPEDREGSERVHRISKRYVLVEGTLYRRAANGILLKCIPREQGVVLLADIHEGECGAHSASRTLVGKAFRQGFYWPTALNDAVDLVRRCKACQFHAKQIHQPAQALQTIPLSWPFAVWGLNILGPFRRAPGGFEYLYVAIDKFTKWPEAYPVVKIDKHSALKFIKGITARFGVPNRIITDNGTQFTSELFGDYCEDMGIKLCFASPAHPKSNGQVERANAEILKGLKTKTFNILKKHGDSWIEELPAVLWANRTTPSRATGETPFFLVYGAEAVLPSELTLRSPRATMYCEADQDQLRRDDLDYLEERRRRAALRAARYQQSLRRYHQRHVRARSLCVDDLVLRRVQTRAGLSKLSPMWEGPYRVVGVPRPGSIRLATGDGTELPNPWNIEHLRRFYP

SEQ ID NO: 129484 - protein, 97 aa, Oryza sativa
  Clone ID: PAT_MRT4530_31738C.1.pep
EVPQLLVELPDLLHSRALGIPPRVPPPATPWIRPPPPRAAPPREIYGLLARVSAGRQEQRRAPPPAIARARQRPTPSTSNQGYGNIGEEMDFSIDIT

SEQ ID NO: 129485 - protein, 1869 aa, Oryza sativa
  unsure (1)..(1869): unsure at all Xaa locations
  Clone ID: PAT_MRT4530_31739C.1.pep
MAKPAKAHDLSPSMSGDDGEPNPRRRARTPPPPPRQSPRREKALERAEGSVTSTSTGGGKGRRDGERRLLVYGDGSTPQGALQAAGALLRHPPVSSXRQRLDADGRSSATKASGAATTSSASSRRRARRAAAAVRHSAATPSSTPSTREDLRGGPDARASIERRRNDRRAAHATEGASSSRVSPQHGHGDQPSVPPVGGVGCRAFVASFRNVRWPPRFRPTIAEKYDGSVNPAEFLQVYTTGIEAAGGDDRVMANFFPMALKGQARGWLMNLPPASVHSWEDLCQQFTMNFQGTYPRPGEEADLHAVQRRDDESLRSYIQRFCQVRNTIPCIPAHAVIYAFRGGVRHNRMLEKIASKEPQTTAELFQLADRVARKEEAWTWNPSGSGVAASATPGSAAQTERRDRRRKKRSAHTDDEGHVLAVEGAPRATRKGRPAGDKKKEAGAPSRERPTGKWCTVHNTSLHDLADCRAVKSLAERTRKWEEERRQERREGKSPVVPSGNRRSEAKQKAPAEDIDDGDDDLGFQEPGATIATVDGGACAHVSRRSLKAMKRELLAAAPTHEATRRARWSEVALTFDQTDHPPCVARGGQIAMVVSPTVCNVKLGRVLIDGGAALNILSPAAFDAIKAPGMMLRPFQPIIGVTPGHTWPLGHIDLPVTFGGPANFRTERVNFDVADLSLPYNAVLGRPALVKFMAAVHYAYLQMKMPGPDGPISVHGDLKVALACMEQRADRLAVVSKPEGGDESLGTSAPAAPRQRIVTCDEVPEDALVSFLRANADVFAWRPADMPGVPREVIEHRLAVRPGARPVRQKVRRQAPERQAFIREEVARLLEAGFIREVIHPEWLVNPVVVPKANGKLRMCIDYTDLNKACPKDPYPLPRIDQIVDSTAGCDLLCFLDAYSGYHQICMAREDEEKTAFITPIGTYCYTTMPFGLKNAGPTFQRTTRISLGSQLGRNVEAYVDDLVVKTRNQETLLSDLAETFESLRSARIKLNPDKCVFGVPAGKLLGFLVSARGIEANPEKIRAIERMRPPXKLRDVQCVTGCMAALSRFISRLGEKALPLFKLLKRSGPFTWTEEAERALTQLKAYLSSPPVLVAPEPNEPLLLYLAATPQVVSAALVVERDEDNPHSAHPHPVLAWPGREQGGEAPEPDGGLRPPSTXVSEALRDAKTRYPQAQKMLYAILMASRKLRHYFQAHRVTVITSYPLGQILHNREGTGRVVKWAIELSEFDLHFEPRHAIKSQALADFVAEWTPAPELVSVPEASSGPSQLPHTAHWVMQFDDSLSLQGAGAGVTLTSPSGDVLKYLVRLDFRATNNMAEYEGLLAGLRVAAGLGIRRLLVLGDSQLVVNXVCKEYRCSDPQMDAYVRQVRRMERHFDGIELRHVPRRDNMMADELSRLASSRAQTPPGAFEERLAQPSARPDPLGETDAPDRPPRPVGVQASGPEGSAPSSLRLIAWITEIQAYLTDKTLPEDREGSERVHRISKRYVLVEGTLYRRAANGVLLKCIPREQGVVLLADIHEGECGAHSASRTLVGKAFRQGFYWPTALNDAVDLVRRCRACQFHAKQIHQPAQALQTIPLSWPFAVWGLDILGPFRRAPGGFEYLYVAIDKFTKWPEAYPVVKIDKHSALKFIKGITARFGVPNRIITDNGTQFTSELFGDYCEDMGIKLCFASPAHPRSNGQVERANAEILKGLKTKTFNILKKHGDSWIEELPAVLWANRTTPNRATGETPFFLVYGAEAVLPSELTLKSPRATMYCEADQDQLRRDDLDYLEERRRRAALRAARYQQSLRRYHQRHVRARSLCVDDLVLRRVQTRAGLSKLSPMWEGPYRVVGVPRPGSIRLATGDGTELPNPWNIEHLRRFYP

SEQ ID NO: 129486 - protein, 193 aa, Oryza sativa
  unsure (1)..(193): unsure at all Xaa locations
  Clone ID: PAT_MRT4530_3173C.1.pep
GSDSRGRSTADRVHGPGKTGVPRGAHVAPTRRTRGGNXGGRTDGPGRSDGGGGSRPARAGTAQAGPAAMARGGAARMWRRREMATGGXREAASRRLSGNAGLVRERELEEGEDTGRRRRPWRCSPANGTEXVPAADGVARTMANAAASSARICAAASGDRSGGGGGEEEGDGARALEGTGGLGEMGKKREGWR

SEQ ID NO: 129487 - protein, 607 aa, Oryza sativa
  Clone ID: PAT_MRT4530_31740C.1.pep
MCGRFPWRAHCSGVSICRNSSRSMSNTDRRGRADDGATSQCRQPWRLTGGAPPNRITPSSTPSTREDLRGGPDARTSIERRRNGRRATHATEGASSSRVSPQHGRGNQPSVPPVGGVGCRAFVASLRNVRWPPRFRPTIAEKYDGSVNPAEFLQVYTTGIEAAGGDDRVMANFFPMALRGQARGWLMNLPPASVHSWEDLCQQFTMNFQGTYPRPVRNTIPCIPAHAVIYAFRGGVRHNRMLEKIASKEPQTTAELFQLADRVARKEEAWTWNPSGSGGGRRGRPIPTTRVMSSPSKAFRWPPERGGLRATKRRKPTLPDLGYLEERRWRAALRAARYQQSLRRYHQRHVRARSLCVDDLVLRRVQTRAGLSKLSPMWEGPYRVIGVPRPGSVRLATGDGTELPNPWNIEHLRRFYPYLAVAVVCTVVTALLVGVEGKREPRGRSLLSVGFPLLMRAICDRRDSARREREQGGEAPEPNGGPTPPTAGAGPPPACPTVPGAPDPQDGPEATAGGRACRPLTPRSSAQKPSTPRVASRIGERPGDVAPDEEDRPRRKVQRPVYFVSEALRDAETRYPQAQKMLYAILITSRKLRHYFQAHRRVTSQRW

SEQ ID NO: 129488 - protein, 54 aa, Oryza sativa
  unsure (1)..(54): unsure at all Xaa locations
  Clone ID: PAT_MRT4530_31741C.1.pep
KTXTXEAICPYTTKGXXXXXXXXXXXXXFWYKEIETRKTLLKETSRLLFLHKIY

SEQ ID NO: 129489 - protein, 2091 aa, Oryza sativa
  Clone ID: PAT_MRT4530_31742C.1.pep
MAEQAKAHDLSPSVSGDDGEPNPRRRARTPPPPPRQSPKRGEALERTEGSATSTSTGGGKGRRDGEHRLLVYGDGSTPQGALQAAGALLRHPPVAHDPESPAQRWLDDVAKLVMTARQRLDAGGRSSATKASGAATTGSASSRRRARRAAAAVRHSATTPSSTPSTREDLRGGPDARTSIERRRNDQRATHATEGASSSRVSPQHGRGNQPSVPPVGGVGCRAFVASLRNVRWPPRFRPTIAEKYDGSVNPTEFLQVYTTGIEAAGGDDRVMANFFPMALKGQARGWLMNLPPASVHSWEDLCQQFTMNFQGTYPRPGEEADLHAVQRRDDESLRSYIQRFCQVRNTIPCIPAHAVIYAFRGGVRHNRMLEKIASKEPQTTAELFQLADRVAHKEEAWTWNPSGSGVAASAAPGSAAQTGRRDRRRKKRSVHSDDEGHVLAVEGASRATQKGRPASDKKKKAGAPSRERPAGKWCTVHNTSLHDLMDCRAVKSLAERTRKWEEERRQERREGKSPAVPSGNRRSEAKQKAPAEDIDDGDDDLGFQEPGATIATVDGGACAHVSRRSLKAMKRELLAAAPTHEATRRARWSEVALTFDQTDHPPCVARGGQIAMVVSPTVCNVKLGRVLIDGGAALNILSPAAFDAIKAPGMMLRPSQPIIGVTPGHTWPLGHIDLPVTFGGPVNFRTERVNFDVADLSLPYNAVLGRPALVKFMVAVHYAYLQMKMPGPDGPISVHGDLKVALACMEQRADRLAVVSKPEGGDERLGTSAPAAPRQRIVTCDEVPEDALVSFLRANADVFAWRPADMPGVPREVIEHRLAVRPGARPVRQKVRRQAPERQAFIREEVARLLEAGFIREVIHPEWLANPVVVPKANGKLRMCIDYTDLNKACPKDPYPLPRIDQIVDSTAGCDLLCFLDAYSGYHQIRMAREDEEKTAFITPIETYCYTTMPFGLKNAGPTFQRTTRISLGSQIGRNVEAYVDDLVVKTRNQETLLSDLAETFENLRSARIKLNPDKCVFGVPAGKLLGFLVSARGIEANPEKIRAIERMRPPSKLRDVQCVAGCMAALSWFISRLGEKALPLFKLLKRSGPFTWTEEAERALTQLKAYLSSPPVLVALEPNEPLLLYLAATPQVVSAALVVERDEDNPHSVHPHLVQTWPGREQGGEAPEPNGGPRPPTTGVGPLPACQTVLGAPDPQEGPEATVGRPHLSPFDPEANPVLTRPGKEQGEEAPEPNGGPRPPTTGVGPLPACQTVLGAPDPQEGPEATVGRPHLSPFDPEANPVLTRPGKEQGEEAPEPNGGLRPLTTGVGPLPACPTMPGAPDPQDGPEATVGRPPLLSSDPEVISTEDKCAPRGCLDEECPRDAAPSEEDRPHRKVQRPVYFVSEALRDAKTRYPQAQKMLYAILMASRKLRHYFQAHRVTVVTSYPLGQILHNREGTGRVVKWAIELSEFDLHFEPQHAIKSQALADFVAEWTPAPEPVSIPEASTDPSQLPHTAHWVMQFDGSLSLQGAGAGVTLTSPSGDVLRYLVRLDFRATNNMAEYEGLLAGLRVAAGLGIRRLLVLGDSQLVVNQVCKEYRCSDPQMDAYVRQVRRMERHFDGIELRHVPRRDNMMADELSRLASSRAQTPPGTFEERLAQPSARPDPLGETDAPDRPPRPVGVQASGPEGSAPSSLRLIAWIAEIQAYLTDKTLPEDREGSERVHRISKRYVLVEGTLYRRAANGILLKCIPREQGVVLLADIHEGECGAHSASRTLVGKAFRQGFYWPTALNDAVDLVRRCRACQFHAKQIHQPAQALQTIPLSWPFAVWGLDILGPFRRAPGGFEYLYVAIDKFTKWPEAYPVVKIDKHSALKFIKGITARFGVPNHIITDNGTQFTSELFGDYCEDMGIKLCFASPAHPRSNGQVERANAEILKGLKTKTFNILKKHGDSWIEELPAVLWANRTTPSRATGETPFFLVYGAEAVLPSELTLRSPRATMYCEADQDQLRRDDLDYLEERRRRAALRAARYQQSLRHYHQRHVRARSLCVDDLVLRRVQTRAGLSKLSPMWEGPYRVVGVPRPGSIRLATGDGTELPNPWNIEHLRRFYP

SEQ ID NO: 129490 - protein, 1004 aa, Oryza sativa
  Clone ID: PAT_MRT4530_31743C.1.pep
MGDRAAAAAEAKTSVWWDIDRCGVPPCCRDPHRVAHGVIAALAAAGCAGPVSIFAYGDAARVAPPVLAALSSTGISLNHVPAGAKDGTDKKMLVDMLFWAFDNPPPGNYLLISGDQDFSDLLHRLRMKRYGILLAQPSNVSSRVLAAAARTVWSWEKLVAGESLLVESTHTHGLPDCNPKLNSLDVSKCSQNKSLDASKCSQNKSLDGSKCSQSKSLDGSKCSNSKVHAVCGNGDSNVKACDRYKVKPLQKYVKKTNAVSSSTNNQGQVVVVDGFSDDSAGSTGSEQDKSSVSSSSSSSESLEVDLPSLLGTPPLADLPSLLGTPPLAQSSAQEPVVSTSSQQVGPLNMTVKSKLHSEYDIAEKNAKKGNQSKSNPIQRYVKKTNITSSPASNQLDSDGMPECSTGNTPSKLNQLPVLPPPNSESLEETKVDHSRSLGIFTLPQSSSQAPVLSTHLHKVEEPHELIVGKQPSCTSTELASRDGTNDSRVSIGHYHSTSMQSQSSLAQHTLHCNYNMGDKVGKAKARNQHKVTQRQQYIKKANIVSSSAHNEIDLVKGFSGNSKGSILSNPSKSVLTSSISESLEEAKANCSTPLKNPPFSLSSVNKPVTPTDLQHLGSEFIFGSNHSLSTECMPKDGIFYFGDINGQNSPACQQAHSSLLPEIHKSIPPSAAGHSNSVNSDVGSSYPTSTGFNGVPSAQIQTSPSGLTFQNMLDICSDFSRLTISECPPGTSEKRPPFQGIPSNYTAFGMPNTSGHLRVPHEIGSTFHPGSVVSFHPSHSSARQCARSPSCNMQNTGDHGETEGSPPSSSEPEVTIRNILHALHILKAEKIFPTESNIADCIRYSEMNISGFDVKKALELAIRHQAVIMKKLVNDMPLFVAKDESIWKCVNVTNSNAKHSKETLDAVHKYISSTDGWSAMKNSQSRYQAATILKKSCLQQHALGDVLQILQIIIHLRWSEGYLNAAIIVNLNSTNYITALIFSDVAALGLAKLQWFYSQELVPS

SEQ ID NO: 129491 - protein, 1920 aa, Oryza sativa
  Clone ID: PAT_MRT4530_31744C.1.pep
MAEQAKAHDLSPSVSGDDGEPNPRRRARTPPPPPRQSPKRGEALERAEGSATSTSTGGGKERRDGERRLLVYGDGSTPQGALQAAGALLCHPPVAHDPESPAQRWLDDVAKLVMTARQHLDAGGRSSATKASGAATTGSASSRRRARRAAAAVRHSATTPSSTPSTREDLRGGPDARTSIERRRNDRRATHATEGASSSRVSPQHGSGNQPSVPPVGGVGCRAFVASLRNVRWPPRFRPTIAEKYDGSVNPAEFLQVYTTGIEAAGGDDRVMANFFPMALKGQARGWLMNLPPASVHSWEDLCQQFTMNFQGTYPRPGEEADLHAVQRRDDESLRSYIQRFCQVRNTIPCIPAHAVIYAFRGGVRHNRMLEKIASKEPQTTAELFQLADRVARKEEAWTWNPSGSVKSLAERTRKWEEERRQERREGKSPAVPSGNRRSEAKQKAPAEDIDDGDDDLGFQEPGATIATVDGGACAHVSRRSLKAMKRELLAAAPTHEATRRARWSEVALTFDQTDHPPCVARGGQIAMVVSPTVCNAKLGRVLIDGGAALNILSPAAFDAIKAPGMMLRPSQPIIGVTPGHTWPLGHIDLPVTFGGPANFRTERVNFDVADLSLPYNAVLGRPALVKFMAAVHYAYLQMKMPGPDGPISVHGDLKVALACMEQRADRLAVVSKPEGGDERLGTSAPAAPRQRIVTCDEVPEDTLVSFLRANADVFAWRPADMPGVPREAIEHRLAVRPGARPVRQKVRRQAPERQAFIREEVARLLEAGFIREVIHPEWLANPVVVPKANGKLRMCIDYTDLNKACPKDPYPLPRIDQIVDSTAGCDLLCFLDAYSGYHQIRMAREDEEKTAFITPIGTYCYTTMPFGLKNAGPTFQRTTRISLGSQIGRNVEAYVDDLVVKTRNQETLLSDLAETFESLRSARIKLNPDKCVFGVPAGKLLGFLVSARGIEANPEKIRAIERMRPPSKLRDVQCVTGCMAALSRFISRLGEKALPLFKLLKRSGPFTWTEEAERALTQLKAYLSSPPVLVAPEPNEPLLLYLAATPQVVSAALVVERDEDNPHSAHPHPVQTWPGREQGGEAPEPNGGPRPPTTGVGPLPACQTVLGAPDPQEGPEATVGRPYLSPFDPEANPVLTRPGKEQGEEAPEPNGGLRPLTTGVGPLPACPTMPGAPDPQDGPEATVGRPPLLSSDPEVISTEDKCAPRGCLDEECPRDAAPSEENRPHRKVQRPVYFVSEALRDAKTRYPQAQKMVYAILMASRKLRHYFQAHRVTVVTSYPLGQILHNREGTGRVVKWAIELSEFDLHFEPRHAIKSQTLADFVAEWTPAPEPVSIPEASTDPSQLPHTAHWVMQFDGSLSLQGAGAGVTLTSPSGDVLRYLVRLDFRTTNNMAEYEGLLAGLRVAAGLGIRRLLMDAYVRQVRRMERHFDGIELRHVPRRDNMMADELSRLASSRAQTPPGAFEERLAQPSARPDPLGETDAPDRPPRPVGVQASGPEGSAPSSLRLIAWIAEIQAYLTDKTLPEDREGSERVHRISKRYVLVEGTLYRRAANGILLKCIPREQGVVLLADIHEGECGAHSASRTLVGKAFRQGFYWPTALNDAVDLVRRCRACQFHAKQIHQPAQALQTIPLSWPFAVWGLDILGPFRRAPGGFEYLYVAIDKFTKWPEAYPVVKIDKHSALKFIKGITARFGVPNRIITDNGTQFTSELFGDYCEDMGIKLCFASPAHPRSNGQVERANAEILKGLKTKTFNILKKHGDSWIEELPAVLWANRTTPSRATGETPFFLVYGAEAVLPSELTLRSPRATMYCEADQDQLRRDDLDYLEERRRRAALRAARYQQSLRRYHQRHVRARSLCVDDLVLRRVQTRAGLSKLSPMWEGPYRVVGVPRPGSIRLATGDGTELPNPWNIEHLRCFYP

SEQ ID NO: 129492 - protein, 72 aa, Oryza sativa
  Clone ID: PAT_MRT4530_31745C.1.pep
MTAEEEEAVADEEVAQQQLDDGLLDPSTPVRSSIREGRRAQACPVPLRAAELGKKVAGGRKRERVIDKKYEN

SEQ ID NO: 129493 - protein, 2091 aa, Oryza sativa
  Clone ID: PAT_MRT4530_31746C.1.pep
MAEQAKAHDLSPSVSGDDGEPNPRRRARTPPPPPHQSPKQGEALERVEKSAASPVAGDAGERRDGERRLLVYGDGSTPQGALQAAGALLRHPPVVPDPESPAQRWLDDVANLVMTAQQRLGAGGRSATTKTSGAATTGSVSSRRRARRAAAVARHSAATPSSTPPTREDQHGEPDARLDIERRCNSRRTPRATEGASSSRVSPRHGREDQPSVPPTGGVGCRAFVASLRNVRWPPRFRPTITEKYDGSVNPTEFLQVYTTGIEAAGGDDRVMANFFPMALKGQARGWLMNLPPASVHSWEDLCQQFTMNFQGTYPRPGEEADLHAVQRGDDESLRSYIQRFCQVRNTIPCIPAHAVIYAFRGGVRHNRMLEKIASKEPQTTAELFQLADRVARKEEAWTWNPSGSGVAASAAPGSAAQTGRRDRRRKKRSVHSGDEGYVLAVEGAPRATRKGRPASDKKKEAGTPSRERPAGKWCSVHNTSHHDLADCRAVKSLAERTRKWEEDRRQERREGKFPAVPSGKRRSEAKQKAPAVDIDDGDDDLGFQEPGATIATVDGGACAHVSRRSFKAMKRELLAAAPTHEAMRRARWSEVALTFDQTDHPPCVARGGQIAMVVSPTICNVKLGRVLIDGGAALNILSPAAFDAIKAPGMVLQPSQPIIGVTPGHTWPLGHIDLPVTFGGSANFRTERVNFDVADLSLPYNAVLGRPALVKFMAAVHYAYLQMKMPGPGGPISVHGDLKVALACMEQRADHLAAASKPEGGDERLGISAPTAPRRRIVTCDEVPEDALVSFLRANADVFAWRPADMPGVPREVIEHRLAVRPDARPVRQKVRRQAPERQAFIREEVARLLEAGFIREVNHPEWLANPVVVPKANGKLRMCIDYTDLNKACPKDPYPLPRIDQIVDSTAGCDLLCFLDAYSGYHQICMAREDEEKTAFITPVGTYCYTSMPFGLKNAGPTFQRTTRISLGSQIGRNVEAYVDDLVVKTRNQETLLSDLAETFENLRSARIKLNPDKCVFGVPAGKLLGFLVSARGIEANPEKIRAIERMRPPSKLRDVQCVTGCMAALSRFISRLGEKALPLFKLLKRSGPFTWTEEAERALAQLKAYLSSPPVLVTPEPNEPLLLYLAATPQVVSAALVVERDEDNPHSAHPHPVPTWPGSKQGGEAPESNGGLRPLTTGVGPLPACQTVLGASDPQEGPEATAGRPHLSPFGPEANPVLTWPGSKQGGEAPESNGGLRPLTTGVGPLPACQTVLGAPDPQEGPEATAGRPHLSPFGPEANPVLTRPGREQGEEAPEPNGGLRPLTTGIGPLPACPTTPGAPDPQDGPEATVGRPLLSSSDPEVISTEDECAPRGHLDEERPGDTAPSEEDRPRRKVQRPVYFVSEALRDAKTRYPQAQKMLYAILMASRKLRHYFQAHRVTVVTSYPLGQILRNREGTGRVVKWAIELSEFDLHFEPRHAIKSQALADFVAEWTPAPETVSIPEASTDSSQLPHTAHWVMQFDGSLSLQGAGAGVTLTSPNGDVLRYLVRLDFRATNNMAEYEGLLAGLRVAAGLGIRRLLVLGDSQLVVNQVCKEYRCSDPQMDAYVRQVRRMERHFDGIELRHVPRRDNMVADELSRLASSRAQTPPGAFEERLTQPSARPDPLGETDAPDRPPRPVGVQASGPEGSAPSPLRLIAWISEIQAYLADKTLPEDREGSERVQRISKRYVLIEGTLYRRAANGILLKCIPQEQGVELLADIHEGECGAHSASRTLVGKAYRQGFYWPTALNDAVDLVRRCRACQFHAKQIHQPAQALQIIPLSWPFAVWGLDILGPFKRAPGGFEYLYVAIDKFTKWPEAYPVVKIDKHSALKFIKGITARFGVPNRIITDNGTQFTSELFGDYCEDMGIKLCFASPAHPRSNGQVERANAEILKGLKTKTFNILKKHGDSWIEELPAVLWANRTTPSRATGETPFFLVYGAEAVLPSELTLRSPRATMYCEADQDQLRRDDLDYLEERRRRAALRAARYQQSLRRYHQRHVRARSLCVDDLVLRRVQTRAGLSKLSPMWEGPYRVIGVPRPGSIRLATGDGTELPNPWNIEHLRRFYP

SEQ ID NO: 129494 - protein, 1899 aa, Oryza sativa
  unsure (1)..(1899): unsure at all Xaa locations
  Clone ID: PAT_MRT4530_31747C.1.pep
MAEQAKAHDLSPSVSGDDGEPNPRRRARTPPPPPRQSPKRGEALERAEGSATSTSTGGEKGRRDGERRLLVYGDGSTPQGALQAAGALLRHPPVAHDPESPAQRWLDDVAKLVMTARQCLDAGGRSSATKASGAATTGSASSRRRARRAAAAVRHSATTPSSTPSTREDLRGGPDARTSIERRRNDRRATHATEGASSSRVSPQHGHGNQPSVPPVGGVGCRAFVASLRNVRWPPRFRPTIAEKYDGSVNPAEFLQVYTTGIEAARGDDRVMANFFPMALKGQARGWLMNLPPASVHSWEDLCQQFTMNFQGTYPRPGEEADLHAVQRRDDESLRSYIQRFCQVRNTIPCIPAHAVIYAFRGGVRHNRMLEKIASKEPQTTAELFQLADRVARKEEAWTWNPSGSGVAASAAPGSAAQTGRRDRRRKKRSVHSDDEGHVLAVEGASRATQKGRPASDKKKKAGAPSRERPAGKWCTVHNTSLHDLMDCRAVKSLAERTRKWEEERRQERREGKSPAVPSGNRRSEAKQKAPAEDIDDGDDDLGFQEPGATIATVDGGACAHVSRRSLKAMKRELLAAAPTHEATRRARWSGVALTFDQTDHPPCVARGGQIAMVVSPTICNVKLGRVLIDGGAALNILSPAAFDASKAPGMVLRPSQPIIGVTPGHTWPLGHIDLPVTFGGSANFRTERVNFDVANLSLPYNAVLGRPALVKFMAAVHYAYLQMKMPGPGGPISVHGDLKVTLACLEQRADRLAAASKPEGGDERLGASAPATPRQRMITCDEVPEDTLVSFPRANADVFAWRPADMPGVPREVIEHRLAVRPGARPVRQKVRRQAPERQAFICEEVARLLEAGFIREVIHPEWLANPVVVPKANGKLRMCIDYTDLNKACPKDPYPLPRIDQIVDSTAGCDLLCFLDAYSGYHQIRMAREDEEKTAFITPIGTYCYTTMPFGLKNAGPTFQRTTRISLGSQIGRNVEAYVDDLVVKTRNQETLLSDLAETFESLRSARIRLNPDKCVFGVPAGKLLGFLVSARGIEANPEKIRAIERMRPPSKLRDVQCVAGCMAALSRFISRLGEKALPLFKLLKRSGPFTWTEEAERALTQLKAYLSSPRAALVVERDEDKPHSAHPHLVQTWPGREQGGEAPEPNGGPRPPTTGVGPLPACQTVLGAPDPQEGPEATVGRPHLSPFDPEANPVLTRPGKEQGEEAPEPNGGLRLLTTGVGPLPACPTMPGAPDPQDGPEATVGRPPLLSSDPEVISTEDKCAPRGCLDEECPRDAAPSEEDRPHRKVQRPVYFVSEALRDAKTRYPQAQKMLYAILMASRKLRHYFQAHRVTVVTSYPLGQILHNREGTGRVVKWAIELSEFDLHFEPRHAIKSQALADFVAEWTPAPEPVSIPEASTDPSQLPHTAHWVMQFDGSLSLQGAGAGVTLTSPSGDVLRYLVRLDFRATNNMAEYEGLLAGLRVAAGLGIRRLLVLGDSQLVVNQVCKEYRCSDPQMDAYVRQVRRMECHFDGIELRHVPRRDNMMADELSRLASSRAQTPPGAFEERLAQPSARPDPLGETDAPDRPPRPVGVQASGPEGSAPSSLRLIAWIAEIQAYLTDKTLPEDREGSERVHRISKRYVLVEGTLYRRAANGILLKCIPREQGVVLLADIHEGECGAHSASRTLVGKAFRQGFYWPTALNDAVDLVRRCRACQFHAKQIHQPAQALQTIPLSWPFAVWGLDILGPFRRAPGGFEYLYVAIDKFTKWPEAYPVVKIDKHSALKFIKGITARFGVPNRIITDNGTQFTSELFGDYCEDMGIKLCFASPAHPRSNGQVERANAEILKGLKTKTFNILKKHGDSWIEELPAVLWANRTTPSRATGETPFFLVYGAEAVLPSELTLRSPXRATMYCEA

SEQ ID NO: 129495 - protein, 87 aa, Oryza sativa
  Clone ID: PAT_MRT4530_31748C.1.pep
MAGAAEGGSEPYHEAPPVDGDQHISSSTAWRGGASPECAAACSDPHSLVLSSAWSSKCKKLGRLAKMSSADVEGAEKVEELHLVMEE

SEQ ID NO: 129496 - protein, 247 aa, Oryza sativa
  unsure (1)..(247): unsure at all Xaa locations
  Clone ID: PAT_MRT4530_31749C.1.pep
LTSSAPPRLAAPATRESARASVNYEGGGGDDDDDEEAEAEVVVDDEAAAGGGGGGGGEELREAVMLVACAGNPAIVRLREMICHPETSKLHLVMDYVGVKQMLAGVKQLHARGPXVIHGDIKPGNVLVGGVDGCVRICDLGLSKSAAAPPPRTQLVGTLWYMSPEQYASTSAENFSTKSSESGLVVAHALRPLPLYIWPPARAHQSRSTIASSSCGETMASLASWAWCCSGRISTRMLDGAVTPRGG

SEQ ID NO: 129497 - protein, 63 aa, Oryza sativa
  Clone ID: PAT_MRT4530_3174C.1.pep
PHATTSPGLRRRRRLHGEAIRGEEAVLLCLERLHVVLHQADPLGAPPPLAHQAVRVELPIHGV

SEQ ID NO: 129498 - protein, 66 aa, Oryza sativa
  Clone ID: PAT_MRT4530_31750C.1.pep
MAASAVAAAIFLRLRQNFEDVHLRDFSEYMDCSGVPHSTGTNSDNGFDLGRMHHLGRLCELHTPSD

SEQ ID NO: 129499 - protein, 151 aa, Oryza sativa
  unsure (1)..(151): unsure at all Xaa locations
  Clone ID: PAT_MRT4530_31751C.1.pep
MALIKKLRKAKKDAPAGEKPEPVRTHLRNMIIVPEMIGSIVGVYNGDTIHTIDTFQDSVMSVNLTNTEIIAGSVDGTIRTFDIRMGRLXDNLGHPVNCISLSNDRNCLLANCLDSTVRLLDKSTGELLHEYKGHICKSFKMDXXLTNDDAF

SEQ ID NO: 129500 - protein, 94 aa, Oryza sativa
  unsure (1)..(94): unsure at all Xaa locations
  Clone ID: PAT_MRT4530_31752C.1.pep
MKCVRYRRDMLGVSVPLCLPFARGSFGVSLVPCGSVAXDRSVDAAVYEWLVEVCLCPSLHKFAVSLIGRRSLTPLGHQMAHMVPWPSGTQWAER

SEQ ID NO: 129501 - protein, 138 aa, Oryza sativa
  Clone ID: PAT_MRT4530_31753C.1.pep
MADVEVEAEVAAAGAPKKRTFRMYSYRGVDLDALLDMSTDDLVQLFPARARRRFQRGLKRKPMALIKKLRKAKKDAPAGEKPEPVRTHLRNMIIVPEMIGSIVGVYNGKTFNQVEIKPEMIGHYLAEFSISYKPVKHG

SEQ ID NO: 129502 - protein, 303 aa, Oryza sativa
  Clone ID: PAT_MRT4530_31754C.1.pep
FLKSWFGIFIKKKKLTEPHTGALVKPYKSHGREVRDVNSSSDNAKLVSCGGDRQVFYWDVASARVIRKFRGHNSEINSVKFNEFNTVVVSAGYDRTVRAFDCRSQSSDPIQTIDTFQDSVMSVNLTNTEIIAGSVDGTIRTFDIRMGRETVDNLGHPVNCISLSNDRNCLLANCLDSTVRLLDNYFIFASAVSFKETIWEFVLQNLVRPASVIVQYGMSTGELLQEYKGHICKSFKMDCCLTNDDAFVVGGSEDGYIFFWELVDAPVVSSFRAHSSVVTSVSYHPTRACMLTSSVDGTIRVWT

SEQ ID NO: 129503 - protein, 58 aa, Oryza sativa
  Clone ID: PAT_MRT4530_31755C.1.pep
RIRRRNPADNFFVLRFAGIIVVVVGWWRHIRTGVPPPPPIAGALFLRTRPASRIPIAP

SEQ ID NO: 129504 - protein, 689 aa, Oryza sativa
  Clone ID: PAT_MRT4530_31756C.1.pep
MPPTPSTRLSDLPSRTAAVLLLLAAPASAASRAPPPASPGDTRKAASSPLRRSPRAHAPAGGFGAAAEAGLPSPASNLNRVEDDQILVEPDLAAELEQSLVDPTHELEQNLVEQGLVIGQEFVDVHACRRAVKDMAIAMHFELRVVKSDRSRFIAKCAREGCPWRVHVAKCHGVPTFTVRTLHGEHTCDGVRDLHHHQATVGWVARSVEATLRDNPQYKPKEILQDIREQHGVAVSYMQAWRGKERSMAAVHGTLEDGYRFLPAYCEQIVQTNPGSVAIYKGTGPDNSFQRLFVSFHASIHGFLNACRPLLEIDKADLKGKYLGTLLCASAVDAENMMFPLAFGIVDAESDENWMWFFSELRKMLGVNTDKMPVLTILSERQSQVVEAVEVNFPTAFHGFCLRYVSENFRDEFKNPKLLNIFWSAVYALTAAEFDSKVNDMVQVQDVMPWFQRFPPNLWAVSYFEGIRYGHFNLGITEILYNWAMECHEFPIVQTVEHIKHQLTCWFVERQNLALSYNSILVPSAEKLISEAIADSGCYQVLRANKVEFEIVSSERTNIVDTQARCCSCRRWQIYGIPCAHAVAALLSCGEDPRLYAHECFSIMKYRETYSQPIYSIPDRSQWNLPFSFAQGAGSKAYAVLRPPKIRRPPGRPKMKILKIESLKRPKRIVQCGRCHLLGHSQKKCSLRN

SEQ ID NO: 129505 - protein, 116 aa, Oryza sativa
  unsure (1)..(116): unsure at all Xaa locations
  Clone ID: PAT_MRT4530_31757C.1.pep
MEDDQILVEPDLAAELEQSLVDPTHELEQNLVEQGLVIGQEFVDVHACRRAVKDMXIAMHFELRVVKSDRSRFIAKCAREGWPWRVHVARGHGVPTFTVRTLHXEPRATVWRDLHH

SEQ ID NO: 129506 - protein, 88 aa, Oryza sativa
  unsure (1)..(88): unsure at all Xaa locations
  Clone ID: PAT_MRT4530_31758C.1.pep
MNSQGFGPGGSPKSFRYPRADFDLESGIARKGLRKPKNHDAPGLLTSTLMKIRYFYEAHPVAVAFILLSFGLSVLILLSVYETRXRMM

SEQ ID NO: 129507 - protein, 99 aa, Oryza sativa
  unsure (1)..(99): unsure at all Xaa locations
  Clone ID: PAT_MRT4530_31759C.1.pep
FFFFFNSRTAISFLYCHIRSISGGYKLTHQATAHSLITTSAVFTTVHPIIHSHVVRSLVTSHKFPSMSSPTLPPHPIISHKVFLSXPSGHCHMGPFGRP

SEQ ID NO: 129508 - protein, 1010 aa, Oryza sativa
  unsure (1)..(1010): unsure at all Xaa locations
  Clone ID: PAT_MRT4530_3175C.1.pep
MESRRLSFPVDRARVHSVGLSSPPPLLITTTTSPPACLRRRRVVPPPTRLAYYAAAVGRLRLHRRLASVAAEWCLRLHGWPIMPPLLGVYDFTAGLPPSPPSGASAYTAGLLCRRCWASTTSPPACLRRRRVVPPPTRLAYYATAVGRLRLHRRPASVAAEWCPRLYGRLVTPPFMGVYDFTAGLPPSPPSGASAYTAGLLCHRCWASTTSPPACLRRRRLVSSLIRLXGSVRTSPPAASSTADWCFTLHNWPIMPPLLGVYVFTXGLPSPPPTGVSACTAGLLCRRCWASTSSPXPACLRRRRLVFPPARLAXYAAVVGRLRLHRPXAFAAADWCFRLHGWPXMPPLLGVYVFTXGLPSPPPTGVSACTAGXLCRRCWASTSSPXACLRRRRLVFPPARLAFMPPLLGVYVFTDRLAFAAADWCFRLHGWPIMLPLLGVYVVTDRLAFAAADWCPHLHGWPIMPPLLGAYVFTDRLAXRPPPTGASACTAGLXYAAVVGRLRLHRPACXAAADWCFRLHGWPLCRRCWASTSSPTGRLDRCRLVFPPARLAFMPPLLGVYVFTDRXPSSPPTGVLACTAGLLCRRCWAPTSSPTGXLRRRRLVSPPARLAFMPPLLGVYVFTDRLAFAAADWCFRLHGWPLCRRXLGVYVFTDRXPSSPPTGVLACTAGLLCRRCWAPTSSPTGLPSSPPTGVLACTVGLYAAVVGRLRLHRPVCLRRRRLVFPPARLAFMPPLLGVYVFTDRLPRPPPTGASACTADLLCRRCWASTSSPTGRLDRRRLVFPPARLAXYAAVVGRLRLHRPACXAAADWCFRLHGWPLCRRCWASTSSPTGXLRRRLVFPPARLIYYATVVGRLRLHRXPPSPPPTATTTDGHHHLPSPTXMPPSTGVFIFTTARLHYQFASVADDSCXTSSRQCNFVIMVERLHLYYLRHWQTLLLLLRKFCYFTNHDVFVSLDILACDAMLFYYNKRLSNIQDFYLDIFNTYLQSSNDYSTTRSYNSRLYVQLFPN

SEQ ID NO: 129509 - protein, 113 aa, Oryza sativa
  Clone ID: PAT_MRT4530_31760C.1.pep
MGGIIRIKDGSRLSNGSDLGDASEVNNRDQDLWLRDAGDANSGQDNESRIREEFVGVAQKILDSLRNGQSTATCHIRVVLLDASVRSPCAGYKILVCEQAPDIIEVGQTLYAS

SEQ ID NO: 129510 - protein, 156 aa, Oryza sativa
  Clone ID: PAT_MRT4530_31761C.1.pep
MYRVVHVQLCNRSVVFLSKRRSKAKQSPNTPYELAASASSVTLSSTHILRTSIGYRREATRRTWIGHVAHSYRECFRRVTRSTRTRRSFVAHCWCHQRDLIQNAIGLSCLASVEKRLDRACRTGAVEDERPLCCIAIVAAKVNRKGGSRIFSHRCY

SEQ ID NO: 129511 - protein, 303 aa, Oryza sativa
  Clone ID: PAT_MRT4530_31762C.1.pep
MQHETNTHMKRIHEPATQCNCASKTTLYVAVVNVGSVEGTVAKPWAGPYWFAAASARRRAPTAGCSRLWSRRRAPHLPVPACSIARLPVARPHATRRRPRSPDGRRPSPRCLPDAGRRRPMPADDPRRRPTLPQAAQSHPCPTPPHAARRYYDSFATAPAGMKGSAHDSRILSHALANFPSFPMPPTGYPNRIGYPAPFKGTTYHIPEFRHRSGPPQGKYEGIPSFSPTTQKHIIMACLAMHNFVRDSNLRDKEFERCDAHEDYLIEDTSDTSDDESEDAENDDTMNTIRTRIADALISARGG

SEQ ID NO: 129512 - protein, 545 aa, Oryza sativa
  Clone ID: PAT_MRT4530_31763C.1.pep
MMTPPKTLRIEDSSSSGTGDGSAPRQAVVERVVPNSSVVELPMLTRANYHQWASVMRVSLEALELWDVVEAVTNDRAKDRRALAAILRAVPSEMKAGLAVKTSAKEAWDSVKKMRAGDDRVKSACMQRLMKEFENMAFRDGETVGDFAMRINRLTASLRDLGEEMEDSRMVKKVLRVVPKRLKQVAVAIEMLADMDVMSVEELVGRLQVAEDADAEDHVEAHGDENREKPAFVARAFVAIVKLHKLCYSLSCLCVSDLGHFQHAREEDKTRILFLSFVDDAPPRPFHHGDVYQQVEVAPHYPMGFKAAAVAPDGVPPSLLRLKGWQVSKTSRTSYDGLADHAHWVDWPLRRRMPDLDGFGIGAGGGSPAAVVGKWYCPFMFIRDGERRLKDQVNRCMFYEMTLEQRWEEIYSCDNTHRGSISGKQPDDEVKVNVTVRRSTALLGGTGAVVQEGGPQEVDGVMWFRPAAPPPNSGAAGGVGVDMVVWEKMKWELERGGWVDGNGDVESIERVERREALGRYWDKPNGYEQTMYYCNYRILIVSVNV

SEQ ID NO: 129513 - protein, 45 aa, Oryza sativa
  Clone ID: PAT_MRT4530_31764C.1.pep
YLELGKIIMFYKDRKIADFFHGKKYFMLFSLEILCKEGSSGGIAL

SEQ ID NO: 129514 - protein, 765 aa, Oryza sativa
  Clone ID: PAT_MRT4530_31765C.1.pep
MSSLSGTVSVPRCPVIFDGINYNHWAQHMRLHMCGQRLWDVLFGELACPPFPLAQAMPTFSAQTTDEDRAKAQEEYDDALETYQGQYVMYKTWLDEDACASAILVASMEVHLTGDVVTLASAHFTWTHLRDRYAPTGDALYLAMCCQRQWSHMDLRRIYDFLTRLRSEYESIRAQLLARHPRVTLMEALTEIHSEEIRLREAGDPYVTALPHCFCFDRIDAWVSWLVLALAAMILSIFGSLTGFVFLPLRLPVFLLLLPPLNPLTQVYSRRPRVMEPSVDASPVAPPRYNLRDRNLVTIRPEDRYGYVATVLAEPSSYRDAVIHQEWQHAMAEELVALERTGTWDLVPLPSHVRPITCKGIFKLDVKNAFLNGGLHEEVYMRPPLGYSVPEGMVCRLRGSLYGLKQAPRAWFQRFASVVTAAGFSASAHDPALFVHTSPRGRIILLLYVDDMIITGDDADFIACLNAQFLMSDLGSLRYFLGIEGTIFCCHFFPRSTSLQLQGYSDATWASDSSDGKSLFAYCVFLGGSLIAWKTKKQTAVSCSSAEAELRAMALLTAEVTWLRWLLEDLGVSVTSPTSLLSDSTGAISIARDPIKHELTKHIGVDASYTRTQVQDQVIALQYVPSELQLADFFTKAQTRAQHRIAEGILYDSRKDLNKLNNGRSTGLQALEVAGLLESGMKNMLTPGEQDLYPVEQALNKCVSLYKEPHTRKFVSKTLKNEYIRCLRRLTGIVQSDFAVSEALTLQGLLAEAQQILEELGHESN

SEQ ID NO: 129515 - protein, 159 aa, Oryza sativa
  unsure (1)..(159): unsure at all Xaa locations
  Clone ID: PAT_MRT4530_31766C.1.pep
ATDGGAARSRRRGRRRRRRRHAKEESAAAGPKSCSSGRRSLLXPSAATGRSSAIGRRATLCPRPAAAASSDPRLPHSERPRCRDPRAPPLLPRTTSTPAGSPPPLRPPSCRRCPASFARRRSGRRRAAVAPAGFARRRSDRCRAAAGHRSVHVGKREVG

SEQ ID NO: 129516 - protein, 37 aa, Oryza sativa
  Clone ID: PAT_MRT4530_31767C.1.pep
ICLASPCCHFCHSPKLIQSVSRLFYLQHSYYYYKPRP

SEQ ID NO: 129517 - protein, 57 aa, Oryza sativa
  Clone ID: PAT_MRT4530_31768C.1.pep
RDQNRGLRRGGIPNHPWIGNGNFRGDQTRNKRQPPGKPRQKSPWTQNPQKNPGVPGT

SEQ ID NO: 129518 - protein, 163 aa, Oryza sativa
  Clone ID: PAT_MRT4530_31769C.1.pep
MEGGGATAPAAPHPAVAPLAFLLGKWRGEGEGSFPTISPFRYGEELLFSHHPSKPVISYTQRTWKAASGEPMHAESGYWRPRPDGSVEVVISQSTGLAEVQKGSFDAEKKTVTLQSELVGNASKVKQITRAFQLVDGELSYVVQMATITTSLQPHLKALLKKI

SEQ ID NO: 129519 - protein, 255 aa, Oryza sativa
  unsure (1)..(255): unsure at all Xaa locations
  Clone ID: PAT_MRT4530_3176C.1.pep
MRAPHGSDSRRXSAVDRVHGPGKDGAPRGADVAPTQRPRGSHVGGRTDGPDLPXGRSDGGCGSRPACAGTAQAGPAAMARGGARRRPAGGGGRRPGRSLEPPSXTRWKGLERERELEEGEDAGRRRRPWRCSPAGVDAVARTMANATAXVGSAASGGEGEGDGSRALEGSGGLGEMGKKREGVAVREGEWVRETRRMRGRGRRGPEEAGXGRGGGCGXRGGAGWRKGTGPTGGPHLSVTPGERREAAGSLIVTTT

SEQ ID NO: 129520 - protein, 90 aa, Oryza sativa
  unsure (1)..(90): unsure at all Xaa locations
  Clone ID: PAT_MRT4530_31770C.1.pep
FFFFFFFFFFVFFFFXEQPNGRRXMGXFXPKXFEXTLNRTLXDXTDXSWXDXXSXPXTHXHXDXXFRQXHSCIYXTXSKKLENXXXSTHF

SEQ ID NO: 129521 - protein, 69 aa, Oryza sativa
  unsure (1)..(69): unsure at all Xaa locations
  Clone ID: PAT_MRT4530_31771C.1.pep
QTXLXHRASSXVPKSTELSYXASSGXNXMTRTXXVLXXVXTALXLXXPXNXVXITCXQVNSAVGPXLTY

SEQ ID NO: 129522 - protein, 100 aa, Oryza sativa
  Clone ID: PAT_MRT4530_31772C.1.pep
MDKLHLIHKLHQFGLGITNTLTFNAIHEEQQPLLDKFSKKVARCKPKDAAIMRKTDTNQDSANVVDIVWWLGARMIAPMDKDNAEETRTRDSGKHLLRSN

SEQ ID NO: 129523 - protein, 146 aa, Oryza sativa
  Clone ID: PAT_MRT4530_31773C.1.pep
MPAVLLVIVVVVTVVAAVLILVPVLVVGRRGLGLAGSAHSLHRRRAGGGAESAAPVPLHHRIRCHRSFPPPDPPLSDPCGRWPPRLPTVGSATTRLTIVGSVTAVASLLRPLPLPEPSTASGGRRGERRSGGEEEEAVVVALARRR

SEQ ID NO: 129524 - protein, 233 aa, Oryza sativa
  Clone ID: PAT_MRT4530_31774C.1.pep
MYYCLAAPPAAAAPAAPAARRASSFLFVVSVPPPTLWGRVTGGAVSAQRLVRRRCSSAGEPRAAGDGGLSSFCIIEGPETIQDFVQMQSQEIQDNIRSRRNKIFLLMEEVRRLRVQQRIRTSESRGASSEESEMPEIPSSIPFLPNTSPKTMKQLYLTSFSFITGIIFFGGLIAPVLELKLGLGGTSYEDFIRTMHLPLQLSQVDPIVASFSGGAVGVISALMLVEIRNVRQQ

SEQ ID NO: 129525 - protein, 192 aa, Oryza sativa
  Clone ID: PAT_MRT4530_31775C.1.pep
ENIRPDVVILGRALGAGVVPVSAVLADKDIMLCIKPGEHGSTFGGNPLASAVAVASLKVVTDEGLVERAAKLGQEFRDQLQKVQQRFPQIIREVRGRGLLNAVDLSNEALSPASAYDICIKLKERGVLAKPTHDTIIRLAPPLSISPEELAEASKAFSDVLEHDLPQLQKQIKKTESAAEKQSCDRCGRDLY

SEQ ID NO: 129526 - protein, 100 aa, Oryza sativa
  Clone ID: PAT_MRT4530_31776C.1.pep
MRYQAGYPKVLDQTIPWYAPASRSDGLARSKKKPNSKVAIYIETSRLHPPIDAKDLIPLGLTASLSFCSHMTTPNLASIVGSLLCSNPHALANLRYLMCS

SEQ ID NO: 129527 - protein, 87 aa, Oryza sativa
  Clone ID: PAT_MRT4530_31777C.1.pep
MILVEAAARAPRRRSCSRSRDGGRPRRSRDGDRRRLGAAQAADEVGEEPRRREAEAEGRSDIGLGREHCVSQRWDLGRPRLARHSPL

SEQ ID NO: 129528 - protein, 45 aa, Oryza sativa
  Clone ID: PAT_MRT4530_31778C.1.pep
VLWGTQYLYHPWRGLVLSFNRLGVRKLKLSSILFFCDLGNFGGFN

SEQ ID NO: 129529 - protein, 229 aa, Oryza sativa
  unsure (1)..(229): unsure at all Xaa locations
  Clone ID: PAT_MRT4530_31779C.1.pep
AILETASAKKEKEKKSSSRKRFLKFCNPGCVCSCIGGWVKIYSGFQGQYRLGPEGALRVPSTAAEAFCGGPCLAETERRXLVLGYVDAIMDSFCFYNGATVRDVRLALGRGCGXRGDFDVLQRLGDDDHGRADPVLPTAAHAVACRHRTPAAYPLPHLAPAASLTLAGWPHQAVDTALRLPPVDLAAQSFTGAEDSELARRLRGPAVAVRERLSFMNEYLAEDRDPVRC

SEQ ID NO: 129530 - protein, 589 aa, Oryza sativa
  unsure (1)..(589): unsure at all Xaa locations
  Clone ID: PAT_MRT4530_3177C.1.pep
MLVMDSRRLSFPVDRPRVHSAGLSSPPPLLITTXFTAGLPPSPPIGASAYTAGLLCRRCWASTTSPPACLRCRRLVPPPTRLAXMPPLLGVYDFTAGLPPSPPSGASAYTAGLLCRRCWASTTSPXGLPPSPPTGVPAYTVGXHTTVDGHRHLHRRPASVAADWCLRLHGWPXLCRRCWASSLSPSTAFVAADWWIHGFKLTSYAPGMDQSEHHHRLASTAADWCFRLHGWPIMPPLLGVYVFTDRLAFVXAADWCFRLHGWPXLCRRCWAPTSSPTGLPSSPPTDVLACTAGLYAAVVGRLRLHRPACLRRRRPXCPRLHGWPXMPPLLGVYVFTDRLAFVAADRCPRLHGWPLCRRCWASTSSPTGLPSPPPTGVSACTAGLYAAVVGRLRLHRPAAASAADWCHRLHGWPVITPTDAIFFTAGYIAVTTNRHQYLQHKLPTFAMAADWFLHFHGCMILPVLIGLTIFIAATTTDGHHRLPPPTXYAAADRCFYLHNCXSSLPXFTSSRQHNFVIMVERLHLYYLRNQQTLLLLLHKFCYITNHDVVVNLDISACDAVLFYYNKWLSNIQDFYLDIFNTYLQSSNDY

SEQ ID NO: 129531 - protein, 47 aa, Oryza sativa
  unsure (1)..(47): unsure at all Xaa locations
  Clone ID: PAT_MRT4530_31780C.1.pep
LGWXILPCFILXNFLALPIHSYXYVNXSRYICMPRFINIYMNECGQC

SEQ ID NO: 129532 - protein, 595 aa, Oryza sativa
  unsure (1)..(595): unsure at all Xaa locations
  Clone ID: PAT_MRT4530_31781C.1.pep
SVVRXXFVAMAVTRPPLGRRLPRDSGGPGCAVPVEAGRKEEEEQKQRGRRHPRLNRPPSRSRAYQDILILGDTLLRREDHVVVSYPMKRRKKPCFVCGLFGHNSKQCMQVDCFGVFYEARSNTRINRMKIINAVSKSVPQPHKVDLNSPNRIIIVQIEKCKGPSFHNIICMVGVIESSSLQAKNMLDRPNVATSVPRCYTDLGLRRRPNNLDDAAPPSPPTRALAAKRLDHPRLLSLCGRPSLAREMERETEESERNGIEFLLPRPVRDFMMAGAANDEWRGVLFHCFDSAGALEYSMANAGSRFSFATEVCAKLMNGARYAVADPPLDSEDHKEFENIVVSDAVIILDLIFDVVHDDAVLNVMMINNGADATGWRFYTDDDLTRTPENNVQSLVLPNGIALPTFEINGGIRFRRRVVLPPVLMEEDGVIYHFLQYKFLPNVRATVRASILSGLAHGEALEELAIDARAQHFAAIAGPEGHDLDPEQWAALLLPEPADGGEGHLDGEAAVGGEGQLDGEAAVEVGEEVLEVAVEVGDEVVLPALYGFVDDDEYRSTEDDDYVPDEEESHSSDDDFVPDESDDDYVPHHEGYESSD

SEQ ID NO: 129533 - protein, 279 aa, Oryza sativa
  Clone ID: PAT_MRT4530_31782C.1.pep
MAGHDGDERRRQAMQRGVRGGETPGTGMWGGRLDSGGGIGLICTGKISNPRRVMIEHHQRAQRNVGGRRGSISGHVVINRDRTERLARLMRDYFCDNPTYGPVLFRRRFRMAQSLYMRIVHAVQNHDYYFVQRRNAAGVLGLHPLQKITVALRMLAFGVPVDFLDDYLGMAENTILSSLRRFVRAIVEIFGDEYLRSPNQDDTNRLLAIGEQKGFPGMLGNIDCMWKWKNCPTAWSGMYQGHVHEPTIILEVVASKDLWIWHAFFGLPGSHNDIKHEFA

SEQ ID NO: 129534 - protein, 982 aa, Oryza sativa
  Clone ID: PAT_MRT4530_31783C.1.pep
MAEGERELHVRALDGRSTVVALAAAASVRDLKAALRSSFPPAQVSPSFHLFLKGTKLRVEAEIGTLAVGEGEFIVLVPFARKSQQCSPVAMAEQGQITESPRSSQVSTGANSARRGITDNLSSIPSSPHAETASRYFSSGANSAWQEIMDDLSSISSSPQDDSASKNFCAQSTIPCSGNSVEDVSTDQRLPTGNSNKRRKPCKENGNAFNEMPTSGANSAAGQPSIDKKSSIARSAATSCHGTCHLGPAEMVDHLKQGLGKEGQIVHIEEIPCRAASFAELPNHLSEATREALKSIGVSRLYSHQALAQDQLRSLLEMKNALHTDIDVNIYDGDTPREDRTWIRDNARLSFHFCNTILRYIVIDEAHSYKGAFGCHTALILRRLKRICSNIYGSHPTFIFCTATSANPREHVMELAKLDNVELIENDGSPCGFKYFLLWNPPLHMTKEGSSKDSLLTRRSSPIVEVSYLLSEMVQHGLRCIAFCKTRKLCELVLAYTREILQETAKELVDTICVYRAGYIAEDRRKIEANLFQGKLLGVAATNALELGIDVGHIDATLHLGFPGSIASLWQQAGRSGRRAKQSLAIYVAFEGPLDQYFMKFPHKLFGKPIEHCQVDSHNQKLLEQHLACAAYEHPLCVQYDADYFCSSLNSVMMALKDKGCLINNPSGPFSSSMWSYVGPEKRPSQAVSIRAIEHDKYRVIDKLNNRLLEEIEESKAFFQVYDGAVYMHQGVNYLVEELDLSSRTAFCRKADLKYYTKTRDYTDINVLGGEFAHLPPSMCKTNGVKTTAQANDCKVTTKWFGFYRIWKSNNKISDSIELNLPPYSFNSQAVWVRLTHSVITNVEERKLQFRCGSHAASHALLNIVPLHMTCDASDLETECANPHETRGIPDRILLYDKHPGCIGIALQINSLFGELLLAALELVSECNCTSSAGCPNCIQTLTCGEYNEVLDKEAAILILKGVIEYERSYFEKEDGSDQGVR

SEQ ID NO: 129535 - protein, 134 aa, Oryza sativa
  Clone ID: PAT_MRT4530_31784C.1.pep
FKILDTSAAQNRASSACTALNCVQTTHKQSKASSAFSLDSSQLHDPPSSARYLPGSKYLGMPVLSNKGASGPSSVSTDSTVLVFASYSSMAAGSASGASFRAASAPPPPCARPPRARRNRARRNRAVGGGLAVV

SEQ ID NO: 129536 - protein, 194 aa, Oryza sativa
  unsure (1)..(194): unsure at all Xaa locations
  Clone ID: PAT_MRT4530_31785C.1.pep
WAPSSCAPRRLXPRRPPACRVAPAYRHRQLCVLMLCRPHATSTQHSPATSLHQALMAPSLPAAGTALPLTSVSSMHSSLLHHTPIAGRQRHRAGLPPCRSAPSTSSCRTTRRRRPRRLLPAQIRRVLGLATLPRRGDPVGAVPDPLPHTGEAATSHPTRSAPPPTSRRSFAGSVSLATTFSVGLAVSSGSKASR

SEQ ID NO: 129537 - protein, 51 aa, Oryza sativa
  Clone ID: PAT_MRT4530_31786C.1.pep
SCAGISRSSDRSKSYRTSTQRAFTTRSYCWTIFEETPVTGTEARLGTYTYT

SEQ ID NO: 129538 - protein, 65 aa, Oryza sativa
  Clone ID: PAT_MRT4530_31787C.1.pep
KFNFRTFFEFWPFSKRGKILLPTKSKGGYSPAGGFNKITKHFLKTKGFWKNLPLFKIVNPKPNWF

SEQ ID NO: 129539 - protein, 79 aa, Oryza sativa
  Clone ID: PAT_MRT4530_31788C.1.pep
MALMKNNSMMVLCLAVLVLMSATSISCHAPPARNSDGTICIYYPACTIEGCVIMCGKVVGANTGHCDNYGNCCCPNLTK

SEQ ID NO: 129540 - protein, 107 aa, Oryza sativa
  unsure (1)..(107): unsure at all Xaa locations
  Clone ID: PAT_MRT4530_31789C.1.pep
MDAGDQSPKEVYSVWALPPEPVRARLRGVMAGLRAAHGGPAFEPHATVVGAIRLRRSAAXEALRAAAAGXRPYXXRVXRRARXGFVLQIPFLLLRPPPGGGAARSXC

SEQ ID NO: 129541 - protein, 386 aa, Oryza sativa
  unsure (1)..(386): unsure at all Xaa locations
  Clone ID: PAT_MRT4530_3178C.1.pep
MAVTRGGRSTADRVHGPGKPAHHVVHTWRRRGAHAAAEPTAPIYPTQGXIGRRVWLAAGVRGHGSSRPGGHGARRLAARMRRRRETVTGGDGGRRHRGDAGGEAAAKRLAAREREREEGEGXRPHQRRPTTASDGGRRRRRDDLRNLLANTVEGVREGEGIGRGRGRRSKAAAMAVLTXNGAEWVPAAGSNGRGVDRVARTTANATASXRGSARRLAAASDDRSGGGGGEEEGDGARALEGTGGLGEMGKKREGVAVELKXGGGARTWPVEAXSPADVGSGGGEREAGFEFRIPAVSGAGVGEREGEWVRRTRRMRGRGRRGRRRRERVRGGGYGARRRRLEEGDGPDRWAPPVGDPGREEGGGRLGWASASDERINITVQDRVQF

SEQ ID NO: 129542 - protein, 171 aa, Oryza sativa
  Clone ID: PAT_MRT4530_31790C.1.pep
MAETLKPVALLLLILNLCMYVILAIIGGWAVNISIDRGFILGPGLRLPAHFHPMFFPIGNWATGFFVVFSLLAGVVGIASGLVGFSHIRHWNYYSLQPAATTGLLAWALTVLAMGLACQEISLDRRNAKLGTMEAFTIVLTATQLFYVLAIHSGSRGPVPVERTHAVAAGY

SEQ ID NO: 129543 - protein, 150 aa, Oryza sativa
  Clone ID: PAT_MRT4530_31791C.1.pep
MHSWVQRLLTTATTAALLLLAACCAASALDAFHVPSVQAQAHVTKINRFHKQLNGNDKVTLTFNLSANLESLFTWSTKQVSLWDHIIPDKDKANLQVEVKSKYPLIDQGSSLRGKKVQLVLHWHVMPKAGVMIRDRMALSEFNLPDSYTS

SEQ ID NO: 129544 - protein, 232 aa, Oryza sativa
  Clone ID: PAT_MRT4530_31792C.1.pep
MHSWVQRLLTTATTAALLLLAACCAASALDAFHVPSVQAQAHVRIRLFFFFFLLPLHYHAWNHPRLGTLEIGDLLCIAQHVDMAEIVLKCLEFWKVGCQILILSTMVTKINRFHKQLNGNDKVTLTFNLSANLESLFTWSTKQVFVFLTAEYENSKNSLNQVSLWDHIIPDKDKANLQVEVKSKYPLIDQGSSLRGKKVQLVLHWHVMPKAGVMIRDRMALSEFNLPDSYTS

SEQ ID NO: 129545 - protein, 133 aa, Oryza sativa
  Clone ID: PAT_MRT4530_31793C.1.pep
MATLLSEQGVESVTKLVNLKWVSKGRVALQPSPTPAPRESQRRPGGLGVPRHAPRALALPCPEALAQLPCVCDRPVVGHVRLDGRPCPHVASVFGGVEVGLSPVAGGGRRRIPLKDGLPLSFRAKARIVVRSR

SEQ ID NO: 129546 - protein, 170 aa, Oryza sativa
  Clone ID: PAT_MRT4530_31794C.1.pep
MDQVLNKVGSYWFSKRASKEIDSIGDDISSISTSIGTGAKWMVNKIKGKMQKALPDLLKEYDMPAGLFPRDATNYEFNEETKKLTVYIPSACDVGYKDSSVLRFFTCVTGYLEKGKLSDIEGLKTKVLVWTKVTAIKTEGSKVHFTAGVKKTRSRDAYEVVRDGIPIDKF

SEQ ID NO: 129547 - protein, 214 aa, Oryza sativa
  Clone ID: PAT_MRT4530_31795C.1.pep
MASSILLLVVLAVVSAPVALVMAGDPDILTDYVIPAGSNAENITGDFFTFTGFRNPLSMNMSMPMPNANFTVTKATMAEFPALNGQSVSYAVLMYPPATLNPPHTHPRSAELLLLVDGALSVGFVDTTNKLYTQDLAAGDMFVFPKGMVHFQFNSGNQPAMALSAFGSAAAGLVSVPVTVFGTNIDDAVLAKSFKTDVPTIQKLKAGLTPPKKA

SEQ ID NO: 129548 - protein, 214 aa, Oryza sativa
  Clone ID: PAT_MRT4530_31796C.1.pep
MALSYYSLLLLLLAVWAPALTLVMAGDPDILTDYVIPANGNPMNITGDFFTFTGFRKVFNTSSAPEPNSFTVTKATMAEFPALNGQSVSYATLVFPPSTVNPPHTHPRSAELLLVVDGALSVGFIDTTNKLYTQDLAAGDMFVFPKGMVHFQFNSGNQPAMALSAFGSAAPGVVPVPVTVFGTGIDDAVLAKSFKTDVPTILKLKANLTPPNKS

SEQ ID NO: 129549 - protein, 227 aa, Oryza sativa
  Clone ID: PAT_MRT4530_31797C.1.pep
MARDESMIAAATYFWSTAMNTFLFSQGAMTPTLLDVIMITDLDVTSSANLPSLDTQLTHEFKTRSIGGNMQPFLMMWLEKFLFCGPSCGPTANWQRVAENLVEKKHFPLGKYLLGYLYQTLNAAINKIVSGKSIGTGGPWWLLQIWLNLHTRMVADRPALADANFPRFEPIIRDDGERSTTRRCMSFEEAASVSTASKLSAELFKEWFNNFYDGFVLTENTRPGRSA

SEQ ID NO: 129550 - protein, 676 aa, Oryza sativa
  Clone ID: PAT_MRT4530_31798C.1.pep
MQPFLMMWLEKFLFCGPSCGPTANWQRVAENLVEKKHFPLGKYLLGYLYQTLNAAINKIVSGKSIGTGGPWWLLQIWLNLHTRMVADRPALADANFPRFEPIIRDDGERSTTRRCMSFEEAASVSTASKLSAELFKEWFNNFYDGFPKNTRIWFAYEGHSTFELPGDFWFDEINSKKYDKSKEVFSTAINPCIIPVGIHQGKNIQMTYEFCHPTSATRQFGMGQLPISLFFTDKIQNRGEITSLLMMDRLLNLPGPPLGSINNIKLRMLRSATFDRWWIEWKKHLFDQSASMYLTDLFPKVVPQTTDFSPLHHSNSGVEIQYALGLLPNGGGLSPPVIGYNAPKTSTLLHGMPRVPIAPIAGKKRSKSATAPSAAKKKPKKQKATTYDLPAIDQDKKKVATKKPQGAAPPPPRPPTHVSESSENTPSAVGSHHIGEEEEEVIAPAPAIPILADMFSFDIRQFMDEEEETTSTALAPLADDVKTILLDISNRLEGSLETLVTSCGSIRDRLHEIDDKIPDELADAITPTAYLEQHRLKLEKAQKRIADRRERRDLEATIQANRASINKEKAKLDELEAGPSATQANIDRLNNQKIQLLAELEQCNAQLALEQAKLADLPKAIEDQKSKLKTSIKHLTELTKSLKPISSTDATDAQIIDEIDQIRQRAISAIQRYVSG

SEQ ID NO: 129551 - protein, 56 aa, Oryza sativa
  Clone ID: PAT_MRT4530_31799C.1.pep
MGRHDEIPETAQALGPADRPIAPPSPRGSGIYSADDGIFLATIQKRKSGDVRSQLP

SEQ ID NO: 129552 - protein, 658 aa, Oryza sativa
  unsure (1)..(658): unsure at all Xaa locations
  Clone ID: PAT_MRT4530_3179C.1.pep
QQRLHRRPASVTAEWCLRLHGWPIMPPLLGVYDFTAGLPPSPPSGASAYTAGLLCRRCWASTTSPPACLRRRRVVPPPTRLAYYAVAVGRLRLHRRPASVAADWCPRLYGWLVTPPFMGVHVFTAGLPPSPPSGACAYTAGLLCRRCWASTSSPPACLRRRRVVPPPTRLAYYAAAVGRLRLHRRPASVAAEWCLRLHGWPIMPPLLGVYDFTAGLPPSPPTGVLAYTIGWSHHRSWASTSSPLACLCRHXLVFLPIRLADSAAVNGLHHLHHWLGSTGADWCFCHHXWTASFPHRLLLLSPREYYKAKSSFILFFIXIFCLFLCLTTSTGSPLTSESGAIDVISYFLNNFHNIYLDCLRHNLSTKVPIKWIQIQICIKGIQGFKLISYAPGMDQSEHHHRXPRPPPTGVSACTAGLYAAVVGRLRLHRPACLRRCRLVFPPARLAFMPPLLGVYVFTDWLAYAAADWCFRLHGWPLCRRCWASTSSPTGRLVRRRLVLPPARLAYYAAVVGRLRLHRPAAFAAADWCFRLHGWPLCRRCWASTSSPTGXSPPPTGVSACTAGLXYAAVVGRLRLHRPAASSAADWCFRLHGWPIMPPLLGVYIFTDRXAASAADWCHRLHGWPVMTPTDAIFFTAGYITVTANRHHLQHKLSTSAAD

SEQ ID NO: 129553 - protein, 92 aa, Oryza sativa
  Clone ID: PAT_MRT4530_317C.1.pep
PRRRRGQSRARLRRKGETTSVAMGVGRSGVRRRRRGTTLASSGAVLGASPAEGGTTTAPARAGCGGVRRRAGTREEVRREEERQRGRWSGSG

SEQ ID NO: 129554 - protein, 80 aa, Oryza sativa
  Clone ID: PAT_MRT4530_31800C.1.pep
MVEVLEVEEAVAFTPTPSRSGDSSGSHGPRHRRHDSPTPSRREPSRREDSTRSSGFALSLPLGEGRPPRAQARARPQFWP

SEQ ID NO: 129555 - protein, 79 aa, Oryza sativa
  Clone ID: PAT_MRT4530_31801C.1.pep
MKEQQDTFCSDGRTECQIMLNILQAPKGKARTRVQDELIDWLKNANSDQVKLPAAREAAAHASKTQTVGVIQAQKALTT

SEQ ID NO: 129556 - protein, 93 aa, Oryza sativa
  Clone ID: PAT_MRT4530_31802C.1.pep
KENLDENKPMCKRLNVKAFLTPFYRELTQLRRLCSCEVRTEDACVNTVVRWSQSVGGWMPEEPQAARDCLSGARLMYLSFLPDDYEPLEISVS

SEQ ID NO: 129557 - protein, 105 aa, Oryza sativa
  Clone ID: PAT_MRT4530_31803C.1.pep
MAGGGVWVFRNNGVMELEEQATSRKALVHVATSEVIRSTEALERRLGALGWERYYEDRATLQLHRRDGSADLISIPRDFSRFRSTHMYDVVVKNRDHFKVVDLHT

SEQ ID NO: 129558 - protein, 178 aa, Oryza sativa
  Clone ID: PAT_MRT4530_31804C.1.pep
MAFSGRCEVEVATGQTRISRVPAAQRREEDDNTAEDGRRDVWHGDSGEGGVMVLRAAFAMLRQHSTTACGRRAAVLRHSRLVAISCMRELQKKNQQENHRILTHRTKVVDACDLTPTPIAGEFSFQPPSSRRRAPLLFLTESPPVEPIPLGCSGEATSVSAGSPNPHYESLGAAAAER

SEQ ID NO: 129559 - protein, 165 aa, Oryza sativa
  Clone ID: PAT_MRT4530_31805C.1.pep
MVHACMRWRRDENAGAPLHGARTPSLSLPSHARAVRRTGEQAAVRCLVRTKGLVMLPRRNTLPQHRERRPQNHDASLAGVAVPNVSPTVFGGVVIFLTPLRRRNTGYPRLAGGDLYLTAPSSVRAVILLTRAVVESGRAILHLVEVCWVNPEKAISVPSCCHAPN

SEQ ID NO: 129560 - protein, 109 aa, Oryza sativa
  Clone ID: PAT_MRT4530_31806C.1.pep
KLVFFFFFFFIFFSSPKSRGKPPPGKNNCPPRHPNGGGPQKTPWGEHQGFPGGGSISLPRPMGPHFYAGQVRGKGRTFPSPTDRNICCRGAGGGGKILCPSMQGRRPPP

SEQ ID NO: 129561 - protein, 343 aa, Oryza sativa
  Clone ID: PAT_MRT4530_31807C.1.pep
MDVLSSIFSKAEGEGLLQPLAIPFSVSLYADDVVAFIRPVMDEIRTATQILAIFEEASGLQTNFTKCSTLPIQCNETDLQTLHDELPCQVVSFPCTYLGLPLSIFHLKKEDLQPLVDKIARRLPSWMSHLMTPIGRATMVNTVLSSIPVYLLMAINAPKWVIKGIDKIRRSFLWAGKASTNGGVCRVAWARVCSPKEYGGLGIPDLERLGIALRSRWLWQQRTSPEKPWQGLSIPVSQKERNLVSISMGSSIRSLAPAVYAAVPARLRNRRTVAEAMTDRRWIQDISSALGIQAILEYSSFGIAFADRLQSRGLSHPDRCVLCDQCEETIDNLLVACPESQQL

SEQ ID NO: 129562 - protein, 79 aa, Oryza sativa
  Clone ID: PAT_MRT4530_31808C.1.pep
MGLKPRAAFPRPFLFRPLFFVRGLVLGPWFFFFAFWAQTLKKLIYWRWDLRSGEGTLNVFGPGPEKRTPLNPWQGIYCI

SEQ ID NO: 129563 - protein, 82 aa, Oryza sativa
  Clone ID: PAT_MRT4530_31809C.1.pep
STGKTAQNLNCPEPKYDYKWHESCRGFEKFRSVFSFRCLYEVPQNSQYSGHFVASQVSWVISFSMMLSQESVKERTPSCHLI

SEQ ID NO: 129564 - protein, 59 aa, Oryza sativa
  Clone ID: PAT_MRT4530_3180C.1.pep
CRRPPSPPIGAVGSAAACAPRRRHVCTTWCAGFPGPWTRSAVDRPPRIPALPTLRCTLK

SEQ ID NO: 129565 - protein, 324 aa, Oryza sativa
  unsure (1)..(324): unsure at all Xaa locations
  Clone ID: PAT_MRT4530_31810C.1.pep
MQAYANGGVCRVAWARVCSPKEYGGLGIPDLERLGIALRSRWLWQQRTSPEKPWQGLSILVSQKERNLVSISMGSSIRLLAPAVYAAIPAHLRNRRTVAEAMTNRRWIQDXQFGVGYSSDPGVFQALGLPSVSAAFRRAGLSILAHKLIWQSLAPPRCRYFLWLVLPPFHDEVALNRCWTADRLRSRGLSHPDRCVLCDQCEETIDHLLVACPESWQLWWVALRAIGHSECLPLNEHSFLSWLCDCRKKMVKEHCRGFDTIVTLVAWTIWKERNNRVFNQKSRTWAEVARVMTGEAELWRLARAAIPVLVAHVSGEGSQNLVGD

SEQ ID NO: 129566 - protein, 169 aa, Oryza sativa
  Clone ID: PAT_MRT4530_31811C.1.pep
MGDRNSVLFWEDCWLQGSSIRSLAPAIYAAVPARLRNHRTVAEWETSGEYSSRSAYRVLFFGRTRLQHKPIWQSLAPPRCRYFLWLVALNRYWTADRLRSRGLLHPDGCVLCDQCEETIDHLLVACPESQQLWWVALRAIGHSECLPLNEHSFFSWLCDCHKKMVKEHR

SEQ ID NO: 129567 - protein, 159 aa, Oryza sativa
  Clone ID: PAT_MRT4530_31812C.1.pep
KFPLFFFFPRPPEGPRRFWGGPGAPGAPPPNPRGRRGTPPGAGLGKGPKMIPPQGPPRKPGAKPPPPKKKREKGPPGTPGGGNPPPGRKPKPLPGLLIGGGEGGGGQRGGAGFTGGGDPALPRIPRGKPKMGKTPTPGPTPKFRTGPREGTNFPFREGV

SEQ ID NO: 129568 - protein, 161 aa, Oryza sativa
  unsure (1)..(161): unsure at all Xaa locations
  Clone ID: PAT_MRT4530_31813C.1.pep
APPRCRYFLWLVTLNRCWIADRLPSRGLSHPDRCVLCDQCEETIDHLLVECPESRQLWWVAFKAIGHSECLPLIXHSFFSWLCDCHKKMVKEHRRGFDTIATLVAWTIWKERNNRVFNQKSRTWVEVARVMTGEAELWRLARAAIPVLVAHVKRAHRKQNG

SEQ ID NO: 129569 - protein, 97 aa, Oryza sativa
  Clone ID: PAT_MRT4530_31814C.1.pep
LSLCKCSQWLSWAGSRCCRTCTDRVYGAYLGWSCRRSRTGGHAGWVRLPRGRSRPRRRTGPTTRPPGMRSSSSGATSVLQALPHPGADGHHAGRSST

SEQ ID NO: 129570 - protein, 679 aa, Oryza sativa
  Clone ID: PAT_MRT4530_31815C.1.pep
MPSLVLLLMMNFVMMVIATFPEFTYNGFSGARNLLLDGAASVGEDGILSLTNGSSGAQQQGRCFYPYPIPLQYTGGETRSFTSTFVFAVTCSGSGSCGDGMTFVISSTADFPAASSPAYLGLANPHDASSNPFVAIELDTVADPDATNGNHVAIDFNSLTSNLSRPAGYIYDDEGAVGNSSFQALKLSSGDPMQAWVSYDAGAARLDVTLALVPMFMPSVPLLSYNVSLSRLLSAADDSPMATKAYFGFTASTGGDPGGAGATHQVLGWSFSNGGLPLDYSLLPLKRAHQGQDYSRSRRANRKSFVTWLPAAASVLAVLAAMAACLVLRWCWKKNARSRENWEAELGPRRFAYRDLRRATDGFKHLLGKGGFGRVYGGVLSASGMPIAVKRVSSESRHGMTQFTAEIIILGRLRHRNLVRLLGYCRHKEELLLVYEHMPNGSLDKYLHEHTYSSNCRTLGWPQRLHVIKCVAAGLLYLHDDWEQVIVHRDVKASNVLLDADMNGRLGDFGLARLHDHGADAHTTHVAGTRGYLAPELTRFGKATKATDVFAFGAFVLEVACGRRPMGHNARGELLVLVEWVRDAWAAGGGGSVVDTMDPRLEEYSGEEAELVLKLGLLCSHPLPAARPGMRLVMQYLDGDVPLPEFSPDYLCIKDVDQVQVGDYSPSVVTTITGLSGGR

SEQ ID NO: 129571 - protein, 61 aa, Oryza sativa
  Clone ID: PAT_MRT4530_31816C.1.pep
KRAFFFFSPKKKKKKKKKKKKKKKKKKKKKKKKKKKKKKKKKKKKKKKKKKKKKKKKKKKK

SEQ ID NO: 129572 - protein, 62 aa, Oryza sativa
  Clone ID: PAT_MRT4530_31817C.1.pep
MRIRFESQQDLPYTLSVPYTVIEEPSCCKGFSLNKGLICLPCVLNKFQNKITNLAVSSNGVA

SEQ ID NO: 129573 - protein, 146 aa, Oryza sativa
  Clone ID: PAT_MRT4530_31818C.1.pep
MHEIVQCLVAYCGNLSLADSNLFATEATAAPDGANHQRRRRPCKTTTLDLYDAIIKAEQQSLCASVQEAYDPAAQAAFLASCKARLQESPVAMSLLVQENGDKTLSLAGGCRVPRRRVARRAEAISTSSPQEVLLARRARKDAVYG

SEQ ID NO: 129574 - protein, 115 aa, Oryza sativa
  Clone ID: PAT_MRT4530_31819C.1.pep
CAAIIKNIVASDVLDIAACMASAQREGLWQSYRQNQLQLCVLLLQHVISRYNYCLRHPNTIRTSHFFPSAACELKNNQVWQHFALDAQQSHYPDINIVQAIAHLSQLQQFGDLYF

SEQ ID NO: 129575 - protein, 727 aa, Oryza sativa
  Clone ID: PAT_MRT4530_3181C.1.pep
MANLNHNPQRFLRQGHAVNVGGDFRIPRVDLTILQHHARRHEDFYVAIVEPIPLEQDWDHHRALIANFVQDELHYEVRNSFQHPSTVGFFQMKSAMNRDALVLSPPEFYDGVHSVTFVNHDQGPNWRAANYHREGWFMFLDFPLDFIDRHHVHLAVTSFGLLTFWADADRMLGRVFVRAKYRDQDFVLRKIVLFDPLGAGGGGESWTISIFMLQGDFINFPPEEDLPPAGPQPGPDDAADEDPNDGNVWQFGNPRNQGARGILDKIDFLCKAKGIMQTLIQDKPIPAALRMANPFSTLVLPRKYIFDSSPSVGQHEPEWALLPFESNSPPLPERVIEDVLPISVRPPSSPISVAPIALLPPKAPDMATKELQMDPRMGIGKPRGRSAKKLKELAVEERNLSLFEWNFKEVVKHRILKLLEFWKIYWKKCCTNRWMMLGEENTKFFQSIATGKILNNSYITLVPKKPSPKTVNDFRPISLMGLSLKFLTKLMADRLQGVILKVVSENQYGFIKGRAIQDCLAWAFEYIYQCQQSKREIIILKTIEKAFDTIEHTAILSVMQSMGFPQKWLNWMQMVFSSTSSVVLLNGVPGISFNYKRGVRQGDHLSPLLFVLGAKLLQRIVNMAFNLDLISKPVNENDGSGFPNIQFADDTLILLKASKKEIFCFKALLNIFAQSIGLKVNYAKSSLYPLNLSEEKPDLIAGFLGCSVGKLPFTYVGLPGNYRAKSD

SEQ ID NO: 129576 - protein, 106 aa, Oryza sativa
  unsure (1)..(106): unsure at all Xaa locations
  Clone ID: PAT_MRT4530_31820C.1.pep
MWMARSLYGMTHAEDGSSLLLERISSRLSMQLTATAPELFNNYDGLRSIWKLSTAVPVIDTAYICHYTGHSIDSELDDRTHINPXIVRTFLILCSSGYIGTSFFAY

SEQ ID NO: 129577 - protein, 462 aa, Oryza sativa
  Clone ID: PAT_MRT4530_31821C.1.pep
MTGAVSKLAAPRPTPTPPHQPTPPPTPAPAMTGAAPNFPPPRPAAPAPLPPASVRSAFLASAPSPRRFSVSIAAGRARSPIIAMASAKEGNGAPTKRTTLHDLYDLQGQSPWYDNLCRPVTDLLPLIGSGVRGVTSNPSIFQKAISTSNAYDDQFKQLILAGKDAESAYWELVIKDIQDACKLFEPIYDQTDGADGYVSVEVSPRLANDTQGTVEAAKWLHKVVDRPNVYIKIPATAECVPSIKEVIANGISVNVTLIFSIARYEAVIDAYIDGLEASGLSDLSRVTSVASFFVSRVDTLIDKMLEKIGTPEALALRGKAAVAQAKLANQLYQKKFSGPRWEALVKKGAKKQRLLWASTSVKNPAYPDTLYVDPLIGPDTVSTMPDQALLAFIDHGTVSRTIDANVSDAEGVYSALEKLGIDWDEVGKQLELEGVDSFKKAFDSLLGSLEEKGNSLKKTVSL

SEQ ID NO: 129578 - protein, 71 aa, Oryza sativa
  unsure (1)..(71): unsure at all Xaa locations
  Clone ID: PAT_MRT4530_31822C.1.pep
LMAFCRARLPRYMAXRTVVVVEEELPKTATGKVQKVALRERAKAMGSLPAAASSSSRRAPTGTAGXGRSKX

SEQ ID NO: 129579 - protein, 584 aa, Oryza sativa
  Clone ID: PAT_MRT4530_31823C.1.pep
MATTLSNGVSQNGPQRNYQVVVAATRDMGIGKDGVLPWKLLGDLKFFKELTVTTADPVKKNAVIMGRKTWESLPLKARPLPGRLNIILTRSGSFEFATVENVVICGSMNSALELLSSTPYCLSIEKVFVIGGGQVLRESLNGPSCEAVHLTDIQSSIECDTFIPPIDLSVFQPWYSSLPVVESNIRHSFVTYVRVRKTMAETHDSNGKESANDGIKSDKFETENFSFLPKLIFDRHEEYHYLNLVEDIIRSGAQKNDRTGTGTLSKFGCQMRFNLRNSFPLLTTKKLAPLKLYNKVFWRGVVEELLWFISGSTSAKVLQEKGIHIWDGNASREYLDSVGLAHREEGDLGPVYGFQWRHFGAEYTDMHADYTGKGFDQLMDVIDKIKNNPDDRRIILSAWNPSDLKKMALPPCHMFAQFYVESGELSCQMYQRSADMGLGVPFNIASYSLLTYMIAHVCGMLSSTLLCDWIIPKQNDDRNQRWKTKNETPQHANQQSTPMDCLNLYHLITRLLISTLSTNKDTQQQQPPRSALTHHTSINDSIQTHYLPHPTYRAQSSILIELQYTLFSLLLPQSLIFRDRGSTF

SEQ ID NO: 129580 - protein, 100 aa, Oryza sativa
  Clone ID: PAT_MRT4530_31824C.1.pep
MEGAADPTLGPTPFRRVPREYRGQPPHPLSLHTLGRGGGSCHSTLGPTLIEGVPRGYRGQPPPLSLNTLGRGEGSRHSTLGPTLLEGVPRGFGAASSLQT

SEQ ID NO: 129581 - protein, 196 aa, Oryza sativa
  Clone ID: PAT_MRT4530_31825C.1.pep
LDSVGLAHREEGDLGPVYGFQWRHFGAEYTDMHADYTGKGFDQLMDVIDKIKNNPDDRRIILSAWNPSDLKKMALPPCHMFAQFYVESGELSCQMYQRSADMGLGVPFNIASYSLLTYMIAHVCGLSPGEFVHVIGDAHVYRTHVRALEEQIQKLPKPFPVLKINPLKKDIDSFVASDFKLVGYDPHQKIEMKMAI

SEQ ID NO: 129582 - protein, 58 aa, Oryza sativa
  Clone ID: PAT_MRT4530_31826C.1.pep
YVSATTFITPTKIREKLKPMDIHSSTTISVHGSINLDQFGFGLYTQIKLSPNSYKIDK

SEQ ID NO: 129583 - protein, 184 aa, Oryza sativa
  unsure (1)..(184): unsure at all Xaa locations
  Clone ID: PAT_MRT4530_31827C.1.pep
REKEYKSKRKKNKSKEEGQNVIVGRIKKKRGKKKKCRKEDKKRKREKKKIKEKREKKKKNXKKKNNDKKKKKKVKEKKKRSNKXKKENKRRRRKKNREEMKNENKKEKKIKKKKKREKGKKKKKKKKEQERKKEKKEIEREKKKKKSRESKKKKKKKKKKKEKDYKIKKKKKTKQYSHHNQYQL

SEQ ID NO: 129584 - protein, 53 aa, Oryza sativa
  unsure (1)..(53): unsure at all Xaa locations
  Clone ID: PAT_MRT4530_31828C.1.pep
KKKKKKKYEDRKKKKXKKKKKKKEKKWKKIKEKKSEXNKKKNKGKKQEKKKIN

SEQ ID NO: 129585 - protein, 58 aa, Oryza sativa
  Clone ID: PAT_MRT4530_31829C.1.pep
MEGQPENKIGIRALRRCLVLDAAVLIREFFYHDELRVELIALHRTELITLHFTGRLAH

SEQ ID NO: 129586 - protein, 209 aa, Oryza sativa
  Clone ID: PAT_MRT4530_3182C.1.pep
MPEVVVVQQADEPGRRKGRPKGRRRRRGWRGRRGDGVPAKPRSSRGGGRCGDAEGGDGDVGRRSGEAAGMAGDGGVVATPLVVGEDASPVISPRNGGEAGKEEAAATPGEVAAQPEGARARREVRLEVASTEEREGRRREGSSGGLRGKRRAGRGGGGGGDAGGGDGAAGRRTGKAVGAAGGVQRHGRERATVGRWLGTMGDRGRGLKR

SEQ ID NO: 129587 - protein, 159 aa, Oryza sativa
  unsure (1)..(159): unsure at all Xaa locations
  Clone ID: PAT_MRT4530_31830C.1.pep
LTTFILFPAKKKSSCLYHFYNFKFIRIICVRVTDKTCLLSYDLWNIPIRYTFTYMDCFRIRRWNLLQITEISLRDXVISKILLGALIGGQDDPWYKRDPXEGCKASNFIAYTPTIVHEARVRGAKSPGDLVEFIDYDLILVLTYLNTQLIRSTSTTRRQ

SEQ ID NO: 129588 - protein, 97 aa, Oryza sativa
  Clone ID: PAT_MRT4530_31831C.1.pep
SAVLQSFWLFCCYSTRNVQGSRTKTCYWGSLLFHHLSLRTWTLMVIVCNVSLEGLRLLDGAILCPNLGLSSLRLVTSSAQQDMRERDDDTSSEGHIF

SEQ ID NO: 129589 - protein, 62 aa, Oryza sativa
  Clone ID: PAT_MRT4530_31832C.1.pep
LWSVSKSINLLHLFTLEKFFPGNISYARIYSILSFCLHYSLDPFYTLRLSLGYHKVTNMLLK

SEQ ID NO: 129590 - protein, 232 aa, Oryza sativa
  Clone ID: PAT_MRT4530_31833C.1.pep
MKKIFGAKKSKDPPPSIQDATERINKRGESVDDKIKKLDEELGRYKEQIRKTRPGPSQDAIKARAIRLLKHKRMYEEQRNMLYNQTYNLDQVAFAADGLKDAQQTMNAMKAANKELKGMMKTVKIEDIDNMQDEMTDLMDVSNEIQESLGRSYNIPDDVDEEELMGELDALEADMEFESSAVPSYLQPDKESDFDAELNLPAAPTAPAAVPVSRQQVDELGLPAVPRASIRS

SEQ ID NO: 129591 - protein, 50 aa, Oryza sativa
  unsure (1)..(50): unsure at all Xaa locations
  Clone ID: PAT_MRT4530_31834C.1.pep
LMYQTLIDSRNKLYYLYTVSDSLNYTLFTLDRTXLMLFLIWHNSLVIIYV

SEQ ID NO: 129592 - protein, 820 aa, Oryza sativa
  Clone ID: PAT_MRT4530_31835C.1.pep
MSPGNLFADFTVLVVVVLAVAAPPVSGQRSVYPSANLSTLWVKNKVLDSVPYEDGLASPVGENATLELTGDGDLVLREKANGRLIWSSGTSDQSVRRMEITEQGNLVLFGQRNMTVWQSFDHPTDALVPGQSLLQGKMLRANASPTNWTEGKIYITVLRDGVHGYVESTPPQLYFKHELSRNMSQRDPTRITFTNGSLSIFLQSTHPGNPDESIQFQEAKSTQYIRLESDGHLRLFEWSRGEPSWIMVSDVMKEFLHVDDCAFPTVCGEYGICTSGQCICPFQSNSSSRYFQLVDERKTNLGCAPVTPVSCQEIKNHQLLTLTDVSYFDMSQIIMNAKNRDDCKQACLKNCSCKAVAFRYGQNDSNGECRSVTEVFSLQSIQPEKVNYNSSAYLKVQITPSSDPTQKKLKTILGATLAAITTLVLVVIVAIYVRRRRKYQELDEELEFDILPGMPTRFSFEKLRECTEDFSKKLGEGGFGSVFEGKIGEESVAVKRLEGARQGKKEFLAEVETIGSIEHINLVRLIGFCAEKSNRLLVYEYMPRGSLDRWIYYRHNNAPLDWCTRCKIIMDIAKGLCYLHEECRRKIAHLDIKPQNILLDENFNAKLADFGLSKLIDRDQSKVVTVMRGTPGYLAPEWLTSQITEKVDIYSFGVVLMEIISGRKNIDLSQPEESVQLINLLREKAQNDQLLDMIDKHSNDMVSHQEEVIQMMKLAMWCLQNDSSRRPSMSMVVKVLEAYAKQLMAAVALAHFVEHLPCGGHGWPGARQSQRRDEAPASESGVDAIAATAGGAGLDRLLRPFGELLTAAASSRIFSCQKLS

SEQ ID NO: 129593 - protein, 61 aa, Oryza sativa
  Clone ID: PAT_MRT4530_31836C.1.pep
KNNKKKHKKPLNITKGIKGSSYFQRRAKKQTTKRGEKLKTQKKKEAKKTKNSLNTSPVYTP

SEQ ID NO: 129594 - protein, 79 aa, Oryza sativa
  Clone ID: PAT_MRT4530_31837C.1.pep
FANVDFCPKPLLLELKLCLINSGEGHVSVSVCNAFSRFLKSCFCASMGVRVQVSFPFSIKKEVGLAACSSYVRSFRAFL

SEQ ID NO: 129595 - protein, 58 aa, Oryza sativa
  Clone ID: PAT_MRT4530_31838C.1.pep
RAWRRRRQWRRRRRQRGATGAVRVEKVRGRSAVTRCFAKYPLKLIAPSKVPPPPPSII

SEQ ID NO: 129596 - protein, 133 aa, Oryza sativa
  unsure (1)..(133): unsure at all Xaa locations
  Clone ID: PAT_MRT4530_31839C.1.pep
MLSVRAYARTAVAALVFTVHNSVVSALHVRRAMPRSPVSPFRHWPPCRRGSAFAACVGCAVHGATPPISPVAFGHARPRLPVTFRHRQSDREXGRRLRNVLIVAIDLIATADNLLSMRDXHLVFPPPHVFLFQ

SEQ ID NO: 129597 - protein, 373 aa, Oryza sativa
  Clone ID: PAT_MRT4530_3183C.1.pep
MAPTAPSPASVRAAASPRCCSRSRPWSSAGRVAALPADGRGDGASTAASYKELGLYSLKKRIEDAVVRVETTASSALEMEEARRIRQEEVLRGRNLWDNPAKSHETLSALADAIRVVDHLKDLRYKAEEAKLISQLSEMDVINVELFKQAYKTSVDATEFLDRYQMYKLLKGPYDKEGACIIVTAGSDAIEIESEYMFGTLTGEKGTHRMIYPSVDNAGTYEATSARVDIIPLFLDRPVNLHLDENDLEISPSPSDHKRRDHRNSAIRVQHIRTGVTAESSGERSYFANKMKAISRLKAKLLVISRELRSSNLKTIKRQTVEELYSRETRRYKFGPQKLVHDLNTGLQLSELNSVLDGDIDPFIRGRIVSRLG

SEQ ID NO: 129598 - protein, 232 aa, Oryza sativa
  Clone ID: PAT_MRT4530_31840C.1.pep
MAYRALEVTLISARNLKKVNLITPMEVYAVVSVSGNPLARQCTLPDRHGGRNPTWNATLHLAVPAAAPGAFLHVLLRTERALGDRDVGEVFVPVADLQLAAAAHYQYLVHKVQSTTEHCGVLSLSYRLGPVVVPAPPLAADTGAVPAYLVVPCYANAPPYVYLSPANPARGEAASASPSPPPRRKRSGDFGQWLGGAVRGMLSGEAMSPDTAAYDAGYKTLIGVADGRRVKF

SEQ ID NO: 129599 - protein, 222 aa, Oryza sativa
  Clone ID: PAT_MRT4530_31841C.1.pep
MAAGNFWVRYARQFFRLQFKLTHDHWASHDVLDYVLSLRRRLRVLLLHRVVVFASSQKQQQHQLPPRVHLGHRGAATATPGFRDRHSRGPVDPPTTAGRAPPHPVRRSGCPRQSSRIWRPPGSPLRPLPLGVFVVIPGRRLDSYSLCFPHDWNRLRKPAVRTEVVIEARSGSSTPGHARSESRATRVFFIYFEHRRRVSKPVTVAALGRWSSYLYIATNVAV

SEQ ID NO: 129600 - protein, 101 aa, Oryza sativa
  unsure (1)..(101): unsure at all Xaa locations
  Clone ID: PAT_MRT4530_31842C.1.pep
SPVSMRXXXEXEKENEKEVMKKDKPHHLHLEPPVGAAPGDPLISDSPFDVNYNIGFHRPELLHDHEDIDRVYSTDPCQSERSACKAYSLTIHVAAIVKGYI

SEQ ID NO: 129601 - protein, 386 aa, Oryza sativa
  Clone ID: PAT_MRT4530_31843C.1.pep
MATMDTTIAHIMDLQEDIKIKFSKSWNSIRPPATLLTSNGRQICIRAPFWVHEYLIESSRSCLYNGSNLIAKFHLSEPQLKKQGIGLICTGKINNPLRDALSRKVVPPTVNCLIIDFERMGISYCYAGVASTESRVILESVIPQRVLDAQQHDRLLQQVKKRVKEGKTRDFTLESSRVERFHGHLCVPHIRMALYETLYGRKCRSPLCWDSIGERAVLEPDWVQQTTERIAEIRKHMLVAQSRQKSYADVRRRELEFEVGDQVLLKVSPTKGVVRFGTKGKLSRRYIGPFSIVEIAGILAYRLELPESMKGVHDVFHISMLTKYLRDPEHHITVEPVTIDQDLTFESRSLRILEESERVLRHRTIKYVKVLWTHKTEREATWELET

SEQ ID NO: 129602 - protein, 107 aa, Oryza sativa
  unsure (1)..(107): unsure at all Xaa locations
  Clone ID: PAT_MRT4530_31844C.1.pep
XPXPLDXEYVEFDTVANLKEPLIAKAAERLLLSRGELRTQYDCFKKNPNISGWLEDAALFAAIDRSIDALSWYEWPEPLKNRHLRALEDIYQKQKDFIEIFMGSTIL

SEQ ID NO: 129603 - protein, 123 aa, Oryza sativa
  Clone ID: PAT_MRT4530_31845C.1.pep
TPAECLTRGIDNYSSLDGFGWAYLKYEHNKFIFSNSIFEVILNRFKQETSEWEWLSRIVEGKYFFPHGGPIFTAPQPEEVEVMACKEGLALSAKWINMSIILETDCSEVIKLMALGQNKAFFV

SEQ ID NO: 129604 - protein, 78 aa, Oryza sativa
  unsure (1)..(78): unsure at all Xaa locations
  Clone ID: PAT_MRT4530_31846C.1.pep
SVKATRARERGGEPEISAAAAAAMALSDRSRESLLPSFLYSTAGARPYTAGGXXSNLKFPVEADLGGVTVLLPISPRM

SEQ ID NO: 129605 - protein, 66 aa, Oryza sativa
  Clone ID: PAT_MRT4530_31847C.1.pep
MGAAAAAATTPNSLLLRRPAAPKPASAAASPLRLPTRAARISCAAVTTPEQAFFYHVVLVDDRAAR

SEQ ID NO: 129606 - protein, 70 aa, Oryza sativa
  Clone ID: PAT_MRT4530_31848C.1.pep
FISQAQMQTFRLYATLAVIGHIGYKVECRSPYYRANWPRTAAGPASGGLPCWPSDWLNVWLTCQHCRATC

SEQ ID NO: 129607 - protein, 49 aa, Oryza sativa
  Clone ID: PAT_MRT4530_31849C.1.pep
YSGRSREISPKTTTPALTSSLSTATCHPIRTVPRHASKATASCALRIPS

SEQ ID NO: 129608 - protein, 679 aa, Oryza sativa
  unsure (1)..(679): unsure at all Xaa locations
  Clone ID: PAT_MRT4530_3184C.1.pep
ASVFEYTHRGKVCVRAFIGVSVPPIRLVGHTTVHGRLCLHQQAAAVGRLRLHRRPASVAAEWCLRLHGWPIMPPLLGVYDFTAGLPPSPPSGASAYTAGLLCRRCWVSTTSPPACLRRRRVVPPPTRLAYYAAAVGRLRLHRRPASVAADWCLRLHGWPIMPPLLGVYDFTAGLPPSPPSGASAYTAGLLCRRCWMSTSSPLAHLRCRRLVFPLTRLAYYAAVSGHLRFHRRPPSSPPTGVFIVIDGRLCSHIGHFCHHQGEYYKAKIQIQICIKGIHGFKLISYAPGMDQSEHHHRLASTAADWCFRLHGWPIMPPLLGVYVFTDRLAFAAADWCFRLHGWPLCRRXLGVYVFTDRLAFVAADWCPRLRGWPIMPPLLGAYVFXPTGLPSSPPTDVLACTAGFYAAVVGRLRLHRPACLRRRRLVFPPARLAFMPPLLGVYVFTDRPPRPPPTGASACTAGLLCCRCWXRLRLHRPAAASAADWCHRLHGWPVITPTDAIFFTAGYIAVTTNRHQYLQHKLPTFAMTADWFLHFHGCMILPCPRLYIWFIQPTTTDEHHRLPSPTSAFIFTTARLHYQFTSSRQHNFVIMVERLHLYYLRNQQTLLLLLHKFCYITNHDVVVNLDISACDAVLFYYNKWLSNIQDFYLDIFNTYLQSSNDYSTTRSYNSRLYVQLFPN

SEQ ID NO: 129609 - protein, 89 aa, Oryza sativa
  unsure (1)..(89): unsure at all Xaa locations
  Clone ID: PAT_MRT4530_31850C.1.pep
MAEDATVAAMGTTSLSDVLKSATTRTXSGEHVVMGWWVKTGREQEKGSFAFLELNDGSCVSNLQVLGDAAVHPLRSLRAPPPILQPNLQ

SEQ ID NO: 129610 - protein, 87 aa, Oryza sativa
  Clone ID: PAT_MRT4530_31851C.1.pep
IGSENRQFGGLYERGRKKLMDGARVVFPDEVDPPSISGKIVECSWNKEEDCWSCMRIRTDKSTPNDINTYRKARLPLLSHTCTISNC

SEQ ID NO: 129611 - protein, 73 aa, Oryza sativa
  unsure (1)..(73): unsure at all Xaa locations
  Clone ID: PAT_MRT4530_31852C.1.pep
MERLQRIFGASGMGQPPSDSPLLDSSEQVYISSLALLKMLKHGRAGVPMEXMGLILGEFVDDYTVRXVDGLRH

SEQ ID NO: 129612 - protein, 363 aa, Oryza sativa
  Clone ID: PAT_MRT4530_31853C.1.pep
MAAAAVAGVGRDGSFASQKRPRRVSVRMERSRVGDGCCCSCSGRGGVASTTAVRPSTGMVVIVGATGTGKTKLSIDAAQELAGEVVNADKIQLYDGLDVTTNKVSLADRRGVPHHLLGAIRAEAGELPPSSFRSLAAAAAAGIASRGRVPVVAGGSNSLIHALLADPIDAAPRDPFADADVGYRPALRFPCCLLWVDVDDDVLDEYLDRRVDDMVGEGMVEELEEYFATTSASERASHAGLGKAIGVPELGDYFAGRKSLDAAIDEIKANTRVLAARQVGKIRRMADVWGWPIRRLDATATIRARLSGAGRAAEAAAWERDVRGPGLAAMRQFVGRADFNAAAVDQLAARSRRQCLRGGMVAG

SEQ ID NO: 129613 - protein, 47 aa, Oryza sativa
  Clone ID: PAT_MRT4530_31854C.1.pep
HRSTVRPSGMATARPSLDGALSLCVEGGPACEGWPVADLGIFLSLGK

SEQ ID NO: 129614 - protein, 118 aa, Oryza sativa
  Clone ID: PAT_MRT4530_31855C.1.pep
PALGSGSRPLAVHAFRPRLRFRVLVFSGSRRSLVRARPGPLFSALRRRCSVLRCGGCRRLGWLSAPCISASAPLPSPPLVVLSPAAFLVVLRFFFLLCSASSPLSLIKMFPSLVFLFP

SEQ ID NO: 129615 - protein, 466 aa, Oryza sativa
  Clone ID: PAT_MRT4530_31856C.1.pep
MALLVCMPALNPINSHMTKTKLLVLSSLIPVNSQTLIWHLRRQNTKGKDPRFATGWGGSGVTQIPQSTEKPLRKLTLEDTRPFGCTSTDFTRTEKSEESNGTRSSNSFGSQARGSGAARGGDEVGFLHPTQFQSLEHSQTSNWTFEVPECPQRYLWCKDHKLAISTEILPKLYRAAQHAYSNSAAAKDGSFMETDLMRHSKALLILCPDMLTAWNSRKIVLSVNYDFTKLKDELQLCALILSYSPKNESTWSHRRWVIKKVSEHNQDVSELIEMESVLVKQIAEKSKMNYRAWRHRCWLIPYMTREQSLLLALLDSCHVEDTEDSLDRKSEVHLLWKEELTWNEKLIRRYQGRESLWIHRRFLSQWWMKFLLSSEETECAAGTSLVDLFLVQEIYLLSDCLNAPADEFGEACVQSELAALYILWISKQVPAVKLKLEERLHSLGSLEDVLARACPERSRLWTHLIA

SEQ ID NO: 129616 - protein, 511 aa, Oryza sativa
  unsure (1)..(511): unsure at all Xaa locations
  Clone ID: PAT_MRT4530_31857C.1.pep
AGNESPSPPHEPTPPRLSRRGPPLRLPPQIANRKTLIWHLRRQNTKGKDPRFATGWGGSGVTQIPQSTEKPLRKLTLEDTRPFGCTSTDFATTEKSEXGNGTRSSDSFGGRSRGSGAARGGYPPPLRGNPPSRPPXDEVGFLHPTXFQSLEHSQTGYWTSQAPECPQRYLWCKDHKLAISTEILPKLYRAAQHAYSNSAAAKDGSFMETDLMRHSKALLILCPDMLTAWNSRKIVLSVNYDFTKLKDELQLCALILSYSPKNESTWSHRRWVIKKVSEHNQDVSELIEMESVLVKQIAEKSKMNYRAWRHRCWLIPYMTREQVLNELKKSTRWNELHVADNCCFHYRRSLLLALLDSCHVEDTEDSLYRKSEVHLLWKEELTWNEKLIRRYQGRECVGXSLWIHRRFLSQWWMKFLLSSEETECAAGTSLVDLFLVQEIYLLSDCLNAPADEFGEACVQFELAALYILWISKQVPAVKLKLEERLHSLGSLEDVLARACPERSRLWTHLIA

SEQ ID NO: 129617 - protein, 763 aa, Oryza sativa
  Clone ID: PAT_MRT4530_31858C.1.pep
MASSHQEDREEEEEHSHGDDEITAPFLRPSTSRGSPELEEEENSPIEQVALTVPVSDEPETPVLTFRMWVLGTASCAVLSFLNQFFWYRKEPLTITAISAQIAVVPLGRLMAAALPERAFFRGRPWEFTLNPGPFNVKEHVLITIFANSGAGTVYAIHVITAVRVFYGKHISFFVSLLVVLTTQVVDDQVLGFGWAGIFRRYLVEPAAMWWPSNLVQVSLFRALHEKEARSKGGLTRNQFFLVAFICSFAYYIFPGYLFQMLTSLSWICWVFPHSVLAQQLGSGLSGLGIGAIGLDWSTVSSYLGSPLASPWFATANVAAGFFFIMYIITPIAYWFNFYKAQNFPIFSDGLFTSTGQKYNISSIVDSHFHFDTKAYEKNGPLYLSTFFAVTYGVGFASLTATIVHVLLFHGSEIWQLSKSAFQEKRMDIHTKLMRRYKQVPEWWFVCILIANIAVTIFACEYYIEQLQLPWWGVLLACAIAFFFTLPIGIITATTNQTPGLNIITEYIMGYLYPGRPVANMCFKVYGYISMSQALTFLQDFKLGHYMKIPPRTMFMAQVVGTLIAAFVYIGTAWWLMETIPNICNTELLPSDSPWTCPGDHVFYDASVIWGLISPRRIFGDLGTYSAVNWFFLGGAIAPVLVWFAHKAFPNQNWILLINMPVLIGATGQMPPATAVNYTTWILVGFLSGYVVYRYRRDWWERHNYLLSGALDAGLAFMAVLIYLCLGLENISLNWWGNDLDGCPLASCPTAKGVVVDGCPVYT

SEQ ID NO: 129618 - protein, 1215 aa, Oryza sativa
  unsure (1)..(1215): unsure at all Xaa locations
  Clone ID: PAT_MRT4530_31859C.1.pep
MEAVALSAQHGRQRFAEGTIVEEKSGIRRDVTLARSPCSDFTLWRPAAEQRNDSIVHARFVVCVELKLLRFSGELRGEFLLSLVKPTRKFVVHQQTFNCAFYGGQQKGLQVIKRGCKEEKTKATANDISNPNGKLAILLVDFRVGNLDLVNEGRLYAGVMDLDGDPPLEDEHEVVHSQLPEIATSLEAMTITPTKEIRVRLQQSPETATVQATHNLLMKVGHSGGQQRQIPLEALKKSMAKAWQRVYLDISQVESNLFMAHFRNYEDLSWVWQKQPWSFGSDVFLLEWVSLDEKIKPMSAYTFKHLMVNVRIYGIPPSLRNVKNVKLAAENIGQISKAEPIDPDSLLRNQKFVSIRIRIDVEKPVPDHVILELPDKSELKAFLHYERTPIICTFCGLLFHNVQVCPQRQRIIIQFPDASEEDLKDKLGKWITQIDYMPSEAFLDMEESNKNSIVEKFRQHFSSPQFKNIQEQQKQQERGSGTSQSLMPKLDWKKASEKALTLAGCSTVQGPPSQAVHTTTVGKQCEKKDKEPDIQSTPEVGTEEMLVHGSTEKKKLVSSTIEDHVSCNSKNVNTAGKVHQMEPVQSVPLVHRVSPSASAHQNSLVNPAIGTNEVQHRRSTRATKIYETASQHLSKKRGFHEAAHESTKRHCSPTTSAASSFSIVGGEEHGGIESRRAPPTNHHSAPIRVPSRRGGQRVTRWDQRGGYGGXMVTSTSWRPLAAAHSDVFQRDAPRSPQSINNIHSRKHTWSALEAHHDIFVDQAAGDTQGGGASDAGASSRLILAIDPRECNVSEIQLVDPSAGNETKSSKVTASDLIHHFHVANSHVVPADQASGGLWLMWDEDMDLTIVQSSVNYILAYGVYKNSGPIFNLLCIYGDPXSHRATSAMWSEISSFVVHSSHRPTFCMGDLNEIMHANEKYGLAPPNQNRINIFKHHVNNLGLMDMGYNGPAYTWSNKQQGKDLVLERLDRCLANVEWCFNYPNTTVYHLPMLYGDHAPIIAILNPKNRRPKRSFMFENWWLLEPDFNQHAHSAWLQSVNCHFQRRTTXLLAISLTSWSKKKKPLQQQLDQLEEDLLKIQSSPDREHLYFEEKRIVQQHDITMQKLADYHKQRNDATPSKDQNDNDVIFPPPEIPSENDILEILKQMXRDASPGPDGLNVAFYRAAWNWIKDDVTTMVGSFYETAHRGXIRQGCPLLPYLFVLAINELSDQLATKF

SEQ ID NO: 129619 - protein, 290 aa, Oryza sativa
  Clone ID: PAT_MRT4530_3185C.1.pep
MSTGSTRFSMTSGSTASTSSGSSLTSAASTGESIGAIFVNPYAAINVKTHIPITLELKHPNFTKWKAFFISMCSKFDAILDIAMEPEQTSRDLWLAIDDLFHVTKEPRVIYLSHEFHSMTQGNLSIADYCHKVKTAVGALLDFSHPVPESQLILNLQSGLNPRFSSTADHIAGAPILSSFTSACNTLLLKELRIANDHKRLVESVAYDKTLFGLPIKCFQADNGTEFANQATNSFFASHITMLRLSCPYTSRQNGKAECMLRTINNSICTLLIQAYMPTSYQAEALATAT

SEQ ID NO: 129620 - protein, 78 aa, Oryza sativa
  Clone ID: PAT_MRT4530_31860C.1.pep
MAIDGGFGVGFNNTTSNSGSRRRKRTIDLSNSSALDIYFAFDASNSVGLENFEKGKRFAKLLVNKIIFNCTSSIEVTT

SEQ ID NO: 129621 - protein, 87 aa, Oryza sativa
  unsure (1)..(87): unsure at all Xaa locations
  Clone ID: PAT_MRT4530_31861C.1.pep
TALLSPCWNINAHSVVYITQGRAPGFKVVRHTHGKTRCSNARLRPRTTCIIIPPHXYAVVKKAQRRYGXAYIAFKTKPNSMVQPPWT

SEQ ID NO: 129622 - protein, 198 aa, Oryza sativa
  Clone ID: PAT_MRT4530_31862C.1.pep
TRSRPQKQIKRKKNPSKSNPRAEASSKISVDLMVVEKKRIVDVPDLDKSESVGRNRGDARSDDRLKLMWLASGRGAERRGYSALAAAVPASKPPTQIKPNQTKIKQQEENQKQSSQRIQKLGGDSIQIMIQEERSGLDRGFEMWREREAALVIYMDGWMEKTLCLAFRVSRVGEWALLFWASGPTKAPVQQRLRSFLL

SEQ ID NO: 129623 - protein, 96 aa, Oryza sativa
  unsure (1)..(96): unsure at all Xaa locations
  Clone ID: PAT_MRT4530_31863C.1.pep
MILLASWLSNQYVAISRTAWLSYDYYLVLDQRCSXFSHYLYFNKVDIRPLRNLRELRLGKSRADKVLSDPLETKDHENSIRHYQRLHVSMVLHQGG

SEQ ID NO: 129624 - protein, 545 aa, Oryza sativa
  Clone ID: PAT_MRT4530_31864C.1.pep
TFDISPSVSPSGKKVAVASYQGKKWDGEIKNLNTNIYVMSLENPSQDRERVIENGGWPSWGSEDVIFFHRKDGDGENSCWGVFRHTLSTGETVRVTPAAFDSVTPAAIDETRVAVAAIRQKSEFSDVRVEAQYRHIEVFDMRSPEQPMQITRNTRPKADHFNPFVMDGGKFIGYHRCKSELLQHGDDLPRKFHKLQSPHEDVGVFRVSGVFPTFSKDGSQLAFVDNEFKSVWLADSQGMRVVFKTDGPDSVFSPLWNSKKDILYVCMGPSFKASETLEIHSIHNVSTGDRKSRQLTFGGFNNAFPSTNPDGTKFVFRSTRDGGAKYSKNLYIMEDADAGEGEDGSQSTVTRMTAGEWTDTHCQWSPNGKWIVFSSNRDRPADAPERDHGLDPGYFAVYLMDVASRSVVRVIRSGYDVAGHVNHPVFSPDGRSIAVTSDLAAVTADPMSLPLFLHSVRPYGDIFTVDIDPDDMARNEDVEGFVRVTHSRYENSTPAWTVFSTHDPHAQWNLLVVEDEHVPSCPYAHPDGGESWHMTGQICIPKRHC

SEQ ID NO: 129625 - protein, 81 aa, Oryza sativa
  Clone ID: PAT_MRT4530_31865C.1.pep
FILSPERALISTAKWKRNSYPKNVLAYYSWLATTMWLVCSPPRQLIKPEEKPSNQNLTTWGSITSFHELTICLLLISQLAT

SEQ ID NO: 129626 - protein, 81 aa, Oryza sativa
  Clone ID: PAT_MRT4530_31866C.1.pep
PRFHELDLWIPQRWRMIQMDTGIPSTTNKQKRYPIRPTTINGGGSLDTDGAPDSMPVAIWSRAGYGGPPGDEDPHVAGEIQ

SEQ ID NO: 129627 - protein, 678 aa, Oryza sativa
  Clone ID: PAT_MRT4530_31867C.1.pep
MEMEEDGGGGKVVYVAVSGNRNKALPTLRWALRRHAPAPEGRKKTALLVLVYVHRPATMIPIFRAKVPSIVLKDEIVTSYRQQERRITEKFFYLYLDICTSEKVQAEAIHITNDNNAQRLTGAIPDIKISRPIMGAGIYWNPDVPKKTSTLKTKLAITMVKEAAITCKNMLIHMAPPFSFMPRTFCFRITYAYSRPLLHALQFPWFSFIPPWHHDDRSSVTSSSFLTDSQTMTDNGLDPENLDHQFFENAMPMFDYDSFSLIRHESLHGLNEIASQIILSGHSQYLRQLNFDVSCNEEVRNRQFIHGIDSILGVDSMNLEEVYWKAYMEDKTIKWIYLLEYIHKIVSVSLKQIQEQHDGASSGLTLEGLSDAATKPINRLLTFASTVSKVNGSPEKLFHTLQMHKALSEASPMIQQALLGEQKEFFVRELHRILDTLEDSAREILGKLKVQIQSHDSPIIPGGSVHLVTTYLMRYITLLAHNTSSLNTILGHDHSDHLLAADGINLLLPSHLISGLIFDLGSMLQKQSKLYKPEGLQYLFLMNNEHFILQHFEREDIKLMIGTEWIQKYCHNINRYKVKYIEATWATVVSCLDKKISISLNFLQPSPLKEFISSFETEYRLQMHWKVPDPKLRIELRQTVCDYVLPAYCEFMEKHPNLEKSGDNLEDIRNKLNELFEG

SEQ ID NO: 129628 - protein, 48 aa, Oryza sativa
  Clone ID: PAT_MRT4530_31868C.1.pep
CESLFNALIILVNFDGHVESFFKYNQNPVAGPCMSHEPALYHGGCVRV

SEQ ID NO: 129629 - protein, 164 aa, Oryza sativa
  Clone ID: PAT_MRT4530_31869C.1.pep
MSLVLSRMLLDRFFPGAGGVVAGEARPPMDWRETPVAHVFEMDLPGLAKDQVAVEVVDGHILRVRAGGEHEDANNAAKAGKASGEEEEENDGVRWHCRERAAGRRRAAVTQFRLPEDAAADEASARMADGVLTVTVPKRKGKKRHAGNGKAAGDDKPVCCRFWP

SEQ ID NO: 129630 - protein, 972 aa, Oryza sativa
  unsure (1)..(972): unsure at all Xaa locations
  Clone ID: PAT_MRT4530_3186C.1.pep
VGRLRLHRRPASVAADWCLRLHGWPIMPPLLGVYDFTAGLPPSPPXPPACLRRRRLVPPPTRLAYYAAAVGRLRLHRRLASVAADWCLRLHGWPIMPPLLGVYDFTAGLPPSPPSGASAYTASLLCCCCWASTLSPPACLRRRRLVPPPTRLAYYAAAVGRLRLHRRLASVAADWCLRLHGWPIMPPLLGVYDFTAGLPPSPPIGASAYTAGLLCRRCWASTTSPPACLRRRRLVPPPTRLAYYAAAVGRLRLHRRPASVAADWCLRLHGWPIMPPLLGVYDFTTGLPPSPPTGVPAYTVGWSHHRXWASSSSPPACLHRRRLVPPPTRLAYYAAAVGRLRFHPPAASSAADWCFRLHGWPIMPPLLGVYVFTDRLAFAAADWCFRLHGWPLXPPLLGVYVFTDRPPRPPPTGASACTAGLXYAAVVGRLRLHRPAASSAADWCFRLHGWPIXRRCWASTSSPTGXLRRRRLVFPPARLAFMPPLLGVYVFTDRPPRPPPTGASACTAGLLCRRCWASTSSPTGRLVRRRLVSPPARLAYXPPLLGVYVFTDRLAFAAADWCFRLHSWPIMPPLLDVYVFTDRXPSPPPTGVSACTAGLLCHRCWASTSLPTGLPSPPPTGVSACTAGLXYATVVGRLRLHRPAXLVRRRLVSPPARLAXMPPLLTVYVFTDRPPRPPPTGVSACTAGLLCRRCWASTSSPTGRLVRRRLVFPPARLAYYATVDGRLRLHRPAXASIAADWCFRLHGWPXLCRRCWASTTPPPACLHRRRLVFPSARLAYYAVVVGRLRLHHXACLHRRRLVFPSARLAYYAVVVGRLRLHHRPAXSPPTATTTDGHHHLPSPTXMPPPTCAFIFTTARLHYRFASVAADLCXTSLRQYNFVIMVERLHLYYLRHRQTLLLLLRKFYYFTNHDVFVNLDISACNAMLFYYNKWLSNIQDFYLDIFNTYLQSSNDYSTTRSYSSRLYVQLFPN

SEQ ID NO: 129631 - protein, 102 aa, Oryza sativa
  unsure (1)..(102): unsure at all Xaa locations
  Clone ID: PAT_MRT4530_31870C.1.pep
MAARPCRSAAGLGASSTRVREASRATTRAGGGERERGRGTEGYRVRTGAGRWPTAXRAGSPASGQGRGRRRVPGVLFGSSRARRLHQHVRRRREARSAAATR

SEQ ID NO: 129632 - protein, 251 aa, Oryza sativa
  Clone ID: PAT_MRT4530_31871C.1.pep
MAARPCRVAAAGLGASSTRVREASRATTRAGGGERERGRGTEGYRVRTGAGRWPTARAGSPASDRGRGRRRVPGVLFGSSRASRLHQHARWRRDVRSAAARRQQWRGGGGREMPRENEMGRLGLGFIDGEEAVWEGELTQGGQGCKDRELAVTGASDQAAIGHGGGGQGKKQKREGKRGALLLADLGEQRKEGRARERGALSRFWKHAAWSSGTRRQRGHGQRPGDWPRVSNHHNPFRILRGADVAYHTDK

SEQ ID NO: 129633 - protein, 182 aa, Oryza sativa
  unsure (1)..(182): unsure at all Xaa locations
  Clone ID: PAT_MRT4530_31872C.1.pep
YFITSYFVFKTFHYSLFVLITISLHATQXRCDPTSYEXQATNLXTGPGGKMLAWRGXXPEXQRXXPXXXXXXVXLXPXXPXXXVXXPXXLPPXEXPPXLXPXSEXKTXPAVFFPKKKKKXPLSQGFGXLPLXPPHXGNXGXXXXGPFXXFLGNFFPGETPRGGKFXETPXXEIWXKXXGXXG

SEQ ID NO: 129634 - protein, 260 aa, Oryza sativa
  unsure (1)..(260): unsure at all Xaa locations
  Clone ID: PAT_MRT4530_31873C.1.pep
TXAXXNTXXHPXXXXXTXXXXXXXXXXPXXXXQDXXXTXXKXQXXRNXXXXXXXXXXXXXXXXXXXXXXXXXHXQXXXXXXXPXKTXXTXTXKKXXXXXXPXXTXXVKXXXXXAQGXXXXKXTXXXPXTXXWXPXXXKXXTXXTXXRARXXRAXFPQLRPXGXXSXSXHXSXXLNXPXEXXGXKXXXYXWXPWXXSXXXFYGLXFSFXFFFXLXXSXXXXXFXPXLVSXIXAXAXKXXXTXKXKKKKKKKKKXXKRXPSS

SEQ ID NO: 129635 - protein, 119 aa, Oryza sativa
  Clone ID: PAT_MRT4530_31874C.1.pep
IGRTRLPRPPHGHRRPPSPESATAVVRLGRPRLPRPSHGHRRPPRPSPSSSSTVARIGRRRLLRPPTRPPPSSRLSPVLSARPTSGPTRRPPPYLVSAHGLPRHARPPVSTASAAWPPP

SEQ ID NO: 129636 - protein, 424 aa, Oryza sativa
  Clone ID: PAT_MRT4530_31875C.1.pep
MGCGASIPKKCKVGGKGKKRRSVIQEVAIFVPTIRIPVDSDVAHPLRGLVSKELVDRLSKFRDRVVALSEDIYCADVSDVSELQHALEEYLPVVLGLTMKESRLESSVEFRWRTLDDDEECCLSSAWYEVLSVIHMMAMLALFEANLILIPKNGQVGGERKVSEDAKKDVVDSLLRASGCLDYCVHRILVQMPAQVKKSFPSYFQEGMLEAISIQALAQCVEIQLGLASECEKATLSVKRRLACELVSYFSQAHYCLSGCDTSDSFGKKLLLFLKWKCMEAKAVAYYYHGLVLDKGNEASSHISAVCCLSAADDLVADSKRACLSFCLANPITRVPPPWGIMRNMHKKIPDSACKRFQMYGYLFEQDNNSALQSLPDLPEFALSLRPEGYELPSTDSIWDNVDSQPQIQSLKEHLDDEDEVETK

SEQ ID NO: 129637 - protein, 89 aa, Oryza sativa
  Clone ID: PAT_MRT4530_31876C.1.pep
MAPREEDIEAELKREMIQYNKAICCKVEAWKQQAADGVEEGKRRKLENKKETNNNREGRGLFSAILVLQFFFFSSGLHIDEAVNSCSED

SEQ ID NO: 129638 - protein, 106 aa, Oryza sativa
  Clone ID: PAT_MRT4530_31877C.1.pep
CRICVWNASDGSLVHSLIGHKESTFVLDVHPFNPRIAMSAGYDGKTIIWDIWEGKPVQIYETGHFKLVDGKFSPDGTSLILSDEIGQIFIIGTGQGESQKDAKYDQ

SEQ ID NO: 129639 - protein, 84 aa, Oryza sativa
  Clone ID: PAT_MRT4530_31878C.1.pep
MAAQRRLLAEAPPYQPHSSRHQQGALGHHLPPASWAAGAEGVVGFDAPVELIVGVRHAEEGYIGVRADDSGIDSEPVGLAAGGR

SEQ ID NO: 129640 - protein, 174 aa, Oryza sativa
  Clone ID: PAT_MRT4530_31879C.1.pep
MDAKPSSWTNLYLQPNPGTIMSLSLFSSSPHLNPSTLLRGLLETEAQLFVPVGTRSNHRSPYENPPLPSNHNPIGGAQLPLLLSSSIVNHNGLTCCTTSSKWIFGRKHTQNIEPQEWASLLVDFRPIEAGCCCHGLAGQGGSQVHDADDGFHAGEGAEGTTMLLSIEAVMISIT

SEQ ID NO: 129641 - protein, 67 aa, Oryza sativa
  unsure (1)..(67): unsure at all Xaa locations
  Clone ID: PAT_MRT4530_3187C.1.pep
PPVPSPGFWVSPESGGKNGTXVVNGPSLGPWSNSPGGDSGAPRAIGDVLLFVRPVVGALLLSVAPLL

SEQ ID NO: 129642 - protein, 121 aa, Oryza sativa
  Clone ID: PAT_MRT4530_31880C.1.pep
SPTYLFTCRHTKLANFPLTPAYLPDQLRNQLNTVHCLSALSENTNWHCNIAFINPSPASRSVSFFIISHCEGKRPLTELEATTSRLKHPIHILNYRTRKSPRANYTLSILQNDPISQGQRP

SEQ ID NO: 129643 - protein, 63 aa, Oryza sativa
  Clone ID: PAT_MRT4530_31881C.1.pep
GGNPSTEVGTPLLHKPHCTEAKEKPNPPCLPTLLVETTYSTNKKRHFALSSNISFINKTHGLY

SEQ ID NO: 129644 - protein, 64 aa, Oryza sativa
  unsure (1)..(64): unsure at all Xaa locations
  Clone ID: PAT_MRT4530_31882C.1.pep
EKRLDSESPFESKAFIGEFRCNGAPRQIKIRVNLRKCQCTQPRAIGSAKTGXSEKVIXRXFXYX

SEQ ID NO: 129645 - protein, 74 aa, Oryza sativa
  Clone ID: PAT_MRT4530_31883C.1.pep
LQLLLLTTVIISTNIKQLKESLDDASSISSYLLAACLKHTNSELSCSNYTLIKKLLKVQRFQQKKKTRNLFLVS

SEQ ID NO: 129646 - protein, 95 aa, Oryza sativa
  Clone ID: PAT_MRT4530_31884C.1.pep
QNRLANRGAHTVSLPRLSVHSDAAPAPSTDEPASPLPASPIVPLPPSPVGAETTTITKMMPLCAAVATHPSSGIALPVLPPVIFGNETLRIGDRK

SEQ ID NO: 129647 - protein, 405 aa, Oryza sativa
  Clone ID: PAT_MRT4530_31885C.1.pep
MASASSPEGASSSSPEKVKMVTVLSIDGGGVRGIIPATILAFLEKELQKLDGPDARIADYFDVVAGTSTGGLLTAMLTAPNENNRPLFAADELAKFYIEHSPSIFPQKNWVLSKIAGTLRMVSGPKYDGKYLHSLLREKLGDTRLDKALTNVVIPTFDIANLQPTIFSKFELKYKPLKNALLSDISISTSAAPTFFPAHYFETKDDNGQTREFNLVDGGVAANNPTLCAMSQVSKYIILEDKEDCDFFPVKPTEYGKFMVISIGCGSNHDQKYKAKDAAKWGIFNWLIKGSSAPIIDMFTSASADMVDIHLGVLFSALQCEKNYLRIQYDQLTGSAGSIDDCSKENMDNLVKIGEMLLDKNVSRVDLETGHYVDVAGEGTNRDQLAKFAKQLSDERRRRQNEPSN

SEQ ID NO: 129648 - protein, 68 aa, Oryza sativa
  Clone ID: PAT_MRT4530_31886C.1.pep
MEDEFSKIQKEGYGKDRANFKRMRGIEISMHVGTKNIAWPAIFRVHYHLRTIEFQIFNAGKNMSFREA

SEQ ID NO: 129649 - protein, 392 aa, Oryza sativa
  Clone ID: PAT_MRT4530_31887C.1.pep
MELPPPPPPPPAAGRDWSDLLADMVDTVLCKLELPDFIRTAAVCTCWRAPALDLRRRGVYSFPRTPCLLYIPAAAAANGGSSTRSAELYCLADERPYTVTLPDPPIAERSIVGSSHGWLVTADARSELHLLNPATREQIELPPIATLEQVRPILEAAGDGGDLRGYEVSFYDGDMREYRAPGIYRPDELCDLLNIKAILSCDPSSSSSRRRGGGGGEGGEDGCGGCIVLLIYHVYQQPSFARVGDDKQWHWITTSSYYWSPYSDIAYRDGAFYAMNLLGGIHRYDIHHSRATRTVVLTDTLGYTLHHAYMAWTPSSGDVWRLTHLPEDEEEELRTVGFHVYKVDFDSQDVVPIDSLEDEALFIGHNGTLCLSTKDYPALLPNHVYFTDDDEY

SEQ ID NO: 129650 - protein, 81 aa, Oryza sativa
  Clone ID: PAT_MRT4530_31888C.1.pep
FTCHSICAESSFWFHKKFISVLNSPKIKFGEPHYTLSLVYSGWLNKLLCKCWLALTFLRYYSIYSTVLLFVICYLSLTDLL

SEQ ID NO: 129651 - protein, 47 aa, Oryza sativa
  Clone ID: PAT_MRT4530_31889C.1.pep
RPNLSDSWTKSKTLESCVSGLFSLPYWESKFTTPHILMSMHIEKNVL

SEQ ID NO: 129652 - protein, 85 aa, Oryza sativa
  unsure (1)..(85): unsure at all Xaa locations
  Clone ID: PAT_MRT4530_3188C.1.pep
TAKERRLPANHGTNANGGHREREGIKVTLTTTYATTDGEGDGRRRAPXGGDLGLTMATAFRRREATTEGGRSSPRSCDPEGGDGE

SEQ ID NO: 129653 - protein, 105 aa, Oryza sativa
  Clone ID: PAT_MRT4530_31890C.1.pep
MVAGLLGDATGLWGDLTSLLAAFALLLALLLALSRGAAAGVVEEVLLTWELGVTGGDDDGFGFFFSPRLLCDSSPRDCSATLPLSRLTSSTTTCCRGRRGIEKEI

SEQ ID NO: 129654 - protein, 296 aa, Oryza sativa
  unsure (1)..(296): unsure at all Xaa locations
  Clone ID: PAT_MRT4530_31891C.1.pep
NSQSDRAINSSLSKFTHVNSRTMVVNDEYNRHDSLLRATGHPDLNASPETQFSIHSGNIYQLILEIGTYXGELAKTRGDAIVLSYYATRYTDSTKTAFKSSTRLECMMQDYPKTLPPSAKVGFTVMDAWLTYAPVKNNPEDSAKVPKGNPYHSATSGEMAIYRANSLILRKAGAQIADPVIDTFNGQEVEVWPRITWIPRWGLIFKDVKAKVHSNSSVSQRSALVINGKNITIQGLSLDGTLIVNAKDEAKFNVTGHIENKGWTIQHVDHKDTSEKEEIRIRGFKFNKVEQLELNY

SEQ ID NO: 129655 - protein, 511 aa, Oryza sativa
  Clone ID: PAT_MRT4530_31892C.1.pep
MEDKVVLAMGASILLVVVVSKLMISFAAKPRLNLPPGPWTLPLIGSIHHVVSSRESVHSAMRRLARRHGAPLMQLWFGEVGTVVASSPEAAREVLRSHDLAFADRHLTAAAAAFSFGGRDVVLSPYGERWRQLRKLLTQELLTASRVRSFRRVREEEVARLMRDLSAAATAGAAVNLSEMVTRMVNDTVLRCSVGSRCEHSGEYLAALHAVVRLTSGLSVADLFPSSRLAAMVSAAPRAAIANRDKMVRIIEQIIRERKAQIEADDRAADSKSCACSLDDLLRLQKEGGSPIPITNEVIVVLLMDMFAGGTDTSSTTLIWAMAELIRSPRVMAKVQSEMRQIFDGKNTITEDDLVQLSYLKMVIKETLRLHCPLPLLAPRKCRETCKIMGYDVPKGTSAFVNVWAICRDSKYWEDAEEFKPERFENNDIEFKGSNFEFLPFGSGRRVCPGINLGLANMEFALANLLYHFDWKLPNGMLHKDLDMREAPGLLVYKHTSLNVCPVTHIASSCA

SEQ ID NO: 129656 - protein, 142 aa, Oryza sativa
  Clone ID: PAT_MRT4530_31893C.1.pep
LVRHAGANVHHIGVASSPMSKASRRLKQEGRLNVREDTGKSTNYPPELSLLTELPHKPQNRTFLTPNYANRTNYPSRHNPRWFWSTWRTRGSPRRGRGAGGGPEYRTFSSFFCLRAVGLIARPEYQFIISLLNRAVQFLYWN

SEQ ID NO: 129657 - protein, 134 aa, Oryza sativa
  Clone ID: PAT_MRT4530_31894C.1.pep
MAPHTGKPGGRTPARASAWSALRTAVTVVPRPLDRRRRWSLRWARRRAPQRNRFGSRTASGEQFDAYFPFAIRIRRADATDADATTPTPSPPPACVAPTSSATAATCDRALDDWLRDDFPDRLRQLYYYKVLGP

SEQ ID NO: 129658 - protein, 108 aa, Oryza sativa
  Clone ID: PAT_MRT4530_31895C.1.pep
GGPPLGGDLWGISWKKTRCLKKRVRRPTLALREYWGGGVNKSTRFGLKTYGKVKRAGRKRQKEKGYPGQLGYRLNTFFKVGGAFFKEFFSRAFGRALMAWSWQKGGGG

SEQ ID NO: 129659 - protein, 74 aa, Oryza sativa
  Clone ID: PAT_MRT4530_31896C.1.pep
MATRWWRLTWDDGEDGAPAATGFVEEVVGVRCSLGKVEKDRVQNFAETGSRISENRVYRWAPKKTVLAKNFGPF

SEQ ID NO: 129660 - protein, 57 aa, Oryza sativa
  Clone ID: PAT_MRT4530_31897C.1.pep
VLEKPLIGFKEVPEFQPFQCQAKSLGPFRILLGTRFPKRWGKNGVEKSYLAILITPL

SEQ ID NO: 129661 - protein, 90 aa, Oryza sativa
  Clone ID: PAT_MRT4530_31898C.1.pep
VHGGESPRLLRAVLVRQRVQPRRQLALQLPEVLLHLLVQPRAARQQRAVHAPAPQTTRSPRPPPPPVRPCGPPRNPNRPRRLDPRNPKNR

SEQ ID NO: 129662 - protein, 112 aa, Oryza sativa
  Clone ID: PAT_MRT4530_31899C.1.pep
MAMHQQNMNLHDQSNTKKIRTGTKKPKKRMDPTMMSIYEDLQKTMVADAAQLNHKISENCYPMTFIGCSSSNLFIRKVCPTESERHVTRAFSQAFQNHKNHEVLAKSRRQSS

SEQ ID NO: 129663 - protein, 170 aa, Oryza sativa
  Clone ID: PAT_MRT4530_3189C.1.pep
PRPAAWAPCTRSARGTPARASARYSPTTPARASRRRRRCPGTRARPAPARATTASRSRASRGTPASAAAASTGARTRPRLPKPARRHRGARSGRARPRTRRPLRHRRRRTGPRACPRGSSASRPQPGRSTSRRGRRRRRLPPPAAPRRRPPSRPSPRAPPPAAPSPTRSP

SEQ ID NO: 129664 - protein, 192 aa, Oryza sativa
  unsure (1)..(192): unsure at all Xaa locations
  Clone ID: PAT_MRT4530_318C.1.pep
MADPAEHREEEQEAAAAAAGEDEDTGAQVAPIVKLEEVAVTTGEEDKEVLLDMKSKLYXRFDKEGNQWKERGTGTVKLLKHKETGKWRXTTKMQEHAGSDKSCVWHALDFADGELKEEMFAIRFGSVENCKKFREMVEEIAEQQGKNEEKENEEVSSTAGLVEKLSVTETKKEENAEKEETPAEEDKKDAKE

SEQ ID NO: 129665 - protein, 360 aa, Oryza sativa
  Clone ID: PAT_MRT4530_31900C.1.pep
MTSGLRGFCSCTDPWEDLLAPSAASGRGKGAEARLRRRGEAAAAAEAEEAAAARGGCGGEVEDSDSTALFRRPLASSVAALASFETRRRHHAGTLARVSSATTIHNSKSTSKLWHKHLREGIGFACGGLQRQESEVAHEFFSQISRMPEVRNSGGRAALADPSGGGFFIRRTTSPPGAVAVKPLARRALPPTSNKENVPPSWAVTVRATPKRRSPLPEWYPRSPLRDITSVVKAVERKSRLGNAAVRQQIHTPTPPTQKALDAAAPCPGSTQAVASTSTAYLAEGKPKASSSSPSDCSFQTPSRPNDPALADLMEKELSSSIEQIEKMVRKNLKRAPKAAQPSKACNCEVFPLVCCFLSR

SEQ ID NO: 129666 - protein, 392 aa, Oryza sativa
  Clone ID: PAT_MRT4530_31901C.1.pep
MATARGASDGDGDRPSSSSFAGSTSRRASSSSCTRDIRATVSSATTIHNSKSTSKLWHKRNSIINGLESTPLTELRVVARVPNWWGHPYGPTCRRHMSLRYAKDLREGIGFACGGLQRQESEVAHEFFSQISRMPEVRNSGGRAALADPSGGGFFIRRTTSPPGAVAVKPLARRALPPTSNKENVPPSWAVTVRATPKRRSPLPEWYPRSPLRDITSVVKVMNHSRRLCGKFSEITGLNFECSSDAVERKSRLGNAAVRQQIQLSEDSSRSVDPATPVQKEEGVPQSTPTPPTQKALDAAAPCPGSTQAVASTSTAYLAEGKPKASSSSPSDCSFQTPSRPNDPALADLMEKELSSSIEQIEKMVRKNLKRAPKAAQPSKVTIQKRTLLSMR

SEQ ID NO: 129667 - protein, 467 aa, Oryza sativa
  Clone ID: PAT_MRT4530_31902C.1.pep
MVLLNSEEVSCNDHHQVDVVAAAGLQCSGDMLGDKQLVSQVILEGLEIEEPPADEMEAAEKKAGISRLMAGYVQHLQHRSAYHLGYPLNFDYDFSPLAPFLNFSLNNAGDPFAKVNNSVHSRQFEVAVLNWFANFWDVQRDQFWGYITSGGTEGNLYGLLVGRELFPDGILYASNDSHYSVFKAAKMYRVKCIRIATTVSGEMNYADLKSKLQHNTNSPAIINANIGTTFKGAVDDIDQIISTLEKCGFQNRYYIHCDSALSGMMTPFMKQAPKVSFKKPIGSISVSGHKFLGCPMPCGVVITRLEHAEVLSTDIEYIASRDSTITGSRNGHAPIFLWYTLSKKGYKGLLKEVHICMGNARYLEVLLKQVGISASCNTLSNIVVFERPKDERIVCRWQLACEGNLAHIVVMPNVTFEKLTVFVEELAEKRKDWYQDKGFDIPCLAVDIGKENCYCNLHAKKLRIPKM

SEQ ID NO: 129668 - protein, 85 aa, Oryza sativa
  unsure (1)..(85): unsure at all Xaa locations
  Clone ID: PAT_MRT4530_31903C.1.pep
NPDQETYSYYGPLNLMTWHVGYHNEHHDFPRIPGTXLYKVREIAPEYYNNLKSYKSWSQVIYMYIMDQTVGPFSRMKRKAPKKDS

SEQ ID NO: 129669 - protein, 306 aa, Oryza sativa
  Clone ID: PAT_MRT4530_31904C.1.pep
MVKILKTTLRATTMLKVLVKIRLSLFLTFSVLCLMPIMYMASHKTIPNEFLHNFGGKIPKSIKLETRSGLTFDVQVTKNSGRVVLQSGWASYVSAHDLKIGDFLVFKYSGDSQLKTLIFDSSGCEKVCEKPVDMSGRSYDIAMRNSQDEKKKRKQRDISRQGTVKPSEEGLKAELVPGCILPSRTDLTRLQKNILIEKVKAINSETPIYGYVMNNSSIHGIPCTVEISKKYADVYLPFEDGTVVLQHHGKSWNVRCCLTKQNSKRFLKGWRQFAGDNKLHLGDICLFDLLKDKKKYVMDVHIIRRK

SEQ ID NO: 129670 - protein, 48 aa, Oryza sativa
  Clone ID: PAT_MRT4530_31905C.1.pep
VALAFTIHLLGCTVPIILYLNHYPISALGRERESSHSLQFLAVNEKHW

SEQ ID NO: 129671 - protein, 140 aa, Oryza sativa
  Clone ID: PAT_MRT4530_31906C.1.pep
REAMGKNTMAPSNSSEDTKESMEHLKGKQDSFVVTTKNDHVDYSVLESSSMLNLGKQDEPDRVEILAKATKDVPEELETIETKSMNSVKNTSKNVGKRTRQDNGGSKIKKSSDHNLRGQGPTQYPRGRGPTRGNLPYGFV

SEQ ID NO: 129672 - protein, 155 aa, Oryza sativa
  Clone ID: PAT_MRT4530_31907C.1.pep
REAMGKNTMAPSNSSEDTKESMEHLKGKQDSFVVTTKNDHVDHSVLESSSMLNLGKQDEPDRVEILAKATKDVPEELETIETKSMNSVKNTSKNVGKRTRQDNGGSKIKKSSDHNLQGQGTDRSVKGRTIETTPGPTQYPRGRGPTRGNLPYGFV

SEQ ID NO: 129673 - protein, 170 aa, Oryza sativa
  Clone ID: PAT_MRT4530_31908C.1.pep
MRRRWAALRRALDSAGGRTQLGAVGRRQAVAEAARGHWLALSDGGGGEQDEEDAPVKGGGGATAAPLPLLHLDPVSSIRGKATARPPPWAPSAHAASPCAKLAAHPSAELVARGRGWGEDVVGGGGRGGKEGGLGWGKNMTSGPEGIFDLLHCLSLLLNQKLIFYCINKI

SEQ ID NO: 129674 - protein, 69 aa, Oryza sativa
  Clone ID: PAT_MRT4530_31909C.1.pep
LMRRLGVRGGVRKSSTTSWTRSSPRSDGVYQESPNLRVARKTNHRTVTIPDAAVPACATWYEPSIRRGP

SEQ ID NO: 129675 - protein, 97 aa, Oryza sativa
  unsure (1)..(97): unsure at all Xaa locations
  Clone ID: PAT_MRT4530_3190C.1.pep
LWPPRHXTTTPXQTTXTHPQKSKPRVSHSXARGSRAXFEXGLVIAYLEXGXEEADGEXGRRASGPVADHVSRSAVEVCGFLTAPPSPLLLSSSXAAA

SEQ ID NO: 129676 - protein, 552 aa, Oryza sativa
  Clone ID: PAT_MRT4530_31910C.1.pep
MPEANAGGRAAPAAEQRSKNTTEMDFFSEYGDSSRYKIQEIVGKGSYGVVCSAIDQHTGDKVAIKKIHNIFEHLSDAARILREIKLLRLLRHPDIVEIKHIMLPPSRRDFKDIYVVFELMDTDLHQVIKANDDLTKEHHQFFLYQMLRALKYIHTANVYHRDLKPKNILANANCKLKICDFGLARVAFNDTPTTVFWTDYVATRWYRAPELCGSFFSKYSPAIDTWSIGCIFAEILTGKPLFPGKNVVHQLDLMTDLLGTPSMDAISRALADPYFKGLAKVEREPSCQPISKMEFEFERRKVTKDDIKELIFREILEYHPQLLKDYMNGSENTSFLYPSAVDNFRRQFAILEENGGKSGALDRKHVSLPRATTVHSTSIPPNEGLDATSQVTQRIPTARPGRTVGPVLPFENPGAADPHSARRVVRNPMVPPAAANKSGYSYNLKSDYSDRQHQEELEKDRVQYRPAQHLMDAKVAPDTAPDIRSSQYYFTRSAPRTDLTDRAALQGSMLYGIAPFNGIAAVAGGYSKAKVEERRRETPIPSQAAIVHLKWQ

SEQ ID NO: 129677 - protein, 412 aa, Oryza sativa
  Clone ID: PAT_MRT4530_31911C.1.pep
MNTLLHMQSEGDDGVVDHFVMEWRKQLRELAYYSEDCIDLSLLHIRRCDTSGVASPRRVPNPMAKRAQSSSSGSQLIPYRRRTKRPTRERDWYNLTDGPAGLIAERVLAGDVADYMRFRAVCTAWRQCSADPREHNSLDSRFHPRRWFMLREWPERAAPHRRRFINAATGQCVAVDLPEIEGHRSFGPTAEGLLVLVDDRTLFVRVLNPFTRRLTELPSLATLLPRDRYLVGGDLSVCGAGLAGGDGCLIALYFSNTRKLAVAKPGDERWALVDHRVPRLASSLSFAGRFYCVSDDADAVMTHRCISASYIIGGDDNESYYEMWKWKYEVYIVDLDARKTTLVHGLNGRALFVGLSRALSVCPKVFPSISADTIYQGFELDDKEETEAYHLTDATTEPSTFTRTDTLISIGR

SEQ ID NO: 129678 - protein, 152 aa, Oryza sativa
  Clone ID: PAT_MRT4530_31912C.1.pep
MLNPALSQWLDVQAQALDLGQCDPQDVISRLATAKVLRIGVPEAQGGSGGTVADAVESIAQVASHSLSAAFVFWGQRAFIEYLLHSPNTALREHLLPSLLSGELAGATGLSNAMKFLSGIESLQLRARDQGDGWCLDGRLHWVTNLRKSGFV

SEQ ID NO: 129679 - protein, 72 aa, Oryza sativa
  unsure (1)..(72): unsure at all Xaa locations
  Clone ID: PAT_MRT4530_31913C.1.pep
MDADKFSLGMRMRESNAEEKKSVCMMDAYGPLGHALVVRLLRRGYTVHAVTYPYHHHHSEEEYXQQHTRLKL

SEQ ID NO: 129680 - protein, 191 aa, Oryza sativa
  unsure (1)..(191): unsure at all Xaa locations
  Clone ID: PAT_MRT4530_31914C.1.pep
MAHSTGTASPWGAAAAPPPPRSPARVLSTSXPQRPGPPPPPPRSKRTWQLCCHSHSLRSSLPGPSEPPHRDAPPPLPVPLGRQPAFAIWARSAGDSPATRRPLLPPPPPRPSLPRSRLPPPSPTSTPHRAPTRLSLFPPSVSTPPSLCTSARPPPIPSDILPSRHRLLSTHPPPTRRHPPTSPPFKPSAND

SEQ ID NO: 129681 - protein, 68 aa, Oryza sativa
  Clone ID: PAT_MRT4530_31915C.1.pep
NGEIIKNDLLFSNQIFSHGCEELGQVLFFCACMRCSSLVWSLALSFLSRAFSQWTLLHPFIVLFISSR

SEQ ID NO: 129682 - protein, 135 aa, Oryza sativa
  Clone ID: PAT_MRT4530_31916C.1.pep
MIDRLLYVRLPCNPIFPIGVIYLADHVHKCFPATAQRIFDLGTIPPLDFNRALDECIDEFQPTILVFSWRDIQIYAPVGGRGGNPLQNAFEFYYGKNPLVKLRGALGGLKVTSAYYGELWSNLRRINRGLRRAKR

SEQ ID NO: 129683 - protein, 539 aa, Oryza sativa
  Clone ID: PAT_MRT4530_31917C.1.pep
MAAAQQQQQKEGGARRTREEVPAVGRVAIIGGGISGLAAAKQLAAHDPVVFEATPHIGGVWKHCAYRSTRLQTPRPDYEFSDMAWPNRDDPSFPTHVEIVDYLEDYADRFGLWRYIALRSKVVGVKFLGGPSAGFTELWSGSGEPLQGKPMWELAVSSTDDPDSDDVQLYKFEFVVMCTGKYGDVARMPVFPPGKGPEVFKGKVMHSLDYCKLNEQETVELMRGKKVVVVGYKKSAIDLALECAEANQGEGGQPCTMLVRTLHWVVPSYSIWGLPFFLFYSTRFSQLFYERPNQGIFRSLLCRLMTPLQKAGVSKFIESYLSWKLPLSRYGLRPDHPFVEDYASCQMAILPDGFFDMADRDLIRFRRSAGGWCFSENGVVLDDGTHVDADLVFLATGFEGKDKLRSVLPEPFRGLVVNKSSMMPLYRGTIHPLIPNMAFVGYVESVSNLHTSELRCRWLAGLLGGRFALPAVEEMVRHVDGETEAMRRTTRFYRRHCISTYSIHDSDAMCADLGSRVHRKSNFLAELFAPYNNQDYKEE

SEQ ID NO: 129684 - protein, 52 aa, Oryza sativa
  Clone ID: PAT_MRT4530_31918C.1.pep
MDDILVTCENCLLMTTKAMRNYRSRRFRSWTYYLILEPSRILDVVVLVTTAI

SEQ ID NO: 129685 - protein, 64 aa, Oryza sativa
  Clone ID: PAT_MRT4530_31919C.1.pep
MANNSANPMGKFDLTGQSHQLIHVIVIAGVVYFSWRDRALGRRAHGDGSDERMVGGGGTVSDMS

SEQ ID NO: 129686 - protein, 779 aa, Oryza sativa
  unsure (1)..(779): unsure at all Xaa locations
  Clone ID: PAT_MRT4530_3191C.1.pep
MRGRQLNKESENRRLKVTLLKEMQKWDDAADSRNLSQGEWKQRYELEDHLNMIFQEDEIYWQERSGEKRLLEGDANTAFFHGVANGKKRISTIRSLEEDGRVIEGNSELREHITRYYKGLFGSELPPKVFLSQDMRRDRGRVDQEDNDFLVRPFSVEEIERALAEMKTNTAPGPDGLPVCFYKEFWEQLKDQIKEMLDSLFEGRLDLWRLNYGVITSIPKIKEANNIKAFRPICLLNVCFKLLTKVLTMRITHVANKVIGESQTAFLPGRFILDGVVILHEVLHELKNSGQSGIILKLDFEKAYDKVQWDFLFDVLQRKGFCEKWIGWIKAATTKGSVAININGEVDQFFRTHKGVRQGDPLSPLMFYLVADALPEMLNKAKEAGHLQGLVPHLVPGGLTHLQYADDTILFMTNSEENIVTVKFLLYCYEAMSGLKINFQKSEVIVLGVEEMEAQRVADLFNCKRGALPITYLGLPIKGKKKYHLIKWEALCRPKEDGGLGFIDTKIMNEALLCKWIYKLESGNDSPCCNLLRKKYLGQGGGFFQSSPEGGSQFWKSLLEVKNWMKLGSAYNIGNGEAVRFWDDVWLGEVPLKIQFPYIYSICANPDKTVSQMLIEGEWKIRLRRSLGQAELNEWCELHSKLSTVQLTSEEDKMFWKLTKXGRIQVAKQLKKMKWXRDTFSWPHIPASRKDLLNLVQLQRRDKAKVLWLLFAAGFWAIWLMRNDWVFNNKLTTNVSSLPYKALSFVTQWKKLAPAKLRGEVETVQGLFLASIRETEGSN

SEQ ID NO: 129687 - protein, 403 aa, Oryza sativa
  Clone ID: PAT_MRT4530_31920C.1.pep
MAPPPRKRRRVDGSGGNGGNYPLVATPNDGVLPVDLLNAVLLRLPARPACRLRAVCRPWRAVLSDPRFAAAHAARHPDPHLVVAACDRLDAGGIELVDVYLVGASGDVAKRVPAGRCDTDAVSSARDGVALLVGNDRRLRVLDAAASAAVSLVPDGEHHPINCSFTLGRAASSSGEHKVLRIGTVVHGEPQVCAVLTLAVAGGRGQNARWREAPSPPLVVRTRRGDVAVAGGVAYFLLRRAYLADRIAAFDLEAEQWRPALVGGPPLAAWRPTRPDRPRVTLAELGGSLVVAIDDHRAATLDLWFLLAAGDGEQHWSKQYTVTMPYHRRPWRCDGERAEPVVVLDDGRIVFWVWAGGSGGTRHGGGVMRVYDPITGGHTDVATAARCAHVGVYTGNLLSLVSE

SEQ ID NO: 129688 - protein, 187 aa, Oryza sativa
  unsure (1)..(187): unsure at all Xaa locations
  Clone ID: PAT_MRT4530_31921C.1.pep
GRAAFGHFGIAVEDVAKTVDLIKAKGGTVTREPGPVKGGKSVIAFIEDPDGYKFELIERGPTPEPLCQVMLRVGDLDHAINFYEKAFGMELLRKRDNPQYKTKMXVLELTYNYGVKEYDKGNAYAQIAISTDDVYKTAEVIRQNGGQITREPGPLPGINTKITACTDPDGWKTVFVDNVDFLKELEE

SEQ ID NO: 129689 - protein, 350 aa, Oryza sativa
  Clone ID: PAT_MRT4530_31922C.1.pep
MARLLLPLPIAAAAASRLRLPVLSSSVARREALLFGGRVAAARAPVRLARRGVSAGAEAGGSSSAAAAAQVIGQDEAVEWVKKDRRRMLHVVYRVGDLDKTIKFYTECLGMKLLRKRDIPEERYTNAFLGYGPEDSHFVVELTYNYGVESYDIGTAFGHFGIAVEDVAKTVDLIKAKGGTVTREPGPVKGGKSVIAFIEDPDGYKFELIERGPTPEPLCQVMLRVGDLDHAINFYEKAFGMELLRKRDNPQYKYTIAMMGYGPEDKNAVLELTYNYGVKEYDKGNAYAQIAISTDDVYKTAEVIRQNGGQITREPGPLPGINTKITACTDPDGWKTVFVDNVDFLKELEE

SEQ ID NO: 129690 - protein, 55 aa, Oryza sativa
  Clone ID: PAT_MRT4530_31923C.1.pep
TPTRRGERTASPCRLKGTVRSSRTPGGHSRWGGWCGGRRRSPSSEAGSYGGFPAG

SEQ ID NO: 129691 - protein, 1087 aa, Oryza sativa
  Clone ID: PAT_MRT4530_31924C.1.pep
MAASVEAAAAAVVAPPASVGGDEVVVGGGGGGASEQARTLIGALNLLSRNLPLPPAVLHAVSSIYHGGDAWEGEGEEGGEEEVAAAAAAVGDGCGESGEGEEDRADASPGADEGCSFKAPYCHCDDWGVTLIQELEDAVLKNQGPYMSYSELTALKEDRFNTSIQHRLTELEGLPSTRGEDLQMKCLLELYGLKLLDLQKKVRTDISAEYWLHKKCAHPDRQLFDWGMMRIRYPFTMYGIGDSFSMDADDINRKKRFSEDSLFGIWEQQRISRLEEEEKNQAEIRKRKFFSEILNAAREYQLQVPASYKRKKQRNDGVLAWHVRARQRINRMEKSRLQVLKAGDQEAYLRMVEESKNERLKLLLGKTNELLEGIGKAVQRQKDAEHVSRPDGSELPKGSESDDCSQISGLKVESPDEESPSDVDADHHSSADHSKFNAGHRLDSTVHSIEEKVTEQPSALEGGELRPYQLEGLQWMLSLFNNNLNGILADEMGLGKTIQTIALIAYLLEKKEVTGPHLIIAPKAVLPNWSNEFKTWAPSIGTILYDGRPDDRKALREKNFGQRQFNVLLTHYDLILKDLKFLKKNFEEWFNAPFACEVSLNDEEQLLIIHRLHQVLRPFLLRRKKDEVEKYLPVKTQVILKCDMSAWQKAYYEQVTSNGRVSLGSGLKSKALQNLSMQLRKCCNHPYLFVEHYNMYQRQEIVRSSGKFELLDRLLPKLQRAGHRVLLFSQMTKLLDILEVYLQMYQFKYMRLDGSTKTEERGRLLADFNKKDSEYFLFLLSTRAGGLGLNLQTADTVIIFDSDWNPQMDQQAEDRAHRIGQKNEVRVFVLVSVGSIEEEILDRAKQKMGIDAKVIQAGLFNTTSTAQDRRALLQEILRRGTSSLGTDIPSEREINRLAARNDEEFWLVEKMDEERRQRENYKPRLMEGIEVPDWVFANDTLTEKIPADEPQNVLLTTKRRRKEVVYSDSFGDQWMKADDVVEETPRMAPRAKRSAYSSDVQEVDFSERRKRHKSLVNIADDASIPMWTPEKVRAGVSSYSKDENEDDAEDESTTSVLQGGSFTWKTLRRKRSSHFSNSSDSKGRSAF

SEQ ID NO: 129692 - protein, 69 aa, Oryza sativa
  Clone ID: PAT_MRT4530_31925C.1.pep
YRPGLPIIIEFKWPCHIQSPVKYSRQASSPHAQLISKKNMIDHHKVSSFMLQHIKDTCPWSSKQYPPEC

SEQ ID NO: 129693 - protein, 258 aa, Oryza sativa
  Clone ID: PAT_MRT4530_31926C.1.pep
MTPSGGYRPLCLVVSCAWAMVARESCGGCARGSDGGSCNEGDDDHDDHDLDAVGGRRVLMVLMSCCPICMNLYFDLDDIELVFRGVKEEILTRRRCVPGEKWCWLPILERRSFGPAEITEWEELKKVIDNLETSPVPDTLLWGLATNKKYTTKSMYRTLTFRGIRELNTSMWLSVKSRVSDLFSKKNLDDIDADLERFLHERFKNLNIVLFFSGNPPYRWLRFSSITIDFPKRTIFAYKSWTVIGVQSQAVIMIASKN

SEQ ID NO: 129694 - protein, 163 aa, Oryza sativa
  Clone ID: PAT_MRT4530_31927C.1.pep
MGGWGSGLEEEMVETTNRRALTRVTAGREIGLERQPEHPDWYVAPHQWSSSWNLIDAMKVDGCVPGRGPSRPSTSTPVPPGPLRMLSRPGQLAEREIREVESLTSGFHTVFHPELSHWYVTWIKMKWQIVKFSFTTNAMYIIGQEIILFPMSVLAILSYRSSI

SEQ ID NO: 129695 - protein, 99 aa, Oryza sativa
  unsure (1)..(99): unsure at all Xaa locations
  Clone ID: PAT_MRT4530_31928C.1.pep
SGVPHVGRGXVVVEHRCRAISSMFLYWSSVGRPXFSGGRSGASLLLVVCVGAVDVXEVVYFFFFXLVMTLQDCNLVIXSYSINKTLHRLVRVVRKKKSS

SEQ ID NO: 129696 - protein, 86 aa, Oryza sativa
  Clone ID: PAT_MRT4530_31929C.1.pep
DMSHSCINSFWNRGSIICFLCRHRKEITGFFGWILTWPKERILGEAESPALTFCIHRHGWTARMDLPTVWIARWKSHPSILPVADS

SEQ ID NO: 129697 - protein, 123 aa, Oryza sativa
  Clone ID: PAT_MRT4530_3192C.1.pep
MRSSPIIFLLLAAAAAIAAPWQVAHAAGKCGKTPAEKVALKLAPCAKAAQDPGARPPAACCAAVRDIGTHQSHACLCAVLLSSTVRRSGVKPEVAITIPKRCKLANRPVGYKCGAYTLPSLQG

SEQ ID NO: 129698 - protein, 90 aa, Oryza sativa
  Clone ID: PAT_MRT4530_31930C.1.pep
EGCGPDCRGGGRWGRGKGYYYSMVGFWVVCFMAVSVLGGMFCCIYFGGVFYRGDFVGRVSCKNSGLAVACCGTCGKLVMYNGVHCINCGT

SEQ ID NO: 129699 - protein, 449 aa, Oryza sativa
  Clone ID: PAT_MRT4530_31931C.1.pep
MWPPLAALLRRLSSHPFDSPAIHANLVKSSSISSPIPATALLTAYANAGLPAAASRLFDEMPTRDAVAWNALLACLVFHARPCAAVAAFRDMATAGFTPTATTLCTMAKACATSRALRPGRQVHARSILACQGDVIMATTLVDLYMSCGLVEEALRLFMCTDCPKDVALYNAVISGCVENGRFREAFFILGRIELNGITLTCALTACSATANLMYGMQVHCKALRGGFTLETILCNALIDMYAKCGRTTAARMVFDRMACRNVVSWSSMIDAYSHHGHGEAALDLFKRMDETVPVVLPNAITFLAVLSACGQSGLVDEGRAMFHLMKRQYGINPGPEHYACFIDLLGRAGQIDEAWDLYCSFSTTRSELSGSICVAMLNACRANMDVVRGNKVALHLLEVDPENPGSHVLISNFHAAARQWFESDESRRIIIDKGLRKEAASSHISSTG

SEQ ID NO: 129700 - protein, 65 aa, Oryza sativa
  Clone ID: PAT_MRT4530_31932C.1.pep
IDGDLRCNFRYRQGLTYDHGVVSHSEPRTTRILWVSPSVRVTSACAASARWSRSAAGGWWPRRAC

SEQ ID NO: 129701 - protein, 147 aa, Oryza sativa
  Clone ID: PAT_MRT4530_31933C.1.pep
MEKQPFALVGDAAASAAAGGGASVKLVREGETSNCFRVRLDSVAHVALRHYPKDQRNHGDIERRCASFGHLLEVDPACYAAPDLSTVRVVVKNGSPREIPREIRIRYASDFRFWHVVPVQILKVWDKSLSFDANGEYVPIYTPAGAA

SEQ ID NO: 129702 - protein, 733 aa, Oryza sativa
  Clone ID: PAT_MRT4530_31934C.1.pep
SFLRKVSELQLQSEMRLQPLTFLHNKYPMIVWMYAPGNSIGLTIPPSMSMALSLLFAAAPRAVASFRASSASSPALDSGRRPQNVPGDFFVDHRCIDCQTCRWMAPEVFKRVDGKAAVAAHPISDDHRTKALQALLSCPTASIHTEKPAKDILQVQNMFPLPIDTHLLPGVYHCGYHSEDSFGATSYLITHPDGNILVDSPRYTTKLANNIEELGGARYMFLTHRDDVADHRKWAERLKCERIIHSGDVERATVDVERKLTGNGPWNIGADFELIHTPGHTQGSVCLFYKPVKALFTGDHVAKSEESDDLYLFLIELATGQHEKIVEVRLRVVFTWYALIQALRIEPPTMGRSDLRCVAGLTGRVRALFGSRVFLLGKAIFRVYFGFYPELDVEKGFREGRFVHLLPCAERTLLVVARTLSLTLLFRHGVDDEPSLRPPSVRRCSAAATTTSCCLFGVLSGTPTPPPAEHHRCIDCQTCRWMASEVFKRVDGKAAVAAQPISDEHRTKALQALLSCPTSSIHTEKPAKDILQVQNMFPLPIDNHLLPGVYLCGYHSQDSYGATSYLLTHPDGNILVDSPRYTTKLAENIEKLGGARYMFLTHMDDVADHRKWAERLKCERIIHSGDVEDVTADVEWKLTGNGPWDIGADFELIHTPVKALFTGDHVAKSEESDDLDLFLMYSKQSVGLQLDSMRKLLKLDFEWFLPGHGYRIHYKDVRAKDSAIESLIANYTS

SEQ ID NO: 129703 - protein, 839 aa, Oryza sativa
  Clone ID: PAT_MRT4530_31935C.1.pep
MPTTPPVTRSSGRAPLHTPASVLVGVPATTAIISSYPSTILSAASPPHLAAASPPHLAGAAAVDSASNPRDLAPSAPAGGGRLPDPRVASSPRRQRRRRRRCRCPPAPAGDAAAAHPQLISRLRRLLTSPPTPLPSTPLQIPALPPHLATNAAAVDSASNPHDLAPSAPAGGGRLPDIFLSINIVDVCESDTHKHTIQIDLKLCGYAYRCRGNRAQSYMGMWDKSGEPDTVRDRILLELEHEFLEVYTTKIDKVNQSRVQLRQAIAEAEQSLLTSVRPWSATGFGKDPVHHDNINLAETVGSWSEIHYKLSQCKAGGVSLLAVAAEAEAEADRGAAAARLGGGMMDPEMMRLAQEQMSKMSPADLARMQQQLLSNPNLVKLASESMKNMRADDFRRAAQQMNQTRPDEMLDMAEKLANANPEEVAAMKVQAEQQMSYVISGAKMLKQQGNELHRCEQYSEAAAKYKLVLTYDSSNVKAYYRRGQAYKELGNLEAAVGDLSKAHELSPDDETIAAVLRDAEEKLAVEGKGAKHPKDDASEPSSSQRSSSPGYTVSQPPEEGNSRPSGSSSIDANGLSKLGMQGMSPELVKTASDMIGTMKPEELQKMFEAASSLHGTSSSPPNLGPNMPEMSPEMFKMASDMIGNMSPDELQNMLNFASNMGGPSASPLRPENKLQSSSRATTSSTSQRSVDNSQPSSSQNVMENPHEILSNQRMGESSSPGAPSTADMQETMRNAMKDPAMRKMYASMMKNISPEMMSSMSEQFGMKMTKEDAAKAQEALSSLSPEALDRMMKWMDRAQQGVEAAKKTKNWLLGRKGLVLAIVMLILAFILRQLGFIGG

SEQ ID NO: 129704 - protein, 548 aa, Oryza sativa
  unsure (1)..(548): unsure at all Xaa locations
  Clone ID: PAT_MRT4530_31936C.1.pep
MMDPEMMRLAQEQMSKMSPADLARMQQQLLSNPNLVKLASESMKNMRADDFRRAAQQMNQTRPDEMLDMAEKLANANPEEVAAMKVQAEQQMSYVISGAKMLKQQGNELHRCEQYSEAAAKYKLAKDNLKSIPSQSAHSLQLVCTLNLMACYLKTRNFEECINEGSEVLTYDSSNVKAYYRRGQAYKELGNLEAAVGDLSKAHELSPDDETIAAVLRDAEEKLAVEGKGAKHPKGVVIEEVVDDASEPSSSQRSSSPGYTVSQPPEEGNSRPSGSSSIDANGLSKLGMQGMSPELVKTASDMIXGTMKPEELQKMFEAASSLHGTSSSPPNLGPNMPEMSPEMFKMASDMIGNMSPDELQNMLNFASNMGGPSASPLRPENKLQSSSRATTSSTSQRSVDNSQPSSSQNVMENPHEILSNQRMGESSSPGAPSTADMQETMRNAMKDPAMRKMYASMMKNISPEMMSSMSEQFGMKMTKEDAAKAQEALSSLSPEALDRMMKWMDRAQQGVEAAKKTKNWLLGRKGLVLAIVMLILAFILRQLGFIGG

SEQ ID NO: 129705 - protein, 151 aa, Oryza sativa
  Clone ID: PAT_MRT4530_31937C.1.pep
MAAEAGMRVNVANLLALGDDTVEFLGEGKDGEAHPQACAGARMPRSACRSDSDYLEVQMKAGGNGLDKRDCQRTSIEQRKEGLRKMEDEMTSGPVASIGSPDSQSNELTTFLCRNMLSMYIVDKNMKKLERFEFDKTTPPVDICNNLWKMV

SEQ ID NO: 129706 - protein, 73 aa, Oryza sativa
  Clone ID: PAT_MRT4530_31938C.1.pep
FFFLFFYTNPTDSWLNSKDLGFKATFQLTMPSVISKLPKEIYPSHPLGRDLLGGLASVKPAVPAWLVNRALGG

SEQ ID NO: 129707 - protein, 43 aa, Oryza sativa
  Clone ID: PAT_MRT4530_31939C.1.pep
GAATARRHREEPRTPLCLGSTAARKGSTAGGSWVTREKTGRRG

SEQ ID NO: 129708 - protein, 108 aa, Oryza sativa
  Clone ID: PAT_MRT4530_3193C.1.pep
RCAATAPPASASPPPPSPPPPRSPCPSPPTPRRVPCCRRRCSSPPPTTSTSSPTAPCPSPTSPRPPARPAPRARPLGSCASGSWIDRLARKLLLRDLSPLLCFGWILV

SEQ ID NO: 129709 - protein, 67 aa, Oryza sativa
  Clone ID: PAT_MRT4530_31940C.1.pep
GLCKNAVMKKEIIRDNKAFEPCQLYVETVRLTACVLCKYGILLPASVVFLKNKVKRFRALPCICPHP

SEQ ID NO: 129710 - protein, 44 aa, Oryza sativa
  Clone ID: PAT_MRT4530_31941C.1.pep
QLVETNSVYHKSTNHYKFQLNLAIFKTGLLTYTQKTSKNKNCTS

SEQ ID NO: 129711 - protein, 77 aa, Oryza sativa
  Clone ID: PAT_MRT4530_31942C.1.pep
SYSSPSLEGFLHPLLKLGSISNRFQLLFPSQGQVGTRYLPVRHWITTLAPRLAVANHHEVAHPHRFPQLGAPRTLGR

SEQ ID NO: 129712 - protein, 53 aa, Oryza sativa
  Clone ID: PAT_MRT4530_31943C.1.pep
MHETDTRWDALSRCQRDCLGPCRSGFASDGREIALRSCETESFSSFWNARLMH

SEQ ID NO: 129713 - protein, 494 aa, Oryza sativa
  Clone ID: PAT_MRT4530_31944C.1.pep
MAAAGHDVQLPHVAIFPFMARGHTVPMTHLACLLRRRGLATVTFFSTPGNAPFVRGQLDDDVAVVELPFPDHVVARGAAECVEALDSLFPLPAFVEAVSALRPGLEVSLAAARPRVGLLVADAFLHWAHASAAALGVPTVAFLGGNMFATIMRDVILRDNPAAALLSGGGGAEAATFAVPEFPHVHLTLADIPVPFNRPSPEGPIMELNAKLWKAIAGSNGLIVNTFDAMEGRYVEHWNRDHRAGPRAWPIGPLCLAHGGTGTGTGAVEPSWMKWLDEKAAAGRAVLYVALGTAMAIPDAQLREVAGGLEAAAAAGVYFLWAVRPSDADLGAGFEERVEGRGMVVREWVDQWRILQHGCVRGFLSHCGWNSAVEGVAAGVPLAAWPMGAEQPLNAMLVVDELRVGVRVPVPTAMATGGHGVVGSEVIARVARELMMMAGEGKGGGGGEEARNVAALASKAREAVAEGGSSWKALEEMVATLCRPVEGDTPKPTK

SEQ ID NO: 129714 - protein, 76 aa, Oryza sativa
  Clone ID: PAT_MRT4530_31945C.1.pep
SRYLAEVGSCVKLTIMAFLSMDGEHINAPAITCYGFSTKNMTLTTSKVDVNNMDIRAINTKSTFHDSGRCEHGRLS

SEQ ID NO: 129715 - protein, 90 aa, Oryza sativa
  Clone ID: PAT_MRT4530_31946C.1.pep
HCSPLSFSSPVSLRFSPTASDHELPPTAPPTGTPPHTHTPPLDCGVTHTPALALALALALAATDRPTPRAGRRALSLKRSPPSPRGSRLR

SEQ ID NO: 129716 - protein, 178 aa, Oryza sativa
  Clone ID: PAT_MRT4530_31947C.1.pep
MNGCHAYCSSPHCPGKPYPSVTVIFSSPPPPRVSSREARFRRACSPADITAIFTTSSLHELWGGWIQASHNHLLLVLASRRPHLASTVISRIQALLPSSPPTPYCVIAVIACCSAVPDAILTAPSFSVIDFPRSLGFGAGGLAYFVGARWSASDLSRSMGFGAASLARSTGAHGLASL

SEQ ID NO: 129717 - protein, 326 aa, Oryza sativa
  Clone ID: PAT_MRT4530_31948C.1.pep
MSAHVAAALLLALLLAPSAATDVPSYPLSQAQSPANTSSGGSTSPPCHLDLSAELFGGVAAACGAGGGPGSLDRGRCCPVLAAWLFAAHARTALSVPAPAPALAGEGLDGGEDEPMVPYDNQRCVDALGSALERRGIGSLRCPAAFAVGGGGAAAAKNATPTAAVKELEKSCRNASYAGCSRCVQSLQKLKGNVSREVAGGDRARRMLGRDCQLMGLTWLLAKNKTVYIPTVSAVLRAMLYSARPTESAAAGGAPPRCSPDQENMPLAVDSLQFERASATSSSAAATVLRGGGAGVVVSLLLGCLAACGGWSELKGDIGGVQIGDW

SEQ ID NO: 129718 - protein, 416 aa, Oryza sativa
  unsure (1)..(416): unsure at all Xaa locations
  Clone ID: PAT_MRT4530_31949C.1.pep
LNQSSNQASELGARRLAHGYPLEAETQAQSGAGGEGEGGGEGSSDVQDQELRRHRLHGRLRLHRHHPKKASASASAVASRHGNPALRDSLPDLPLLLTFHELAAATANFSSSHRLAPNSTSFRCSLRGHSAAVFRRPLRRDQAHVGXRLAALGHCHHAAIARLLGAAASPDGSLFLAYELLPDASPLSALLRNPNSPSFTPLASWQSRLKVAADVADALHYVHLQADTVHNRLSASTVLVSGDGPTLRAKIAHFGAADLAGELLGDRRGRRIEGTRGYMAPELIAGAAPSRRSDVYALGVVLLELVSGQEAVRYEQNKATGEYERTSVIESAEAAAEGGGGEAMRRWVDRRLRDSFPVEAAEAMTAVALRCVARDAAARPDMSWVAAKVSKLFLEAQDWSDKFRIPTDISISIAPR

SEQ ID NO: 129719 - protein, 181 aa, Oryza sativa
  Clone ID: PAT_MRT4530_3194C.1.pep
NSDGSAFGDLFCPRSFFCLAPGRGGTADWRAKVGLIPLTVRVAWTFLAVPGITRALAVQVEHHAIAHQAHTQLQGAPHAHTLDRQGRHSAHSSRQCSSTAGEHSSHRRQGFLHRQCSQSHHRRKFPGTAHTGDVTSPAPDTLAARQASTTPALPHRAHTRDGARHSAGTRVHRVRRLRGQL

SEQ ID NO: 129720 - protein, 408 aa, Oryza sativa
  Clone ID: PAT_MRT4530_31950C.1.pep
MAAAAAEVAAAGGGGEMVVVRLPPLSQDDPLFQDKKDLVSKGFLLFCVYFTRGKKLQTSRKILLELYFTGDDDFGPLSTRNELESLNLLLKILNTLLLTANVGAMGVLQVLRDEILIRLRSLELEDNDQMVVQIRNQNMEDSLLKWGEQHGVKTKLQIAFFEGAGRGMVASENIDVGDIALEIPESSIISEELLCQSGMFLALKDLDSITTETMLLLWSIRERYNPSSKFKIYFEALPANFNTGLSFGIDALAALEGTLLFDELMQARQAIYCYGIVILILQITIQLVSPHILNYGRVDKVTKSLKFPLSRPCKAGEQCFLSYGKHPGSHLITFYGFLPRDNPYDVIPLDLDTSVDEEDSSSPSVTTSQTSHMGERMLGRQSRTGLQRSTKKDSFVHCYFVYLRLGHA

SEQ ID NO: 129721 - protein, 97 aa, Oryza sativa
  Clone ID: PAT_MRT4530_31951C.1.pep
PSSKTTDNITKPQIKKEKKNSSSNGEQEEITTIATTVISSSSSSTTGSSTPSSSPPSPAATSPSSAPPPTDRRSAAGGGGGGHGSFFLSPQHFASHS

SEQ ID NO: 129722 - protein, 103 aa, Oryza sativa
  Clone ID: PAT_MRT4530_31952C.1.pep
TFKKASPLPLKVSLRSIREGRNQTLNECLVREYRMSINGISKKFSHEFREGVRARLVEKGLAPKWDPPALEYVSADMVDSYFAPLGEFEPELTLPTESREAFV

SEQ ID NO: 129723 - protein, 69 aa, Oryza sativa
  Clone ID: PAT_MRT4530_31953C.1.pep
CPPSQLVGNRRGRNSSSVPRDCTLSSWWSDFFFIIFGTGKLYCCYFASFTTSPTTTSLHSTSTTSNISV

SEQ ID NO: 129724 - protein, 442 aa, Oryza sativa
  Clone ID: PAT_MRT4530_31954C.1.pep
PGPAGTLPLLLTLSALLNPTTMPTLAAAAAAARRAGGALRYAVLGGVRSLSSLQPSSSSSAAAAASEEVLVEGKASARAAVLNRPGHLNALTTTMGARLNKFYMSWEDNPDIGFVMMKGSGRAFCAGGDVVRLHQLISEGKLDECKDFFKTLYSFIYVLGTYLKPHVAILDGVTMGGGGGVSIPGTFRIATDRTVFATPEVHIGFHPDAAASFYLSHLTGHVGEYLALTGEKLNGVDMIALGLATHYSMSDRLNLVDERLATLLTDDPSVIDTSLTHYGDLVYPDKSSIVHRLEVIDKCFSLETVEEIVDAMEIEAARLNEDWSTLALKRLKEASPLALKVSLRSIREGRYQTLDECLVREYRMSINGISEKFSHEFREVYRILFIDDQGVRARLVEKDLAPKWDPPALEYVSADMVDSYFAPLGEFEPELTLPTESREAFV

SEQ ID NO: 129725 - protein, 80 aa, Oryza sativa
  Clone ID: PAT_MRT4530_31955C.1.pep
QQGLISMYQASTSIVTPMAPVLITKEGMVVVRNGAACTSSEEGYVSHSCYPVCELVVALVDVQPAPHSLPTTPNPSVHNG

SEQ ID NO: 129726 - protein, 34 aa, Oryza sativa
  Clone ID: PAT_MRT4530_31956C.1.pep
PMRPQNLDYTRPSLLCYSNYIFSVNLPWSILFAI

SEQ ID NO: 129727 - protein, 143 aa, Oryza sativa
  Clone ID: PAT_MRT4530_31957C.1.pep
MVTCPAGYGDMPVDCVLWKCSASELKTKLEDQGSDPNKFVKVGSHFRKGRDTTSGRYNHKRKGLVKTQLFQEVGMDVALILRVGRPRSGSAANPSRRHRRSLPPRAAATATPLRILLSVEELSKSRVFTNPFLLRQTTIRSVP

SEQ ID NO: 129728 - protein, 107 aa, Oryza sativa
  Clone ID: PAT_MRT4530_31958C.1.pep
HVAHHPRPCGLGPRWTGPSCVAAQWGPPVNRHSLPLEPLICGARLPAPHLPPLLTSSSPELKSFLVGAFSEKLVSSLPSRIPVEWGRLVSISDLRFRMWTLFLIVAR

SEQ ID NO: 129729 - protein, 148 aa, Oryza sativa
  Clone ID: PAT_MRT4530_31959C.1.pep
AVRRQRGRIGSKQILKYFLLIRVFFPFLWCIRNNFFLFCFLLYFFHLSYGHVSFFLFIFFLSIFILFLLLFIFIILLLFIFLFFIFIIHFFFYIFFYIYYFIFFFFFFFFFIFIFFFFFVFFIYYYYYFIILFIIYFFFFIIFFIIYY

SEQ ID NO: 129730 - protein, 76 aa, Oryza sativa
  Clone ID: PAT_MRT4530_3195C.1.pep
AHVPRRRGGPAPPPTAVSTPPSPPSRSPGSPAPSVTPSPSTVPPSPSPGCSSPTAFSSYTPLPSTPYSSASPPPPP

SEQ ID NO: 129731 - protein, 89 aa, Oryza sativa
  Clone ID: PAT_MRT4530_31960C.1.pep
GRSLQTASESEGRRCGTSSKWQPQKVTERIGWKTRAPKGKSGLPKKEERFHGHGCGKPGPAEGHPLFYPSLLLENPPFFFLLLLVIKIK

SEQ ID NO: 129732 - protein, 558 aa, Oryza sativa
  Clone ID: PAT_MRT4530_31961C.1.pep
MAAVTLLALGNDAPDVAGERRRGRDGERHGDERDGPDDERGDERASAASDGRCGGGDGGDQRVGRRSAWRGGRGEAVFLLYLVFPVQSVEFFKSVGWAPYHVLDYDFFRNSYYVNFYMFRDDVIATSSQLQIDNRYILSEQTPNRAPVDWKMGHLIGRGDDNAMLSIRADNLYVTGFANRTGHWHVYPKFADQIPEPKTLLTFGDDYHSLLGDGSSQNLPKINLGLHATLNAIETLSNYQPSSDNTAIKIALTTLIVTLPEAVRFRPIRYRLLDGWFTGTRLTSHLAKEVVSWRDMSCAVLIFDKYGRWWASAEAGILQGKFQIRSKFDTLQYLDVTLHSTMIYYPLNKKTLTFGFAKSRIQRPPTPSPRSSFSRPHRRQGRPQLLLRHLNPQRHGTDGTARVARRRGGRDPGRERSSSMSGGRLDTSVANNPTGDRTSHAPRSASPQPQAAADDWLARLPILRAAPPSDNYPSCLRPPVRRLITSSSTTSAVPSTSTRYTEDEDDMIGFTGFYNVDIFFSHDPNSLPRGYEKHKNKLGKEPHIMTSKSLQLFISQER

SEQ ID NO: 129733 - protein, 183 aa, Oryza sativa
  Clone ID: PAT_MRT4530_31962C.1.pep
MDHYTHSVAPFTRSPILKPTTWRLRQRRGGWVGRGEEQQMPRAWVALGGPTHRASGDGRGCAKHPNAARSEQVPGGEGGAPAAAAREQVRGADADHAVTSAAARVYEQLQRQCASSRRRRPWQLHASTRRFGRRASISSTRHVERLVHGQLATCGARAQVAPHLAPPLTTRNLFGDLFYGECD

SEQ ID NO: 129734 - protein, 2552 aa, Oryza sativa
  Clone ID: PAT_MRT4530_31963C.1.pep
MANTNPNPFRFLRAGQVVHQGGDQRLPRVDLSAATRPPRQHEQYVLELWDDHRVLITNFLEQVQHFQVRRSFPHGSAVGLFKMGSAVIRDLLVYSPSFVYDGIHQVCFVRHDQGPNWRASLFTRKGWFLLLDFPLDYINMQYICLATSTFGQLDYWWEEDPIKGRVMLRAMYKDADSVPKKIVLQDPTAGAGESWTISVFILEGEFADMFPPDEDLPPVGHNPGNDGDSGYDGGPDDDNIWQFGPNVHVEEDHPWDQAVGQVHDDAENLDQAIDNMGQVVNNDNWQLVTIEQTNLGLFSDLASAFTQFVHQWSVNLIPSAVIRNGLVSLPRGPPVVEHHLLLEPTPLAVLPPDNPLLPDNPFDMPSDVVDVNPSPVTPNSRIITKLNPVSPCKRKRKMVTPLVDSSVRRSGRLLAIRDGFRQELAEDPNMGVGKPRGKDVRKLKQLADASGVVFPNELIPFVDLHSDISIDNSSDLSTVIPADCSVDLIQRIGLDICGASLEEETKRSSFDHSCIRKLAPKRFDKFAFSPSRGASGGVLICWNSSIFTASNIVIESFGIQLTFTSTHSNLSWTLVTVYGPCAGIERDNFLTWLHDLQILDDDLWLLLGDFNFYRSVFNRNKSGADINDIFLFNEVISDLGLVELPIKGKAFTLSNMQQQPLLEQSDWFFTSPSWTLSFPHTLVKPLARSISDHTPCVVQIGTNIPRANVFRFENFWIEHEGFFDLVQSIWDNHGSSHDSAKNISSKLKALRKGLKKWSKNLSRLQKLISNCNNVISFLDSIEEYRYLSLLEWNFRVFIRSKLLTYLRYKQVYWQKRCTIRWAKFGGENTKFFHAMATESYRKNSIASLIDVDGTIIFDHEGKAHVAWDTFKGRMGVSNFVSMPFDLYSLITPQNGLEVLEAPFPKSEIDNLVKNLPTDRAPGPDGFNGLFMKKCWPIICHDYYNLCQDFHSGSLDLNSLNHSFITLVPKKLTPETINDYRPISLMSISLKFLTKLLADRLQKTILNRAFSLGLLSKPFPSNQDQNFPMVQYADDTLLYAKASGRELFTLKALLQYFAQGTGLKVNYHKSCLIPINISDEKADLLAGVFGYKVGSLPFTYLGLPLGTTKPRVIDFAPLVDRVERRLSANAAFLSYGDRLTLVNTVFSSLPTYYMCTLLLPKTVIDNIDRARKHCLWRGSEVNSNRKSLAAWDKVCKPKMKGGLGVINLSIQNQALLLKFLDKFYNRRKAYNEYLELTEFLSNINLSHENDVWSYIWGGLKYTSQKFYALNFRSLQPPRHFLWLWKSKVSQRVPMEGSEAAQQKDSVKVVVNIRPLITPELLLGCTDCVTVTPGEPQVQIGPHVFTYDHVFGSTGSPSSLIFEQCVHPLIDSLFRGYNATVLAYGQTGSGKTYTMGTNYTGEANCGGIIPQVMETIFKKADALKDGTEFLIRVSFIEIFKEEVFDLLDASHAALRLDSGSVAKATAPARVPIQIRETGNGGITLAGVTEAEVKTKEEMASFLARGSSSRATGSTNMNSQSSRSHAIFTISMDQKKTSSASDKLSNDDYDILSSKFHLVDLAGSERAKRTGADGLRLKEGIHINRGLLALGNVISALGDEKKRKEGAFVPYRDSKLTRLLQDSLGGNSKTAMIACISPADSNAEETINTLKYANRARNIQNKAVVWSFSLKINRDPVTAEMQKLRSQLEQLQTELLFSRSGSAALEELQLLQQKVSLLELKNSELNHELKERELSYEQLAQSALAAQLEKDQLMLKIESARNGKSWDDIENTDTDQDVEVMKRYILKIQQLESELTRQKFSSTCKNDLHDRFAMDKDLLLDDLGSGCEVGTPDASSAVNFRITPVPAGEADEEKERDHSSMQDKLDKELQELDKRLQQKEAEMKEFAKSDTSVLKQHYEKKLNEMEQEKKALQKEIEELRHALTNITSSTDESAQKLKENYLQKLNTLESQVSELKKKQEAQQQLIRQKQRSDEAAKRLQEDIHRIKSQKVQLQQKIKQESEQFRSWKAAREKEVLQVLQRKTEEAAMATKRLKESLEAKKSTRDTYGSASGSGIQALMRAIDDELEVTVRAYELRSHYERQMQERAAISKEIAKLKECPQAMSPSARSSRISALENMLSSSSSAMVSMASQLSEAEERERAFNGKGRWNHVRSLPDAKNTMNYLFQLASSSRCQQLDKEVMCKEKEHLICDLKEKVVALNGRIRQLETQVKDLNNQNMLLFTAISEAKNPVGTSRKGTVGSEDGQHYAMRKSIRASHSLHYSKNSFLWSDDMDISDSEKSEGSDADWEASDADYGASDADWECSKKVRRRRQTVSSHLNPNPGSGTTQKSAKSEMASQEKSTSLDLAPQCCSCSKYSSCKTQKCECRASGSHCGGDCGCITSRCSNRVDMKEEKEGGGVVEVSSSDDVDDAKVQEIVKEGVMLLENSMSEKEAQETKSRKPLADIGNGVVKQTGAKPKQRKNWRKSTVQLVPSAPPLPPTAPQNTEPVPRNRDIPLRLPRAMSSPAVDSIPLTDRNAAKPDESMSSNKENVTAVRARSPARPRKNANEKENHLR

SEQ ID NO: 129735 - protein, 476 aa, Oryza sativa
  Clone ID: PAT_MRT4530_31964C.1.pep
MGAKERKEAAQREKEAGDEAYGEELYKRAAAHYAAAADLDPGDTSCLIKRAAANFSMNKVSSLPIPHAIRERKPLRFTSPLDAGAIKCKECVADCDEALGRRRRRDARCGCDEKLAADALFLKALALLNLAVCAADHEPAITALEGSLELRPGSKETRAKLDMAKRNRDAFAEQERLDQEAAKTHRDRGLELLRKKKYKEAEMQFSEAIKRNPRYPKICLQLLLFNFGIHLFMTDMITQNFSDRARCLVELNSLPKALEDANRCIELDDTLGMGYLRKGLVQIAMAKYEDAIATLVDGLKHDPQNLSIHNSLRECAARIKMAKDSDAIAKDLTKHQREIECLHKQLNEGENKASKERSRRMKSEKLVKTLSSQVEQLRSANERNANLERELSECRERFERLQLIQNRILQHFTCPISHEVMNDPLMAADGHTYEAKFIRDWFRRGHNTSPITNVELEHKKLVPNRALRSAIEECRK

SEQ ID NO: 129736 - protein, 300 aa, Oryza sativa
  Clone ID: PAT_MRT4530_31965C.1.pep
MQQQGAAALTPATGLGSRPSLTVKTSRVCTTAALPPLCRCGRRHLIGSTSATALLPLLALPSPAASPVDPEVSFLPALALMREWYEKFYATAMDKFMKPYEAEISLYQNSQIAQYKSKLFSQLMTAGKNILELGVGTGPNLKYYANADGVNIVGVDPNKHMEEYARAAAVSAGLPPSNFTFRRGVGEALPAEDNSMDAVVGTLVMCSVSDVEMALREIKRVLKPGGLYIFIEHVAAPDGSFLRFVQGALNPLQQFVSDGCHLTRETGEIIRHAGFSSLDLNTTRLSTAFILSPHVYGVAC

SEQ ID NO: 129737 - protein, 430 aa, Oryza sativa
  Clone ID: PAT_MRT4530_31966C.1.pep
MADFPPWADLADAVVREIANRLPCVYDRVHLAGVCRPWRESLERLPPLHPPPKLPYLILPLAEQPAFSCVLSGGATHPFFVPERIRHACYFGSYDGGWAFLSTLHPRAQGYRDYFLTNLHQTPNTFVLPVWIQLDREEPVLRPRQKRLRPRDPLFINAATLSSDPFMDGCVVAGFVNNCAPVPGHHRQKIAFWRIDDKVVIGCFFMEDACWDAVDVVRHNGAFHFLTNGQHIVVGNPGFDDEANAPPQVQWEYRCFSSQGRGYDGQHVVARYLVESSGELLMVVRCSPRPGESTSAFKVFRMAQPEEDDDGDGDAPLLDGRTMLFVGDPCSRSDGDVVRYIWRELPSLEGRMLFVGRGCSRSYNTDQYPGFEGGVYFFDHRIPGQGGGAPALYPCRDCGKWTGKPALQVELCFPEQDPSNYSSQVWLLNG

SEQ ID NO: 129738 - protein, 125 aa, Oryza sativa
  Clone ID: PAT_MRT4530_31967C.1.pep
QTGGAIPGGLQVFMPEGLKGSPLTMEKAGKGAARIMARLVTKVALIITVVQVCKGATKLIKGAAPLTNMSVNTVKPALSMIGPAVAHFLGTKKNEVAPHDACVAPSCFRSMGALLLCTDLGRLSL

SEQ ID NO: 129739 - protein, 334 aa, Oryza sativa
  unsure (1)..(334): unsure at all Xaa locations
  Clone ID: PAT_MRT4530_31968C.1.pep
YLFVLVINELSESLLDAXQSGYIKGITTTGGTILHSLMYANNLITVGQANDGEATRIFQTVQTCCAQSVQTPNWGNXSIFFSSSTPNQQKHQILNIFHVPLIENSTKHLGHPLIINTRTRASAYKFIISKFKARLTSLKANMLSHASHLSLIKYVFASIPIYCMSTILHSKSLLNKLTAIISAVLVDKSXIMKALRKVFPGGLGMIFANASPNTISQLWDDRTCWELSKLNQIFDQPMVQHIMKVQIVPRDNEDKICWIHNSSGECTSKSAYKQVYNLSHSVFTIVTSLQLNILLKICSTKCIPPKFKTFIWRLNRKALPTVANLHLKFCDIPD

SEQ ID NO: 129740 - protein, 70 aa, Oryza sativa
  Clone ID: PAT_MRT4530_31969C.1.pep
HGQFQGATPFSCGLAALSLASHSQHCPANTLFVSLSALLAHQSALEPLWSNWPWPVQHLFGRTSLGAWFV

SEQ ID NO: 129741 - protein, 70 aa, Oryza sativa
  Clone ID: PAT_MRT4530_3196C.1.pep
AGIRHEDGSMHLIPLLCVLDNLLSRLMVWLVCFFLSTSDIPMLCYWQKKQNIIVCHSKTYFIKYLSITCW

SEQ ID NO: 129742 - protein, 51 aa, Oryza sativa
  unsure (1)..(51): unsure at all Xaa locations
  Clone ID: PAT_MRT4530_31970C.1.pep
GNNGCGCSXSQRVXFGXHELLYSKGFLVLETLKVNHSVLYTLSSAGLSLCT

SEQ ID NO: 129743 - protein, 76 aa, Oryza sativa
  Clone ID: PAT_MRT4530_31971C.1.pep
GSDTVIFASLLSHLFFSCFAYANNYHDTGCMHCSLVGVKYTSQWECRNLIFLLCFQSHPPLISPPQIVKCINLHCT

SEQ ID NO: 129744 - protein, 84 aa, Oryza sativa
  Clone ID: PAT_MRT4530_31972C.1.pep
VVSPFPHLPPWEREQSASQSNPVASPPSNLVGGDKDMNMVRMWKIKYGKMNTTLKVVKKYEDKEKRVIKKYQKEDADMHYRSVK

SEQ ID NO: 129745 - protein, 152 aa, Oryza sativa
  unsure (1)..(152): unsure at all Xaa locations
  Clone ID: PAT_MRT4530_31973C.1.pep
MKRIVESKPNVKKVNPSCLFVRTIPSYEPSDMFEDNLXMGNLYEADAKDMNYEKFXELKPHLQVPQPSRSQLXGATRDKSGEEKIPSATEDQAKQFRLGKFCWASLLKKTQRKKSDQKRRLPTYLLASLLESWVQDSCKGVDLSRPDKFIPN

SEQ ID NO: 129746 - protein, 109 aa, Oryza sativa
  Clone ID: PAT_MRT4530_31974C.1.pep
MNERMITESISNADNIRSRLIVTWSKYLQEREEKEENNSIAKDRSSFRAQPATQTKQLLPKCRVKLKDSYSIQENYMGSKPREMAISSSASTTNPRHKGQEIPQKNSPP

SEQ ID NO: 129747 - protein, 541 aa, Oryza sativa
  Clone ID: PAT_MRT4530_31975C.1.pep
MAEAATTTPLLTSHEAEPSIDDVIEAYIGATGARQLLKAMLLAFAWAFDAQQVFMSVFTDAEPPWHCTGVVDAAAAAAADSGSSCSPPAASASPCALPPGTWEWDRPAETSVVSDWALNCGPALVSLPASSFFAGNLAGGFLLATLADTHLGRRKMLLLSLVTMSVAAALTAFSPNVWVYSALRFVSGFGRSMVGTSAMVLSTELDGKRWRNTVSAAGFVFFSVGFVSLPALAYTFREASWRNMYVWTSLPSLCYAVLLYLLVQESPRWLLVRGRKQEAIEAVRQIASLNGGGGGITTSSFSMLDACAVELGDGGEGMFATLHSIWERRRALRRLAAITAASFGVGMVYYGMPLNVGSLSPSNLYLSVAYNAVAELPSSILAWLLMGRWFNRRGSVVALTTASGLCSLAACVPAVVLPDGARMAAEVASFFASCTAYDMMLMYTIELFPTSVRNSAVGLVRQAVALGGVVAPVLVALGRETTSYWSSSFGVFGLAVGCLGLLVTCLPETRGRRLSDTMEEEEAAVLSSSGASDMDNNGELV

SEQ ID NO: 129748 - protein, 66 aa, Oryza sativa
  Clone ID: PAT_MRT4530_31976C.1.pep
HPNLQHEMQRREVRCLSRRVMALASRSGTSMGRVGGRAYERSIYDMDGIYVRLLVVVFVCVPIPAG

SEQ ID NO: 129749 - protein, 82 aa, Oryza sativa
  unsure (1)..(82): unsure at all Xaa locations
  Clone ID: PAT_MRT4530_31977C.1.pep
DXNHSYXXSQLFLPSNXIXXXPXIHLXYPXTXSXTXLSRLGTHXIXTKKTXHLKGPIYTVPPFSMATLVLGVPLLXPKASIS

SEQ ID NO: 129750 - protein, 77 aa, Oryza sativa
  Clone ID: PAT_MRT4530_31978C.1.pep
GRVSEPLEPFRKCLNGAHRGKFPHFPPPGALGLRIHAATTAELTHSLRRHPPMLRLRTCHPLTSGRLSRSSAGGSLD

SEQ ID NO: 129751 - protein, 102 aa, Oryza sativa
  unsure (1)..(102): unsure at all Xaa locations
  Clone ID: PAT_MRT4530_31979C.1.pep
LRLTANKGFIGVLADFMASDLQPMCALTFGXCLFYHIIVSRLVSTGLYCYIILSSADCLHIIIYIGHIADFLHPIAIGWYRHRLLSAIGWNYSIGLLADRLF

SEQ ID NO: 129752 - protein, 156 aa, Oryza sativa
  unsure (1)..(156): unsure at all Xaa locations
  Clone ID: PAT_MRT4530_3197C.1.pep
GSANIAEKNQDNEMSTDAGEPEEVADIFIYREDVVSLKSKEDTRGLVLEVAGEYDSEGSITDDDTDTEEHEHKSSHRTENGGADGDNVSNGXDVDSQSSLPDNKVRVLWIDGVEKTEDIDSVVVMDRSFLHGDIVASATDPTGQMGLVADASLWLI

SEQ ID NO: 129753 - protein, 296 aa, Oryza sativa
  unsure (1)..(296): unsure at all Xaa locations
  Clone ID: PAT_MRT4530_31980C.1.pep
MAAKLQGGGGGAAVMAVVVVAMVAGAASGGNFYEECDATWEPQNCWSSDNGKSLSLALVSNSSGSMIRSKRQFVYGSVSTSVQLXPRQLRRHRHHLLHVVXGDKHDEIDFEFLGNETGQPYTIHTNVYANGVGDKEMQFKPWFDPTDGSHNYTISWTPCRIVWYIDGMPIRVFRNYQSSNGVAFPTWQPMYAYSSIWAAEDWATQKGRVKTDWSKAPFVANYHGIDLDVCECYGGDCVYGCAAAFNQGGGCAGQQLTGDEMGQMKWVQDNFRIYDYCVDYKRFNGQMAPECSLPQY

SEQ ID NO: 129754 - protein, 162 aa, Oryza sativa
  unsure (1)..(162): unsure at all Xaa locations
  Clone ID: PAT_MRT4530_31981C.1.pep
PFLRTRVLLEQPGHRNHWXGLHDASIVAKDKHTAAVASDDSRLSWLATQKILKRNLADVINIKLSQLGMLAALQVLDAAXKARIALIIGGIAATRISMGYAVHLAASLGSMSMADLYTHILLSEDLICRGYETTRPVYKSTDARSHGGYPHLHNNSLTYGNA

SEQ ID NO: 129755 - protein, 37 aa, Oryza sativa
  Clone ID: PAT_MRT4530_31982C.1.pep
GHVYGPPLCYTLCTALGFPSFTNQQPQIVPMVASTPR

SEQ ID NO: 129756 - protein, 39 aa, Oryza sativa
  Clone ID: PAT_MRT4530_31983C.1.pep
MGKGNVLFFMLWGWICLDCEEYQRMKPYNNLRTPSDTVL

SEQ ID NO: 129757 - protein, 207 aa, Oryza sativa
  unsure (1)..(207): unsure at all Xaa locations
  Clone ID: PAT_MRT4530_31984C.1.pep
HFQLQIDEDIPATLGVNKGDGVRHTSHKENEDDVNQVDGLRLSKNDQAYHGTIMRSHAXRKIQQEVNSLFSQLNPNFSENFILPKCSTFVLLRCTPEDIITTIRRMGXVEDYKGYAEEESAHAQPAAVYANKKMVCAVKAQLPRLVXPSQSRYGVHXAYIVGKRDNXIKPHLNIIFQXEVMPFLLKTAHELKGCARTRENSLHSHLC

SEQ ID NO: 129758 - protein, 174 aa, Oryza sativa
  unsure (1)..(174): unsure at all Xaa locations
  Clone ID: PAT_MRT4530_31985C.1.pep
HTQNFPILNLXQMSPVKVNLYQXALLSPFWNINAHSVVYITQXRARVQVVNNXGKTVFNGELXRGQLLIIPPPYASCKEGXREGCAYIXAFKTNPNSMVSHXAGKSSIFPCSPNDVSTNAYRHSQEKRLQRLKHNXRGDDSGHPLPTQYQSSQTFIIRQEPSLVGFRIKNNLNK

SEQ ID NO: 129759 - protein, 96 aa, Oryza sativa
  Clone ID: PAT_MRT4530_31986C.1.pep
MEDADVPQCLLSDAGLNLVNDWMYEAGWEPTGDAISPLDQVTGEIQHNLEEHIAQTQEWQQTADAHFTNINNLMQQLHDDLQVYVFFQGFNPYQGP

SEQ ID NO: 129760 - protein, 114 aa, Oryza sativa
  Clone ID: PAT_MRT4530_31987C.1.pep
HLWYGAMRVSTVDSPHLCMMVAAQQARPIRVVIIAHRQKVRRARRHLVFWLRALRELASVARVSSTTVVVLAAAAAVDDGADHHLHQCHAAPPPLVTPRACCSSSPLSPSGREL

SEQ ID NO: 129761 - protein, 433 aa, Oryza sativa
  Clone ID: PAT_MRT4530_31988C.1.pep
MADTRGSTSSGGGDDRGREGHDDFTGGGQYNRYHRILEAVPSPLVRSENVVHHQYPTGLIHHPSSTMPVAPCSYVPRYTMVPTSAMLPLQHHHRQLQISQENFQDRVPSNNVAAPHLPSNFQDLRPMCNGPPFMSYGQTASNRNVLYQNLTPYSFNAWASNNMPRNPVYTSYHPTAIEDPHATPFHINNHDTDQGFFTVSTSFRVDQSFVHAPSPFPPVSSSSRSFSSAQISNGPTDAKKAKKSDIKDQPIVLRRSDTESEKNDELNQTPASEPSSMSHNSANSTIRFNCREYRVILRKELTNSDVGNIGRIVMPKRDAEAHLPALHQREGVMLKMDDFKLETTWNFKYRFWPNNKSRMYVLESTGGFVKQHGLQTGDIFIIYKSSESEKLVVRGEKAIKPNVIMPIVDCSCKNDLNNSEECGFAISLLTKKT

SEQ ID NO: 129762 - protein, 84 aa, Oryza sativa
  Clone ID: PAT_MRT4530_31989C.1.pep
MSSTVFPREFPVLTVLLWIRDLAQATISTLLALTQRRKNYSYELKTTVPMAIARPNSTDDGWKFLQRELSSQQLSVDQIIVSNN

SEQ ID NO: 129763 - protein, 1406 aa, Oryza sativa
  unsure (1)..(1406): unsure at all Xaa locations
  Clone ID: PAT_MRT4530_3198C.1.pep
MVVEASGGTADHACQEAAYLMMARLRERHNYIFCNTAYRFHPRQASGDDVSTFRSTAGENDTTFGHMCAVMRGMDRMHSDLRKASRALNDGKLVRIIALKDEIARLKKDEIARLKKENAQLKNPQHAPQVDDGTPPAPVPAPVPVSAPASALSFAPALAARGPASGNGGWLPATPSGSRDHSSSSSSGSEPGSGEMYLPNSRSRSEGRGDEQEDALDSTDRRSRSESVRLGMVYTRNGSRTAGEGSNGEERIDGVHPNSDSGNGPPLLPENPTLAQSKLPEFLHVRPPTFSSTTNPMEANDWLHAIEKKLNLLQCNDQEKVAFATHQLQGPASAWWDNHMATRPPGTEVTWAEFCRNFRKAQVPDGVVAQKKREFQALHQGNRTVTEYLHEFNRLARYASEDVRTDAEKQEKFLAGLDDELTNQLISGGYADFEKLVDKAIHQEDQCNKMDRKRKAAQFRSNQGSHPRPRFTPRQQSGPTTMIVRQHRPFNSSSFHQGASGSQNHHGGQPNRRAAPRPPITPAQSAPSAQAKKETGTKPGSCFNCGELGHFADKCPKPRRVGPRFVQARDNHASAEEARAAPEVVLVTLTNEKGETVVYMSPVSPKQRISLNQIEVENPVTTEQKGLQKLEDIPIVCEYPEVFLEDLTTMPPKRELEFRIDLAPGTAPIYKKPYRMATNKLAQVKKQVDEQLQKGYIRPSTLPWGAPVIFVEKKDKTKRMCVDYRALNEVTIKNKYPLPRIDDLFDQLKGAKVFSKIDLRSGYHQLRIREEDIPKTAFTTRYGLYECTVMSFRLTNAPAFFMNLMNKVFMEFLDKFVVEHQLYAKFSKCDFWLLEVKFLGHVITAQCVAIDPSNVESVTKWTPPKTVSQIRSFLGLAAECDQSFEKLKKKLVTAPVLILPDQTKDFQVYYDASRHGLGCVLMQEGRVVAYASRQLRPHEGNYPTHDLELAAVVHALKIWRHYLIGNRCEVYTDHKSLKKSYCNALCTEGMCKELQQELEHLNLGLVEYGYVAVLEARPTLVDQVRAAQVNDPEIAELKKNMRVGKAQDFHEDEHGTIWFGERLCVPDDKELKDLILTEAHQTQYSIHPGSTKMYQDLKEKFWXLQPLQIPEWKWEEIGMDFITGLPWTSSGHDSIXEEKVRTVRERLRIAQSRQKSYADNRRRELTFEAGDYMYLRVTPLRGVHRFQTKGKLAPRFVGPYKILERRGEVAYQLELPSNMIGIHDVFHVSQLKKCLRVLEEQADSEHIDIQEDLTYVEKPVRILETTGADALHNHRRAHVPAFSGPRQPRQRMRRVFRTYSPSLSHAPAPETAGIRNFESHLSLLLHLPTTTATPSLFFPISSSPPEPSNALAPSPFFLTTTPPFRSSVADTPSRADNAVAFAVVRATPVTPFSLDPAAGTQLRAGH

SEQ ID NO: 129764 - protein, 96 aa, Oryza sativa
  unsure (1)..(96): unsure at all Xaa locations
  Clone ID: PAT_MRT4530_31990C.1.pep
GXCGXQGXXRXSPLTVXXXXGXXTIQLQCXXRKDASIXXLTMRAGLPXTNXXTNPWXXAMTPHSXGEXXXARIDNQXXDEXLPDTVIISXNXRVLH

SEQ ID NO: 129765 - protein, 63 aa, Oryza sativa
  Clone ID: PAT_MRT4530_31991C.1.pep
MASSVEGDDARGDGGESELGLAGARRRMDEEALGETAGRRSSSSSAPISWARAPQLLPHQGRK

SEQ ID NO: 129766 - protein, 120 aa, Oryza sativa
  Clone ID: PAT_MRT4530_31992C.1.pep
FPALYNITHTRHITLAKLKEKGWETIKFRTLHGDKLRDWNGIKQMWRLLNLQEGIKDRMWWNLEKNGYFTVKSFYKALKREQKSEARQRSLMLGAKLARQVANEVFSSRFGWRIYTRRLE

SEQ ID NO: 129767 - protein, 117 aa, Oryza sativa
  unsure (1)..(117): unsure at all Xaa locations
  Clone ID: PAT_MRT4530_31993C.1.pep
MADWCSEQSGGGSATVREGGCGGEGVAREGGXRLNGGGLSRKTRLAALLSSSAARVAPAVAASILAPHSRRPPPPAPLPSAPPSSPHRSSRPPPPRRSRRCRLYSPHATLQRREERN

SEQ ID NO: 129768 - protein, 99 aa, Oryza sativa
  Clone ID: PAT_MRT4530_31994C.1.pep
KIFFFFPGNALSQFGPLLAKFFSRSCASHGSHDEQAVLLDLSPLQEERLRFLRQRLNVPFDSSSVKHQVPLLYLTTYRPLVFLFYCSHQWDTNFLAQKK

SEQ ID NO: 129769 - protein, 72 aa, Oryza sativa
  unsure (1)..(72): unsure at all Xaa locations
  Clone ID: PAT_MRT4530_31995C.1.pep
RRFRFGHRWNSEFREIRWKTGKFRTNFINQNLNTNSLSLPTSSXKPIGFGEIPIEIIKISISNPAHLSVFLF

SEQ ID NO: 129770 - protein, 144 aa, Oryza sativa
  unsure (1)..(144): unsure at all Xaa locations
  Clone ID: PAT_MRT4530_31996C.1.pep
ILAHAQLEPWPGVEAPXVPPASKPARGGCPXFGXPPPGCPKRXSPSLVARPXEEQGRWXAXPXLLXVXPARVRPPPPPGXAKGRRXSNXLPXRGGPGTPIPPIIESYXNSTXPXFYNXLDWGKTWRLPNLIXLXATSPFPPXWR

SEQ ID NO: 129771 - protein, 168 aa, Oryza sativa
  Clone ID: PAT_MRT4530_31997C.1.pep
MRRLGDVVEAPALVLTPASMQQAGGRGSSGALDASMVVILAALLCVVICALGLTSLIRCALHCARGLSPTTATPTPSVSTAATAGLKKTELRRIPVEVYGAKQAGVPDGECAICLGDFADGDKVRVLPRCHHGFHVRCIDTWLAAHTSCPTCRDSILSVHGVVAGGQT

SEQ ID NO: 129772 - protein, 147 aa, Oryza sativa
  unsure (1)..(147): unsure at all Xaa locations
  Clone ID: PAT_MRT4530_31998C.1.pep
GGGGGDGGRRELXALDANMVIVLAALLCVVICSLGLSSLIRCALHCARGLSPSPAMATPAAATTTGGLKKKELRRITVEVYGAKQAGVPDAECAICLGDFADGDKVRVLPRCHHGFHVGCIDTWLAAHTSCPTCRDSILSVHAGVTG

SEQ ID NO: 129773 - protein, 380 aa, Oryza sativa
  Clone ID: PAT_MRT4530_31999C.1.pep
MDGHQFGPWNLLPDDILELLVGRNLCEIDRLHARRVCHSWRAAFARIEPPPPPPPLPLLLLPEADDNEHGLAFSCVLSGWDTHPFFLPRAARHRARCFGSCDGVWLFLAMEDGLQGDRARDHVLVNLHSFQFLDLPNVIRLDHTFPQLMKDIEIAIVAVTLSRQPTQQGCVAAGIIELPPFPIGVRPFAFWRMGDRVILPFYEDVFGDQAVEDVIYHNGYFLFLTQDEHIRVCQEPVFHDTNVDVDSILLRFEPRVDDGDAVLARYLVLCRGKVLMVVRLGCPHRRSPTSAFRVFERVDYLVVNAGVVEVLEHTWSEIDELGGRMLFLGRGCSRSYEEADGYPGMEGVYFLDDRSFRDPIFHDPDMVFDHTYHCCDNGRW

SEQ ID NO: 129774 - protein, 69 aa, Oryza sativa
  Clone ID: PAT_MRT4530_3199C.1.pep
PRILFIITARSKLIFKPPCFIKMPGCLFPLSINLSTNPPAVGVDSYRSQPSEQYCCRIHCQSPLNGGCS

SEQ ID NO: 129775 - protein, 202 aa, Oryza sativa
  unsure (1)..(202): unsure at all Xaa locations
  Clone ID: PAT_MRT4530_319C.1.pep
PATVRRRPRRRRCXDXDTGAQXAPIVXLEEVAVTTGEEDEEVLLDMKSKLYRFARGGNQWKERGTGTVKLLKHKETGKVRLVMRQAKTLKICANHLVATTTKMQEHAGSDKSCVWHALDFADGELKEEMFAIRFGSVENCKKFREMVEEIAEQQGKNEEKENEEVSSTAGLVEKLSVTETKKEENAEKEETPAEEDKKDAKE

SEQ ID NO: 129776 - protein, 148 aa, Oryza sativa
  Clone ID: PAT_MRT4530_31C.1.pep
MHNSVFFSFSRDVKCGNILVHRNGSVKLADFGLAKQINKFSMLKSCEGSVYWMAPEVVNPKRTYGTAADIWSLGCTVLEMLTRQLPYPNLEWAQALFKIGRGEPPAIPKYLSKEARDFISQCLRPYPDDRPSASKLLDHPFVNRCGLV

SEQ ID NO: 129777 - protein, 159 aa, Oryza sativa
  Clone ID: PAT_MRT4530_32000C.1.pep
WAASYYRKQKLFFHTKKKIRVRTEGPSAPRAGGAPARKNTGAHTKIKNRKNLKKKETLASRWRGPSRPLLLLLAGGARRGTGMAPLPVCRLVGCCGCPASPEVARSRRRPLPASHRSRRAAPHAPSRRRPLTGCRQASGLALLVEGVPEAGALSALSPT

SEQ ID NO: 129778 - protein, 78 aa, Oryza sativa
  Clone ID: PAT_MRT4530_32001C.1.pep
LGWFFFFCFFFFFFVFIFFFFFIFYFCTVFFFVYFVTRSCYHFHTPSSSLKKKRGRIFLGNLLGATRTTPPGGEELCI

SEQ ID NO: 129779 - protein, 522 aa, Oryza sativa
  Clone ID: PAT_MRT4530_32002C.1.pep
MEHGGHELAVVVLVLLLLVSATSCTFLEEDVILGTVEEAKVARLGGGGGGGSKGANASTRRADNTCAGVGVGVGGGGGGGGGGGGGGRGRFYLGWKEEIAGMAGRPETAAWLRAVRRRIHERPELAYEEVETSRLVRDELDAMGVGFRHPVARTGVVANIGTGRPPVVALRADMDALPIQEAVEWEHKSKNPGKMHACGHDAHVAMLLGAAKILKAREHHLRDFNLYSTIIGQPGTVRLLFQPAEESGAGAKRMIEGGALEDVEAIFAVHVSHQHPTSVIGSRTGPLLAGCGFFKAVIHGGRRSGDAVLAAASTIISLQSIVSREADPLDSQVVSVAMVNGSDHPAATARAAAAEEEEEFVLGGTFRAFSNASFYQVRRRIEEVITAQARVHGCEAAVDFFENQSFYPPTVNDARMYAHVKAVAGELLGAGSYRDVPPMMGAEDFSFYSQVVPAGFYYIGVRNETLGSVHTGHSPYFMIDEDVLPTGAAFHAAIAERYLANHSPSSSSSSDSDDPDVELEAS

SEQ ID NO: 129780 - protein, 69 aa, Oryza sativa
  Clone ID: PAT_MRT4530_32003C.1.pep
MELYRDYVGASTLTSESWTESGDFTCSRYGAISCCVLSIDDSKLEMSLLGKALSQAVKKGLHRRGTVRL

SEQ ID NO: 129781 - protein, 58 aa, Oryza sativa
  Clone ID: PAT_MRT4530_32004C.1.pep
MQEAKVEATTVALPPRHPRLDLGPRLTHFSLPVAAALTIGAYPTVSMPDFDTATMTLF

SEQ ID NO: 129782 - protein, 68 aa, Oryza sativa
  Clone ID: PAT_MRT4530_32005C.1.pep
ITYFHQQLGQHNHGAGGALINFWATQVVWVPTTEQSHLRGTFHPTLGRLSFQGSVAGFASPSRSGAIL

SEQ ID NO: 129783 - protein, 83 aa, Oryza sativa
  Clone ID: PAT_MRT4530_32006C.1.pep
MKRTAKRVLPWRSDRYSIRSDRASGCRSDRALGRSDRRDYTRGRGRLTDGPHAAATRRARGRPRLRGRREAARPRPDGRRRRP

SEQ ID NO: 129784 - protein, 70 aa, Oryza sativa
  Clone ID: PAT_MRT4530_32007C.1.pep
MDNRWEGALTGGVSADDGRTCGQADSGRRPACMSAVVGVLATTGNGARARGSSSSLQACSESSSCNNSLR

SEQ ID NO: 129785 - protein, 250 aa, Oryza sativa
  Clone ID: PAT_MRT4530_32008C.1.pep
MDHEPPPRRAAAAGGERERMLTRTLAGRVRPLLAAAGLRGYAPRAAADLVVVGDEEPPPRTASSASAAATVSIAATAPTVLQPRVLIYDGVCHLCHRGVKWVIKADKHAKIRFCCVQSKAAEPYLRLVGMDREDVLRRVLFIEGPEAYYEGSTVPSSVCGYGFDFLNGITSELLSAALKVASYLPLPYSALSSLLIIPAPLRDAIYDYIAKNRYDWFGKDDECIVTKNKELLERFIDREEMLGGGPSNSF

SEQ ID NO: 129786 - protein, 62 aa, Oryza sativa
  Clone ID: PAT_MRT4530_32009C.1.pep
HPLDRDRISKPVIPWGPVILLATGSFSDATVLSYHATGCLIALMCCVHIHMHMLPTLPNTPG

SEQ ID NO: 129787 - protein, 150 aa, Oryza sativa
  Clone ID: PAT_MRT4530_3200C.1.pep
LCIEGMCEELRQEFEHLNVGIVELGFVAALEARPDDKELKDLILTEAHQTQYSIHPGSTKMYQDLKEKFWWVSMRREIAEFVALCRVLPPPPAAPGAPPRPQPLPRPRLRLLSRASHRSRAVQPLAAAVSAGSSSAGCRILPWLAVAVRH

SEQ ID NO: 129788 - protein, 69 aa, Oryza sativa
  Clone ID: PAT_MRT4530_32010C.1.pep
CKSLTQNLLTNRCASIRLDGQTQLILLDVIGRGTSVRENSISSFSNDGTSQHIVQTRPYIFDIDTDVRL

SEQ ID NO: 129789 - protein, 86 aa, Oryza sativa
  Clone ID: PAT_MRT4530_32011C.1.pep
MGMDNRWEGALTGGVSADDGRTCGQADSGRRPACMSAVVGVLATTGNGQRSRLQHEHAAAAAHYRPAARAAAATTPYDSSSKPARW

SEQ ID NO: 129790 - protein, 46 aa, Oryza sativa
  Clone ID: PAT_MRT4530_32012C.1.pep
GYQDRAPIRTDLRSYVLFLQKEYLDRTQGGDLFCQDRRSTHTMGGC

SEQ ID NO: 129791 - protein, 193 aa, Oryza sativa
  Clone ID: PAT_MRT4530_32013C.1.pep
MSRMEQGLRPVLQVTDVRPAAGRYLVALFDGTKSGQGVLVASMAHLVRACAIRAGTIIRVLDYLCIDTSLTPIAALSPYKCKWTIKARVTAKSGLQHLSNDRGEAKFFDFDLLDEQGGEMLAKCFSSAAEKFYGLIEVDKVYLISRGLVKPAQEPFNSDYELALDASASVEGSSPVHAASGANQRLSRAMSAH

SEQ ID NO: 129792 - protein, 39 aa, Oryza sativa
  Clone ID: PAT_MRT4530_32014C.1.pep
MSIHRMPSRIQLRHPSVVFPAGHWLKEGGNDAIAREETT

SEQ ID NO: 129793 - protein, 81 aa, Oryza sativa
  unsure (1)..(81): unsure at all Xaa locations
  Clone ID: PAT_MRT4530_32015C.1.pep
PNKHGYTPIDLISIRCTITTYSMLTATSSHDNLLGSFTPTNTSLSSQRRKPVMRCTRPTNMSMSWTTYLXMXYPTSYXTRG

SEQ ID NO: 129794 - protein, 148 aa, Oryza sativa
  Clone ID: PAT_MRT4530_32016C.1.pep
MARHSVATDVALRCLSSAPYDLALSKKFYQMASGAAVTAAAAMCTVLVILSTGGQPPAAAAQTDYCATACSSSSNGTVTCYNNAINTCSSNCSITPQYCDQCRRESNQQCQNYCYNGCLYGCSLQHPSVNTPNHHQGPVGKCQMEAGG

SEQ ID NO: 129795 - protein, 243 aa, Oryza sativa
  Clone ID: PAT_MRT4530_32017C.1.pep
MGRDERGTKQSQSMMKPLRRGGVWVDGAMGSEEKDKGNVRRAWWAMEEDKTWHDGYVLLLEALLHLRHHAADVQAALRRRDAARLSSAVRSQRQAHKDLARLAASVRGAATKWPAQLPSSATVAEVEVSGVLADAMAAIASASAAVFSAVETMSTMATAAAASTCSSSSSSSSKTPLLISLVRKKNRKSAAAVPDEEKEMAASERMEELEECMAAMESGNDRVFRTILHTRVALLNTHATLIN

SEQ ID NO: 129796 - protein, 131 aa, Oryza sativa
  Clone ID: PAT_MRT4530_32018C.1.pep
TKCYSNLLHLSEQTIRINHLSQYKHAEISGGASHGFKPGHRQEKAAPSPAAGLLSLGVRRPTADAGRCVGLLRACSRGWAWARCAGWPGLACCGHRPLGCCEPRRSRKESTKPAEGSQLQVDSTASQGAEL

SEQ ID NO: 129797 - protein, 265 aa, Oryza sativa
  Clone ID: PAT_MRT4530_32019C.1.pep
MATCSAACARPAVVVFASPAAARRRAASSVYLPGRPLRGGGVVRCSAGPVSGGMISKKVAELWAAARSASPVAVIAAVAGAAVVYKVGSSLLAPPPPPARPREEPSEEAPPPPEPVQVGEITAEELLQYDGSDPEKPLLMAIKGQIYDVSQSRLFYGPGGPYALFAGKDASRALAKMSFEPQDLTDDISGLSLLELSALQDWEYKFSSKYVKVGTIKKVLVEQGGDSTADAIEEAAVDGEDSILTAKMSNQLLYEEEMEVGSDDP

SEQ ID NO: 129798 - protein, 104 aa, Oryza sativa
  Clone ID: PAT_MRT4530_3201C.1.pep
SFGGFNDHLIISNRPISPLELADLSSSVSEYDRIINQVSAGKKKSMGQGLEANLPRPHLDSCQYLPRILKHGPPLIYSGTVQEQTFYSRGDYYLYFHTYYISTN

SEQ ID NO: 129799 - protein, 404 aa, Oryza sativa
  Clone ID: PAT_MRT4530_32020C.1.pep
MAEAEVKDNEVYEEDLVDYEEEVENGTDGGANAANASADVVKKCVPPKVQHECIPQAILGMDVICQAKSGMGKTAVFVLSSLQQIDPVAGQVGALVLCHTRELAYQICHEFERFSKYLPEVKVAVFYGGVHIKKHKDLLKNDCPHIVVGTPGRILALAREKDLSLKNVRHFILDECDKMLDSLDMRRDVQEIFKMTPHDKQVMMFSATLSKEIRPVCKKFMQDPMEIYVDDEAKLTLHGLVQHYIKLSEAEKNRKLNDLLDALDFNQVVIFVKSVSRAAELNKLLCECNFPAISIHSGMTQEERLTRYKNFKEGHKRILVATDLVGRGIDIERVNIVINYDMPDSADSYLHRVGRAGRFGTKGLAITFVSSASDSDVLNQVQERFEVDIKELPEQIDTSTYMPS

SEQ ID NO: 129800 - protein, 417 aa, Oryza sativa
  unsure (1)..(417): unsure at all Xaa locations
  Clone ID: PAT_MRT4530_32021C.1.pep
MGEAEVKDNEVYEEDLVDYEEDVETPLDVGAAAANASADVVKTPLPTSSLPPRPLRLPSTGLLSPASRHPRPKPRLRRTRLTRRITSTTRRRSSPPPTDPVAGQVGAPVLSQRXDLAYPICRELERFSXYPPEVKVAVFYGGVHIKKHQDLFKNECPHIVVGTPGRILALAREKDLSLKNVRHFILDECDKMLDSLDMRRDVQEIFKMTPHDKQVMMFSATLSKEIRPVCKKFMQDPMEIYVDDEAKLTLHGLVQHYIKLSEAEKNRKLNDLLDALDFNQVVIFVKSVSRAAELNKLLCECNFPAISIHSGMTQEERLTRYKNFKEGHKRILVATDLVGRGIDIERVNIVINYDMPDSADSYLHRVGRAGRFGTKGLAITFVSSASDSDVLNQVQERFEVDIKELPEQIDTSTYMPS

SEQ ID NO: 129801 - protein, 306 aa, Oryza sativa
  Clone ID: PAT_MRT4530_32022C.1.pep
MNYIVGAFKPPCDISIAFSDARSRKQIAVKNDNGRTVMVPVFQSLETISGEVSVVPVPGKRIEHLGVKIELLGQIELYLERGKFYDFTSLVRELDIPGEIYEKKTYPFEFSTVEMPYESYNGTNVRLRYILKVTISRNIMGMGSIVEFREFCVRNYSPAPTINNSIKMEVGIEDCLHIEFEYSKSKYHLKDVIIGKIYFLLVRIKIKNMELEVRRRESTGAGSSAYVETETLAKFELMDGAPVRGESIPVRLFLTPYELTPSYRNINNKFSVKYYLNLVLVDEEDRRYFKQQEITMYRLLETPQAS

SEQ ID NO: 129802 - protein, 132 aa, Oryza sativa
  Clone ID: PAT_MRT4530_32023C.1.pep
MAEAEVKDNEVYEEDLVDYEEEVENGTDGGANAANASADVVKKGYVGIHSSGFRDFLLKPELLRAIQDCGFEHPSEVQHECIPQAILGMDVICQAKSGMGKTAVFVLSSLQHIDPVAGKVGALVLCHTRELA

SEQ ID NO: 129803 - protein, 293 aa, Oryza sativa
  Clone ID: PAT_MRT4530_32024C.1.pep
MVGMMETSPDDGGGGEAMAAAQQTEEDMGPPWLRPLLSTSFFVACASHPELSKNECNLFCLGCTGDALCAYCLPAHRDHHVVQIRRSSYHNVIRVSEVGKLIDISHVQTYVINSAKIVFLNGRPQARPGKGVTNTCEICCRSLPDSFRFCSLGCKLATLHLDLCRPWHLSLEVSLANMTAQGGVQQANETFSMESLGGMRWDPSLTFAIRPKRGQDSGDGGSGSDYDSFSPKKARRAAAGYDQLGRFDRGMIRWSDDEGSKSNTAPITPTTPPISRCRPSRRKGIPHRAPFYG

SEQ ID NO: 129804 - protein, 123 aa, Oryza sativa
  Clone ID: PAT_MRT4530_32025C.1.pep
HEGLLQSDIKAALKTAFANMDGPLLVTDWCRGRSNAAEYASMGDAYSFQHPTGDIRESSSSISIGGDSMSPPQSSHVISNDRGTSELEHHRGYHRVRPTVAVLPLPSLLVGYQDDWLKTSANC

SEQ ID NO: 129805 - protein, 121 aa, Oryza sativa
  Clone ID: PAT_MRT4530_32026C.1.pep
SCNTKVLDSNPQQVNNNEQYVNLKEDIVAGELLRCMGWPPPPQPPPPFVRIWEGWVGVASPHSRRRHVPLPSARSERGGVEGRGSDVASGCHRRRVVVVVGAVADALCPRRCRPSPPVPSP

SEQ ID NO: 129806 - protein, 65 aa, Oryza sativa
  Clone ID: PAT_MRT4530_32027C.1.pep
MHAIRAHHHVSQPIDAAVLPSAEPDTACHVVVRFPPAPPAHGKNGQLEIAGRMARSSKPYKVANK

SEQ ID NO: 129807 - protein, 81 aa, Oryza sativa
  Clone ID: PAT_MRT4530_32028C.1.pep
STFRMRFSVFMLRDQRTCLQLGLFLIRCVFLWCVGLVSHGAFLASSTKRTCYLIYCSQPRACSRHASVAGVLQHGMCYISM

SEQ ID NO: 129808 - protein, 70 aa, Oryza sativa
  unsure (1)..(70): unsure at all Xaa locations
  Clone ID: PAT_MRT4530_32029C.1.pep
RMSRWGPPPPAGEMRGGGVXKCCLSRTRAWXRRFGTGRRRRFRFPCPASLQLFLTPVWLSIGGDKKIFFF

SEQ ID NO: 129809 - protein, 400 aa, Oryza sativa
  Clone ID: PAT_MRT4530_3202C.1.pep
MGEGASSSGVPHSSSRGGPPPTLTPGGTGCRAFVASLRNVRWPPKFHPNLTEKYDGSINPSEFFHIYTTIIVAAGGDDRVMANYFPMALKGQARGWLMTQPPDSIYSWEDLCQQFVTNFQGTYPRPGEEADLHAVRRKDDESLCSYIQRFCQVRNTIPCIPAHAVVYAFRNGLQHNRMLEKIAFKESKTTAELFELADKVARKEEAWAWNSPGIGAAAAATPESIPRSKRLSIISPAAFDALKAPGMKLQPSLLIIGVTPGHTWPLGHVELLVTFGDSTNFRTERIDFDVADLNLPYNAVLGRPALVKFMAATHYAYLQMKMPGPSGPITVFGDVKVALACAEQRADNLAVATEPQALEASASRASKKHLTSADEVPVKEIPLGDDPSKTAKIGGTLDAK

SEQ ID NO: 129810 - protein, 125 aa, Oryza sativa
  Clone ID: PAT_MRT4530_32030C.1.pep
MDGTGRCQADMESRRELGSPTAMDGTGECLASCVEDGATGCLGIASRFRSLARELGSPAAAGQVNAVVDDLAEDLLTGRIPLARTKSRRWRKLGGRGMPDLWRTRYAEKGMSIFGRKSRDPVGEK

SEQ ID NO: 129811 - protein, 79 aa, Oryza sativa
  Clone ID: PAT_MRT4530_32031C.1.pep
IRIKGHKRVEHDAEWAIRWRNHGQGSNAQRLSRGQPSSLTGARKKEPPLTFARYGYRNIRPHGPKEKEGGGTGGTGEEL

SEQ ID NO: 129812 - protein, 30 aa, Oryza sativa
  Clone ID: PAT_MRT4530_32032C.1.pep
IMKEKFISIYIHAKVSACGHIMSEYREALF

SEQ ID NO: 129813 - protein, 644 aa, Oryza sativa
  Clone ID: PAT_MRT4530_32033C.1.pep
MAITKVLGSKPADCFQFQDPNSWTCMTELVSDVVVEVGDFSFHLHKFPLMSRSGTLQKLISEAAAGADDGEPCSVKLHDVPGGAAAFELAARFCYDVRAELDAGNVVALRCAAEHLGMTEDHGGEGNLVEQAEAFLRDVLGSWDDALRALRSCDGALLPLAEELLVVPRCIDALASKACADPTLFGWPMVEYYTARGLEETVMWNGIATAGKPRSPGPDWWYKQASSLKLPVYKRLITAMRSKGMSPENIAGSLTHYAKRHLSGLTRHSGYVGGGGASGTVLSDVEQRALLEEIVALLPVERGVATTRFLLGLLRTATILNAGAACRDALERMAGNQLEEAALEDLLIPNTGYAVETLYDVDCVQRMLEQFVAANTSAFAASPEITDEAQLVDGPSGELMPISTVAKLVDGYLAEVATDTNVKLSKFQSIAELVPDYARAIDDGIYRAIDIYLKAHSWLTASEREQLCRLMNCQKLSLEACTHAAQNERLPLRVVVQVLFFEQLRLRTTVAGWFFVADNVDQGSPIAAGRYAPERSGELDFGAGPPEEEDGDDDDDEARNNVRSSSSATMSVDDIRQRVVELEEECSSMREEIHRIGKPKGALSRLFRKLGLGGRSAARRQQQQPPPPPTSSGDERRKSMSLEC

SEQ ID NO: 129814 - protein, 148 aa, Oryza sativa
  Clone ID: PAT_MRT4530_32034C.1.pep
MYGDTEPAAAAAAERTAFRRAEKQYKLYKPLKPKGGRARSKPGGGGGGGGLEDLSAVVDFHALLAAAAGGGGELPAGIGRRDVAGFDLFCFLDRPGFYFIPGALSIEEQCYWIRESLKTFPQPPNRTNLTALYGPIFDLLTAAKVERF

SEQ ID NO: 129815 - protein, 38 aa, Oryza sativa
  Clone ID: PAT_MRT4530_32035C.1.pep
FGGFKLLRCIPFITLYQYHTLLKHESTHMIGTDYQVYM

SEQ ID NO: 129816 - protein, 101 aa, Oryza sativa
  Clone ID: PAT_MRT4530_32036C.1.pep
FLSFSLSRFASIKSTDSLEDLKQASLVWSRDHNSFISADESHHGIRNIEEKLTILQVNKITALKRDSALVLHLLCSRLWKGHEAELDMMPFYRPQRCVVML

SEQ ID NO: 129817 - protein, 88 aa, Oryza sativa
  Clone ID: PAT_MRT4530_32037C.1.pep
GLKRSETIGIGSISSETMLNRPVIDHIYHLNYSVLTLIRCRKNCEKTKFKNSQKRYGQKRYTIYGNGTRSIGNSYAEHDRDIAKVISI

SEQ ID NO: 129818 - protein, 69 aa, Oryza sativa
  Clone ID: PAT_MRT4530_32038C.1.pep
ICIQYAISLLLATVSWFCHIACQWYMCRWLVAWLQHLGVIGSACGCDEYGTHRRVVLHCKVIAVVGVNE

SEQ ID NO: 129819 - protein, 57 aa, Oryza sativa
  Clone ID: PAT_MRT4530_32039C.1.pep
SIQFTLINREEKKSSLNMLKREVIQLWIRNDKISPTPNISVFHSKFSFFHSYTKWRL

SEQ ID NO: 129820 - protein, 1068 aa, Oryza sativa
  Clone ID: PAT_MRT4530_3203C.1.pep
MVEVLEEEVVAFTPTPSGSEDASESRGPRHRRRNSSTPPRCEPSRRGDPTYSGGSGLSPLPGGGRPPRVGARRRLTYGDGGSPRGALQAAGALLRHPPVNSEPETPIQRWLDDVANLVTTAQRQLAAGGRPAVTGTSRTPITLSSSARRRARRSAMASRRSTAPTSMGASGSRRRHDGLYGEQDARINIERRRDERRALRMGEGASSSGVPRSSRGGPPPTLTPGGTGCRAFMASLRNVRWPPKFRPNLTEKYDCSINPSEFLQIYTTVIVAAGGDDRVMANYFPMALKGPARGWLMTQPPDSIHSWEDLCQQFVTNFQGTYPRPGEEADLHAVRNTIPCIPAHAVVYAFRNGVRHNRMLEKIASKEPKTTAELFELADKVARKEEAWAWNSPGTGAAAAATHESAPALSGEIGEETVATLDGGRGACAHTSRRGFKAMRRELLAAVPTHEAARKARWLEVKLTFDQSDHPTVLARGGKLALVVSPTIHNVRMKRVLVDGGASLSIISPAAFDALKAPAMKLQPSLPIIGVTPGHTWPLGHVELPVTFGDSTNFRTERIVFDVADLNLPYYAVLGRPALVKFMAATHYAYLQMKMPGPSGPITVFGDVKVALACAEQRADNLAVATEPQAPEASASCASKKRLTSADKESTLVFFLRAHSDVFAWKPSDMPGVPREVIEHRLAVRPDARPVRQKVRRQALERQAFIREEVVRLLEADFIREVIHPEWLANPVVVPKANGKLRMCIDYTDLNKACPKDPFPLPCIDQIVDSTAGCDLLCFLDAYSGYHQVRMAREDEEKIAFITPVGTFCYTTMPFGLKNAGLTFQHMTRITLSNQIGRNVEAYVDDLVVKTRHQDTLLQDLAETFDSLRSTRVKLNPDKRRSHADFGKRGRPQIRRSARLPSYEQHGGIWRNNVLKKHGDSWLEELLAVLWANRTTPSCATGETPFFLVYGAEAVLPSELSLGSPRVALYNEANQDELRRDDLDYLEEWRRRAALRAARYQQSLRRYHQRHVRARSLQVGDLVLRRVQSRLGLSKLSPMWEGPYKVIGVPRPGSVRLTTEDGTEFPNP

SEQ ID NO: 129821 - protein, 115 aa, Oryza sativa
  unsure (1)..(115): unsure at all Xaa locations
  Clone ID: PAT_MRT4530_32040C.1.pep
DHASADAFVDYSDEYRVVTSKAHSVGGAHCTIADALEITEYLNSDLYLDKYDSQCHXYANVTDDLIDMYYTDXIITSSFYXIDGSKVTVVYSEXHIAFTLLELYRSVHVIEDFHS

SEQ ID NO: 129822 - protein, 97 aa, Oryza sativa
  unsure (1)..(97): unsure at all Xaa locations
  Clone ID: PAT_MRT4530_32041C.1.pep
AAAVVVHGRRXIARAXXASPAGVCDCGAAAGGAGDGGRSGHDDEDSFXHRXXRRPPLPSXXVAAAAASLIPXSRRRRSRASPMVHLRRSXPPPLDLL

SEQ ID NO: 129823 - protein, 133 aa, Oryza sativa
  Clone ID: PAT_MRT4530_32042C.1.pep
MPGTDRRSQGFRDAADSGFILDEGVDVGASNAKPTKTRRRRHRHLHPRRRRRRRQQREDNNDETPPPPASSSSTTTTTMAAPTTRRQRRKKAAATGFIILDDVTKAPPTSSSMTTRRRRVNLPPVKMSSTCKS

SEQ ID NO: 129824 - protein, 55 aa, Oryza sativa
  unsure (1)..(55): unsure at all Xaa locations
  Clone ID: PAT_MRT4530_32043C.1.pep
SHQNYQGXNINCQYQHPSPQVQYQQGGLTQPQFASQYNQFEPIQQQSQGAAQQRP

SEQ ID NO: 129825 - protein, 480 aa, Oryza sativa
  Clone ID: PAT_MRT4530_32044C.1.pep
MAAAAAAAVGARGGIRRRPNLSLLADRCATPRALAAVHAAMLVSGRLADDAFAASRLLAAHAALSPPGAVLRLLASLPCAPNSFMLNITLRALASSPDPASALRFFSLLRRGSGGGGGSYSPGRHTFTFLLKASARLPLRASEQLHALAVRHGLERDAYVANGLVRAYSLAGLVPLARRVFDGLPERSAVVCTTMVSGYAQNGMHEDAMRSFEEMVGDGIEPHGAALASVLSSCARSGSRGLEMGRRVHELMESRRVTAPVVGAILGTALVDMYAKTGAMEEATAVFDRMPERQTATWNALITGLAHHGHGEVALATFHRMRRDGVPPNGATLVGVLSAYGCTGRLDEARRVFASMEKDFAVAPTIQHYGCMVDLLGRSGLLTEAEEMIRGMTTCDADTVIWGALLNACKNHGDIDVAERAVQEMLKLDPGNHGVYVVLSNMYAEAGRWQDVDRLRKVMKRARLSKIPGSSSVDGSLPCH

SEQ ID NO: 129826 - protein, 644 aa, Oryza sativa
  Clone ID: PAT_MRT4530_32045C.1.pep
MATTAAAAAAALSAAATAKTGRKNHQRHHVLPARGRVGAAAVRCSAVSPVTPPSPAPPATPLRPWGPAEPRKGADILVEALERCGVSDVFAYPGGASMEIHQALTRSPVITNHLFRHEQGEAFAASGYARASGRVGVCVATSGPGATNLVSALADALLDSVPMVAITGQVPRRMIGTDAFQETPIVEVTRSITKHNYLVLDVEDIPRVIQEAFFLASSGRPGPVLVDIPKDIQQQMAVPVWDTSMNLPGYIARLPKPPATELLEQVLRLVGESRRPILYVGGGCSASGDELRWFVELTGIPVTTTLMGLGNFPSDDPLSLRMLGMHGTVYANYAVDKADLLLAFGVRFDDRVTGKIEAFASRAKIVHIDIDPAEIGKNKQPHVSICADVKLALQGLNALLQQSTTKTSSDFSAWHNELDQQKREFPLGYKTFGEEIPPQYAIQVLDELTKGEAIIATGVGQHQMWAAQYYTYKRPRQWLSSAGLGAMGFGLPAAAGASVANPGVTVVDIDGDGSFLMNIQELALIRIENLPVKVMVLNNQHLGMVVQWEDRFYKANRAHTYLGNPECESEIYPDFVTIAKGFNIPAVRVTKKSEVRAAIKKMLETPGPYLLDIIVPHQEHVLPMIPSGGAFKDMILDGDGRTVY

SEQ ID NO: 129827 - protein, 68 aa, Oryza sativa
  Clone ID: PAT_MRT4530_32046C.1.pep
MMCGKEEKLLGVQKAPGSCPYCGGGVAATDVEAKWVLCFLPLCLNNKRRFSCTACNRRLVSYPAIVHD

SEQ ID NO: 129828 - protein, 98 aa, Oryza sativa
  Clone ID: PAT_MRT4530_32047C.1.pep
PPQSFTSLGGHFHFFFVHHHPHTHFHSVTIHSEASFSALHFAASRGQVLWLHHLRQMQGHRSSSPLIYSSRVRACAPSIIAGKPLAITSDMGMATDII

SEQ ID NO: 129829 - protein, 80 aa, Oryza sativa
  unsure (1)..(80): unsure at all Xaa locations
  Clone ID: PAT_MRT4530_32048C.1.pep
LPSATTHVVRXLRRVDNHVGGGARRRRRAPHPPTNRRRVPPPLLVGAGPGILPGGTTITQLGGRWGLHNNVLXXXLALSP

SEQ ID NO: 129830 - protein, 507 aa, Oryza sativa
  Clone ID: PAT_MRT4530_32049C.1.pep
MAALRVGTRAVEGRFQASNGGGGGGGGMAPSSRLVAAHREAKPRSSHSAAPWKLPRRRAGAMPLWRVAVFASVALNVATLALLLHHYATSPPPHHHHHDAGLATRSSDAAVHRRARTASSMAPSTGKPAVTTDSVINLDHGDPTMFEEFWRETGDAAEVVIPGWQTMSYFSDVTNVCWFLEPELDRQVRRLHRVVGNAAVDGYHVLVGTGSTQLFMAALYALAPDAAAAAAGEPISVVSTAPYYSSYPAVTDFLRSGLFRWAGDADAFKGDSYIELVCSPNNPDGAIREAVLDPKTGNGRTVHDLAYYWPQYTPITKRASHDIMLFTVSKSTGHAGTRIGWALVKDRAIARKMTKFVELNTIGVSKDSQMRAAKVLAAVSDGYERRPEQTKETMTTPLRLFDFGRRKMVERWSMLRAAAAASGIFSLPEETSGFCNFTKETAATNPAFAWLRCDREDVEDCAGFLRGHKILTRSGAQFGADARYVRVSMLDRDDAFDIFINRLSSLK

SEQ ID NO: 129831 - protein, 83 aa, Oryza sativa
  Clone ID: PAT_MRT4530_3204C.1.pep
NAGRGGTAGISGCRRRCAVTGHCYLKHTNGHADNWAFYTVRLSLHLGLLAGERGGCIIADLTRIGKRFPDSMLKTIPMWCCDS

SEQ ID NO: 129832 - protein, 174 aa, Oryza sativa
  unsure (1)..(174): unsure at all Xaa locations
  Clone ID: PAT_MRT4530_32050C.1.pep
MHFWQLHHSQKLRRLWPKSGDDYLLGSSSGLTGVEAERRIAKTMTATMHWYQRCPDLRRALGLIAHTDSGXMLQSIVVYHRAVVNRDRDRISLGYFLGPPXPDVKVAPLTDAVSPGRSAAYRAVTWPGYKAVRKKAFTTGGSALKMISTAAATDDRTQRRNRRCRDVKFTPNLS

SEQ ID NO: 129833 - protein, 50 aa, Oryza sativa
  Clone ID: PAT_MRT4530_32051C.1.pep
PAEGDAGALAAGDVSGGAVKDRDDRRGNMGVQRVLGEKWWRPGNGLALRC

SEQ ID NO: 129834 - protein, 152 aa, Oryza sativa
  unsure (1)..(152): unsure at all Xaa locations
  Clone ID: PAT_MRT4530_32052C.1.pep
MARHFGPTQTRHGLTEVGPVPARPDHRAMPGPLHQHVGLARHGTMGRQPGPIGGRKIDLILKKARWATCAFGPARHGPPAGPTAGGPCLGGRSSPWARTARHEXPDCGPGLMAGAWWTRPCRAGLLAIYIHARRSHDFFKQPSQPNTLARRR

SEQ ID NO: 129835 - protein, 40 aa, Oryza sativa
  Clone ID: PAT_MRT4530_32053C.1.pep
VWSQITPTFLFNFHYFYFRRIMYEMHLMYATTLYNVYVKK

SEQ ID NO: 129836 - protein, 127 aa, Oryza sativa
  unsure (1)..(127): unsure at all Xaa locations
  Clone ID: PAT_MRT4530_32054C.1.pep
MLALIAQAIETGYLLRRTRXKTRKYNCLNXALSLIGNGNYPNLGPCXAQVMLYRLYWLSASSTLINFILCFLPIRYSADAQSNSKFSSIQXQIHFDLLPSTLNLMTNSIVNTCPPPNFCFKMSLPPP

SEQ ID NO: 129837 - protein, 130 aa, Oryza sativa
  Clone ID: PAT_MRT4530_32055C.1.pep
MWDPSSLPQELTNGERGDSRRTCLREAATAVGAYIDELLALEACARQATAVRWALSSDNGGGTPSYHGSAASTLSRLNEDVEVSDTQILFKNCGKGGNSGTDFEMHCDTAFAHMEANIGGSNGGFYGTSY

SEQ ID NO: 129838 - protein, 118 aa, Oryza sativa
  unsure (1)..(118): unsure at all Xaa locations
  Clone ID: PAT_MRT4530_32056C.1.pep
RRRARRSATASRRSTAPTSSGASGSRRHHDGLYGEQDAXRRRDERRAARMGEGASLFGVPHSSSXAPPDSIHSWEDLCQQFITNFQVTYPHPGEEADLHAVQRKDDESLCSYIQRFCQ

SEQ ID NO: 129839 - protein, 1724 aa, Oryza sativa
  unsure (1)..(1724): unsure at all Xaa locations
  Clone ID: PAT_MRT4530_32057C.1.pep
MVEVLEEEVVVHTPTPSGSEDASGSRGPRHHRRNSRTPPRRDPSRREDPTRSGGSALSPPPGGGKPWRIGARRRLTYGDGGSPRGALQAAGALLRHPPVNSEPETPVQRWLDDVANLVTTAXRQLAAGGRPTTTSTSRTPTTLSSSARRRARRSATASRRSTAPTSSGASGSRRHHDGLYGEQDAXKRRRDERRAARMGEGASLFGVPHSSSRGGPPPTFTPGGTSCRAFVASLGNVRWPPKFRPNLTEKYNGSINPSEFLHIYTTIIVAASXGGDDRVMANYFPMALKGQARGXLMTQPPDSIHSWEDLCQQFITNFQVTYPHPGEEADLHAVQRKDDESLCSYIQRFCQVRNTITCIPAHAVVYAFRNGVRHNRMLEKIASKEPKTITELFELADKVARKEEVWAWNSPGTGAAAAAAPESAPHSKRRDRRGKRKPVRSDDEGHVLAADGPSRAPRKEKATGDRPSSTATSGEGRSADKWCSVHNTYRHSLADCRLVKNLAEXFRKADEEKRQGQREGKAPASPANDRRGEAKKKAPADDDDDGTVATLDGGACAHTSRRGFKAMRRELLAAVPTHEATRKARWLEVKLTFDQSDHPTAQGMKLQPSLPIIGITSGHTWPLGHVELPVTFGDSTNFRTKRIDFDVADLNLPYNAVLGRPALVKFMAATHYAXLQMKMPGPSGPITVFGDVRVALACAEXRADNLAAAMEPQVPEASASCASKKRLTSADEESALVSFLRANSDVFAWKPSDMPGVPREVIEHHLAVRLDARPIRQKVRRQTPERQAFIREELTRLMEAGFIREVIHLEWLANLVVVPKANGKLRMCIDYTDLNKACPKDPFPLPRIDQIVDSTSGCDLLSFMDAYSRYHQIRMAREDEEKXAFITPVGTFCYTTMPFHLKNACPTFQRMTRITLSNQIGRNVEAYVDDLVVKTRHQEMLLXDLAETFDSLRSTRMKLNPEKCVFGVXRANSSPGAPMTGDGPSSPDGSLPEAPXPREGPEAPGGGREALAGGPDAYNPDMARDTPEAPKHGHPGPAAPNNKDRPHRKVQRPVYFVSEALRNAKTRYPQAQKMLYAVLMASRKLRHYFQAHRVSVVMSYPLSQILHNREGTGRVEKWAIELAEFDLHFEPRHAIKSQVLADFITEWTPVDDPVASNAPPLLGDGGDPNANIRAGHWVMHFDGSLNLQGAGAGVTLTSPSGDVLQYVVRLDFRATNNMAEYKGLLAGLRAAAGMGIRRLLVLGDSQLVINQVSKEYQCTDPQMDAYVREVRRMECHFDGLKLRHVTRRDNAVADELSHIASARAPLSPGTFEERLAQPSLGPGATVSAPIPDDPWASGPKGVGPDPPSQVVWMTDIQAYLDDNTLPEDRAEAEKLARISKRYVLVEGTXYRRGANGILLKYISREQCVELIADVHQDILGPFKAARGGYQHLYVAIDKFTKFPEAYPVVKIDKHSALKFXRGITSRFGVPNRIITDNGTQFTRELFGDYCDDMGIKLCFASPTHPKSNGQVKRANAKILKGLKTKTYNVLKKHGDSWLEELPAVLWANRTTPSRATGXMPFFLVYGAEAVLPSELSLGSHRVALYDEANQDDLRRDDLDYLEERRRRAALRAAPYQQSLRRYHQRHVQARSLQVDDLVLHRLQSRLGLSKLSPMWEWPYKVIGVPRPGSVRLTTEDGTELPNPWNIEHLRRFYPXVARLLLSXELGPTPAHPLACAGLAGGYHC

SEQ ID NO: 129840 - protein, 121 aa, Oryza sativa
  Clone ID: PAT_MRT4530_32058C.1.pep
SEEAATAEPYMDRSRHTSGWIDRHTWGCAYLLLSEFELPPSAGVPAEGARSAGVGSSLSLGLALSGLDSIPGKWMPRTHTLLFARIDHRNSWRGFLRLGGRSSWKITAWNGHRRRRRRITG

SEQ ID NO: 129841 - protein, 113 aa, Oryza sativa
  Clone ID: PAT_MRT4530_32059C.1.pep
HASQFSAFAVCRICFGVLRPFVLGCAASLSPFHVFSVVLCLLGGFLLCPGCVAVPAVVEPGTRGSCCCSARYWLRFGLSSVFSRSRGERLWAIRAFVRVLRVLLTGPGVCGIS

SEQ ID NO: 129842 - protein, 47 aa, Oryza sativa
  Clone ID: PAT_MRT4530_3205C.1.pep
TISQCSAAYGFGWAFRKLRIVGEPRTMCLCYPMTSPVTVVVCLSLSS

SEQ ID NO: 129843 - protein, 59 aa, Oryza sativa
  Clone ID: PAT_MRT4530_32060C.1.pep
SKVSGIARQHRAPAHLGPAQCCLTCAELFLGRAERLRITSVLIPPAPSRIVGHGRTRGR

SEQ ID NO: 129844 - protein, 485 aa, Oryza sativa
  Clone ID: PAT_MRT4530_32061C.1.pep
MTSSSGQLKRLKPLYQLAVNNILAVVAVPLAAAVVLKAAELGHEEILARARALPPAHLFLAAFVPAAAAVVYLMLRPRAVYMVDYACFRTSPNCRVPFATFLEHSRVWPGFEERSVRFMTRLLERSGLGEETCLPYAQHYIPPSRDLESSRAEAELIIFSAIDDLLAKTGISPQDIDILVVNCSLFAPTPSFTDMIINRYKLRKDVRNVHLSGMGCSAGLISVGLARNLLQVAPKGAHALVVSTETITPNYYMGQERAMLLPNCLFRMGGAAVLLSTNGAKARFRLARVVRTLTGAQDGAYHCVYQEEDGRGNVGINLSKDLMSIAGDALKANITTMGPLVLPASEQLLFALSFMARKVLSGRIKPYIPDFRTAFEHFCIHAGGRAVIDELQRSLTLSDEQVEASRMTLHRFGNTSSSSLWYELAYVEAKGRMRKGDRVWMIGFGSGFKCNSAAWECIRPAANADGPWATCIHRYPVDIPDVLKH

SEQ ID NO: 129845 - protein, 263 aa, Oryza sativa
  Clone ID: PAT_MRT4530_32062C.1.pep
MKVMTLRRGGAGAGIRIKKKARGFMCGGCGGSKAVSVSDGSDKQSPMATPPPNTSSTTTTTTTGSAGNKTTAAAGSSSFSPSYDYDYVDTDADTSVGSTPSVAALLRQLGELERSVRSLQGAVAEGRGAKNDGRGGGRRHRRTVSDGGGGGSGRVEESVAVVKESADPLFDFRRSMLQMIVEKEIVGGAELRELLHRFLPLNSPHHHHVILRAFAEIWEEVFAGYERTPDFLVSSRHRRPTKKKLPASYTAADDDDDDSWNAA

SEQ ID NO: 129846 - protein, 237 aa, Oryza sativa
  unsure (1)..(237): unsure at all Xaa locations
  Clone ID: PAT_MRT4530_32063C.1.pep
WRHVAPTCRRQAARTSGDDRMGEGRNGEPCSRPRRCHTPPSEASQPPPPXTPLPAVAAFPCSIKKICQLHLRYECRRLGQHVELVGGLLRELELAELMRREATRRPLERLQGALRPCCRRSRRPSTDDACSFSLPAARRWGRRGEKGREGREGGGRRKRTPHVLPGFTTNGSTSGIVNRERPHGKRKVPTGGFLVAKGESREKREEKGSGVAALRWLEGGDVGGHACSRASRIRGRQ

SEQ ID NO: 129847 - protein, 97 aa, Oryza sativa
  Clone ID: PAT_MRT4530_32064C.1.pep
MGRRPILSFFSPSSLSQAAPPPSSPGVADRWGPPVGSSPNLPPPAPVTTPPKTAAAAPHLSRFPRAHAASPAPTPRRRPLSPRLPAAPAHERGGIRF

SEQ ID NO: 129848 - protein, 887 aa, Oryza sativa
  Clone ID: PAT_MRT4530_32065C.1.pep
MAPAAHRDGAAEAVGQRVFHFGKGRSDGNKTMKDLLGGKGANLAEMASIGLSVPPGFTVSTEACQQYQAQKAMPAGLWDEILAALTWVEGNMGAVLGDPRRPLLLSVRSGAAVSMPGMMDTVLNLGLNDHVVAGLAHRSGERFAYDSYRRFLDMFGNVVMDIPHSLFEEKIEAMKAALGLRNDTELTARDLKELVAQYKNVYVEAKGEEFPSDPKKQLHLSVLAVFNSWDSARAKKYRSINQITGLKGTAVNVQCMVFGNMGDTSGTGVLFTRNPSTGERKLYGEFLVNAQGEDVVAGIRTPQDLDTMKDCMPEPYAELVENCKILESHYKEMMDIEFTVQENRLWMLQCRTGKRTGKGAVKIAVDMVNEGLIDRRSAIKMVEPRHLDQLLHPQFESPSSYGDKVIATGLPASPGAAVGQIVFTADDAEAWHAQGKSVILVRTETSPEDVGGMNAAAGILTARGGMTSHAAVVARGWGKCCVAGCSGIRVNDAEKVVLVADKVLCEGEWLSLNGSTGEVILGKLPLSPPALSGDLGEFMSWVDEVKKLKVKANADTPADALTARNNGAEGIGLCRTEHMFFSSDERIKAMRQMIMAETIEHRQIALDRLLPYQRLDFEGIFRAMDGLPVTIRLLDPPLHEFLPEGNVEDMVRLLSSGNVYTQEEILTRIEKLSEVNPMLGFRGCRLGISYPELTAMQARAIFEAAISMTEQGVKVFPEIMVPLIGTPQELAQQVDVIREVAEKVFANAETTISYKIGSMIEVPRAALIADEIAALAEFFSFGTNDLTQMTFGYSRDDVGKFLPTYLSKGILQNDPFEVFDQKGVGELVKVAVERGRKARPDLEVGICGEHGGEPSSVAFFAKVGLNYVSCSPFRVPIARLAAAQVML

SEQ ID NO: 129849 - protein, 162 aa, Oryza sativa
  Clone ID: PAT_MRT4530_32066C.1.pep
MASLGRSAGSSLAGGGSGRHLPLPSPALWQASTDQPDPASQAVDLGATCHSPHLDGQHDAPAPRQPVRCTSLGVVDTNAWSMEGEGPCDAIQVVRRTLGQQPPDLKWRGARERIEGDRGGEWKEVGSGGGHCQWWQRASWLAMVRWLAVVSRGFRLMASYPT

SEQ ID NO: 129850 - protein, 144 aa, Oryza sativa
  Clone ID: PAT_MRT4530_32067C.1.pep
MNIEPGKVQNSCHNNSQKGPNLISGDLATEGPRVAGIGGAKWPRRPGDGRTSCGGEAEDKRWGSWRASRRRGSVADRRCRGRVAGGKGVRWRGDLPEGGRGDLVRRHDAKEARRDGEVERVARRPDAEEAQCGRGCGGRGGHAR

SEQ ID NO: 129851 - protein, 38 aa, Oryza sativa
  Clone ID: PAT_MRT4530_32068C.1.pep
MVTATLCARRCQLRRRTSYPVHRSVSANHRRSSNSSHA

SEQ ID NO: 129852 - protein, 150 aa, Oryza sativa
  unsure (1)..(150): unsure at all Xaa locations
  Clone ID: PAT_MRT4530_32069C.1.pep
FLLSRPYAFGCVLRLRTSSDFEPGNSYGHFFPDPQYEHVQHIICCDSFATYAYDFNFSHPEGFSRHTDPAVVQIAFQYSVIEPVKHTSENETQSSTSNMFCLKRRLRIRTLQYRPAKNINEIYDSVDPETXLHILVHKVILISLDKELKR

SEQ ID NO: 129853 - protein, 518 aa, Oryza sativa
  unsure (1)..(518): unsure at all Xaa locations
  Clone ID: PAT_MRT4530_3206C.1.pep
MDWLTKFKGVIDCANRTVTLTNEKEETVVYKSPVALKQGISLNQIEVENSVVTEEKSWRKLEDIPIVCEYPEVFPEDLTTMPPKREIEFRIDLAPGTAPIYKRPYRMAANELAELKGTKVFFKIDLRSGYHQLRIREEDIPKTAFTTRYGLYECTVMSFGLTNAPAFFMNLMNKVFMEFLDKFVVVFIDEILIYSKSEEEHQQHLRLVLEKLQEHQLYAKFSKCDFWLSEVKFLGHVITAQGVAVDPSNVESVTKWSPPKTVSQIRSFLGLAGYYRRFIENFSRIARLMTQLLKKDEKFKWTAECDKSFGELKKKLVSAPILILPDPTKDFQVYCDASRHGLGCVLIQEGRVVTYASRQLRPHEGNYPTHDLELAAVVHALKIWRHYLIGNRCEVYTDHKSLKYIFTQPDMNLRQRRWLELIKDYDMSIHYHPSKANVVADALSRKSYCNALCTEGMCKELQQELEHLNLGIVEHGFVAALEARPTLVDQVRATQVNDPEIAELXKKNMRVGKARDFL

SEQ ID NO: 129854 - protein, 111 aa, Oryza sativa
  unsure (1)..(111): unsure at all Xaa locations
  Clone ID: PAT_MRT4530_32070C.1.pep
MGATFSGDAATTRGRRDSWRGAHVSSSGGAKSGSGSASSTSPLGLAMAPLPLAPSTVAEKTMAISTSTAIQLGTGIXFSGAIFQRCGFVSTGGGAHTGDGWIRAWRRACGV

SEQ ID NO: 129855 - protein, 321 aa, Oryza sativa
  Clone ID: PAT_MRT4530_32071C.1.pep
MAPFLVVFAVMAAAFASASGSGELTPDFYSETCPQALTTIKLVVGAAILKEPRMGASLVRMHFHDCFVNGCDGSVLLDDTDDMIGEKLAKPNNMSLRGFDVIDAIKVAVNTACLGNVVSCADILAVAARDSIVALGGSSYEVLLGRRDATTASIDDANDDIPNPFMDLPDLVDNFESHGLSLQDLVVLSGGHTLGYSRCLFFRSRLYNETDTLDPAYAAALEEQCPIVGDDEALASLDDTPTTVDTDYYQGLTQGRALLHTDQQLYQGGGGGDSDELVKYYGENPDKFWEDFGAAMVKMGNISPLTGDDGEIRENCRVVNQ

SEQ ID NO: 129856 - protein, 78 aa, Oryza sativa
  Clone ID: PAT_MRT4530_32072C.1.pep
TMATRKRAYLAPARSTLKIPLGHTVDDPGLTKIPLTALCVETQWADMFWVKDRDPDRLSSLAYNKLSRSYLNSLLQLL

SEQ ID NO: 129857 - protein, 87 aa, Oryza sativa
  Clone ID: PAT_MRT4530_32073C.1.pep
YVSAAEAAEREPCGGGAPRREEKERWRQVLVVGCLVALLLFAFLVLGRESASEVLQIANSKLSAMNGGFTTKNPSHGGGAAKHADEL

SEQ ID NO: 129858 - protein, 1555 aa, Oryza sativa
  Clone ID: PAT_MRT4530_32074C.1.pep
MLIYTFILYNPAGGEEERARERIIMASHVFMIRQETAPAQWWFLSLAFVGAAYAATVTLRFVAYLALCRCHRPKDDLRRRYGEWAVVTGPTSGIGRAMALELARHGLNLVLVGRDPAILREISGTVRSLHKVKTKTVVFDLSLVWTPDGDEPLRRLREAVEGLDVGVVVNNAGVAKPGAVYLHEADVEAWVRMVRVNMSAVTEVTAVVLPGMVSRGRGAIVNIGSAGSEYIPTLPLYTMYAATKRYVAQFSRSLHVEYASKGIHVQCQAPFFVDTRLMFRFEEAAGGVSLFTVTPDAYTARDNRTDIAVIAAIIMVIVLPRGGGNPGPNDKVFCFFHPKLPDPFFRCLSMDHQLRPNNEAAAAAGAAAGAPAGGAIVIPAAGAAAGAAAGGAVVVPHGPAAAALTIASVRTHVPVTLEMKNHNYTKWRTFFVAFLGKFALLLHIVGPIPPIHDAAWAQDDFAVLTALYYSIADDVLDIIMEPEQSAHALWLAAEDLFRDNKETRIIYLETEFRSLNQGDMTVTEYCRRLKTLADSLRDLGEPVTDRALVLNLIRGLSPRFSTQADLLPLQTSFPTFARARSALLLAEMRHTADSITTNTTALVATSDSSSGGRSFSNNGGGGGKGRGNGKGKRTGGGGGGSGGSSGGNGGSGGRNSNGSGGVPASSGNRAGGGGGGGDQTGSGNPRPPTGPWVVYPQWAAASWPTAPPQPWDLITVAGLLTPVLPPTWPPLMCFQTDNGREFLNSAILSFFDSHGIILRTTCPYTSQQNGKAERSIRSTNDIIRCLLFQAHMPGSYWAEALSAATYLLNRRPCQPIQFATPFERLFGISPSLDHLRVFCCLCYPNLSATAPHKLAPRSTSCVFLGYPHSQKGYRCLDLTTKRVLVSRHVYFDETIFPFSTAAAPSKSSSLDMDLSFQDDAPGQGVGPAAAHGQGAPAGGPPSPRPGPGARAPDHGPASPPSTPRPASPSAGLASPPTPRPAGPTLPGSPPDGPFSSTGPVGATSPSAGRIAAASPPPAGDDAPSSSASTCHPPGAPSESGALPRPAPGPHPMVTRAKTPLRSRRRTAPPCKLHAMRDEYEALVHNNTWTLVPRLPGVNIVTGKWVFKHKFHADGSLAQHKARWVVRGYSQQPGIDYDETFSPVVKLATIRVVLSLAISRGWPIHQLDVKNAFLHGNLEETVYCQQPSGFIDPVHPDYVCHLHKSLYGLKQAPRAWYQRFASYIRTLGFTPSASDTSLFIYMNGADMAYLLLYVDDIILTASSTRLLHHLTGRLHDEFAMMDLGDLYHFLGISVQRTPNGLHLSQRQYAVDLLQRAGMAECHPTATPYLTLTRPDLAYAVQQVCLHMHSPRDAHLALVKRILRYVKGSLDQGLFLHATTASTLTAYSDADWAGCPDSRRSTSGYCVFLGDNLVSWSSKRQAMVSCSSAEAEYRAVAHAVAECCWLRKLLDELCTPLRSATVVFCDNVSAVYLSANPVQHKRTKHIEIDIHFVREKVALGLVRVLHMPSSHQFADIMTKGLPVQLFQDFRSSLCVREPHVSTAGGVKDSIVSSIFGD

SEQ ID NO: 129859 - protein, 214 aa, Oryza sativa
  Clone ID: PAT_MRT4530_32075C.1.pep
MAGVMAIRASSTSAAGHPGELRLSHRSPERTREIEQGLGRDWVEGDAAAADGVADAGAGAGMTHLHFFFHEVFTAGPNGTTATVAPPARSGDGSSLGFVGVVDDMLREGADPASRLVGRAQGVTAGTSLAAADGAGAITTMLSLAFTEEGPYAGSTLQVFGRAVLGTVMERPVVGGTGKFRMARGHTLSRRVNSSDPDNLLVIEYDAYVTTSPI

SEQ ID NO: 129860 - protein, 149 aa, Oryza sativa
  unsure (1)..(149): unsure at all Xaa locations
  Clone ID: PAT_MRT4530_32076C.1.pep
TVAXPXTVYXHEXXXESWXXMXRVNXSAXTXVTAVVLPGMVXRGVRGAIVNIGSAGSEYIPTLPLYTMYAATKRYVAQFSRSLHVEYASKGIHVQCQIMMKSGKHKGIKLGVCMMLCMCMRAGAVLRGYEADVQVRGGGGRRIAVHGDP

SEQ ID NO: 129861 - protein, 119 aa, Oryza sativa
  Clone ID: PAT_MRT4530_32077C.1.pep
MRPDTSDGECCCCRSVGNDDGTTGGSTGSGTRSGNDDGTTSRGTGGSARGCSGLVVGTELMIHGEAAEEGIGKFGLSVEESERVARWHGVTATLRGGRSSPTRARPIFLPNTRQPLLLG

SEQ ID NO: 129862 - protein, 114 aa, Oryza sativa
  Clone ID: PAT_MRT4530_32078C.1.pep
PTRPHDHYEDERKVGRGEYSGVFKGINVTNDEPCVIHILKPVQKPEMKREIKILQNLCGGPNIGTLHNIVSDQHSKPPSLTSGYVNSSDFSALYPALTDSETRFYIHELLKALD

SEQ ID NO: 129863 - protein, 109 aa, Oryza sativa
  unsure (1)..(109): unsure at all Xaa locations
  Clone ID: PAT_MRT4530_32079C.1.pep
MAFNVFRLFMAANLVMLCVEXACSASPCSTTPTPPTPTPSTPTTTPSAFVRCTTYALKLGTREQDPSRLQGDRPDQGRPIVSEHRRHILALLILSMRTLGSYHSNGPTL

SEQ ID NO: 129864 - protein, 1058 aa, Oryza sativa
  Clone ID: PAT_MRT4530_3207C.1.pep
MRIQLAPRNPPPPAAPPVPPAVLAVPAAPAPAPAPVPVSAPASALSFAPASAARGPASGNGGWLPATPSGSRDHSSSSSSGTEPGTGETFVRLWMVNTRNGSRAAGEGSNGEERTDGGHPNSDSVNGPPPLPENPTLAQEKVAFATHQLQGPASAWWDNHMATRPPARYAPENVRTDAEKQEKFLAGLDDELTIQLISRDYADFEKLVDNAIRQEDQCNKMDRKRKVAQFRSNQGSHQRPRFTPGQQGGPTTMIVRQHRPLNSSSFHQGASGSQSHQGANLILLESKDLDVILGMDWLTKFKGVIDCANCIVTLTNEKGETVVYKSPVSPKQGISLNQIEVENPVATEEKSSRKLEDIPIVCEYPEVFPEDLTTMPPKREIEFRIDLAPGTAPIYKRPYRMAAKELAEVKKQVDEQLQKGYIRPSTSPWGAPVIFVEKKDKTKRMCVDYRALNEVTIKNKYPLPWIDDLFDQLKGAKVFSKIDLRSGYHQLRIREEDISKTAFTTRYGLYECTVMSFGLTNAPAFFMNLMNKVFMEFLDKFVVSEEEHEQHLRLVLEKLKEHQLYAKFSKCDFWLSEVKFLGHVITAQGVAVDPSNVESVTKWTPPKAMSQIRSFLGLAGYYRRFIENFSRIARPMTQLLKKEEKFKWTAECDKSFEELKKKLVSAPVLILPDQMKDFQVNCDASRHRLGCVLMQEGRVVAYASRQLRPHEGNYPTHDLELVAVVHALKIWRHYLIGNRCEVYTDHKSLKYIFTQPDLNLRQRRLLISYQCTLLIQAKGRIGDPFEFQYSLPSADRWPNREGQSDLGRHVASVCARFGGAWDKSLPYAEFSYNNSYQASLQMAPFEALYGRKCRTPLFWDQTGEHQMFGTEVLTEAEEKVRTVRERLRIAQSRQKSYADNRRRELTFEAGDYVYLRVTLLRGVHRFQTKGKLAPRFVGPYKILERRGEVAYQLELPSNMIGIHDVFHVSQLKKCLRVPEEQADSEHIDIQEDLTYVEKPVRILETSERRTRNKVTRFYRVQWSHHSEKKATWEREDELKAAHPHLFASSSESRGRDSV

SEQ ID NO: 129865 - protein, 829 aa, Oryza sativa
  Clone ID: PAT_MRT4530_32080C.1.pep
MAEERESFESQWAPSDVTEENLMEMVAHGVLPAKEIIGWRPAFGEAFPTPNTHEVVVFSHFFYGGFSLPTSRFFRGILNFYGISLHHLNPNSIVDIANFIHACEAFLGIRPHFALFRRIFLLKPQPNKSKPCVVGGAGFQLRGTLSQKYFSMPFKTSNKGWHANWFYVQNPEPALPEYSCLPSVYQDTWNSLPMGDEAAQAVELMERMLKLKEQGLQGEQITRHFIKSRLAPIKERSRTAYEFDGKHDPNREDPDSLDFKVMKERMYKIFSNAIVVSYSHLLPVVPYNAFNPPPPEFALMKSDPPIVQRRSPHRQTVQGSGGPKIWSESQPNTSNLAGQSDSRKRKLVLSDDEGDDGKKSGDKETPRKLPKQAIPKKKTSSRPMPKIRKSSRKPSDIDPSGKDSDPANMEMSSSKETGPTAKGHPSDSQPATDNVDSGDQPPTGNQSAEAETGASQEPPTGNQSETGPSQEIPEVDASPRRQDASNDSKPGSPAKAQGSTRPRPGIITGPMIGDKEEILWIRAAENSRPPILVKWWDDDLQPQGIVINRQKEDEEVCQLKKALGQATRIVNRIHLRNEAKTATLEKLVPHLGTLEAVRDQLYEAKEHAKKTEHDLRDRIAQLQESNFELSGSSKGKYKVCPTNWCSHLRNLQLTGVNIVQAAKMSQLEKQIQTLESDKAELARQRDSALKDVEVSDVPEESVSIEEDRKIKSQALFDVLVGKIKMLEGARDEVANAATPLVQAMFFNNNGPSRFDASEIFDKLRVAPDTYFKNIKEAGNGTSKEATLDLINDAQKAADKIAVDVVERFQDTDLRPTGPDSSDDEKTDTD

SEQ ID NO: 129866 - protein, 130 aa, Oryza sativa
  unsure (1)..(130): unsure at all Xaa locations
  Clone ID: PAT_MRT4530_32081C.1.pep
MVSNKGKLSVLILIIESELDVTVTMEDHHIDQVVYSSXERRQPXMRYTMNSLTRCQAGXVSARAWAHGAPGSTLDKQLRKDWCRQFVEIDDSLCMSSELKHMVGGIYRKLGATDGGHCMAKVLPGWRRGD

SEQ ID NO: 129867 - protein, 80 aa, Oryza sativa
  unsure (1)..(80): unsure at all Xaa locations
  Clone ID: PAT_MRT4530_32082C.1.pep
PRIPIDTNIGVSTSAADVIHAWALSNLSIKLDAIRGILSILSYNFPVVGVFYGQCSEICGANHRFMPIALEVTLXDSFKS

SEQ ID NO: 129868 - protein, 160 aa, Oryza sativa
  Clone ID: PAT_MRT4530_32083C.1.pep
MVCDSAVLNWQSHGFSGPGLRLIREGLKSKGTREKGLPPRRCHGSPVPPPPPTPCPSTCPSSSSLPHLAPLSSQALLLPPPPAPSPGVAPSSPDARPSSARLRSSSFPTRARSPTPLLIPPFTTHARAYSLARCSSFHPHCRSPLAPVPLLLPPLLPHWE

SEQ ID NO: 129869 - protein, 128 aa, Oryza sativa
  Clone ID: PAT_MRT4530_32084C.1.pep
MRRMGDRRCSALPTPFTSASPPDPQSSPRSTPPRCLVKVAVAISREGGRREQRRGRGRESSADRRMGVEAKVKWWRLGANEVVRSHPLALSPPSSRRFLLPYRRPHHVMLHAAELIGVPAKGVGSLVG

SEQ ID NO: 129870 - protein, 118 aa, Oryza sativa
  Clone ID: PAT_MRT4530_32085C.1.pep
VNPIICTAEPGDGRRRRRRPEETAAGWFPHSSPHLTRSPPNFCLPNHRRNGGPSAPAPPARSPPRLLRPCQSCRRLHRGEGRCWDQRRDRVEAAELRGEVQVVWPLRGRCRCPLTPQQ

SEQ ID NO: 129871 - protein, 95 aa, Oryza sativa
  unsure (1)..(95): unsure at all Xaa locations
  Clone ID: PAT_MRT4530_32086C.1.pep
LLDGFMRVALYFHSLSLAFPLFRHACGCVRKWMLISXVLALGFGVWLGNFAGVVHQLLSSWKVFLYLFSPLCIPRVFYSHILQGSCACVGEACPV

SEQ ID NO: 129872 - protein, 81 aa, Oryza sativa
  Clone ID: PAT_MRT4530_32087C.1.pep
KPPAFKGARKSSRLKDLKLEPGFCVPLPVVFLKKQLLKGKFIPPVSRVHFPKLSPLMAPQFFCHRGFPSFKAQDQTLTLIL

SEQ ID NO: 129873 - protein, 52 aa, Oryza sativa
  Clone ID: PAT_MRT4530_32088C.1.pep
VVPPIIPGCVSLSPCLVLGSFPAFQCTLGVAPLCPSLIAVISNSIKLVVFLG

SEQ ID NO: 129874 - protein, 68 aa, Oryza sativa
  unsure (1)..(68): unsure at all Xaa locations
  Clone ID: PAT_MRT4530_32089C.1.pep
VGRTLKTNAWFRYFRIRARCAILNSYSVNPRXKSHTQLVDDCWKQILAALSKLERPKMRTPLCRIKNT

SEQ ID NO: 129875 - protein, 1664 aa, Oryza sativa
  Clone ID: PAT_MRT4530_3208C.1.pep
MATWGLASLTWRVEASGGTADHACQEAAYLMMARLRERHNYIFHDTAYRYHPSRANGDGVSSFRPTAGENDTTFGHMCAVMRGLDRMHSDLHKATKALNDGKLMRIVALKDEIARLKKENAQLKGLPAPGGVRIRTTPRKRTTAPVRIQLAPRNPPPPAAPAAPAVPAVPPAPAPAPAPAFTLSFAPASAARGPASGTGGWLSATPSGSDETDLSGSRSRSEGPGCLFGMVYTRTGNRTTGEGSNGEERADGVHPNSDSGNGPPPLPENPTLAQVMAHQTQMMAAMMQQMQQQHQQMHQRMMQHAEQQHQQFGPPPPQSKLPEFLRVRPPTFSSTTNPMEANDWLHAIEKKLNLLQCNDQEKVAFATHQLQGPASAWWDNHMATRPPGTEVTWAEFCRSFRKAQVPDGVVAQKKREFRALHQGNRTVTEYLHEFNRLARYAPEDVRTDAEKQEKFMAGLDDELTNQLISGDYADFERLVDKAIRQEDQRNKMDRKRKAAQFRAHQGSHQRPRFTPGQQGGPTTMIVRQHRPFNPSNFHQGSSGSQNHHGSQPNRGTAPRPPMAPAQSGQPAQAKKETGAKPGSCFNCGELGHFADKCPKPRRAGPRFIQARVNHASAEEAQAAPEVVLGTFPVNSIPATVLFDSGATHSFISKKFVGMHGLIREELSTPMRVHTPGNSSTSVQFSPSITIEIQRSPFLANLILLESKDLDVILGMDWLTKFKGVIDCANRTVTLTNEKGETVVYKSLVSPKKGASLNQIETKIPVDTEEKNLRKLEDIPIVCEYPEVFPEDLTTMPPKREIEFRIDLAPGTAPIYKRPYRMAANELAEVKKQVDEQLQKGYIRPSTSPWGAPVIFVEKKDKTKRMCVDYRALNEVTIKNKYPLPRIDDLFDQLKGAKVFSKIDLRSGYHQLRIREEDIPKTAFTTRYGLYECTVMSFGLTNAPAFFMNLMNKVFMEFLDKFVVVFIDDILIYSKSEEEHEQHLRLVLEKLKEHQLYAKFSKCDFWLTEVKFLGHVITAQTKDFQVYCDASRHGLGCVLMQEGRVVAYASRQLRPHEGNYPTHDLELAAVVHALKIWRHYLVGNRCEVYTDHKSLKYIFTQPDLNLRQRRWLELIKDYDMSIHYHPGKANVVADALSRKSYCTALCIEGMCEELRQELEHLNMGIVEHGFVAALEARPTLVDQVRAAQVNDPEIAELKKNMRVGKARDFLEDEHGTIWMGERLCVPDDKELKDLILTEAHQTQYSIHPGSTKMYQDLKEKFWWVSMRREIAEFVALCDVCQRVKAEHQRPAGLLQPLQIPEWKWEEIGMDFITGLPRTSSGHDSIWVVVDRLTKVAHFIPVHTTYTGKRLAELYLARIMCLHGVPKKIASDRGSQFTSKFWQKLQEELGTRLNFSTAYHPQTDGQTERVNQILEDMLRACALDFGGAWDKSLPYAEFSYNNSYQASLQMAPFEALYGRKCRTPLFWDQTGERQLFGTEVLAEAEEKVRIIRERLRIAQSRQKSYADNRRRELTFEAGDYVYLRVTPLRGVHRFQTKGKLAPRFVGPYKILERRGEVAYQLELPSNMIGIHDVFHVSQLKKCLRVPEEQADSEHIDIQEDLTYVEKPVRILDTSERRTRNKVTRFCRVQWSHHSEEEATWEREDELKAAHPHLFTSSSESRGRDSV

SEQ ID NO: 129876 - protein, 101 aa, Oryza sativa
  Clone ID: PAT_MRT4530_32090C.1.pep
MGLSCLGAGMMGKKKVSPAKQQQQQPVDQNQQQKNLYCSKSKDADAAEVGEKEKKIGGGSDGDHHAGVEKVEMRKKKSGSSSSSAPILMYQFPFHSRPGLL

SEQ ID NO: 129877 - protein, 132 aa, Oryza sativa
  Clone ID: PAT_MRT4530_32091C.1.pep
KSFGMQQRPDGDIEIDEKFWEQDFDIPSCNQCGGVLKPDVVMFGDNVPEERAESTKEAARNCDALLVVGSALMTMSAFRLARLAHEANAPIAAITIGETRADSILSLKINARCGEILPRILQMGSLAVPNVS

SEQ ID NO: 129878 - protein, 79 aa, Oryza sativa
  unsure (1)..(79): unsure at all Xaa locations
  Clone ID: PAT_MRT4530_32092C.1.pep
MHRCDVCTDGRAIRFLGSARRDYSLFVNVYFIFTNMSNTGDNDNTGFKEKEVPKEKEVPVNTXRGNTASNSSGGLFLGF

SEQ ID NO: 129879 - protein, 526 aa, Oryza sativa
  Clone ID: PAT_MRT4530_32093C.1.pep
MKGRHERIKKGWSGSAAVWLLLVPLFVLIVLKTDFLPQVARLGDTSFTKVADEMVQKVSSLGLDRARWQQQQTLDVAKLEDSVVGTSDELTGHVDANNEDSNQPNQQILAMSRSKDSRLINSDVAAAKTSHLSCNFSSAHMDTCAMDGDIRIHGRSGVVYVVASSDYRPENATAVIRPYPRKWEQATMERVRQITIRSTAPPGAAVADTDGGGAIIPLRCTVARDMPAVVFSTGGYSVNFFHTMNDILLPLYITAREHGGRVQLLAANYDRRWTAKYQHALAALSMYPVVDLDADAAVRCFPSARVGVESHRVLGIDTPLTGSNGYTMVGFLAFLRSAYSLPRHAVTRTTPRRPRVVMVLRRKSRALTNEAEVVAAVAEAGFEVVAAGPEEAGDVAGFAATVNSCDVMVGVHGAGLTNMVFLPRNGTVVQIIPWGGMKWPCWYDYGEPVPAMGLRYVEYEVAANETTLRERYPMDHPVFADPVSIHRKGFNHLWSTFLNGQNLTLDVNRFKAVMAEVYTSITAAPV

SEQ ID NO: 129880 - protein, 58 aa, Oryza sativa
  unsure (1)..(58): unsure at all Xaa locations
  Clone ID: PAT_MRT4530_32094C.1.pep
YGTCDCADTSLCVKTATCYGVGLHKAENNHLXRTPTPKRTGGAISATNACAPHCKCGM

SEQ ID NO: 129881 - protein, 101 aa, Oryza sativa
  unsure (1)..(101): unsure at all Xaa locations
  Clone ID: PAT_MRT4530_32095C.1.pep
MGKLNFLDISDIPKISVFSKLKISKLISLGFFQVDVLPKFKSLRGFYSSLXELTMNRVFSNLILVRLHKYTPTSTKGXSKLSXVSSTTKSNKCHKDFLGMK

SEQ ID NO: 129882 - protein, 69 aa, Oryza sativa
  unsure (1)..(69): unsure at all Xaa locations
  Clone ID: PAT_MRT4530_32096C.1.pep
GLLLIISTSVGEIXVCRYFKEKTHQSYKKTYIRPIRHKYTDXRTHKSSETIMEWVITVVTAIRTHHSIS

SEQ ID NO: 129883 - protein, 73 aa, Oryza sativa
  Clone ID: PAT_MRT4530_32097C.1.pep
RWCYNGSRSHCDKELSACRQMPTENVVRLWVAFLAEQQRPHGRKGASGTRTALTFHISRRRKTVPASSHCAVR

SEQ ID NO: 129884 - protein, 108 aa, Oryza sativa
  unsure (1)..(108): unsure at all Xaa locations
  Clone ID: PAT_MRT4530_32098C.1.pep
MAATALTSQARLPMSLRFVTAPVPVHVXGLPTSTXLGDRLRMQTTYNVKLITPKXEVELQSARDVYILDHAEEEGTDLTYSCRAGCXSSCTGKENSVWTDQSNQSFLD

SEQ ID NO: 129885 - protein, 65 aa, Oryza sativa
  Clone ID: PAT_MRT4530_32099C.1.pep
YLWNSLPLHFKLMQHFHSQAAYFCSTIKIDITNDSCHDHTEQFEVICFCDDTFSHMLDVWPFSVF

SEQ ID NO: 129886 - protein, 675 aa, Oryza sativa
  Clone ID: PAT_MRT4530_3209C.1.pep
MAPPQMYERRLLAAASLLLSADAQGQPPHAAAQLGVGVTAELKPHQVDGVAWLIRRYQLGVNVLLVVLCPLSVTDGWLSEFNKFCPSLRVIQYVGDKLHRRDLRRMMFQDVQKSSSSSHSTELPFDVMMTTYDIALMDQEFLSQIPWHYVVIDEAQRLKNPSSVLYNVLEQRFIMPRRLLLTGTPIQNNLSELWALMHFCMPSIFGTLDQFLSTFKQSGDSLTGGETNKTDKQFKILKHVIQLRKASSHPYLFSGIEPEPYVEGEHLVQASGKLVMLDLILKKLHEVGHRVLLFAQMTQTLDILQDFLELRQYTYERLDGSVRAEERFAAIKSFSSQPTKGVVRDDNQSGAFVFMISTRAGGVGLNLIGADTVIFYEQDWNPQADKQALQRAHRIGQLNNVIMRRAERKLKLSHSVIGEEDATYGKGKYVENEASDMRSIIFGLHLFDTSDTTAETMNDDTASETIKEETMLKLKSMSEKVVLMRSHEPSEKDERAFEINPNMTDNSGAVVTRVSDSVNVDPDFNEAAYLSWLEKFKESSHSKENTRAELERQRIAPEEKFLKREAIKKKVEEKRLAKWESLGYQTLKIKDPDILPNQNIPDSGSVQLVYGDCTNPSVVCPAKPAIIFRKCCVDNSGTWGHGGMFDALANLSTCIPDAYNRASEFDDLHLADLHL

SEQ ID NO: 129887 - protein, 194 aa, Oryza sativa
  Clone ID: PAT_MRT4530_320C.1.pep
RRPYRDDYSPRGSAYSDLGPRSAPRLSDRRAYIDDGYGGKIDRPLPTYREGRGRDYDTMSGSKRSYAEMDDVPPRYHDISVRQSKARLDYDVGGSSARYADTYSERLGRSHAGYSGGRSVSGHDPVYSSGRHGMSYGGSASSNDAGGMYSSNFSGSYMSRGSDVGGSSYSSLYSGRNVGSSSGYYGGSGSSSYY

SEQ ID NO: 129888 - protein, 63 aa, Oryza sativa
  unsure (1)..(63): unsure at all Xaa locations
  Clone ID: PAT_MRT4530_32100C.1.pep
SEYNSALHRICTNLFLXWKVVMDAXKIEKTLSTFHPSAVRXARNYRQASYKEYYEMLVTWTPA

SEQ ID NO: 129889 - protein, 592 aa, Oryza sativa
  unsure (1)..(592): unsure at all Xaa locations
  Clone ID: PAT_MRT4530_32101C.1.pep
MDFVKVFDQAVREIKREVNLKVLKVPELEQKVLDATSDEPWGPHGTTLSELSHATKKFAECQLFKFFFGNXADSGAQSGHQDLALTIIEYLIANGSERAVDDILDHYSKISVLSSFEYVEPNGKDAGINVRKKVETILGLINDKEKIKSVREKAASNRDKYVGLSSTGITYKSSSASFGSNYSSGERYGSFSGTREGDSYGDSYRDKEPVKSSPSYTGSQKSGSRIKKDVNRRNEDSPSSLKSNAKGNEDDFDDFDPRGSSSNGAANTNTSGVDLFAPNLLDDFIDVPAAATHETNDSADAQVDLFADADFQSAIPSTETAAGSDVQGNVDLFAEQPAFTAAFPPQTGFIPPPSSGTSEANTSTSKNTTPEPFDPFGAIPINSFDGSDPFGAFNSDVGSSSIPPPTQSSVGNISTPSQNPQAASDFGGFVSSTVETAAKDPFDFSSSNLGKTPLADPKADASDFGAFVSHSEEVAKDPFDLSLSTSSGRTNQAPLAAPKSDTKKENFQVKSGIWADSLSRGLIDLNITGPKKVNLADVGIVGGLDDGSDDKALPSWTMGAGGSXPRNVRNSFIYTKWWHXSLAXLQQVPVWL

SEQ ID NO: 129890 - protein, 153 aa, Oryza sativa
  unsure (1)..(153): unsure at all Xaa locations
  Clone ID: PAT_MRT4530_32102C.1.pep
RRRQRRRRGAPPHAHGGGDTASARLSCSRRVRVAVVVVVVLVFLHQCRQERRRRAPPERRRGGRRRRRRXRRGRRRGTRGCGLAWACWRPSPPRGRRAATRGSTGRRRSPRRGGGGPPLPGARTGCGRRRSRRSRRAPPASRGGRRGAPTGRP

SEQ ID NO: 129891 - protein, 336 aa, Oryza sativa
  Clone ID: PAT_MRT4530_32103C.1.pep
MIHHTGLLMPPSSPRAAFQLAEPPCASHILVPEHLVEPQPCPPGMMRACSSHARASSGDGLLVLDFTDGLTAAPAAGARGPIPLDGKQLKPDVTRFVCNPLSGELFRVPDIDGTKKTLKWQLVGILTQSDRPNGPPDRYALASFSSNAAAADNDEWSFAVRRFLSQKGEWDEPVVFPSPLPLERPLFVDHDPVTFAGRIWWVDVSWGAISVDPLSDQPELRFVELPGGSVMEPVKDEKRRGLVRYRRLGVSEGRLRYAEASQKEPFVLSSFALDDNGSSWTLEHRVALSRLRVDGGLPLQQEDTPQIGVIDPLNASIMYLKIGVQCISVDMERDLL

SEQ ID NO: 129892 - protein, 71 aa, Oryza sativa
  unsure (1)..(71): unsure at all Xaa locations
  Clone ID: PAT_MRT4530_32104C.1.pep
MAIVRVSSVYWIKGDQGPWLDPVQATLTAHPNLPDRXARPRPTAIHTSPATARSWRRPTSSCPRRAAPPSP

SEQ ID NO: 129893 - protein, 96 aa, Oryza sativa
  Clone ID: PAT_MRT4530_32105C.1.pep
MAESKKRGIRDWIGDSQRKRNRKPGRLFFLLPLSSRPPRLRLRGRETDGGFGMRPRRREMNSGEGKNSKHLSVLTVKYYDLRTVKSTPFSAPVGRP

SEQ ID NO: 129894 - protein, 102 aa, Oryza sativa
  unsure (1)..(102): unsure at all Xaa locations
  Clone ID: PAT_MRT4530_32106C.1.pep
RGRWRVDRAREKQRSNVVRIPCEKVTRVRILRGQLRSTVGIGTSRLREELRSRRSRIPDDEIRYEMAHGTXTHDGWTSCGRDLRNGFHEVCVQVSVSAKEIG

SEQ ID NO: 129895 - protein, 88 aa, Oryza sativa
  Clone ID: PAT_MRT4530_32107C.1.pep
EDTGQVEDLHQIRLNLLHVTQKKARTANAYAGGDELLCMCASVGEATVDWTGRQRYKELDLRPTPFEALPTLIGSESSVCTMSCRTRN

SEQ ID NO: 129896 - protein, 710 aa, Oryza sativa
  unsure (1)..(710): unsure at all Xaa locations
  Clone ID: PAT_MRT4530_32108C.1.pep
MVVNSRPLKRARTRVEARDFAGFPPAGDGGAAGTFREAVRGFLARYARLLPLPSIFSPAAAAAPPHLLTWRVSLRVGEEGDEEGGGGAVELNVVEEDVLRSRSVYCDQCRVVGWSGHPVCGKRYHFIIENDNNQVCGKRHSCCLRCGTPTVAGESRCLLCNFDMDGEELEECGYMHLDDNTHLLHAVVHANGYGHLLRVNGREGGSRCLTGRDIMSFWDRLCKVLHVRKVTVMDISKKHGMEYRLLHAITSGHPWYGEWGYKFGAGSFALTSDTYQEAVDTLSGIQLALYFSHRQPIRTPLQNTIALYWALSDRQLVTVRDLFRFIMHLLHQARKKNETSKPTTDEHKEVASNVLCKWTKEDIDRAETAMLKVLRVVQPGQWVSWRALRGAASKAVDSQELLDYSLRGLGGKLMDDGHFIAVRCNAETSAIEYRLEDNSNQSVDAAAFGPSVDHLLHDLKFLYNALLNPETMLASQPEVIGASSHSAAAKILDCKQFIKHYDQHTPRAPLNPFLLSVRCSIELLDHPKDYTAPPVELVLLPASATLAELKIQATRAFQETYLMFQSYQVEQLPDFPNFSDTTLVKHVLGSSQLVRVRGRCTGDNRRIVQFRMERGLENWTVDCTCGAKDDDGERMLACDVCGVWQHTRCSGISDFDDVPEKFICRKCASPRREXGRVGXGAMWGSRMNASMSWLYTMKGSHIVESGVLQF

SEQ ID NO: 129897 - protein, 351 aa, Oryza sativa
  Clone ID: PAT_MRT4530_32109C.1.pep
MRRGGFHGAAAASPTTVARAGRVMRAAVAAFFHGYHCYTSVAGLLVLPFSAAVLASGAMASPSSGALAAVSARIRRMFDAAGFPPSSFFALFNAKLSQTVFTFAAALPFTLTFLLLAKACVAAMLRPDDDGEGVARRGRGVARATRLPPCGSVAGAYPATVATHLFGAFVMLSANAAVFSLMFLAFNGADLLGLTTTSHAAATLALSAAGAIAYSVAVGIATVVCNLAVVVSAMERRAGHAAVLRACVVIRGRVPTALALALPTNLGMAAAEALFQLRVVSQAQRHRLAGAGDGKRLAAGVAGEAFSIAYIHALCVVLEIIVSCMFYRSCRRSEADELRELEPEEKGDLQA

SEQ ID NO: 129898 - protein, 190 aa, Oryza sativa
  Clone ID: PAT_MRT4530_3210C.1.pep
FMNKVLYAKEGAKNMMDNTFDYFPWDVKLEIDGSKINIPQDSEGILVANIQSYMGGVDLWKNEDDVSDNFHPQSMHDKMLEVVSFTGMLHLGRLQVGLSRAQRLAQGHHIKIEIKTKMPIQVDGEPWSQDPCTIVVSHHCQAFMLKRVSEEPIGHAASIMADVLENAENNGIITASQKRTLLHEIAFRLL

SEQ ID NO: 129899 - protein, 144 aa, Oryza sativa
  Clone ID: PAT_MRT4530_32110C.1.pep
MHLMFQSFQVEQLPDFPNFSDTTLVKHVLGSSQLVRVRGRCTGDNRRIVQFRMERGLENWTVDCTCGAKDDDGERMLACDVCGVWQHTRCSGISDFDDVPEKFICRKCASPRRGKGRGGGGGNGGSRMDVSAEACVNLHGILSF

SEQ ID NO: 129900 - protein, 716 aa, Oryza sativa
  unsure (1)..(716): unsure at all Xaa locations
  Clone ID: PAT_MRT4530_32111C.1.pep
MVVNSRPLKRARTRVEARDFAGFPQAVDGGAARTFRXAVRGFLARYARLLPLPSIFSPAAAAAPPHLLTWRVSLRVGEEGDEEGGGGAVELNVVEEDVLRSRSVYCDQCRVVGWSGHPVCGKRYHFIIENDNNQVCGKRHSCCLRCGTPTVAGESRCLLCNFDMDGEELEECGYMHLDDNTHLLHAVVHANGYGHLLRVNGREGGSRCLTGRDIMSFWDRLCKVLHVRKVTVMDISKKHGMEYRLLHAITSGHPWYGEWGYKFGAGSFALTSDTYQEAVDTLSGIQLALYFSHRQPIRTPLQNTIALYWALSDRQLVTVRDLFRFIMHLLHQARKKNETSKPTTDEHKEVASNVLCKWTKEDIDRAETAMLKVLRVVQPGQWVSWRALRGAASKAVDSQELLDYSLRGLGGKLMDDGHFIAVRCNAETSAIEYRLEDNSNQSVDAAAFGPSVDHLLHDLKFLYNALLNPETMLASQPEVIGASSHSAAAKILDCKQFIKHYDQHTPRAPLNPFLLSVRCSIELLDHPKDYTAPPVELVLLPASATLAELKIQATRAFQETYLMFQSYQVEQLPDFPNFSDTTLVKHVLGSSQLVRVRGRCTGDNRRIVQFRMERGLENWTVDCTCGAKDDDGERMLACDVCGVWQHTRCSGISDFDDVPEKFICRKCASPRRGKGRGGGGGNGGSRMDVSAAGRCKDEIGSSVGGAGKFGRMATVG

SEQ ID NO: 129901 - protein, 423 aa, Oryza sativa
  unsure (1)..(423): unsure at all Xaa locations
  Clone ID: PAT_MRT4530_32112C.1.pep
MNRQAPPRRRSARIAAAHGGGGGDTTLRERILRRPDGYIGSPEKRSTQTFWINDGYYMVPREVTYRPGLHRIFDEVLVHAASNKRRDPSMDTLSVEVDVVERSVSVFYNGRGVVPVELVDEERGVYAPEMFFGHLHDDDEEDDQNKATNDGGGGYGVKLANLFSTEFIIETADGCRMKKYKQVFSENMGKKSVPHITDCNQGENWTIITFKPDLAGFNMTYLEEDHVTLMWKRVVDMAGILGDSVQVEWDGVRLRINSFNDYVRLYIDSPVSDRSGAGFPRVYEKLNDWCEVCLSLSDDGHFQQVSFVNGFETLKGGTHVDYVTELITTHLMNLLNEHYEECNFNVDDVKRYLWVFLNVIIDNPTFDSQTKETLTTPPGRLGSKLELPKSFSKIACXTSDDESGVLFGCRGPLDAKTGVSSRD

SEQ ID NO: 129902 - protein, 1042 aa, Oryza sativa
  unsure (1)..(1042): unsure at all Xaa locations
  Clone ID: PAT_MRT4530_32114C.1.pep
IVLFSRKSDFEMRLNVRVIEARNLRAMDSNGFSDPYVKLQLGKQRFKTKVVKKNLNPAWDQEFSFSVGDVRDVLKLYVYDEDMIGIDDFLGQVKVPLEDVLAADNYSLGARWFQLLPKGKTEKAIDCGNXMEISLLLNLAHESFALDNCSQDTDRNQTTAEDKSNGIPAAASTGIEVSKTDKSNKPSFVDRVCQMFVRKSDDVVTTPLVTTDKSEDVQEATTGYEAPATGSQTYSASTDTPFDELLKYFESKHQEVEMPVDLQGILVDKSYITSPSDLNNFLFSPDSNFRQTVVELQGCSDVKMESWKIDSDGESLKRVITYTTAPSKLVKAVKATEEQSYLKADGNGYSVLLSVSTPDVPCGTYFRTEILFRILPGPELDSEQLTSHLVISWRINFLQSTMMKGMIENGAKQGLQQNYAQFSDLLSQKIKPIDVDAGSDKGQVLASLQRGQESDWNIAFLYFCNFGVLCSLFVTIYIAVHVQLRSSGAHKGLEFPGLDLPDSLSEIVMGGLLFLQLRHIYKKISCFIQAREQKGADHGVKAQGDGWLLTVALIEGTKLAPVDATGFSDPYVVFTCNGKSKTSSIKFQTLEPQWNDIFEFDAMDDPPSVMNVHVYDFDGPFDEVTSLGHAEINFVKSNLSELADVWIPLQGNLAQSWQSKLHLRIFLSNSKGSTMVTEYLSKMEKEVGKKVSRFLPVSKECQMTLRSPRTNTAFQELFSLPAEEFLISSFTCCLKRKLHTQGHLFLSPRTIGFYSSMFGRKTKFFFLWEDIEEIQAVPQSISSWSPSLVITLHKGRGMDAKHGAKSVDNGRLKFCLQSFASFSVANRTIMALWKARSLSSEYKMQIAEEQSQNNDTLQSEDSGIFVGVEDAKNLQMNEVFSSSISANMASLMEVFGGGSFEMKIMNKVGCLNYSATQWESDKPDEYQRQIHYKFSRKLSPIGGEVTGTQQKSPMPNKAGWIIEEVMELQGILFGDFFTIHIRYQIEDLAPKQRACSVQVFLGIEWSKTTRHRKRIEKSVLSGSSARLKEMFILASKQLPHAR

SEQ ID NO: 129903 - protein, 287 aa, Oryza sativa
  Clone ID: PAT_MRT4530_32115C.1.pep
MEDRDRDHRGGADEDAPGPAAAAVAAVDGEDEVEDDGGGFSFPVPPFAADAFIVPVYPVFGRPMSPPPREAVVEEEEEDEPETATLRVPLGRLLLEEREFRARQRESSGTSPVQPQRRRPDDEGELEGVPPESYCLWAPGGQPSTTPASPRRCRKSGSTGSVLRWRRISERLVRRSHSDGKEKFVFLNAPGGGAPSPHPPKDNDDANGGGSVGKGDAGRHGWSYYSKGGGGGSGGRRRSYLPYKQELVGLFANGGGLRRSRAPFKSEGEQGGDKGERADVASDADAK

SEQ ID NO: 129904 - protein, 81 aa, Oryza sativa
  Clone ID: PAT_MRT4530_32116C.1.pep
MPATPTIIGALLGLGTQMYSNALRKLPYMRHPWEHVVGMGLGAVFVNQLVKWDEKLKEDLDKMLERAKQANERRYFDDDDD

SEQ ID NO: 129905 - protein, 320 aa, Oryza sativa
  Clone ID: PAT_MRT4530_32117C.1.pep
MDLCLLDIGNAHGLGVEALRMLMQMVLTNEEELKLKYFKDDLSTKLCPVEAFLKAVLDIPFAFKRMDAMLYVANFYLEVNQLRMSYATLEAACQELKNSRLFHKVLEAGLNFGNLMSIDTGSPNSHAMEPNTLLKIVDVKGADGKAALLQFVVHEIVKPEATVPKHGLQVVSKLAAELSNTKKASSIDMMKLSRDVSELGVGLGKIHDVLRLNSMVTSADSARRFHNTMSMFLRQAEEEILKLQAQESICLSCVKEVTEYFHGELSSGDEGHMARVFGSVREFLAMLDRICKEAGEEMKSSGCMMGRDWNMAAPMGMTTP

SEQ ID NO: 129906 - protein, 87 aa, Oryza sativa
  Clone ID: PAT_MRT4530_32118C.1.pep
GARSPSRHWRGGSLAVPHARLPKRSERKKRRTDASDMASGFTFTSSLFLLNAFFHVKKKKSCRFELETEGASLASGVFIPQLCVSKV

SEQ ID NO: 129907 - protein, 386 aa, Oryza sativa
  Clone ID: PAT_MRT4530_32119C.1.pep
HGDGRVRYLVDTFERLLSLSSDPGEQSRRRRKKKTPVARKTGSSWPPPPTPTPTTTRADEIDVSYPSIASSSEVSFPINGVVLRRSIARDEPPRRQKRCSSICSSERSWSRKKIGVTIQRPFNLRTERRGKMKEESLVQRMKNKLLEEERLRNPVAQGLPWTTDVPENPVKPLGKEPTEPIDVVLHSEIRSVGRARFDHQVAERNSFLEKLNMERERQQKLDEELEIKQLRKEQVPRAHPMPDFSKPFVPKRYFVFIANPDRRVKGAEVFVGGLPRSVTERALREVFSPCGEIVDLRIMKDQNGISKLQGKRLAVDLSLDQDTLFFGNLCKDWGIEEFEELIRKSMLEDVVESCNSRMMMKMEIHPFLNEEDLGAFTNCSSAPLVP

SEQ ID NO: 129908 - protein, 2225 aa, Oryza sativa
  Clone ID: PAT_MRT4530_3211C.1.pep
MVEVLEEEEAVAFTPTPSGSGDSSESRGPRHHRRDSPTPPRHEPSRREDPTRSGGSALSPPLGEERPRRVGARRRLTYGDGGSPRGTLQAAGALLRHPPVNSEPETPVQRWLDDVANLVTTAQRQLAAGGRPAATGMSRTPVTLSSSARRRARQSAMASRRSTAPTSSGASGSRRRHDGLYGEQDAQINIERRRDERRAARMGEGSSSSRVPGSSSRGGPPPTLTPGGTGCRAFVASLQNVRWPLKFRPNLTEKEARLQGAQDHRRALQVGGQGGSEGGGVGNSPDTGAAAAATPESAPRSKRRDRRGKRKPGRSDDEGHVLAADGPARAPRKGKATSDKPSSTAPSGEGRSADKWCSVHNTYRHSLADCRSVKNLAERFRKADQEKRQGRREGKAPATSAGDQREEAKNKAPADDGGDSEDLDFQVPQGTVATLDGGAYAHTSRRGFKAMRRELLAAVPTHEVARKARWSEKMDRKRKVAQFRSNQGSHQRPRFTPGQQGGPTTLIVRQQRPFNANNFHQGASGSQNHHGGQPNRSAAPRPPMAPAQTAPSAQAKKETGTKPGSCFNCGELGHFADKCPKPRRAGPRFVQARVNHASAEEAQAAPEVVLGTFLVNSIPATVLFDSGATHSFISKKFVGMHGLIRGELSTPMRVHTPGNSSTSVQFSPSITIEIQRSPFLANLILLESKDLDVILGMDWLTKFKGVIDCANRTVTLTNEKGETVVYKSPISPKQGVSLNQIEVEIPVVTEEKNSRKLEEIPIVCEYPEVFPEDLTTMPPKREIEFRIDLALGTAPIYKRPYRMAANELAEVKKQGAPVIFVEKKDKTKRMCIDYRALNEVTIKNKYPLPRIDDLFDQLKGAKVFSKIDLLSGYHQLRIREEDIPKTAFTTRYGLYECTVMSFGLTNAPAFFMNLMNNVFMEFLDKFVVVFIDDILIYSKFEEEHELHLRLLLEKLKEHQLYAKFSKCDFWLSEVKFLGHVIAAQGVAVDPSNVESVTKWTPPKTVSQIRSFLGLVGYYRRFIENFSRIARPMTQLLKKDEKIKWTAECDKSFEELKKKLVSTPVLILPDQMKDFQVYCDASHHGLRCVLMQEGRVVAYASWQLRPHEGNYPTHDLELAVVARPTLVDQVRAAQANDPEIAKLKKNMRVGKARDFHEDEHGTIWLGERLCVPDDKELKDLILIEAHQTQYSIHPGSTKMYQDLKEKFWWVSMRREIAEFVALCDVCQRVKAEHQRPASLLQPLQIPEWKWEEIGMDFITGLPRTSSGHDSIWVVVDRLTKVAHFIPVHTTYTGKRLAELYFSRIMCLHGVPKKIVSDRGSQFTSKFWQKLQEELGTRLNFSTAYHPQTDGQTERVNQILEDMLRACALDFGGAWDKSLPRLRCAQGPGDEAPVVAADHWRDSETHVELPVTFGDSTNFRTERIDFDVADLNLPYNAVLGRPTLVKFMATNHYAYLQMKMPGPAVPITVFGDVKVALACAEQRADNLAVATEPQAPEATASRASKKRLTSANEESALVSFLRANSNVFTWKPSDMPGVPREVIEHCLAVRPDARPIRQKVRHQAPERQAFIREEVVRLLEADFICEVIHPEWLANPVVVPKANGKLRMCIDYTDLNKACPKDPFPLPCIDQIVDSTVGCDLLCFLDAYSGYHQIRMAREDEEKPTFITPVGTFCYTTMPFGLKNAGPTFQRMTRITLSNQIGRNVEAYVDDLVVQRPVYFVSEALRDAKTRYPQAQKMLYAVLMASRKLRHYFQAHRVSVVTSYPLGQILHNQEGTGRVVKWAIELAEFDLHFKPRHAIKSQVLANFIAEWTPVDEPVPPNVSFLPRDVKDPNADIHGGHWVMHFDGSLNLQGAGARVTLTSPSGDVLKYVIWLDFRATNNMAEYEGLLAGLRAVARMGIHRLLVLGDSQLVVNQVSKEYQCTDPQMDAYVREVRRMEHHIDRLELRHVPRRDNTVADELSRVASARAPLPPGTFEERLAQPSARPNPSRDPDDTPSAPTLGDSRPSGPEGVDPDPPHQVVWMTDIRAYLDGNTLPEDRAEAEKLARISKRYVLIEGTLYRRAANGILLKCVSREQGIELIADTHQDILGPFKTARGGYQHLYVAIDKFTKWPEAYPVVKIDKHSALKFIRGITSRFGVPNRIITDNGTQFTSELFDNYCDDMGIKLCFASPAHPRSNGQVERANAEILKGLKTKTYNVLKKHGDSWLEELPAVLWANRTTPSRATG

SEQ ID NO: 129909 - protein, 47 aa, Oryza sativa
  Clone ID: PAT_MRT4530_32120C.1.pep
YFTAVCGQAHSLPTIDYTLVVGSKRKHVPRRFNPTSCCACSKRWLCA

SEQ ID NO: 129910 - protein, 839 aa, Oryza sativa
  Clone ID: PAT_MRT4530_32121C.1.pep
MATVLEMLVQLAVVVTVLCAAVRAYTPADSYLFLCGTSGNATVDGRTFVGDAGLPASVLMAPQSTEANMPANQVTGAGDDSPALYQSARVFTAPANYAFSAKPGRHFVRLRFFPFRYQSYDLAADAAFNVSVQGVVFVDGYTPKNGTAVVREFSVNITGRALVIAFTPTGKKVAFVNAIEVVSHPDELIGDTAPMVNPRNQSQYTGLTAKALETVHRINMGEPKVTPNNDTLWRTWLPDWTFLHESSFAAHNQVSPAMIKYQSGYATSLTAPSAVYTTVTELNTTAAMVGNTQAQLNLTWKFNAPAVSDYLLRLHLCDIVSKATLGVVFNVYVGQWRVLQDYESSGDTFSLLATPLYKDFVLAASDAAKGTITVSIGSSTATNALPGGFLNGLEIMRIVGSTGSIDGATSPRGSKIKTGIIAGSAVGGAVLAIALGCVAVRMLRRKKKPVKQPSNTWVPFSASALGARSRTSFGRSSIVNVVTLGQNGAGAGAGYRFPFAALQEATGGFEEEMVIGVGGFGKVYRGTLRDGTQVAVKRGNRLSQQGLNEFRTEIELLSQLRHRHLVSLIGYCDERGEMILVYEYMAKGTLRSHLYGSDLPPLPWKQRLEACIGAARGLHYLHTGSAKAIIHRDVKSANILLDDGFMAKVADFGLSKTGPELDKTHVSTAVKGSFGYLDPEYFRRQMLTEKSDVYSFGVVLLEVLCARAVIDPTLPREMVNLAEWATRRLRDGELDRIVDQKIAGTIRPDSLKKFADTAEKCLAEYGVERPSMGDVLWCLEYALQLQVASPDSSVTTLQRSSSISSVVTDATVSANLGDLDGMSMKRVFSKMLKSEEEGR

SEQ ID NO: 129911 - protein, 81 aa, Oryza sativa
  unsure (1)..(81): unsure at all Xaa locations
  Clone ID: PAT_MRT4530_32122C.1.pep
LDGQITNRPRHSLKLVAKESSNVLLHAPVLWQHLNHQLNAASFKGYDRXTSSPSSCSEASGAGSMGVGGGGRGVGGGERNG

SEQ ID NO: 129912 - protein, 59 aa, Oryza sativa
  Clone ID: PAT_MRT4530_32123C.1.pep
PAKTPLCAVTSTRTNQQTTPGMHKNLLRPLMRSTDAALLCTLLITEGTPTVCRRAKHEA

SEQ ID NO: 129913 - protein, 519 aa, Oryza sativa
  Clone ID: PAT_MRT4530_32124C.1.pep
MNGEEAPAGSGGGGGGRAEIDTSAPFESVREAVDHFGGGAAAVWSSCLVNRMLTPPKEHDQMNGQTLQLEKELIIKESQTLDVLKELESSKRIISDLKLKVQNDSAITGHPGQTEAPGAGPEERRSSENVETDGELGGLDSQNLQPPSSVLMQLEQAKAYLTRTTADLAEIRASVESLCNEIAKEKILVERSREKVCSNTSLISSLEGELDRTTHKLQTLNDRQRRREDSSHILMEIKKVTSEIEQLKSASNASKSEATMLAAEIEQTKASIATAEVRCLAAKKMEDAARAAEALALAEIKALLSGEASAGDLQGTDGVNLSLEKYFELASKAQECDVSSRKKIEAAMLQVEEANRSKSNSLNKLEEAKLEFEKCKIALQDALKRAHAANRGKLAVEESVRRWLSESGYKRHSFHDSSKLKNAADITDVSKSFLKPTLSIGQILNLKLMGPDGYDKSVWDDTTEASNVSLGQILNRRNAVFCNSDITSQKILSGKRKKFAFTGLSVLLAKQAKRQEQEK

SEQ ID NO: 129914 - protein, 849 aa, Oryza sativa
  Clone ID: PAT_MRT4530_32125C.1.pep
MATLASCPKSCGQMSIHYPFGIGAGCFRQPDFNLICDNSTQPPKLLLHDGTTEVVGDEDSLRRTRYPVRGVRIWRSDSSIGMDVGLSEWIDINISATIPMVPGVAEYNYSWNLSSFSIFDASLNITGCEFDTYIINNKSYSPTTAICKSSCPNKEITETVARQSCNGTGCCTIYVGIDVANLHLRFVRHGREGFLGVNSSRSSLWNRINIVSSYASVMWGINNRPTCASVKDQNQTDYACASANSQCVDSISSTDLGYRCECNSGYIGNPYVLDGCTRDEVLNVSSASGEVYELCSLKAGYHPVQQKANCSRWCGNISVPFPFGLEEGCTARKLFELNCTNVTSSTLQFNRGHVVTDIDLAEGVVGIKLITSYYVEQVFRMYISGEPYLYASFGEAVISVHWAAANLTCQEAQKNHSRYACVSANSTCLGVNSTDGYVGYRCKCMDGFHGNPYDANGCEDVDECKKTPGIFKGICHNNIGSYQCMECLDKTEYDVTAMQCVSRKKQNLLIGIVIGLSVGFTILLFVMSGMLLLRRWKRDIQRQLRRNYFRKNQGLLLEQLISSDENASDKTKIFSLEELEKATNNFDPTRILGRGGHGMVYKGILSDQRVVAIKKSKIIKQDEIDNFINEVAILSQINHRNIVRLFGCCLETEVPLLVYDFIPNGSLFGTLHADASTFGYLDPEYYHTGQLNKKSDVYSFGVVLIELLLRKEPIFTSETGLKQNLSNYFLWEKKVKLIRDIVADQVLEEATEEEIHTVASLAEDCLSLRRDEIPTMKQVEWALQFLLNKRLNSYCTVQANKEEMDPFIMTKVQHSTENSNVEFLSNKATISSYQPGLEHEFMSSATIPR

SEQ ID NO: 129915 - protein, 37 aa, Oryza sativa
  Clone ID: PAT_MRT4530_32126C.1.pep
METMLASHQGQVANLERGSNISEVWTASAVPLDQRKD

SEQ ID NO: 129916 - protein, 802 aa, Oryza sativa
  Clone ID: PAT_MRT4530_32127C.1.pep
MATLASCPKSCGQMSIHYPFGIGAGCFRQPDFNLICDNSTQPPKLLLHDGVTEIIGDTDSSFDMDVGSTESIDVNISSTIPMLSSISHYNYSWNLSSFSIEYVILNITGCNFDTYIINPDTDIRTRICRNSCPKEEITEAVARQSCNGTGCCTYDIYGVANLQLSFVRGDEGLLGGNSSRNSLWNIINIRSWYAYVTWSIIDQPTCASAKDNRTDYACVSANSTCIDSFNSMEYLGYLCYCSSGFIGNPYVLHGCTRDEGYYPVQQKANCSRRCGNISVPFPFGLEEGCAARKLFQLNCTNVTSSTLQFDRGHVVTDIDFAEGVVGIKLASYFEEQEFNIDECKKTPGICKGICHNDIGSYHCMECPDKTEYDVTAMQCVSRKKQNLLIGIVIGLSVGFTVLLFVLGGMLLLRRWKRDIQRQLRRNYFRKNQGLLLEQLISSDENASDKTKIFSLEELEKATNNFDPTRILGRGGHGMVYKGILSDQRVVAIKKSKIIKQDEIDNFINEVAILSQINHRNIVRLFGCCLETEVPLLVYDFIPNGSLFGILHADARSSFRLSWDDCLRIATEAAGALCYLHSAASVSVFHRDVKSANILLDANCTAKVSDFGASRLVPINETHVVTNVQGTFGYLDPEYYHTGQLNEKSDVYSFGVVLIELLLRKEPIFTSETGMKQNLSNYFLWEKKVKLIRDIVADQVLEEATEEEINNVASLAEDCLSLRRDERPTMKQVELALQFLLNKRLNSYRTVEANKEEMDPFIMTKVQHSTENSNVEFLSNKATISSYQPGLEHEFMSSATIPR

SEQ ID NO: 129917 - protein, 77 aa, Oryza sativa
  unsure (1)..(77): unsure at all Xaa locations
  Clone ID: PAT_MRT4530_32128C.1.pep
REQCGFLTAHKNVAWQALNMYSTKHIISFVVWWFVQXHPSSHTIPLHFFTHKYTLHLGGWKETSNHLSNTYHVCFVV

SEQ ID NO: 129918 - protein, 144 aa, Oryza sativa
  Clone ID: PAT_MRT4530_32129C.1.pep
MAAHVASPPELATLWSYEANVGRLAHHLVKLAGKPLDQLPLQIDDVQHAAYGVLQLQALWSMHPCDVIYCDGMDGWMRFVGLEDLTVERAVRLSSTISFMRTRPKVGNWGADGLRPRREAAHVCSLQSSPERLAQIEEVSNQQL

SEQ ID NO: 129919 - protein, 229 aa, Oryza sativa
  Clone ID: PAT_MRT4530_3212C.1.pep
VFPKYERRLLAAASLLLSADAQGQPPHAAAQLGVGVTAELKPHQVDGVAWLIRRYQLGVNVLLGDFLGLGKTLQAISLLSYLKIHSISPGPFLVLCPLSVTDGWLSEFNKFCPSLRVIQYVGDKLHRRDLRRMMFQDVQKSSSSSHSTELPFDVMMTTYDIALMDQEFLSQIPWHYVVIDEAQRLKNPSSVLYNVLEQRFIMPRRLLLTGTPIQNNLSGLWALMHFCMP

SEQ ID NO: 129920 - protein, 523 aa, Oryza sativa
  Clone ID: PAT_MRT4530_32130C.1.pep
MAASSSFLAAGRRLIRLGCGRLLPAGHARSHGSTPALIRAAAAASSPASPRGHSGGRKPARPPSLQSTLWPLGHPGTLLVPEIERWAAKPGNRLRHVELERIVKELRKRRRHRQALEVSEWMNAKGHVKFLPKDHAVHLDLIGEIHGSSAAETYFNNLPDKDKTEKPYGALLNCYTRELLVEKSLAHFQKMKELGFVFSTLPYNNIMGLYTNLGQHEKVPSVIAEMKSNGIVPDNFSYRICINSYGTRADFFGMENTLEEMECEPKIVVDWNTYAVVASNYIKGNIREKAFSALKKAEAKINIKDSDSYNHLISLYGHLGDKSEVNRLWALQMSNCNRHINKDYTTMLAVLVKLNEIEEAEVLLKEWESSGNAFDFQVPNVLLTGYRQKDLLDKAEALLDDFLKKGKMPPSTSWAIVAAGYAEKGDAAKAYELTKNALCVYAPNTGWIPRPGMIEMILKYLGDEGDVEEVEIFVDLLKVAVPLNSDMTDALSRARMREEKKVKDAVRMWVGDGNQNEILSDIQ

SEQ ID NO: 129921 - protein, 277 aa, Oryza sativa
  Clone ID: PAT_MRT4530_32131C.1.pep
MASMQKSREERAEAAAHRAADELHAARRDEPGGGGGGMLGTVQESARSLLGAVRDKIPGPGSGGAGAGAAAGEGKAAEAKGFAADKAEGARRALAGSAAARKGETDESAWQHGEDVRRRAAEKAEEARRRSEPQPSSEENPGRVVLVRRGRSATENIYGSAASAAEAFRQKMTMPEDVVEQKRAEAAAGGNKGTAAATATATNTGGEAAAEEVMMRVKAADQMTGQAFNDVGKMGEEGTGMAAGDGGAPPLRSPEPTARRHATVFLLVAFCSFSLFI

SEQ ID NO: 129922 - protein, 285 aa, Oryza sativa
  Clone ID: PAT_MRT4530_32132C.1.pep
MATSSAAAALRLPASQLPLSARPSSSSTLRFPPRRPARRGGLAVSAFTKLSEASPVAIPPEPAQPLPDEEALPPKPGVYGVYDPAGELQFVGISRNVRASVEGHRRKVPADLCGSVKVSIADEETPDRTVLTNAWKSWLEEHITATGKAPPGNVAGNHTWVGPPQRPPDLRLTPGRHVQLTVPLEQLIDRLVKDNKVVAFIKGSRSAPQCGFSQRVVGILESHGVDFVTVDVLDEEHNHGLRETLKTYSNWPTFPQVFVGGELVGGCDIVSSMAEKGELAALFKK

SEQ ID NO: 129923 - protein, 72 aa, Oryza sativa
  Clone ID: PAT_MRT4530_32133C.1.pep
KKSHRGRKPLGKLNKQIQKLGKISTKHAAGQRARVKNKAQLSHGAPPQGDPKSPPQGKEKKGNPDEQTSPAP

SEQ ID NO: 129924 - protein, 123 aa, Oryza sativa
  unsure (1)..(123): unsure at all Xaa locations
  Clone ID: PAT_MRT4530_32134C.1.pep
LLFGSRNRSGGFAIARAPVVSHPRPGSPPTVEHPQQCPRASPPXRLPPPRPSAPSSGCPPPPLAHPPGRRRPSATHPPPPTLRRTPAAAPRQLPFARPAAANPRPHTRRRPSPAHPPPRLLAT

SEQ ID NO: 129925 - protein, 43 aa, Oryza sativa
  Clone ID: PAT_MRT4530_32135C.1.pep
MATSIFTSAVVAPARAKGLSYISRRGSALTIRCNGGKKIKNDK

SEQ ID NO: 129926 - protein, 111 aa, Oryza sativa
  Clone ID: PAT_MRT4530_32136C.1.pep
GSRIPSLKTTTTVLPLHGPKRDFTANVYHLGNDAQLQHLLDPTRTPRLTLGIRDHLRMRLTYGARTTPTTTTCMHDVQTTQHRIRSIMALPMDRDYLKAMEQLEYIPSNTT

SEQ ID NO: 129927 - protein, 51 aa, Oryza sativa
  Clone ID: PAT_MRT4530_32137C.1.pep
HSWQSYPWRHRCRARLSALPQRLSHGSAHVQRMVMTCVGRSPAGLDPRLDP

SEQ ID NO: 129928 - protein, 180 aa, Oryza sativa
  Clone ID: PAT_MRT4530_32138C.1.pep
MISAKRLVQLAKKWQRMAALGRKRVMAAAQETEECSTSVAVKGHCVMYTADGRRFEVPLVYLGMRVFIELLRMSQEEFGFTSDGRIMLPCDAAEMEYAMCLLKRNASADVVNALLSSMLTSCRYTDWNIAHDVLMTLSPYPAFPTMPNLAGYLLLSNYKSMAKWPPNTITSSTNKALQLR

SEQ ID NO: 129929 - protein, 133 aa, Oryza sativa
  Clone ID: PAT_MRT4530_32139C.1.pep
MSPLSQFRSEQHKRKFSEKGGATQEKTVHGWENTGEHQRLDGVVTVADQRGELGSRSMSIGRLDGVEMLADQQSVLGSGSSGREDHLKDEHLYAFKRKKKSIIDLHSGSHVPTIYIVDVFQDSYCKMYLILTK

SEQ ID NO: 129930 - protein, 145 aa, Oryza sativa
  Clone ID: PAT_MRT4530_3213C.1.pep
MKRVLVDGGASLSIISPAAFDALKAPGMKLQSSLLIIGVTPRHTSSSRPTLVKFMATNHYAYLQMKMPGPAVPITVFGDVKVALACAEQRADNLAVATEPQAPEATASRASKKRLTSANEVPVKEIPLGDDPSKTAKIGGTLDAK

SEQ ID NO: 129931 - protein, 682 aa, Oryza sativa
  unsure (1)..(682): unsure at all Xaa locations
  Clone ID: PAT_MRT4530_32140C.1.pep
DESLVRVLTGPRLAETNTSDGPSYSFPGLAALPASVAVRIXRCRRLVRLLSRXRLLCPRRLLRPPPSPSASPALPALAAVXLSLRRRTSPSPLPLPSVGPALSPLPLRFASGRRQAPAGGGAAGGAASGWARGNHQVRFDIMSSSYVSLEDQEEYKMIGTVVFSSEEESYKELKHFERTDQKREPRALIRCGYLAKIEIDWNEEKGVWFVQEFDNQHTHELANPYHVAFLGVHRVMSDSKKAQAVELRMSGLRPFQIMEVMENNHDESDEVGFVRKDLYNFFTRYEMKNIKGRDAEDVLKYLTRKQKEDIDFFFKYTTDEGGRLRNVFWADVESRLDYAAFGGVVIFDSTYRVNKLCTWHIEENMSRHLRKPKLDELRKLIYESMDEDEFERRWAEFKENGGTRNGQWIALMYRLREKWAAAYTDGKYLLVMRSNQRSDSLNSKLHTLLKRNMSLMYLVKHVKLCIQRLRKKEAQLDAKSINSVPFCRIDADPLEKYAARIYTAVVFKKVRAQIRLIAGLEVISGTNQDGSSLYAVGLKDDNEVWDEVRVTFRGQALEGVECHCXKMECEDIPCSHIFVVLKFLGLDTIPRCCVMDRWTMGAKAAFRSYRNTDPNVWSEHMVRYRSLRNLGSDAFFEAARNPEQTEKAMDFLKGVLDKGSSSHDETTYYNLGPMNLRYSTRN

SEQ ID NO: 129932 - protein, 1214 aa, Oryza sativa
  Clone ID: PAT_MRT4530_32141C.1.pep
MKPPVAMDSAGGNSGKLFDEMPPRSSDRGCPRSPSPAAMEHGFDRHCVVLGGMPKKRSRLELDAGVSLWAGLQPDILGIVLHFLPCLADRARMRSVCRHWRASANGHVLPPPLPLLMLPGFKFSSLSDKGDLMPVRCVPVPKEVAADDLRCVGYFDGWLVGVTPNKDRSDEYNRDADGDCFLVNVFSRKVIRLPQLCHMRYNFPAYSSKTLRIINGSGEVYFRVNDIYTMSLCNVALSASPDSRGKYIVAASSDHKCASKLALWQPGMISWHICAGVDIDGPRDLTFYLGKLYVLQRYKIRLFAFEVGEDNGGLMVSRVKRCLSALPLHHPYQGGGAISCNMVVWRGELLLIIRHYSDNYRDREVLKVEVFALDVNTNPYGLTEIHSLNGDCIFVGLGGCKSFPAGLHHGVEGDHIYFVPDDWKPYDTFVYSMRDAGVWKPTAGALPEFDLRKENPCNTDQSEQNKNTDQGGLKAELRRSISCLTKAGVDTVPQFLPQPRRLARLRRRPYRIGSHLRFASQVRSDIMTSSYVSLEDQEEYKMMGTVVFSSEEEGYKFYLDYAKGKGFSVRKNNLKRKDGEIIWRQFVCSCEGYRELKHFERTERIREPRALTRCGCLAKLEIERNEEKGVWFVKEFDNQHTHELANPDHVAFLGVHRVMSDSKKAQAVELRMSGLRPFQVMEVMENNHDELDEVGFVMKDLYNFFTRYDMKNIKGHDAEDVLKYLTRKQEEDAEFFFKYTTDEEGRLRNVFWADAESRLDYAAFGGVVIFDSTYRVNKYNLPFIPFIGVNHHRSTTIFGCGILSNESVNSYCWLLETFLEAMRQVHPKSLITDGDLAMAKAISKVMPGAYHRLCTWHIEENMSRHLRKPKLDELRKLIYESMDEEEFERRWADFKENGGTGNGQWIALMYRLREKWAAAYTDGKYLLGMRSNQRSESLNSKLHTLLKRNMSLMCLVKHVKLCIQGLRKKEAQLDAKSTNSVPFCRIDADPLEKDAARIYTAVVFKKVRAQIRLIAGLEVISGTNQDGSSLYVVGLKDDNEVWDEVRVSFKGQALEGVECHCRKMECKDIPCSHIFVVVKFLGFDTIPRCCVVDRWTMGAKAAFRSDRNADPNVWSEHMVRYRSLRNLGSDAFFEAARNPEQTEKAMDFLKGILDKGSSSDENIVAGDFGPMPTHFSSSNQPLEKRVLDPEEIRAKGAPSKRRRPFRETLHTNNQ

SEQ ID NO: 129933 - protein, 47 aa, Oryza sativa
  unsure (1)..(47): unsure at all Xaa locations
  Clone ID: PAT_MRT4530_32142C.1.pep
PSVRTRGEWGGLCKIASKGXASKVVECSXVDVKEYGEKSXGLNIVQE

SEQ ID NO: 129934 - protein, 393 aa, Oryza sativa
  Clone ID: PAT_MRT4530_32143C.1.pep
SAALVGVTAIIWFEFRATLRCNILEVWIPSPNSSPNLAALPASVAVRIALVRIFGYRELKHFERTERKREPRALTHCGCLAKLEIERNEEKGVWFVKEFDNQHTHELANPDHVAFLGVHRVMSDSKKAQAVELRMSGLRPFQVMEVMENNHDELDEVGFVMKDLYNFFTRYEMKNIKGHDAEDVLKYLTRKQEEDAEFFFKYTTDEEGRLRNVFWADAESRLDYAAFGGVVIFDSTYRVNKYNLPFIPFIGVNHHRSTTIFGIDADPLEKDAARIYTAVVFKKDDNEVWDEVRVSFKGQALEVKFLGFDTIPRCCVVDRWTMGAKAAFRSDRNADPNVWSEHMVRYRSLRNLGSDAFFEAARNPEQTEKAMDFLKGILDKGSSSDENIVAGDF

SEQ ID NO: 129935 - protein, 36 aa, Oryza sativa
  Clone ID: PAT_MRT4530_32144C.1.pep
YQICSRYISCVYIAGRLCYSHTSSAQTTTFVSTLNN

SEQ ID NO: 129936 - protein, 447 aa, Oryza sativa
  Clone ID: PAT_MRT4530_32145C.1.pep
MSDGARVEAAPRLAQWRVDVLPCYTYRKSEPFRIGLWNWYLSVERNNKQTCVKKTIVHPGIFDKPLKHEGFVWAIDSTVTGRFVIEIEFLDLKIADPSYNSLTGSNSAFQGGEPASIWASHQIKKSSDNTALSSLARMLQEGILTDITINATDGSIMAHRAILASRSPVFRSMFSHDLKEKELSTVDISDMSLEACQAFLNYIYGDLRSEEFLTHRLALLRAADKYDISDLKEACHESLLEDIDTKNVLERLQMAHLYRLQKLKDGCLRFLVDFRKVYEMHDDFKVFLQTADRDIIAEIFQGTGATTAAVLGLSSTASSPMATHARRAAEARVWRGGLRATETREWRRAPTRRDGPISLDGRLAGIVLRARSRNSSPHRLNPRSSSGSGVYGSGGGGGRADETAGLKGDPYAVGVDAVMEFPGSPSYGPDRVIYLRPLSGEFPGYYG

SEQ ID NO: 129937 - protein, 687 aa, Oryza sativa
  unsure (1)..(687): unsure at all Xaa locations
  Clone ID: PAT_MRT4530_32146C.1.pep
MHGIRSEAGTGSRRRGRWLFLPAGGVAAGGAVRRICPTQAPAGGGTASGSARRNPQVRFDIMTSSYVSLEDQEEYKMMGTMVFSSEEEGYRFYLDYAKGKGFSVRKNNLKRXDGEIIWRQFVCSCEXGYRELKHFERTDQKREPRALTRCGCLAKLEIERNEEKRVWFVKEFDNQHTHELANPDHVAFLGVHRVMSDSKKAQAVELRMSGLRPFQIMEVMENNHDESGEVGFVMKDLYNFFTRYEMKNIKFCDAEDVLQYLTRKQEENPQFFFKYTTDEEGRLSNVFWADAESRLDYAAFGGGVIFDSTYRVNHHRSTTSFGYGILSNESVNSYCWPLETFLEAMRQVHPKSLITDGDLAMAKAISKENMSRHLRKPKLDELRKLIYESMDEEEFERRWADFKENGGTGNGQWIALMYRLREKWAAAYTDGKYLLGMRSNQCSESLNSKLHTLMKRNMSLMCLVKHVKLCIQRLRKKEAQLDIKSTNSVPFCRIDTDPLEKDAARIYTTVMFKKVRAQIRLIAGLEVISGTNQDGSSLYVVGLKDDNEVWDEVRVTFKGQALKGVECHCRKMECEDIPCSHIFVVLKFLGFDTIPHFCVVDRWTMGAKATFRSDRNTDPNVWSEHMVRYCSLRNLGNDAFFEAARNPEQTEKVMDFLKGFLDKGSSSHENIVAGDFGPMPTHFSSSN

SEQ ID NO: 129938 - protein, 336 aa, Oryza sativa
  Clone ID: PAT_MRT4530_32147C.1.pep
MDALPDAADAAQLAAAAAPPQKRDEWSESGIVRLLEAYEAKWLLRNRAKLKWSDWVDIAHEVSAHCAMENAAATGKPGSSTAKTPNQCKNKIESMKKRYRAESAAAARAGPAAAGAGPSWRFFARMDGLLKGPAGSGQPQAELSNSIDLRAPPPAKVEVDVDADFVSQLADAGPGALSELVSAYANGSIQEKLDKVENSGHVEGRAAESDVNVSSPRIKEANEDAEEVDKVWDMSKKRKNTEFDIAKSIELLASSFLKIERARMDLYRETERMRVEAEIKKGEMELKRTEIMAKTHLQIAKLFAKRLKECSSKTGGSSSVTAEVDNHAKKGENGSG

SEQ ID NO: 129939 - protein, 177 aa, Oryza sativa
  Clone ID: PAT_MRT4530_32148C.1.pep
RVEAAPRLAQWRVDVLPCYTYRKSEPFRIGLWNWYLSVERNNKQTCVKVFAELSNSAKNTTPAPIACFITKLLISFPPNQKTIVHPGIFDKPLKHEGFVWAIDSTVTGRFVIEIEFLDLKIADPSGGEPASIWASHQIKKSSDNTALSSLARMLQEGILTDITVNATDGSIMAHRAI

SEQ ID NO: 129940 - protein, 318 aa, Oryza sativa
  unsure (1)..(318): unsure at all Xaa locations
  Clone ID: PAT_MRT4530_32149C.1.pep
MHLCLSEQGSPRTQSPAAVDPSLDRSGVVLGGMPKKMSRLELDAGVSLWAGLQPDILGIVLHFLPCLADRARVRSVXPSLTSQRERPRPATAAAPAGASWFQVLEPIRQGGFDACAVIRLPQLCHMRYNFPAYSSKTLRIVNGSGEVHFGVNDIYTMSLCNVALSASPESSKYIVAASSDHKGAPVPALWQPGMISWQVCSGVEIDGPRDLSFYQGKLYMLMRHRTRLFTCELEEDDRGFMEGGAISCNMVVWRGELLLIIRHYNGDYRGCKSFPAGLHHGVEGDHIYFVPDDWKPYDTFVYSMRDDYLLYFLLNWQP

SEQ ID NO: 129941 - protein, 162 aa, Oryza sativa
  unsure (1)..(162): unsure at all Xaa locations
  Clone ID: PAT_MRT4530_3214C.1.pep
HASGLNLIGADTRXVIFYEQDWNPQADKQALQRAHRIGQLNNVLSINLVSQRTIEEVIMRRAERKLKLSHSVIGEEDATYGKGKYVENEASDMRSIIFGLHLFDTSDTTAETMNDDTASETIKEETMLKLKSMSEKVVLMRSHEPSEKDERAFEINPNMTDN

SEQ ID NO: 129942 - protein, 651 aa, Oryza sativa
  Clone ID: PAT_MRT4530_32150C.1.pep
MATAKKLGEKDVAYLSVLPFMLLRILHSQVWLTISRLMDARGNRRRIVERGIEFEQSGSCDSILLHALQGLITTDYAKGKGFSVRKNNLKRKDGEIIWRQFVCSCKEYRELKHFERTEWKREPRALTRCGCLAKLEIERNEQKGMWFVKEFDNQHTLELANPDHDAFLGVHRVMTDSKKAQAIELRMSGLRPFQIMEVMENNHDESEEVSFVMKDLYNFFTRYEMKNIKGRDAEDVLKYLTRKQEEDPEFFFKYTTDEEGRLRNVFWADVESRLDYAAFGGVVIFDSTYRLLETFLEAIRQVHPKSLITDGDLAMAKAISKVMPGAYHRLCTWHIEENMSRHLRKPKLDELRKLIYESMDEEEFERRWADFKENGGTGNGQWIALMYRLREKWAATYTDVKYLLGMRSNQHSESLNSKLHTLLKRNMSLMCLVKHVKLCIQRLRKKEAQLDAKCTNSIPFCRIDADPLEKDTARIFTTIVFKKVRAQIWLIAGLEVISGTNQDGSSLYVVGLKDDNEVWDEVRVTFKGQALEGVECHCRKMECEDIPCSHIFVVLKFLGFDTIPRCCVVDRWTMGAMAAFRSDRNTDPNVWSEHMVRFRSLRNLGSDARNPEQTEKAMDFLNGILDKGSSSHENIVAGDFAPMPTHFSSSN

SEQ ID NO: 129943 - protein, 663 aa, Oryza sativa
  Clone ID: PAT_MRT4530_32151C.1.pep
MRVRSLLLLEGSGAVKIAGGAASGSAWRNLRGIKERRHDYLCWMRITQVIATSVILGLLWWHSDPSTPKGLQDQVRSDIMNSSYLSLEDQEEYKMMGNVVFSSEDEGYKFYLGYAKGKGFSVRKNKLKRKDGEIIWRQFVCSCEGHMELKHFERIDRKMEPRDLTRCGCLAKLEIELNEEKGKAQAVELRMSGLRPFQIMEVMENNHDELDEVGFVMKDLYNFFTQYKMKNIKGRDAEDVFKYLTKKQEKDAEFFFKYTTDEEWHLRNVFWADAESRIDYAAFGGIVIFDSTYCANKIDADPLEKDATHIYTAVMLKKIRAWIRLIVGLEFISGTNQDGSTLYVVGLKEDNEVWDEVRVTFKGQALPGVKCHFLKMDCEDIPCSHIFVVLKFLGFDIIPRCCVVDRWTMGATAAFRSDKNNDPNVWSEHMVRYRSLRNMGSDAFFEAARKLEQTKNVMDFLNGVLDKGSASHENIVAADFGPMPTHFLSSNQPLEKRVLDPDEIRAKEAPSKRQRPFRVEPASTYPNLGMSPEWYGSLEWVFPEVQYSSMCIKIAISTGGHACFGDPGFEGWMRSIESEYKDKFRGWVGFTVLVSHRITACCDILLMSSRFEPCGLNQLYAMQYGIVPVVHGTGGLRVKNQEGVANFDDILAKSVAFMVARVD

SEQ ID NO: 129944 - protein, 98 aa, Oryza sativa
  Clone ID: PAT_MRT4530_32152C.1.pep
DPIQVDGLIFLFFLTLIITLYTDNIIVPQRGTKMKQYILQEELAASYSSYLLACFYPTFKMDHHSNNNIRIIISILLRLMHLWSPISITYRPLSILAN

SEQ ID NO: 129945 - protein, 525 aa, Oryza sativa
  Clone ID: PAT_MRT4530_32153C.1.pep
MTSSYEEGYKFYLDYAKGKGFSVRKNNLKRKDGEIIWRQFVCSSEGYRELKHFERIERKREPWALTHCGCLAKLEIEWNEEKGVWFVKEFNNQHTHELANPDHVAFLGVHRVVSDSKKAQAVELRMSGLRPFQIMEVMENNHDESEEVGFVMKDLYNFFTRYEMKNIKGRDAEDMLKYLTRKQEEDPEFFFKYTTDEEGRLRNVFWADAESGLNYAAFGGVVIFDSTYRVNKYNLPFIPFIGVNHHRSTTIFGCGILSNESVNSYYWLLETFLEAMRQVHPKSLITDGDLAMANAISKLCIQHLRKKEAQLDAKCTNSLPFCRIDADPLEKDAARIFTAVVFKNVRAQIRLIAGLEVISGTNQDGSSLYVVGLKDDNEALEGVECHCRKMECEDIPCSDIFVVLKFLGFDTIPRCCVVDRWTMGAKAAFRSDRNTDPNVWSKHMVRFRSLRNLGSDAFFEAARNPEQTEKAMDFLKGILDKGSSSHENIVAGDFGPMPTHFLSNNQPLEKRAFFDIHDAHMWDLS

SEQ ID NO: 129946 - protein, 55 aa, Oryza sativa
  Clone ID: PAT_MRT4530_32154C.1.pep
SPRGSSAPGTSPSLSPSPSSLSIFGDLTIQSFSSIFHVNGLWFCYPILETSCRLL

SEQ ID NO: 129947 - protein, 730 aa, Oryza sativa
  unsure (1)..(730): unsure at all Xaa locations
  Clone ID: PAT_MRT4530_32155C.1.pep
ADIAMLADAGVDSVALFLPWPRRLXLRRRPYRSPSXALSASLVRSDIMTSSYVSLEDQEEYKMMGTVVFXSEEESYKFYLDYAKGKGFSVRKNNLKRKDGEIIWRQFVCSCKEYRELKHFERTEWKREPRALTRCGCLAKLEIERNEQKGMWFVKEFDNQHTLELANPDHDAFLGVHRVMTDSKKAQAIELRMSGLTPFQXMEVMENNHDESEEVSFVMKDLYNFFTRYEMKNIKGRDAEDVLKYLTRKQEEDPEFFFKYTTDEEGRLRNVFWADVESRLDYAAFGGVVIFDSTYRVNKYNLPSIPFIGVNHHISTTIFGCGILSNESVNSYCXLLETFLEAIRQVHPKSLITDGDLAMAKAISKVMPGAYHRLCTWHIEENMSRHLRKPKLDELRKLIYESMDEEEFERRWADFKENGGTGNGQWIALMYRLREKWAATYTDVKYLLGMRSNQHSESLNSQLHTLLKRNMSLMCLVKHVKLCIQRLRKKEAQLDAKCTNSIPFCRIDADPLEKDTARIFTTIVFKKVRAQIWLIAGLEVISGTNQDGSSLYVVGLKDDNEVWDEVRVTFKGQALEGVECHCRKMECEDIPCSHIFVVLKFLGFDTIPRCCVVDRWTMGAMAAFRSDRNTDPNVWSEHMVRFRSLRNLGSDARNPEQTEKAMDFLNGILDKGSSSHENIVAGDFAPMPTHFSSSNXPLEKRVCDPDEIRAKGAPSKRRRPFRETLHTKNQ

SEQ ID NO: 129948 - protein, 53 aa, Oryza sativa
  unsure (1)..(53): unsure at all Xaa locations
  Clone ID: PAT_MRT4530_32156C.1.pep
PTRDRTLQRPPPPPPAAGPLSLRPAYXSRSAERXVSPHAIQGSPDFDSFLTNY

SEQ ID NO: 129949 - protein, 292 aa, Oryza sativa
  Clone ID: PAT_MRT4530_32157C.1.pep
MAVARLVVITPAVLLGRTARVSPSAVPRLRPIVAGRRAVAAPTRAVLGDGAGVGGEEDAVVAVVEEDAVARRAARKRSERRTYLVAAVMSSLGFTSMAAAAVYYRFAWQMEAGGGDVPATEMVGTFALSVGAAVGMEFWARWAHRALWHASLWHMHESHHRPRDGPFELNDVFAIANAAPAISLLAYGLLNRGLLPGLCFGAGLGITLFGMAYMFVHDGLVHRRFPVGPIENVPYFRRVAAAHQIHHTDKFEGVPYGLFLGPKELEEVGGTEELDKEIKKRIKRKEAMDAIR

SEQ ID NO: 129950 - protein, 89 aa, Oryza sativa
  Clone ID: PAT_MRT4530_32158C.1.pep
GRRHGAGTRTAAWSSKDERRRVVAAVGSAPMLLALSLYTATPTGLALTSCHHGGRADPPADVAGTSAPRQLALRWPTSAPSALALTFGT

SEQ ID NO: 129951 - protein, 55 aa, Oryza sativa
  unsure (1)..(55): unsure at all Xaa locations
  Clone ID: PAT_MRT4530_32159C.1.pep
LIRLIADPVLVWRKRGQCGXIDTCKTGLRGPLXKALATGVSKLNRPELEAACEDF

SEQ ID NO: 129952 - protein, 1344 aa, Oryza sativa
  Clone ID: PAT_MRT4530_3215C.1.pep
MVYTRNGSRTTGEGSNGEERTDGVHPNSDSGNGPPPLPENPTLAQVMAHQTQMMAAMMQQQHQQMHQRMQQQAEQHQQQFGPPPPQSKLPEFLRVRPPTFSSTTNPMEANDWLNAIEKKLNLLQCNDQEKVAFATHQLQGPASAWWDNLMATRPPGTEVTWAEFCRSFRKAQVPDGVVAQKKREFRALHQGNRTVTEYLHEFNRLARYAPEDVHTNAEKQEKFLAGLDDELTNQLISGDYADFERLVDKAIRQEDQRTKMDRKRKAAQFRSNQGSHQRPRFTPGQQGGPTTMIVRQHRPFNSSSFHQGASGSQNHHGGQPNHSAAPRPPMAPVQSAPSAQAKKETGTKPGSCFNCGELGHFADKCPKPRRAGPRFIQARVNHASAEEAQAAPEVVLVTLTNKKGETVVYKSLVSPKQGVSLNQIEVEIPVVTEGKSSRKLEDIPIVCEYPKVFPEDLTTMPPKREIEFRIDLAPGTAPIYKTPYRMAANELAEVKKQVDEQLQKGYIRPSTSPWGAPVIFVEKKDKTKRMCVDYRALNEVTIKNKYPLPRIDDLFDQLKGAKVFSKIDLRSGYHQLRIQEEDIPKTAFTTRYGLYECTVMSFGLTNAPAFFMNLMNKVFMEFLDKFVVVFIDDIPIYSKSEEEHEQHLRLVLKKLKEHQLYAKFSKCDFWLSEVKFLGHVITAQDVAVDPSNVESVTKWTPPNTVSQIRSFLGLAGYYRRFIENFSRIARPMTQLLKKDEKFKWTAECDKSFEELKKKLVSAPVLILPDQMKDFQVYCNASRHGFGCVLMQEGRVVAYASRQLRPHEGNYPTHDLELAAVVHALKIWRHYLIGNRCEVYTDHKSLKYIFTQPDLNLQQRRWLELIKDYDMSIHYHPGKANVVADALSRKSYCNALCTEGMCKELQQKLEHLNLGLVEYGYMAALEARPTLVDQVRAAQVNDPEITELKKNMRVGKARDFHEDEHGTIWLEERLCVPDDKELKDMILTEAHQTQYSIHPGSTKMYQDLKEKFWWVSMRREIAEFVTLCDVCQRVKAEHQRPADLLQPLQILEWKWEEIGMDFITGLPRTSSGHDSIWASLQMAPFEALYGWKCRTPLFWDQTGERQLFGTEVLTEAEEKVRTIRERLRIAQSRQKSYADNRRRELTFEAGDNVYLRVTPLRGADSEHIDIQEDLTYMEKPVRILETSERRTRNKVSPSRVRTSASPVFAASLVFRRRSSPPPPVRTPSPFLSFPIPRAPSVLAAPLLRLCASAFVPSAAASSHGRPAGFEAEPSPAATPCAVRSARGRSGPSVLWTGGGPPAWSRSTVDRPLCAADPWGPRAGAPSLSPCATDMRAPHVGAARSL

SEQ ID NO: 129953 - protein, 318 aa, Oryza sativa
  Clone ID: PAT_MRT4530_32160C.1.pep
MAVARLVAARAPLLSPAAVAAAHRSPPALLRLAFAPLPARLAVPLRVAVGEPEPEEDARRAVAERAARKQSERRTYLVAAVMSSLGITSMAAAAVYYRFAWQMEVGNTPSPNSRSHLTITQFGNSFAAALKFLRVLDQGSGEIPVTEMFGTFALSVGAAVGMEFWARWAHRALWHASLWHMHESHHRPRDGPFELNDVFAITNAVPAMSLLAYGFFTRGLVPGLCFGAGLGITLFGMAYMFVHDGLVHRRFPVGPIANVPYFRRVAAAHQIHHMDKFEGVPYGLFLGPKELEEVGGIEELEKEIKRRIKRKETLDAIQ

SEQ ID NO: 129954 - protein, 109 aa, Oryza sativa
  unsure (1)..(109): unsure at all Xaa locations
  Clone ID: PAT_MRT4530_32161C.1.pep
TPTRDQAVVAPSRSHXPPPHSTAXPRRSRGRPQPPPPSIAVPAGAEVVPSHHYRRKRVRLREAAPVIGHRRHAFRKAVAVVVGRGLTTRGQGSGATGAQCSCVVRAASH

SEQ ID NO: 129955 - protein, 116 aa, Oryza sativa
  Clone ID: PAT_MRT4530_32162C.1.pep
MVNGMVDADGGGGARGVFISLGLGGVAIDGTRLLVGGPAGGGRRGGPAAASAGRRGGRWWRRWRLAAAAAPRGGPGGGGCPSGGPRGGGLRGGAGGRVAAADCGAARRPRAGQGVF

SEQ ID NO: 129956 - protein, 139 aa, Oryza sativa
  unsure (1)..(139): unsure at all Xaa locations
  Clone ID: PAT_MRT4530_32163C.1.pep
SLAPAPPPSTLPPPXPIPPTQRPTPPPRPPPSPPGTPRTAXPPPPPPGSYANAGSTPIPPAPGAXQPARARAAQQPPPPPRRRRRGGASSRRLRQPAGERQQEERDRDGDGARHGGAHGVGDGAVQPHQDVHRHEAVAP

SEQ ID NO: 129957 - protein, 84 aa, Oryza sativa
  Clone ID: PAT_MRT4530_32164C.1.pep
GRQERRAGGGRRGGPAAASAGRRGGRWWRRWRLAAAAAPRGGPGGGGCPSGGPRGGGLRGGAGGRVAAADCGAARRPRAGQGVF

SEQ ID NO: 129958 - protein, 238 aa, Oryza sativa
  Clone ID: PAT_MRT4530_32165C.1.pep
PSPARGRGGRAGKSGARAATCRCSPRGRGARTTAAAAPSRRPRRPPGTPHTARRRRAACPRRRPRRRRRGARTRTRAARRWPGRRARTTRTGAPAAAPPAPRGRYRRRRRRSPRRARGPARRRRRPWARASRRGRAAGRAPRWRRRPWRRRRRRRARTAAAATRTPPRCRSRRAPRRRPAVRRAPPPPTAQAAPPSAWPPILPSSSSSRSLALAPPLHHARAAAKRSKNPRARGGILV

SEQ ID NO: 129959 - protein, 159 aa, Oryza sativa
  unsure (1)..(159): unsure at all Xaa locations
  Clone ID: PAT_MRT4530_32166C.1.pep
MAAATMALSSPALAGKAAAKVFGXGRITMRKSAAKPXPAASGSPWYGADRVLYLGPLSXXPPXXLTGXFPGDYXWDTAGLSADPXTFAKNRELXVIHSXWAMLXALGCVFPXLLPXXGVXFXQGVXFXAGXXXFXXGGLHYLRXXXLIHAXNILPXXAV

SEQ ID NO: 129960 - protein, 55 aa, Oryza sativa
  Clone ID: PAT_MRT4530_32167C.1.pep
SQFWFSRTSRWSRRGFVQLLPLKVQCIRRCWPCQSWSLCGSQWLFTDSACGFTRP

SEQ ID NO: 129961 - protein, 89 aa, Oryza sativa
  Clone ID: PAT_MRT4530_32168C.1.pep
MVQKDCMPWLSLPGRVLFDSRKRAPRYGHTDTGGQHKVGPTYQYLVPSCCSVWTNRLRREIRLGMRAHTASTGERSTMARLINRELTPD

SEQ ID NO: 129962 - protein, 464 aa, Oryza sativa
  Clone ID: PAT_MRT4530_32169C.1.pep
MGKRLAGAEKEVLVEIVRFTQKNGLKGAEGGWKDFLARNDKKFGASVSDPKKRSKDVLLAFLLTFSKDFQKVYFGKLIRRLNERSAFEQFLKEFPDKISPQLKLVQLTAEHPEYRKNYNFPSYKEGWKVLREGKITNFMKSTMLAIDCEMVLCHDGTEALVRVCVVNSNLEVKLDELVNPLKAVADYRTSITGLSKKDLKGVTCSLVDVQKSLKKLLSKGKILIGHSLSKDLHALKFDYSRVIDTAYIFKYANLPTTASASLNSLCKSVLGYAVREEGEPHNCLKDAEAAMNLVLAKLKHGFNDPIEIARDSVPESDMMKLLAHKIPVYLPCQELLKLFSGNPSIDEKIDSRVRGDYYSTCISFGDRDEVEKAFDELDGQEAKDSSGRLQKNVLLKRDNGDVASFYVRKMAYGAQLNKSELSNKRPPPTEHVEPTKEDNDGDKQKKRKTGKKHEKKKAKISVAE

SEQ ID NO: 129963 - protein, 80 aa, Oryza sativa
  Clone ID: PAT_MRT4530_3216C.1.pep
NFSHLVDAEGEVNEAGRRLLQLKREWLTRAHGRADGNGEFRFRGHHGAYHVDVVTPAGAKISQEFTVDKDDAPLVLNITV

SEQ ID NO: 129964 - protein, 204 aa, Oryza sativa
  Clone ID: PAT_MRT4530_32170C.1.pep
MAEEKKTPCLNERILSSLSKRSVAAHSWHDLEIGPGAPQVFNVVVEITKGSKVKYELDKKTGMIKVDRVLYSSVVYPHNYGFIPRTLCEDGDPMDVLVLMQEPVIPGCYLRAKAIGLMPMIDQGEKDDKIIAVCVDDPEFRHFNDLKELSPHRLAEIRRFFEDYKKNENKEVAVNDFLPPATAQEAIKYSMDLYAEYILHSLRR

SEQ ID NO: 129965 - protein, 590 aa, Oryza sativa
  Clone ID: PAT_MRT4530_32171C.1.pep
MQALLIFAILAVLAGVVQGQQWCQPFSCGHLSNISHPFWRRGDPHRCGVSSYELECSSGKATIQINTGTYYVTSINYNDSSFWVVDANLQDANSNCPLPRSNHRPFIWGIPGPSYTRELTLQGIWWATFVNCSQAVKNNNKYIHVDCQNTSSSFVYVLNVAPYYALMENLEPSCGYLAMIPVSWTPASGKKYQYFAELMRKGFSVRFPFVLDHPTAFELIKQCLNRSIRFVLAPLALLTFLAQRYWKTRITIDAVEKFLRMQLMLGPTRYTYTDIIAMTSHFRDKLGQGGYGSVFKGVILPGDVYVAIKMLDNYNCNGEEFISEVSTIGSIHHVNVVRLVGFCAEEMRRALVYEYMPHGSLDKFIFAPEKSFSWDKLNEIALGIARGINYLHQGCDMQILHFDIKPHNILLDSNFVPKVADFGLAKLCPRDNNYVPVSAARGTVGYIAPEMISRSFGVISSKSDVYSFGMLLLEMAGGRRNSKQNMSSSTQVYYPSLVYNQLIQQEMGEITNTLNMHELERKLCVVGLHCIQVKPPDRPTMSEVIEMLEGDVDGLQLPSRPFFCDDEPLPLLVDSYRFSSELTEISEEDG

SEQ ID NO: 129966 - protein, 37 aa, Oryza sativa
  Clone ID: PAT_MRT4530_32172C.1.pep
VLAVRPSGHHDVDADRAELRLILLGIPDHQRANPTHH

SEQ ID NO: 129967 - protein, 68 aa, Oryza sativa
  unsure (1)..(68): unsure at all Xaa locations
  Clone ID: PAT_MRT4530_32173C.1.pep
MAAATMALXYPALAGKAIKEGFGEGRITMRKSEDKPKPAVFESPWYGADRVLYLRPLFGXPXSYLTGE

SEQ ID NO: 129968 - protein, 460 aa, Oryza sativa
  Clone ID: PAT_MRT4530_32174C.1.pep
MSAITTELLVLDDAAAGASKAAPGTGEARAAPDPRHHRRPPRSTSSSPPREEGPDASAGGTASFTLKTIQIYFQRPKVQAFMVWPYDPRAILMLERKRQLPVDRVDSHAGREEELLPRRIAARRALADDTDSINQYDQQRGQFFLHKGLMKREIFYKTQHMEREKSKQQKIEKRAKTCIPYCLLPPNTRTSQFTCRPIEESQEKKQEIGKEHCAEPRNRLRQSAGIELYLTKSQELSHYKESRNADMPRTQIRLGGRRRRRGSAARWFATGGRSRGGRRGYIRGGRALAVRPSGHHDVDADRAELRLILLGIPDHQRANPTHHRRLLLRSANTLERNTLKKKPKEAVTTEEKVTEPGEKQLSPNPPNRVTSNRESGTTKGKKRLPGGEQHTPTPKVQQQRMKTAHPQDGLTSTDSGTEDDKQQRPPARASHQRRGDNTNPKRTRKTQKSQQGKSTCTYPA

SEQ ID NO: 129969 - protein, 194 aa, Oryza sativa
  Clone ID: PAT_MRT4530_32175C.1.pep
MATTRVTAITAAGTPLIDHTLFWGVVQFSMTVKQSVERIVNACLSCDHERLAGKHGCTGRISMGAKNMVMEMVVSVLPLFRTVLIPTPGYAAAYTINYWGWFGFGSSGLYEIQSNGTAEHNHGGCIFSFCSLGDAMLEESTLPLPESSHKGSVRITGWMMDWIYWCSTTVPVLFLSQVYNVVRTDYADVVRFRA

SEQ ID NO: 129970 - protein, 75 aa, Oryza sativa
  Clone ID: PAT_MRT4530_32176C.1.pep
PSNSHSRPNRRPVGACRGEKETAFTAGRGGNSKCRGGNQKEAIQPRGYQENGEVACSAWNTNYSPPRGRPKVVKK

SEQ ID NO: 129971 - protein, 67 aa, Oryza sativa
  Clone ID: PAT_MRT4530_32177C.1.pep
MWLMISPMGQGGFNLYQEASFGDVPGQPTVPRERPKHGLAVGPCRTWAGPNWRALDRAMGLMPYGHL

SEQ ID NO: 129972 - protein, 642 aa, Oryza sativa
  Clone ID: PAT_MRT4530_32178C.1.pep
MWRRQHALLRRISLPKPPAATGIGCYYATEPEGRKPKTAPLQSRGMVDRFRLRAKGGDGGNGCISLRRSRSDRQGKPDGGNGGRGGDVILECSRSVWDFSGLQHHMKASRGANGVSKNQIGTRGSDKIAQVPVGTVIHLVEGEQPSLSVNKPTRALDPWDIPDAVEHSPFSSSRIGSKMMKGLDSSRSSQHISSKKNTAENDCERGNRNHRGKEPYYMTEFVRTEDYDGTSYPHQVGVDENDQFDDEDDEFWEDDEEELDMEEVTEEKEEEEDVRYSVAEMTKPGQRLIIARGGEGGLGNACILKEMWLSKAHKEEEMASLSTGHPGTETYLILELKSIADVGLVGMPNAGKSTLLSALSRARPEIADYAFTTLRPNIGSLTYEDYFSVKVADIPGLIKGAHENRGLGHAFLRHIERTKVLAYVLDLAATLNGRKGVPPWEQLRDLVVELEHYQEGLTKRPSLIVANKIDEEGADEMYEELKKRVQGVPMFPICAILQEGVPDLRVGLRDLMDASDPQGIELSKIVLASFYVLKELEDDGPVTGHTSGQLKQTSWQRSIKPIVVSVPLKDSKFSHDECYKEETVRRKKYPDLEEKSSSTKATVVLGVAPEKKAQQFEAAAESGETAHGCSCGSSCRCNPCNC

SEQ ID NO: 129973 - protein, 72 aa, Oryza sativa
  Clone ID: PAT_MRT4530_32179C.1.pep
MSLYAVLTRPPRNLRDLRLGTPRADKALSDPVETKDQVKGPRALSSEKNPLTIRLGARESGTKTTKKANASP

SEQ ID NO: 129974 - protein, 691 aa, Oryza sativa
  Clone ID: PAT_MRT4530_3217C.1.pep
MAGNEWINGYLEAILDSGGAAGGGGVDPRSPAAGAASPRGPHMNFNPTHYFVEEVVKGVDESDLHRTWIKVVATRNARERSTRLENMCWRIWHLARKKKQLELEGILRISARRKEQEQVRRETSEDLAEDLFEGEKADTVGELAQQDTPMKKKFQRNFSELTVSWSDENKEKKLYIVLIVLISLHGLVRGDNMELGRDSDTGGQVKYVVELARALAMMPGVYRVDLFTRQVSSPEVDWSYGEPTEMLTSGSTDGEGSGESAGAYIVRIPCGPRDKYLRKEALWPYLQEFVDGALAHILNMSKALGEQVSNGKLVLPYVIHGHYADAGDVAALLSGALNVPMVLTGHSLGRNKLEQIMKQGRMSKEEIDSTYKIMRRIEGEELALDAAELVITSTRQEIDEQWGLYDGFDVKLEKVLRARARRGVSCHGRFMPRMVVIPPGMDFSSVVVPEDTSDGDDGKDFEIASPRSLPPIWAEVMRFLTNPHKPMILALSRPDPKKNITTLVKAFGECRPLRELANLILIMGNRDDIDEMSAGNASVLTTVLKLIDKYDLYGSVAFPKHHKQSDVPEIYRLTGKMKGVFINPALVEPFGLTLIEAAAHGLPIVATKNGGPVDIKNALNNGLLVDPHDQHAIADALLKLVADKNLWQECRKNGLRNIQLYSWPEHCRTYLTRIAGCRIRNPRWLMDTPAD

SEQ ID NO: 129975 - protein, 349 aa, Oryza sativa
  Clone ID: PAT_MRT4530_32180C.1.pep
MVSTMYKEAAATCGDGEHYSRLIRELCALLAAIISPSSSSSTAAAARSPGMSPAAAATMLLGASVALMLCGSVTFAIGLLLMPWVAGVALLFGLSAAVSTLSSGVFGKAAAAASSPVVTDLSLIITIKIFKRSVDLRVSPLQWPQSLDSESPIFLDKYGDREAARIPLPYQYKVPDFSKFSGQDDISTMEHISRFLAQCGEASAEEALKVRFFFPLSLTGSAFTWFSSLPSNSIQGWADLEKQFHDYFFAGVSELKLADLISVEPQEGESAMEYIQRFRNVRSRCYSLSLSDEQLADLAFQGLSAPIRDRFFFHEFDSLAHLMQTISAHESRLHEAKEDRFWSYQDNKF

SEQ ID NO: 129976 - protein, 51 aa, Oryza sativa
  Clone ID: PAT_MRT4530_32181C.1.pep
LEDPLGRVAVRRRLARGGRRCSFAHVPAEDGRWWSIKAIAMDWQGRAAGDN

SEQ ID NO: 129977 - protein, 127 aa, Oryza sativa
  unsure (1)..(127): unsure at all Xaa locations
  Clone ID: PAT_MRT4530_32182C.1.pep
PIDGHVGRPAWHGLGPAVPGPRLVGPARPDXRTGPCRASPRAALTAQARPNTPRAVPGRAEGTMGYFPILCVPGLACRPIVPGRHGPDPNWAVPCLGRAKPCRGPGLRASCLMAICTLALASDRVSL

SEQ ID NO: 129978 - protein, 119 aa, Oryza sativa
  Clone ID: PAT_MRT4530_32183C.1.pep
WRAPAHTPPRRHPRRPRSPRRARPPSGTAAPPRPARSGSPTPPPSATRRANAAAAPAATARGWFSLARQSMKMPRIPMRMARAWAFSSRSVTRPSCPSMTPSAAPSTALASAPDTTAAA

SEQ ID NO: 129979 - protein, 51 aa, Oryza sativa
  Clone ID: PAT_MRT4530_32184C.1.pep
KSKLVKRRLTGRPTVDLSPCDPRAHMTPSAIKVRAKTFSQLDRLEFSGADA

SEQ ID NO: 129980 - protein, 128 aa, Oryza sativa
  unsure (1)..(128): unsure at all Xaa locations
  Clone ID: PAT_MRT4530_32185C.1.pep
FFFFFFCINSTLFPRMVPSFYFPCGNKRHQIYQKKKDNLQVTVALXHFIPSLLDLCIAHFCALHTSNHRGAHIQFTFQLQLSTPLAQTAPFHHIGQSHNFNPNCKQHSTTVHKLAPVVIPAXQITSVL

SEQ ID NO: 129981 - protein, 266 aa, Oryza sativa
  Clone ID: PAT_MRT4530_32186C.1.pep
MARCSFFSSVGTNDVKGAGRVGGGGGGGGGALRRTSSPARTKKRSRSGAAESGDAQKDKLDDSIARCRQSDRAGKGAGCGDRRGWSGWSEREEREDAGRPTSRRAGQQARTEREAVMRPTSAQRGRRLGGHNDGHTKGIDVTMPSGSALSSGSSPSYSGGREGCYGGGEEGSRCSTPATPSPLTLTGSTTAARCASSWSTSSHHCLPWSVARMPCLRLADHDERALVSPSSPLPSTSPATESPAPRAYFSPSTFSPRSQWQPQALS

SEQ ID NO: 129982 - protein, 49 aa, Oryza sativa
  Clone ID: PAT_MRT4530_32187C.1.pep
DRPGCMYIGRFIQYSCNSIPYSRVYVLMVSITSFRRVYCLSIDLIRQLC

SEQ ID NO: 129983 - protein, 94 aa, Oryza sativa
  unsure (1)..(94): unsure at all Xaa locations
  Clone ID: PAT_MRT4530_32188C.1.pep
VGPVHAPRFPKPKEKGWWLVIGESSPHQLLAIKRVALQKRARVKLXFPPASKAGKKEAMFSLMSDFFLGCDPEYEFPLHFMDAGGDFSPGPKKD

SEQ ID NO: 129984 - protein, 151 aa, Oryza sativa
  Clone ID: PAT_MRT4530_32189C.1.pep
MERFPDKIAVAVFAASSMPCVGKHMGIVRELMRERAPKGLLMDSKMIPMNNKRGPGTADLTLAKLLMTPGSQFQDDPMMKDDKLLTSANYGSVKRVCLIGMGDDIKELHRYLITLSPGTEVEEIAGADHNIMCSKPRELCDLLAKISSKYD

SEQ ID NO: 129985 - protein, 58 aa, Oryza sativa
  Clone ID: PAT_MRT4530_3218C.1.pep
MAGGGLSSGGGRAAEAAAAATGPLKRQWQRDGRRCTARFVDDFVNDLWIVDDIVDGQL

SEQ ID NO: 129986 - protein, 620 aa, Oryza sativa
  Clone ID: PAT_MRT4530_32190C.1.pep
MAVALRFAAVARDSPAAAAPPRVGREQQYLACAAAARPGGRCSRRRGLVVRCQSGAAAVVLNKDDAASVAAAAASSATGFTVAMKFGGSSVASAERMREVADLILSFPEETPVVVLSAMGKTTNNLLLAGEKAVSCGAPKASEIPELAVIKELHYDAFDIGFITTDDFTNADILEATYPAVAKRLQGDWIDDPAIPIVTGFLGKGWKSCAVTTLGRGGSDLTATTIGKALGLREIQVWKDVDGVLTCDPNICANAIPVPYLTFEEAAELAYFGAQSILTSIVLKSNITMLDIVSTRMLGQYGFLAKVFSIFEDLGISVDCVATSEVSISLTLDPSKLWCRELIQQAFNVLRRNGVNVQMISQGASKALHSAFFENGFLSEVEEEDLQHNGSPVSPNAQRLRLGKSATVAWLFRLHRERLRRRRSAPPPTREAATPSSRSRARSASTATTPVARRLPSPAANSRGRDAVVPLPSSLRKYGDDARGAPTSISGHRQLARPRRRRPAPELAPQVRRRRPWRADFHLRPPPTREAATPSSRSGARSASTATTPVARRLPSPATTNSRGRDAVVPLPSSLRKYGDDARGAPTSISGHHQLARPRRRRPAPECSNSQVGDDAPDIS

SEQ ID NO: 129987 - protein, 567 aa, Oryza sativa
  Clone ID: PAT_MRT4530_32191C.1.pep
MAVALRFAAAVARDSPAAAAPPRVGRGEQQYLACAAAARPGGRCSRRRGLVARCQSVAAAVVLNKDDAASVAAAAASSATGFTVAMKFGGSSVASAERMREVADLILSFPEETPVVVLSAMGKTTNNLLLAGEKAVSCGAPKASEIPELAVIKELHVRTIDELGLDRSIVSGLLEELEQLLKGVAMMKELTPRTRDYLVSFGECMSTRIFAAYLNKLGKKARQYDAFDIGFITTDDFTNADILEATYPAVAKRLQGDWIDDPAIPIVTGFLGKGWKSCAVTTLGRGGSDLTATTIGKALGLREIQVWKDVDGVLTCDPNICANAIPVPYLTFEEAAELAYFGAQVLHPQSMRPAKEGDIPVRVKNSYNRRAPGTVITKTRDLSKSILTSIVLKSNITMLDIVSTRMLGQYGFLAKVFSIFEDLGISVDCVATSEVSISLTLDPSKLWCRELIQQELDHVVEELEKIAVVHLLQHRSIISLIGNVQRSSLILEKAFNVLRRNGVNVQMISQGASKVNISLVVHDSEAKQCIQALHSAFFENGFLSEVEEEDLQHNGSPVSPNGVIYGN

SEQ ID NO: 129988 - protein, 83 aa, Oryza sativa
  Clone ID: PAT_MRT4530_32192C.1.pep
MLTKTKALMLTTARKVNASGSTREPWEIFPPLIRSFHARTHVDLDIDDCFKTCAPFLFLNDVVCHVPLPSRSPKSVRSNIFAG

SEQ ID NO: 129989 - protein, 236 aa, Oryza sativa
  Clone ID: PAT_MRT4530_32193C.1.pep
PPQDGAYRALPPASYPVRTPTICALSTEALVPVKAKRSKRSRATAWSLSGAPPFSDSTSSSSTTTTSSCSSSASFSSFSPLLKFEWHPLGGTSDLPDDHLLPPGKKSKHGKNGKNKPKKRGRKPKQLPPHPSGAAASAPAPGDRRCSHCGVQKTPQWRAGPEGAKTLCNACGVRYKSGRLLPEYRPACSPTFVSAIHSNSHRKVLRDEAQEGGRLRTPHRRRRRSARRGVVLAKAS

SEQ ID NO: 129990 - protein, 78 aa, Oryza sativa
  Clone ID: PAT_MRT4530_32194C.1.pep
MEADKEGSSAISDLDEFILEEKDYPVVDYVLVIYAANWEQSSGAALRFAASPVANGVSAGEKPGKQPLNCPCQLPIMG

SEQ ID NO: 129991 - protein, 111 aa, Oryza sativa
  unsure (1)..(111): unsure at all Xaa locations
  Clone ID: PAT_MRT4530_32195C.1.pep
GFRARSFXPXAEIQIKSNPKFVXPXXXAVHAMLCCCVVVVXLNWCIEXXXNKVXGRXRXNXSXXPPXLARXLXFPVIXMLFQLXPNXXNPVFPXQXTNVXXRNPXXXGXVX

SEQ ID NO: 129992 - protein, 252 aa, Oryza sativa
  Clone ID: PAT_MRT4530_32196C.1.pep
MRIRKRTPVRAASPSPGPSPPPPPPPAQLKVRRLCALCPFDTFCFRPLLGFCLPSRRPGDPPPLTCDSLQGGRPPVVHADEEEEEKKKKKKKKKKKKQGSMVVGGDREEEEEEEDDDDDLVLVASTTSERDVTGAAAAGRCSRNDGKRWRCKSAAVPGYVFCDRHIAWSTRKRKPRKRSHSSIVDPPQPKEDPAAAAKAEDDDGVEEEEESKNHGANLRCNDDDDDEEFHYYGGLQHGGRKRAKSGGGGGPA

SEQ ID NO: 129993 - protein, 154 aa, Oryza sativa
  Clone ID: PAT_MRT4530_32197C.1.pep
APPLFARSGRCKVDATRSEGSVGLGLWRSSSPAASAARRERKWRTCGEACGGVGARLGAGGWSGGATAQGVGVAGRGGARRGKRRTVTGVVAARVSGRKGRKGRCCEGSDGAGAARADARGGAESTRLPALAGDVDASACEHAAPKRTQLANSQ

SEQ ID NO: 129994 - protein, 373 aa, Oryza sativa
  unsure (1)..(373): unsure at all Xaa locations
  Clone ID: PAT_MRT4530_32198C.1.pep
EAPSGSTADVEVQPEKTVPXEYGHTKIHINVPLLDAMQVPTYARYLKDLLNNKRPLPTTKVVKLTEQCSNVIVHKLPEXKKDPGCPMITCLIGTHKFDQALCDLGASVSVMPKDVFDKLNFTMLAPRPMRLQLADSSVRYHARIAEDVPVKIRDFFIPVDFVVLDMDTEKEMPLILGPPLLSTADANIGVGIGSIHKIRAKPVEHPSGRSGATQDGQPSEVHAEFPGKGNNYSQEPLLEDAGETQYTGQKVREAGSEEAVSHTKTKEGEEGKAKDARSITSGGGMRRRLSGXFKKGPGSPLSHHDESSTHSSADISMEDADVPXRLLSDADLDLVGDQEKQAYYMLKDREYSHTKCIFASLLGIIFLEMSFRN

SEQ ID NO: 129995 - protein, 86 aa, Oryza sativa
  unsure (1)..(86): unsure at all Xaa locations
  Clone ID: PAT_MRT4530_32199C.1.pep
ANWDLRGRPDHQPQQEAILELNQQQHLSPSCLVKTFALPRRRRCLRCGANCGCDSGCQRGGRCAXCKMFPDVQVTITIKTFALAAP

SEQ ID NO: 129996 - protein, 1226 aa, Oryza sativa
  Clone ID: PAT_MRT4530_3219C.1.pep
MAGNEWINGYLEAILDSGGAAGGGGGGGGGGGGGGGGGGGGGGGGVDPRSPAAGAASPRGPHMNFNPTHYFVEEVVKGVDESDLHRTWIKLELEGILRISARRKEQEQVRRETSEDLAEDLFEGEKADTVGELAQQDTPMKKKFQRNFSELTVSWSDENKEKKLYIVLIRSYTAYFTHWCHSVYATKLQNFTEFLYSLFYFSLHGLVRGDNMELGRDSDTGGQVKYVVELARALAMMPGVYRVDLFTRQVSSPEVDWSYGEPTEMLTSGSTDGEGSGESAGAYIVRIPCGPRDKYLRKEALWPYLQEFVDGALAHILNMSKALGEQVSNGKLVLPYVIHGHYADAGDVAALLSGALNVPMVLTGHSLGRNKLEQIMKQGRMSKEEIDSTYKIMRRIEGEELALDAAELVITSTRQEIDEQWGLYDGFDVKLEKVLRARARRGVSCHGRFMPRMVVIPPGMDFSSVVVPEDTSDGDDGKDFEIASPRSLPPIWAEVMRFLTNPHKPMILALSRPDPKKNITTLVKAFGECRPLRELANLILIMGNRDDIDEMSAGNASVLTTVLKLIDKYDLYGSVAFPKHHKQSDVPEIYRLTGKMKGVFINPALVEPFGLTLIEAAAHGLPIVATKNGGPVDIKNALNNGLLVDPHDQHAIADALLKLVADKNLWQECRKNGLRNIQLYSWPEHCRTYLTRIAGCRIRNPRWLMDTPADAAAEEEEALEDSLMDVQDLSLRLSIDGERGSSMNDAPSSDPQDSVQRIMNKIKRSSPADTDGAKIPAEAAATATSGAMNKYPLLRRRRRLFVIAVDCYGDDGSASKRMLQVIQEVFRAVRSDSQMSRISGFALSTAMPLPETLKLLQLGKIPPTDFDALICGSGSEVYYPSTAQCVDAGGRLRPDQDYLLHINHRWSHDGAKQTIAKLAHDGSGTNVEPDVESCNPHCVSFFIKDPNKVRTIDEMRERVRMRGLRCHLMYCRNATRLQVVPLLASRSQALRYLFVRWGLSVGNMYLIVGEHGDTDHEEMLSGLHKTVIIRGVTEKGSEQLVRSSGSYQREDVVPSESPLIAFTKGDLKADEIMRALKEVTKAASGMDWQRPLCKTAYWFQSRVYTNMEEKEEMTMLSLGVGAASKHSISNRKFRLKEVTDHKFNLGDQDHNSGHVRKKLRLSEEQLTVLENMYEAGSNLDQALKQGLAEKLNIKPLQVEVWFQNRRARTKHKQIEEECKNRGGWRA

SEQ ID NO: 129997 - protein, 723 aa, Oryza sativa
  Clone ID: PAT_MRT4530_321C.1.pep
MPPRRAALLLLALAVYVPLGTASSTTIASYLLGLWSRAHRHSLPAPAPAPAPAPAPETHRPGIRHPVPRHHRKRPHVAPPLPPPSSSERQVAPYQLFPRIDELEIEIAAGTFLKQSQVRIMGAGSSLQDPEKTTVTVDLVPLGQKFDRTSALLTSNRFLQKKVPINSSIFGDYNVIYVHYPGLPSLVPSVPGSLGPISSSQYPFSANVHNRRHQKINSKSVAIIALSAVVLVLMSFGICIIWKYKGFEKSRGTGRVSNSSATRKTGMRSSFSSMTSSTASFVSTIATCPPTVKTFSISELEKATENFSFNKIIGEGGYGRVYRGTIDDEVDVAVKLLTRKHQNRDREFIAEVEMLSRLHHRNLVKLIGICIERSTRCLVFELVPNGSVESHLHGSDKIYGPLDFDTRMKIALGAARGLAYLHEDANPHVIHRDFKASNVLLENDFTPKVADFGLAKEASEGMDHISTQVMGTFGYVAPEYAMTGHLLVKSDVYSYGVVLLELLSGRKPVDMTQPPGSENLVTWARPLLTDRDGLQQLVDPSMPAASYGFEKLAKAAAIASMCVHVEASHRPFMGEVVQALKLIYNGNNDDTCTSGSFGGGGGEEYEDEEASSPWNNRSWSHDFAATPPPASRRLAFPRAPARPTTMDYSSDPADGAAGTSSASARRQRSTSSLVLDKIESLAAYDWSGPLRASRGRNFYRLRGSMSEHGGHPSEDCSMEGYWM

SEQ ID NO: 129998 - protein, 394 aa, Oryza sativa
  Clone ID: PAT_MRT4530_32200C.1.pep
MASWSSPVAAAALQVHFGSSCFFSARSPRQTLLLPPLARNPTLTIQPRPHPFRNINSSSSSSWMCHAVAAEVEGLNIADDVTQLIGKTPMVYLNNIVKGCVANVAAKLEIMEPCCSVKDRIGYSMISDAEEKGLITPGKSVLVEPTSGNTGIGLAFIAASRGYKLILTMPASMSMERRVLLKAFGAELVLTDAAKGMKGAVDKATEILNKTPDAYMLQQFDNPANPKVHYETTGPEIWEDSKGKVDVFIGGIGTGGTISGAGRFLKEKNPGIKVIGIEPSESNILSGGKPGPHKIQGIGAGFVPRNLDSEVLDEVIEISSDEAVETAKQLALQEGLLVGISSGAAAAAAIKVAKRPENAGKLVVVVFPSFGERYLSSILFQSIREECEKLQPEP

SEQ ID NO: 129999 - protein, 147 aa, Oryza sativa
  Clone ID: PAT_MRT4530_32201C.1.pep
MAGRPSSSSPSNPHALPCDTCSLNVTQLRQTGALIQQPRLAAGGERLHGALCSVGRAGHGCTRFNEAGLFYSRRHVRQGPPLQPRRAARIINAHCYAATPGCCRASSRGALAARTRLAVSHQAHRPPPTASHAVPLTSPHLHPPTRL

SEQ ID NO: 130000 - protein, 61 aa, Oryza sativa
  Clone ID: PAT_MRT4530_32202C.1.pep
MEQWRCDVAEDPLQSTSCRRGAFRSSHCATSGRDEGGNGDHGEPAPLTTEDLRRRHAAGGD

SEQ ID NO: 130001 - protein, 64 aa, Oryza sativa
  Clone ID: PAT_MRT4530_32203C.1.pep
ELLAFFGRLRSITAFLLFIYLFLVMNYRLSPEDGLAVLCRLVRNSASAPPMGLTSPASRHCKLP

SEQ ID NO: 130002 - protein, 146 aa, Oryza sativa
  Clone ID: PAT_MRT4530_32204C.1.pep
MAEWNPEKDLLAMVTDDSKVVLHRFNWQRLWTISPGKCITSICWSPDGKIVALGTEDGLVLLHDVETDKDGLLSYEDRTARFFPPAPVIPRIGGLSSGDTGLSDENEESIQEFSSASCQRFNILCSGDKGGCICFSIFGIFPVGKI

SEQ ID NO: 130003 - protein, 244 aa, Oryza sativa
  unsure (1)..(244): unsure at all Xaa locations
  Clone ID: PAT_MRT4530_32205C.1.pep
SLQAERIVVRRDAASARRRLPSAARRRPSWRREASDPPAPXSTTTTTVMPPPRAVGSPRPRRRRPLWRREAADPPAPLLPAXRRWLPSSSPPPPAPSSTTTTTTATPPPRAVGSPWPRRRRPSQHREATDPPAPLLPASAASSPPRRRLRLHRRLPPRHRLPPRRRRCQQHEDNDVATTAPGHRLPPRRQPRCDDITTAPTPVGTAADGGGKHLRRCRPPVKLIFAGGPAGSRDANKSMGCATP

SEQ ID NO: 130004 - protein, 269 aa, Oryza sativa
  Clone ID: PAT_MRT4530_32206C.1.pep
MAGSVTRRGLHMTGFVLELRGMCVVLGYPHGVDYQARPLPDQEGEDAEPHAGWEVTAVILSGSPERTSLAVTAGGDSFPAACQNAALLAIGTLHQRYPDELQHSPYRYHPRRGGARDYATFRDASSEDDATVVHLARMVEAYDAARIDFHQMVRRGMVENNMKILELRQENLQLKKDLDALEAQLHQLKVAQGEISRPKRRRVCRSQKITARKSTSRPELVRQSLAWTCFVETPRAEPAPVVPQEGEASGVGSSEGALLLTFRPGPSQR

SEQ ID NO: 130005 - protein, 232 aa, Oryza sativa
  Clone ID: PAT_MRT4530_32207C.1.pep
NGCQIRGNNAVRLAYDTREWTSSGILVFSGKEVRAADEARTLEPARSAEAAMAGEGRSHEAGSLGVGAGCDLGLLFGQRREEQMTEERARLGAEKPNSERLSNTYGLGPRLSVRAGRDTHRPQPSVEWPQQYSPPPMGHGRIPRISVDVTIVRFLLGKSTPKPAGGWGDGRQGKAGEDVRRPATREKGRVAAAGARGEIEEDRGSTAAAAASGLPDLSPSSPPNAAAVLLPC

SEQ ID NO: 130006 - protein, 53 aa, Oryza sativa
  Clone ID: PAT_MRT4530_32208C.1.pep
CMILQSRSAGPLVPCGNVSIPLYDLEALCRIHQGEDWPPALQQSGQTRKRTRG

SEQ ID NO: 130007 - protein, 144 aa, Oryza sativa
  Clone ID: PAT_MRT4530_32209C.1.pep
PTRPPSTVTAGPPRPTTSGLGGGAHLASARRLPGSSHRRGLQRHRSSSLNGRGAARRGSRQAVRSWRWWRAAPPRFVARSAGRRPPRRKTERRATMAMGSSGDREKEREDREGIEIRGSEDDRWVHVGPTNYPPIVCVKLTCGS

SEQ ID NO: 130008 - protein, 473 aa, Oryza sativa
  Clone ID: PAT_MRT4530_3220C.1.pep
MHGRLLILKLCIPHESVSGPRDKYLRKEALWPYLQEFVDGALAHILNMSKALGEQVSNGKLVLPYVIHGHYADAGDVAALLSGALNVPMVLTGHSLGRNKLEQIMKQGRMSKEEIDSTYKIMRRIEGEELALDAAELVITSTRQEIDEQWGLYDGFDVKLEKVLRARARRGVSCHGRFMPRMVVIPPGMDFSSVVVPEDTSDGDDGKDFEIASPRSLPPIWAEVMRFLTNPHKPMILALSRPDPKKNITTLVKAFGECRPLRELANLILIMGNRDDIDEMSAGNASVLTTVLKLIDKYDLYGSVAFPKHHKQSDVPEIYRLTGKMKGVFINPALVEPFGLTLIEAAAHGLPIVATKNGGPVDIKNALNNGLLVDPHDQHAIADALLKLVADKNLWQECRKNGLRNIQLYSWPEHCRTYLTRIAGCRIRNPRWLMDTPADRCTSKQLPSIGFVHNAFTVRVFFFFFDSELCIVH

SEQ ID NO: 130009 - protein, 105 aa, Oryza sativa
  Clone ID: PAT_MRT4530_32210C.1.pep
RRRRRGFCCGPGCLVSPRARALGGQWVTRSRLWSGVTAMILPQVHLRQTLLRLLLPLNMIRFNGLSRDVGARRTPPSPRIRTLHRTIQSCRSARAVCHQQCASGT

SEQ ID NO: 130010 - protein, 109 aa, Oryza sativa
  Clone ID: PAT_MRT4530_32211C.1.pep
MTKNDLKMARFHDEIVARWWLDFAAAVCGALVQCGDEFLPRCDPLLAVAAALQWQSQTQARRERGGLVVEADDPDEPNVPRFLFSKATQCQFSFMVYDGVETAWNRRGG

SEQ ID NO: 130011 - protein, 247 aa, Oryza sativa
  Clone ID: PAT_MRT4530_32212C.1.pep
MRALSRVGVGLAVVSALLLLALAAELYYLFVYKRRRSAAISDAASSPSSSSRELLQLFCFKKPPALASTYAQEPHAGEAVVAVAVDDDDDTVEAQLMRLGSLVGPTRLLFTIKEETKEDLESEDGRSRCGRSRSLAELLHSSETPFMTPASSPLPMDKSFNPLFEPTVAAAVTVSPPPKFQFLKDAEEKMYRRALAEEAMRARRSPQTRSPAAAGEEDGGYITIMVGKNNKVIPLPSPPSNGDGDLQ

SEQ ID NO: 130012 - protein, 56 aa, Oryza sativa
  unsure (1)..(56): unsure at all Xaa locations
  Clone ID: PAT_MRT4530_32213C.1.pep
ADRRPNNRSNQAQLTXSKGSSRVLARTSKEQFQPRQTRLPVDYNRXEFPXKQGWFP

SEQ ID NO: 130013 - protein, 48 aa, Oryza sativa
  Clone ID: PAT_MRT4530_32214C.1.pep
MKFTELFPEFKSLRGFYSPLRSSLRAEGISFLAEARSGLHKLLPANHM

SEQ ID NO: 130014 - protein, 126 aa, Oryza sativa
  Clone ID: PAT_MRT4530_32215C.1.pep
MAELGREGMPTCHLAVGKGTLESGHFNFVNFNDRFEKNFSNRQPSQQTNILLTIPGSARTQGLKDCKDKFRICATLNDGDDALPQDNGAKTLFDGDENEGGRKDLSPQRKRARFPNKLLSGPEWAK

SEQ ID NO: 130015 - protein, 70 aa, Oryza sativa
  unsure (1)..(70): unsure at all Xaa locations
  Clone ID: PAT_MRT4530_32216C.1.pep
MALFFLFSIDAFTSMASARAFITTESTTDFWHRXLGHLGHDALSCLVQASVIPPPKGSTPVCHACQLGRH

SEQ ID NO: 130016 - protein, 261 aa, Oryza sativa
  unsure (1)..(261): unsure at all Xaa locations
  Clone ID: PAT_MRT4530_32217C.1.pep
MATVGQPDAMRRITVHYVNPPPIAGAGEAHVDGLDDEVLDYVIGDVLQDQEGLYQSILYGKYGDDMRGARNTALAQSDGLHYYYHGENSSGEATTSRNSEIDQQIEYDLVFARQLQAMDNLTIETPADEDDDISCVPSPSDSETDEPAEGNNEEAATQDDNDDPDNMTYEQRQALVESVGNENRGLSDLLISYLETWKYKSGFFPRKANHDNCPICLSAFRRRETLITLACKHSYHEGCIARWLKIDKACPVXKYEVFGPS

SEQ ID NO: 130017 - protein, 164 aa, Oryza sativa
  Clone ID: PAT_MRT4530_32218C.1.pep
MGNSLALRCVCGGGAARRPLVIGPDGRPVCVEEAATGAAELMIEAPGHVVARAADAAKERRVRAMAADEPLRAGEVYLLVPASRAGARLGDREVEAIGRLIVSGGGRKKGRSKQPGGKRIFPEVVVDMSAAEEDEMGTQVQAQAQAHCRRSTQWRPALDTIYEA

SEQ ID NO: 130018 - protein, 53 aa, Oryza sativa
  unsure (1)..(53): unsure at all Xaa locations
  Clone ID: PAT_MRT4530_32219C.1.pep
AIGGAVGXCQXCGGVWCRLVSCVSAVVGGVCRXAACQRRVNVTTRLVYLFRHS

SEQ ID NO: 130019 - protein, 167 aa, Oryza sativa
  Clone ID: PAT_MRT4530_3221C.1.pep
LERQQDGAEGIAPASWEAAAGVQIRRREARIRAPHGRICCSGRQVGSPGGVVGVAGGGAEHETPGGRRRRRGWRRAGGGVGVDEVLAAACRLLATPAGGGRGRGRRCRGGLGDEVARSTSPAQTQRHSGACCSGGEAAGCGYVEERATPVWRRRRCLWRLAVAVAVA

SEQ ID NO: 130020 - protein, 749 aa, Oryza sativa
  unsure (1)..(749): unsure at all Xaa locations
  Clone ID: PAT_MRT4530_32220C.1.pep
MCILCAVQRWSRRVATMLPWLVLPLILLWALSQLLPAAYRFEVTSPRLACVSVLLLTLFWYEILLPRLSLWRARRSARLREERRAHPPQPPKLRKTATRRGRKCNKPYLDKNPGGATVTGSYGGHVSKPPFLDLGPAGTLPTGWPCTHDRQNAAGQPASWLDFLCSCHNLHXGVLVKDVLIILXSMKWCWGQMLRFDYSGDGDDLGGDGERLAKEGENGAKAEESRVEKAKRKAEEKRLARLEKEMLEEEERKQREEMAKLVEERRRLRDEKAEAEERSKGATPVGEKDPRKEVERRRQERRRKDEKDKGSSKSNSDCEDIERRVTREGERKRDSDRRNEPEKRDATRVGAEGHKPYNFDANNQGSKTVQSKAKYFGRMTGGLLSSSRGFGGGSFFGRSAQTSAPQVNKSNVVKRDTQPPATAKSATAGGTTNSSRNVHIGPPGHSGSKEAVVLNGPQEASKILLSNRGTCWWWLFPXMNGQPEPYGAQISNAQIFLSQYPPLDSNPSSSRCMQFPGFPPVNGAPANMSLSHFPAGHVPYYCEPEPTVFEEPEQFEDPCYDPDAIALLGPVSESLDNFPLDLDSGFISSDITKETHTKPSPIESPLSRSRTFEDNPIRHSTGKGPNGSILPEASNEQGGTWQMWGTPLVQESLGLRGPQTEWLLPNANQFNHGVSHLNGGTRSSVGSGLDDNDLWLQKAPFQQMPLDTRSLFLSHDVSENAIHNNLDFGSPNKSARLHPIGPPGHSWSK

SEQ ID NO: 130021 - protein, 347 aa, Oryza sativa
  Clone ID: PAT_MRT4530_32221C.1.pep
GRNFDANNQGSKTVQSKAKYFGRMTGGLLSSSRGFGGGSFFGRSAQTSAPQVNKVTKPLVTVTDQSNVVKRDAQPPATAKSATAGGTTNSWTNVHRSVSPNVQSQPTGLKKSWHQLFSRSASVSPCPDVPATAREMNGQPEPYGAQISNAQIFLSQYPPLDSNPSSSRCMQFPGFPPVNGAPANMSLSHFPAGHMPYYCEPEPTVFEEPEQFEDPCYDPDAIALLGPVSESLDNFPLDLDSGFISSDITKETHAKPSPIESPLSRSRTFEDNPIRHSTGKGPNGSILPEASNEHGGTWQMWGTPLVQESLGLRGPQTEWLLPTNQFNHGASHLNGWTRSSVGFWVMT

SEQ ID NO: 130022 - protein, 95 aa, Oryza sativa
  unsure (1)..(95): unsure at all Xaa locations
  Clone ID: PAT_MRT4530_32222C.1.pep
DAIATWVACEPIKPINWAQSTTVHYWWESLATRQGAPKHGTRFLILLISWEIXKERNQRIFRNKELTMVALISKIKEEAKSWAMAGAKRLAEMLP

SEQ ID NO: 130023 - protein, 137 aa, Oryza sativa
  Clone ID: PAT_MRT4530_32223C.1.pep
CPWAHISALSPISSHLSLYSLSEACSHGEASVAAEMARTAASGVKRGSSGGGRAHGRRSGIIGRAEWQQWRASARQARTGRASATCLAISVAVLSGLAVVRTAGGAARADATARVDAAAGCSARRAVGGRQRGGHGC

SEQ ID NO: 130024 - protein, 38 aa, Oryza sativa
  Clone ID: PAT_MRT4530_32224C.1.pep
IRSFMLFRHAYIEALHPVSQHCEFMLVTRTRALSLESR

SEQ ID NO: 130025 - protein, 1015 aa, Oryza sativa
  Clone ID: PAT_MRT4530_32225C.1.pep
MLTPTTAAAAAVAVSGELSISATQSRLLPSASRVHLPHLLPAPPALSSSRSHPSVPTPTGGGGAGEAADLDPSDEHLATMSPREQTALLSRQRHWRRARDLLDRMRALPGYAPSAIHYGVVLRHLAGARRWGELRRVWARMAREGAPPPTNQAYAALADALAKAGHARDSLLLLRHMRARGVAPDEVSMSTFVRILKDVGRYSDAATLFDNWCNGRFEVGFIDLDYSALDSGGPMQFLLEEMCHGNVDDAGASGIQGVARIPKLAVTYNTMIDLYGKAGKLKDAMDMFMGMPDYGVAADTCTFNTLINIFGSCGNVKEAEALFASMIVRGTNPDVKTFNVMMTLFASKGDVEGVLKHYYHIGKMGLSADTVSYGIVLRVLCERKMVHEAEDVIVGIMRSGTCVPEQSLPVVMKMYIDQGLLDKANAFFDRHCRGDEVSSKTFAAIMDAFAERGLWEEAEHVFYSHRGVRRRGIVEYNVMVKAYGAAKRYDRVSPLLEHMNESGISPDECTFNSLVQMFATGGYPQRAKKLLGKMKYAGFKPKCETYAAAITTLSRNYLVSEAIYLYNEMKASGVEPNVVVYGVLIDTFAETGQLEEALHYNNLMEESGIAPNQIVLTSLIKAYSKANCWKEAQDLYSRMKSMDGGPDIVASNSMLNLYANLGMVTKVKEIFDCLRRNNQADDVSYTSMISLYKNMGLLNESVRVAHDLQNSGLLSDCASYNAVMACFVAKGKLRECAELVQQMQEGNILPDASTFGMIFSIMKKIQIAPEEVSQLQSAYNDNRSSSSQAVIAFLFLIAGMHAAALNICEKYMKPVLTIDQCACNVAFKVYASCGEVDKAFSLFMQMHELGLKPDTATYIHLTTCYGEYGMPGGKMKAIFLLISQLRNEMLIQFTQSPDMLTRNSECPWLHAKCKVLTAASWKLQVIQGDFLPEVVNIYDSTSSSYRKATKHPGEHDFGGADILECNAQLLELSQEELHNKISVPIWKLEYMNLNKDQHPGPGAYKGRNEEHKCCQ

SEQ ID NO: 130026 - protein, 80 aa, Oryza sativa
  Clone ID: PAT_MRT4530_32226C.1.pep
QRPTYGYIDRDHSPADDKRGGKDERYYQATGKKTWCSHVNKELPFYSKWPRVASDLTGCTAYDENVHRERQSSLCAHTAD

SEQ ID NO: 130027 - protein, 233 aa, Oryza sativa
  Clone ID: PAT_MRT4530_32227C.1.pep
MGNGECVRSRGEGRRGRVFCSQRARLRLLVLTPVALSLPPTQLSSRSGAARAGGERGRAWSARRGEQAARGHRVAPRRAVWAAFDKRVGPAWAVMMGWVVFAWGKVYLRPVQSDRCRRDEAAGRSNGERRRGGMGKGRRDILREPTVVGGMGSRFPRHYRSSLVTLLTPSSSPPATVLLLARRHQQASSLSARATVGHRAPPVLPARRRSRSPRWPFSSSTVAHLRWRGLEKR

SEQ ID NO: 130028 - protein, 152 aa, Oryza sativa
  unsure (1)..(152): unsure at all Xaa locations
  Clone ID: PAT_MRT4530_32228C.1.pep
SGFCTLGISCQATENIQLRECFGMKPDLTGVLVSRINPLSDAHRVLKKDDILLEFDGVPIANXGTVPFRNRERITFDHLVSMKKPGEMAVLKVLRDGKEHELNVTVRPLQPLVPVHQFDKLPSYYIFAGFVFXPLTQPYLHEFXXDWYNNSA

SEQ ID NO: 130029 - protein, 157 aa, Oryza sativa
  unsure (1)..(157): unsure at all Xaa locations
  Clone ID: PAT_MRT4530_32229C.1.pep
MAAVDNAPPSPVVTVTSTRTVAPAAAKCVLATFDLPYITFYYNQKLLLYRLPNGASDFPDAVARIRQDDHDGSLSIHGQHGAEVIEASADHVSVDQLAGEECSEEAEKVMQLLVPYTGVMNLEGLNRPLLAVQLTRLXDGVAVVCPFSPALLAGALP

SEQ ID NO: 130030 - protein, 567 aa, Oryza sativa
  unsure (1)..(567): unsure at all Xaa locations
  Clone ID: PAT_MRT4530_3222C.1.pep
PPARLRRRRVVPPPTRLAYYAAAVGRLRLHRRPASVAADWCPRLYGWLVTPPFMGVHVFTDRXASSAADWCFRLHGWPIMPPLLGVYVFTDRLAFAAADWCFRLHGXPIMPPLLGVYDFTAGLPLXAANWCPRLYGWLVTPPFMGVHVFTDRXPSPPPTGVSTYTAGILCRRCWASTSSPTGWPSPPPTDVSACTASLLCRRCWVSTTSPXGLPLSPPNGVLAYTVGGLRRCXWASSSTPLAWPRPPSTGASACTAGLLCRRCWASTSSPTGRHVRRRLVLPPARLAYYAAVVGRLRLHRPAASSAADWCFRLHGWPIMPPLLGVYVFTDRLPSPPPTGASACTAGLLCRRCWASTSSPTGXPRPPPTGASACTAGLYAAVVGRLRLHRPAAASAADWCHRLHGWPVITPTDAIFFTVDWPIMPXSTTTDGHHHLPSPTDFAAADWCFYLHNYASSLPVCFCCRRLVFTSLRQYNFVIMVERLHLYYLRHRQTLLLLLRKFYYFTNHDVFVNLDISACNAMIFYYNKXLSNIQDFYLDTFNTYLQSSNDYSTTRSYNSRLYVQLFLN

SEQ ID NO: 130031 - protein, 166 aa, Oryza sativa
  Clone ID: PAT_MRT4530_32230C.1.pep
MHTGLRASAFSIPMQAVAKPRGGFDDDDECDLRAGRQDDRSIVIPPRGRTARRAHGDWDVRVRDRSAQLRTESSGRRTVPCVASLIGLLCPCRPPPARGSLPTHYNESCARGPGERTVSLGAFTWAKVGGGLVGGGEREGRTASSRRRSLTPGVRRGKRNCSMDGP

SEQ ID NO: 130032 - protein, 41 aa, Oryza sativa
  Clone ID: PAT_MRT4530_32231C.1.pep
PRVRKKKAQTMLTFNLPSMCGIYRNYYSAPRSIATVGGVWY

SEQ ID NO: 130033 - protein, 445 aa, Oryza sativa
  Clone ID: PAT_MRT4530_32232C.1.pep
MAAVDNAPPSPVVTVTSTRTVAPAAAKCVLATFDLPYITFYYNQKLLLYRLPNGASDFPDAVARMSASLSDALAYFYPLAGRIRQDDHDGSLSIHGQHGAEVIEASADHVSVDQLAGEECSEEAEKVMQLLVPYTGVMNLEGLNRPLLAVQLTRLRDGVAVGCAFNHAVLDGTSTWHFMTSWAELCRGGGAPSLLPVHNRGMARSVRVNLPLPASAEAHEKTDPNGPKVPLVARVFSFPPSAVARAKAAANAALPPGAKPFSSFQSLAAHIWRAVSRARALGPSDITVFAVFADCRARLSPPLPPAYFGNLIQAVFTGVPAGMLLAGPPELAAGLLQKAIDDHDAAAITRRLEEYEAAPKLFHYSDAGPNCVAVGSSPRFRVYDVDFGFGRPERVRSGANNKFDGMVYLYPGRGGDGGIDVELSLQPEPMQRLDKDQDFLQMRAP

SEQ ID NO: 130034 - protein, 440 aa, Oryza sativa
  Clone ID: PAT_MRT4530_32233C.1.pep
MAASSSSTTRLIPLLLVLTFCLALASASAWAAAAGDDDLLAAAREPGMAEWLRGVRRRIHRHPELAFEEVRTSELVRAELDAIGVPYQWPVARTGVVATIAGGGGGDGPVVALRADMDALPVQELVDWEHKSQENGKMHACGHDAHTAMLLGAAKLLQKRKNELKGTIKLVFQPAEEGHAGAYHVLESGLLDDVSVIFGLHVIPNLPVGVVASRPGPFMSAAARFAATFTGKGGHAGVPHDAVDPVVAVSSAVLSLQQLVSRETDPLEAAVVSITILKGGDAYNVIPESASLGGTFRSMTDEGLAYLMKRIREIIEAQAGVNRCAAAVDFLEEELRPYPATVNDDGMYGHAKAVAEAMLGEANVRVAARSMGGEDFAFYARRSPGAFFFIGVGNETTMGPAAAVRPVHSPHFVLDERALPVGAALHAAVAIEYLTKHDCS

SEQ ID NO: 130035 - protein, 100 aa, Oryza sativa
  Clone ID: PAT_MRT4530_32234C.1.pep
LQPLYQAGSVILFCGQSKFGQEATSTVDFVVNQSDFTIQTLRNVTDYLSLAKTISVAALYLPSDVQGQIDNLKVDLNKAADTISQKTSENYRRIRKVLHN

SEQ ID NO: 130036 - protein, 208 aa, Oryza sativa
  Clone ID: PAT_MRT4530_32235C.1.pep
MAAMMNNERSSSNKLQVDAENPAAVGDELDLAARANWLRAAVLGANDGLVSTASLMLGVGAVKAEARAMVISGFAGLLAGACSMAIGEFVSVCSQRDVELAQLERDGKRGGEEEKALPSPAQAAAASAMAFSVGAVVPLLAAGFIVNYRLRIAVVVAVASVALAAFGCVGAVLGRAAVARSSARVVLGGWAAMGITFGLMRLFKASGI

SEQ ID NO: 130037 - protein, 43 aa, Oryza sativa
  Clone ID: PAT_MRT4530_32236C.1.pep
FVCQWDLGTFENTILETLVFFFVTVQTCHCNTHNKKIFFVIIC

SEQ ID NO: 130038 - protein, 76 aa, Oryza sativa
  unsure (1)..(76): unsure at all Xaa locations
  Clone ID: PAT_MRT4530_32237C.1.pep
MSWRPAAVFGAAVTAVLXRETAATEGWTRCCSSSRCXRRRRRSTATTEATAAPDWTPAGGDDAKNHAEAALEKAAS

SEQ ID NO: 130039 - protein, 132 aa, Oryza sativa
  Clone ID: PAT_MRT4530_32238C.1.pep
FLLLLCSASYPFLNPPACAVLAGGYNMHGDWPESPCHDVLYPYEIAAARGGSWRGLSPTPAWSPDSPAEEETPSAPLARSSMTPPTAQRTYPSSRTVIGAQTDTLPTKGECHAGGASPKPTAPPLKDDDLDD

SEQ ID NO: 130040 - protein, 464 aa, Oryza sativa
  unsure (1)..(464): unsure at all Xaa locations
  Clone ID: PAT_MRT4530_32239C.1.pep
MGGKLLPAAAFAESAPPLSQVATSAAHGEDSPYFAGWKAYDEDPYHVVDNPDGVIQMGLAENQVSFDLLEAYLXDHPEAAGWSTGGAGAGSFRDNALFQDYHGLKSFRKAMASFMGKIRGGKARFDPDHIVLTGGATGANELLTFILANPGDALLIPTPYYPGFDRDLRWRTGVNIVPVRCDRANGFQVTVAAXQAAYDEAAAVXGMRARAVLITNPSNPLGTTVRRKMLDDILDFVSRNDIHLISDEIYSGSVFAAPDLVSVAELVEARGGDGIAGRVHIVYSLSKDLGLPGFRVGVVYSYNDAVVTAARRMSSFTLVSSQTQKTLAAMLSDEAFAGGYIRTNRRRLXRDRHEHVLAXGLARAGVPCLRGNAGLFVWMDMRRLLLGGGGVGGELRLWEKLLRQAKLNISPGSSCHCSEAGWFRVCFANMSLDTLDLALHRISRFMDTWNGTKQQASCQQQEQQ

SEQ ID NO: 130041 - protein, 636 aa, Oryza sativa
  unsure (1)..(636): unsure at all Xaa locations
  Clone ID: PAT_MRT4530_3223C.1.pep
HWASSSSPTSXPRQPPTSVSACTAGLLCRRLLGLYVSTAGLPSPPPTDVSACTAGLLCRRCWGSTSSPPARLRRRRLVFPPTRXHTIVVGRLRLHSRLAFAAADWCLRLHGXSIMPPLMGVYVVTDRXVSSAADWCFRLHGXPIIPLLLGVHIFTNRLAFAAADWCLCLHGWPIMSPLLGVYDFIAGLPLSPPTXCFRLYGWWTPSPLMGLVIYTTGLLPPPPTGVFIAIDGRLAXQEWISQNITNGLPSPRPTSVTACMAGLLCRRCWAFTSSPXGLPSPHATGVTACTAGLFCRRCRASTSSPTGLPSPPPTGVFAYTAGLLCRRCWASTSSPPACLRRTRLVSLPARLAYSAAVVGRLHLHRPACXAAADWCLCLHGWPIMPPLLGIYVFXPPPTGVADCTASLLCRRCWASTSSPTGLPSPPPTGVFAYTAGLLCRRCWASTSSPPACLRRRRMVSSPTRLAYYAAVVGCLCLHRLAASYDANWSYRLHGWPXLVVIILLLPSPTGYAAAGWCFYLHNYASSLPICFCCCRLIFTSSRLCNFITIMGXLHLHYLRHRQILLPLLCKICYFTNQDVYKSSDISACITKYDAMLFYYNKWCSNIQYFYSDIFNTYLHSSNDYSTTRSYSSRLYI

SEQ ID NO: 130042 - protein, 150 aa, Oryza sativa
  Clone ID: PAT_MRT4530_32240C.1.pep
MDQKEPSVKRRPLVFGEASTNKVKHQNQGNMSENQASQRVAAEGGIFMPVQAKTEYQERKFSDMYRDRSLCKDLNQGQRIVIKRRRRGLIEHDLHGRAGRMFGGGGILGINKERGLRVFMCCVDPRESEKYSGKMPRVPVSSDGFTMTCP

SEQ ID NO: 130043 - protein, 50 aa, Oryza sativa
  Clone ID: PAT_MRT4530_32241C.1.pep
GQRIRGTFRERQNTSCSIKPGGIQLPISLSQLKIGHGTNYKTGKQINSPT

SEQ ID NO: 130044 - protein, 61 aa, Oryza sativa
  Clone ID: PAT_MRT4530_32242C.1.pep
FFFFFLFAKRKRLLIYENFLYRFQINFLVRGLKDKEDLRSTGKKRISKETWVRQFFPKLWA

SEQ ID NO: 130045 - protein, 77 aa, Oryza sativa
  Clone ID: PAT_MRT4530_32243C.1.pep
EAFIGSFSNAGFPSGSVHLIVCCTASPTEEAGAMPLVRNRYLLLHNQRSTIADSTTPRRSIYTRCHRKLLPMSTRSI

SEQ ID NO: 130046 - protein, 809 aa, Oryza sativa
  unsure (1)..(809): unsure at all Xaa locations
  Clone ID: PAT_MRT4530_32244C.1.pep
FILWNDLKFWLPLLLPTNFFASTVGQRRRRLMPLPTRLDGHITVDGRHHLHRPDTSSATDXSPRLYGRLVTPPLMGIFIITADWCLRLHGWPIMPLLLGVYDFTXRPASVAADWCPRLYSWSVTPPFMGVHVFTDRXPLPPPTGVFAYTAGLLCRRCWASTTSPXGPPSSSPTGVLAYTVGGLHRRXWASSSTPPASLLPLPPTGVFIAIDGRLCSHIIHLCSSPLSCLRRRRLVSPPARLAYYAAVVGRLRLYRPACLRRRXLVSPPTRLAYYATVVGRLRLHRPXAFVVADWCLRLHGWPIMPPLLGVYVFTXRLAFAAAEWCLRLHGWPILPLLLGVYIFTDWLAFAVADWCLRLHGWPIMPPLLGVYVFTDRLIFTATDWCLRLHGWPILPPLLGVFVFTDRXPSPPPTGIFAYTAGLLCRRCWASTSSPXGLTSPPPTGVFACTTDLLYLHCWVSTSSXAGLPSPPLTGVFACTACLLCCRCWAVDEKHEAWEICLAPVQVNLDEMRACQSAYQISLLTWASTSSPTGRLVXRQLVISSSRXGHVAAIANRHHHLQRKLSTSAADWFLHFHGCMILPLLIGLVVFTXQSSRLLLTNALASTVGLCYYHYXCTSLFSLLDALFDANGFVCLHGCASSSLLTGVIVIASLPSPLPVVSSLLRLAYYAAAQGCLRFRHHSTSSVADWCLYLHNYASSLLVCFYCCRLVFTSSRLXNFVTMVERPHLYYLRHRQTLLPLLCKLCYFTNYDVSKSLDISVRVTKYDAVLFYYNKWCSIIQDFYLDILNTYLHSSDGYSTMRSYSFRPYV

SEQ ID NO: 130047 - protein, 106 aa, Oryza sativa
  Clone ID: PAT_MRT4530_32245C.1.pep
NMHTHQFFYFSRNYHKSNGTAHRSLSWTQIHKNYFLLPYLTWDSIAYKLQDLNGNKDIHKSMALLILANGTRAMTRMLIALLNNRGICTYGDIAFAGTPTITNTPR

SEQ ID NO: 130048 - protein, 393 aa, Oryza sativa
  unsure (1)..(393): unsure at all Xaa locations
  Clone ID: PAT_MRT4530_32246C.1.pep
TTGLPSPPPTGISACTAGLLCHRRWASSSSPXACLRRRRLVSPPTRLAYYAAVVMRLRFHRPACXAATEWCLRLHXWPIVPLLLGDYVFTAGWPIMPPLLGIYVFTVGWPXLCRRCWASMSSPTGLPLLSPTGVSACTAGLFCRHCWASSSSPTGLPSPLPTGAIVFTAGHVATTANRRHHLQRKLSASTTDCCASSSSLTGVIVIAGSPLPPQMASSLSRLAYSDVVQGRLHFRHHSTSSSYFIFIVFGTGKLYCLYFVSFATSPTTTSPRASTSRXFTQVMATRRQEATVLDSMFSCFSTNQRVGGYTDTRLXKFDKPNQSINQPXESTLGVIIFVFASKPTFYFSNSNYFTGNFGFSMPSQSTPNFSNXSSLRFYLHVREFRVINQSAQF

SEQ ID NO: 130049 - protein, 137 aa, Oryza sativa
  unsure (1)..(137): unsure at all Xaa locations
  Clone ID: PAT_MRT4530_32247C.1.pep
MTGERRPLWWRVGAPNTGAGGGRWLRAWHTGADGGVAVTAKRRXLRRRLPTLLGSXRRARLDEWRQRRRWARLGANAASRPAVPVVPMARVQLELLPVVREGDGARRPQWISGRRTPPASPSXPAAPSAGHQLAGHI

SEQ ID NO: 130050 - protein, 123 aa, Oryza sativa
  Clone ID: PAT_MRT4530_32248C.1.pep
MSLLPLPVSSEAEAFSFRAVASLSLFLNSGRCHPSSSAAFSLFQSSVWCHESASMRHRAPSPPNAVVPERAHERWSVAFTRELITIHPFFAKAEGVQVTSASVETAMGARVATTLIEGIESVK

SEQ ID NO: 130051 - protein, 88 aa, Oryza sativa
  unsure (1)..(88): unsure at all Xaa locations
  Clone ID: PAT_MRT4530_32249C.1.pep
FMKRXQXXXXMXXXXXXXQNXXXXTXXECXXXXXLXIYRXXXXXKKWCEXXLGLXLSTPKXXVVXXXXLVIXXLLRDAPNSHLNIRNR

SEQ ID NO: 130052 - protein, 121 aa, Oryza sativa
  Clone ID: PAT_MRT4530_3224C.1.pep
TDKSFMETSPLMFDEKPMGTLTSRCINEYVYAHLLPSAETLTNGENGCHELSLMPRVNKNGGNYPGLVLPKQYFINPLGIRRVFPVNPLSVIYVDKPAEHCGVSLSDGKNAHSVLDNRVTP

SEQ ID NO: 130053 - protein, 57 aa, Oryza sativa
  Clone ID: PAT_MRT4530_32250C.1.pep
EEDTGAQVAPIERLEEVAVTTGEEGQDVLLDMKAKLYRSDKEGNHLKERGMDTCKLS

SEQ ID NO: 130054 - protein, 538 aa, Oryza sativa
  Clone ID: PAT_MRT4530_32251C.1.pep
MATVSPARREPTPQAVRASPMPSAAAALVRRGGGGSGGTVLGKYELGRVLGQGSFAKVYQARHLETDECVAIKVLDKEKAVKGGMVHLVKREINVLRRVRHPNIVQLFEVMASKTKIYFVMEYVRGGELFSRVSKGRLREDTARRYFQQLVSAVDFCHARGVFHRDLKPENLLVDENGDLKVSDFGLAAGPDQFDPDGLLHTFCGTPAYVAPEVLRRRGYDGAKADIWSCGVILFALMAGYLPFHDHNIMVLYRKIYNGEFRCPRWFSKDFTRLITRLLDANPKTRITVPEIIESDWFKKGYKPVKFYIEDDKLYNLSDDVLNLEPADPVPPPLGLAPPVPPPPQGDDPDGSGSESDSSVVSCPATLSTGESQRVRGSLPRPASLNAFDIISFSKGFNLSGLFEERGNEIRFVSGEPMSDIVKKLEEIAKVKSFTVRRKDWRVSIEGTREGVKGPLTIGAEIFELTPSLVVVEVKRKAGDNEEYEDFCNMELKPGMQHLVHQMLPAPNGTPVSEKVERSSSLQAPLTLKLIGTEGSMS

SEQ ID NO: 130055 - protein, 140 aa, Oryza sativa
  unsure (1)..(140): unsure at all Xaa locations
  Clone ID: PAT_MRT4530_32252C.1.pep
HAYLDGYYDGDLRGKQMRLETGPENFKCRLGXKGYNRLRAMLVVPGMLVTEALKLNNWVQATRVGWRRQPDRPRNLGTQEPXGTLATNVVIEDERIDCAEHQWTMENDAEKKKYSGGAFEPFGLYTDPVKYXEYKLNEIK

SEQ ID NO: 130056 - protein, 68 aa, Oryza sativa
  Clone ID: PAT_MRT4530_32253C.1.pep
CRNIQIVPIVTYDYNITGVYQAQNSHTTLLAALRWLARHCYNRPFLEQSIHGMESIYQVWHLRLESNS

SEQ ID NO: 130057 - protein, 107 aa, Oryza sativa
  Clone ID: PAT_MRT4530_32254C.1.pep
SAWKPAATGATTVAAARASEEPARPRSRRRRRALALALALAAAAAVHALAAASKLRAWPPHALVAAARAQALAAARPHPRRGCRRGPNHKTFAKQAHADTPSVPGDC

SEQ ID NO: 130058 - protein, 69 aa, Oryza sativa
  Clone ID: PAT_MRT4530_32255C.1.pep
QTILTSVEHMTCGTVSDSTLISVILCFKLLRCILKRWMSRKTVDVCMKLGIAHEPLLNYWISYALLHNN

SEQ ID NO: 130059 - protein, 117 aa, Oryza sativa
  Clone ID: PAT_MRT4530_32256C.1.pep
LRRRRRHDSIPAGSSLCSSSQHPLAPSPAFFCLLAPSAGSSPPPRPSPPNPSPSRTTSSPAAASPEPKQPRLRRRSPTSAPPTIPTPSSASSTTSAPPPPNRRRHRRRPEVAVRGRG

SEQ ID NO: 130060 - protein, 177 aa, Oryza sativa
  Clone ID: PAT_MRT4530_32257C.1.pep
MAAAGVSGLAVGCLVAATAALLVAGASAQTGCTAALINLYPCLNYISGNETSPTRTCCSQLATVVQSQPQCLCAAISGDSSSSIGGVTIDKTRALELPKACNVVTPPASRCNSAGGNTPGAATTTSPATQTPGATGAGTGVGSKTTPTAPYLINGGASLRGATGLVLALAAVAVYAV

SEQ ID NO: 130061 - protein, 447 aa, Oryza sativa
  Clone ID: PAT_MRT4530_32258C.1.pep
MSASASAACLLPPRGGSLARPDTALPPASQPATVAVNQNIPRLASPRLAVTSITLLPRRGRRCAVDLLLLHLHRLLLFLSLFSEETPNLFLPRKPAAFLKRIKSPSLIRRCNPSPQNLAAPRAVLGFELMAVEEASSSSGGGRGGGGGGGGEEGLSGCGGGWTREQEKAFENALATVGDDEEEGDGLWEKLAEAVEGKTADEVRRHYELLVEDVDGIEAGRVPLLVYAGDGGVEEGSAGGGKKGGGGGGGGGGGGHGEKGSAKSAEQERRKGIAWTEDEHRLFLLGLEKYGKGDWRSISRNFVISRTPTQVASHAQKYFIRLNSMNRERRRSSIHDITSVNNGDTSAAQGPITGQPNGPSANPGKSSKQSLQPANAPPGVDAYGTTIGQPVGGPLVSAVGTPVTLPVPAAPHIAYGMHAPVPGAVVPGAPVNMPPMPYPMPPPTSHG

SEQ ID NO: 130062 - protein, 89 aa, Oryza sativa
  Clone ID: PAT_MRT4530_32259C.1.pep
ATCGMKTGSILPRRRHVSQNRFQNRRESQIALVLIVGGVVLSGVADRGQGKDGADEGGSSRGHEPPRSRPVEEEAVGMGSSLSGYLQDI

SEQ ID NO: 130063 - protein, 160 aa, Oryza sativa
  unsure (1)..(160): unsure at all Xaa locations
  Clone ID: PAT_MRT4530_3225C.1.pep
SLLGVYVFTDRLAFATADWCLRLHDWPIMPLLLGVYVFTXGLPSPPPTGVSACTAGLLCCHSTXCLRLHSWPIMPLLLGVYVFTTGSPSLPLTGVFADRPPRMTPTGAIVFTARHVAATANRHHHLQRKLSTSAADWFLHFHGCMILPVLIGLIVFTASH

SEQ ID NO: 130064 - protein, 132 aa, Oryza sativa
  unsure (1)..(132): unsure at all Xaa locations
  Clone ID: PAT_MRT4530_32260C.1.pep
PERLTPGDIXPGSFSPGDMLAPSFRGPLQXQQLDIVPSQPAKSTNPFDMAFESDVEASNMFMDLTSLQETLPNPHVNTDYSNLTESWIPHNSNMPYISSGPQGGLSYMATQVQDSLMLNSAQGSFPPRNPFE

SEQ ID NO: 130065 - protein, 373 aa, Oryza sativa
  Clone ID: PAT_MRT4530_32261C.1.pep
MVNIEGDLHMTSGEGEGSYAKYSRRQTIVIDETKPVIEKAIIEVYKAILPKTMVIADLGCSAGPNTMFFMSNVINIIADHCTKLDEHDPIELQFFLNDLPGNDFNQLFRSLEKIKTSTTMYHKGDSLPSYYISGLPKSYYSRLFPRQSVHLFHSSYCLHWRSQVPEGLEAGGKSLSNKDNIYISSTTTPLVVKLFKEQFRKDFSLFLKLRHEELVNDGHMVLIFFGRKDEDVYNGSLSHILGCVAKSLESLVCKGLVNKEKLESFNLPIYGPSDDEVMEIVMESHMFDLVHMKLFEANWDPYDDSVDDVVHDIASSSQNITTGIRSVLESLIASHFGESILDVLFQEFRPLVAQHLEREKTKYAVIVMSLKKI

SEQ ID NO: 130066 - protein, 117 aa, Oryza sativa
  Clone ID: PAT_MRT4530_32263C.1.pep
MNVTRPLSRYLDNPDAAAERPPEGPGSGFLVVEDEAAVEQAATICCGLCHDPRVRTLPFTQSWRLYMGEDNVVVFVPVVGEPLSAGCYYVDRSTGSHHAGKLKSVASCADAGGRVVR

SEQ ID NO: 130067 - protein, 217 aa, Oryza sativa
  Clone ID: PAT_MRT4530_32264C.1.pep
IPGLQEWYIEVFLVDFLIVCIGRHSGSPNIPEFPANSGLELFKGKILHSIDYSYMDNAAEFVKGKKVTIIGSGKSAFDIAAEVAKVNGETQPCTMIYRTRHWLVHKSSICGVDLSYFYLNRISQLLVHKPGEGFLYYVLATALSPLRWAISKVIETYFKQSIPLQKHGMVPDYSFSFAMSSCLIAMLPEGFYDKVDEGSIILKKSKRFSFFNDGIIL

SEQ ID NO: 130068 - protein, 270 aa, Oryza sativa
  unsure (1)..(270): unsure at all Xaa locations
  Clone ID: PAT_MRT4530_32265C.1.pep
PPPPPPRPPPPPPPPPPPAPPPRAPAPPPPPAPPPPPPPPPPPRGARPARAPPPRPPPPAPPPPPPPXPPRPPPPRSPPRSPGPHRARGVPAPAGPPAPRPPPLPPGPPGGGCPPSGGVPGGVPRRPPARGRPARGGPAPPPAPPPPPPPSPPPPPTPSPPPPRRPPPPDGRRSHGGGTTQSSPPSPSPASPAGRRRPAPRRPPPNRLPPAGQPSPRPPPPRAPARQACYLTMTGGPHPSSPTSSCPLSPAESLAPATSDLPPPLTVPPN

SEQ ID NO: 130069 - protein, 149 aa, Oryza sativa
  unsure (1)..(149): unsure at all Xaa locations
  Clone ID: PAT_MRT4530_32266C.1.pep
MITTIPWKATQAQPNAFPERQALMPVWEGEAIPQAEWQQCWQQAAINVLKEDGLAYFHIPFCASHCIFCGFYRNAWKEDYSKVYTDKLIEELAYEASIRQGNGKIQAVYFGGGTPTALATEDLVRLIKRVXQYLPLATDCEFTLEGRIS

SEQ ID NO: 130070 - protein, 163 aa, Oryza sativa
  Clone ID: PAT_MRT4530_32267C.1.pep
MDISEANESYMSCGSNYAYSPEKAKPVPKERRERRRSQWRSRLLFVTFVEWIDKEMNEFHTSLIRHWREWKEEPKKRQRECAAIQKAERERELAIENWEKEEGDVDWVRKVARAQRVKEAGTEVPRKGEYPRAPNSAMEGWEDDQGMPRVVLHLVGAHPTWAH

SEQ ID NO: 130071 - protein, 57 aa, Oryza sativa
  Clone ID: PAT_MRT4530_32268C.1.pep
VIGIKKFLSFIFLFIFLISRNIGYVVMILAPNNLQIILQKSFASSFFPFSPLLRVCT

SEQ ID NO: 130072 - protein, 561 aa, Oryza sativa
  Clone ID: PAT_MRT4530_32269C.1.pep
MALTHLLCSLLLATALLLLSISRTEAGEVGVCYGRDADDLMDPPAVVNLLKENGITKVRIYDADPTVLRSLSNTGIKVMVALPNKDLASAGHDQGSALDWVKTNIVPYYNQGTQINGVAVGNEVFRQAPNLTPQLLPAMKNVQTALARLGLADIIKVSTPINFDAVNVSWPSSKGVFQDSIAQSVMSPMIDFLQQTNSYLMVNFYPYIAWANSKGQISRDYATFGPNAGVVDPWSHITYYSLFDAQLDAVYYAINQVSGDSVRASMAQTRWGHPTPRVPVKCSECGHPSGGQFRKLTTQADAEVDVATKANAQAFNNGIIRRALFGASGMPDVSVYIFALFNENKKAGASVERNFGLFYPNGTKVYEVDFHGGGICPTKASWCVANLAVGNSRLQAALDWACSNGADCSAIQQGKPCFEPNTMVAHASFAFNDYYQRMGQANGTCDFAGAAYIVFQPSESICDPNPSWCIANPAVGDMRLQAALDYACGSCADCSAIQPGARCFEPNTKVAHASYAFNDYYQRVGRVSGSCDFGGAGSITYQAPEIGNCVLPPMLELDKAY

SEQ ID NO: 130073 - protein, 118 aa, Oryza sativa
  unsure (1)..(118): unsure at all Xaa locations
  Clone ID: PAT_MRT4530_3226C.1.pep
LRLHRRLASVAADWCHRLHGWPIMPLLLGVYNFIAGHRLAVVAADWCFRLHGWPVMPPLLGVYVFTDRLAXSAADWCFRLHDWPIMPPLLGVSPSPLIGVIIFNASCLRLLPTSLFTS

SEQ ID NO: 130074 - protein, 143 aa, Oryza sativa
  Clone ID: PAT_MRT4530_32270C.1.pep
GTAGAAAMDESRTLSWLSRCSEERSQVEACGIPELKCACGWPAAPRTSSTIRNPARRWLQCGGEVNLWPREILSCIQEYVEDMMAYYHAGEYNSLRETQPVAVAIEMKDKIESEKDMLQWVMHMLMLMCVLCVPVVVGKNYLR

SEQ ID NO: 130075 - protein, 55 aa, Oryza sativa
  Clone ID: PAT_MRT4530_32271C.1.pep
DEGEVAVVLECDKGAAPSWRSCSSVCGRRRRMWQAKSLTDQSTVAALHAQLQQTA

SEQ ID NO: 130076 - protein, 62 aa, Oryza sativa
  Clone ID: PAT_MRT4530_32272C.1.pep
DGAPIRILLCPNSQLPQKAVKKQQNRVDMLQQMSLKINDEGAMEFLGIGCLVIFCFVKFEPV

SEQ ID NO: 130077 - protein, 72 aa, Oryza sativa
  Clone ID: PAT_MRT4530_32273C.1.pep
TPPKHAWFISDSSTEFTLYKQFVLPRICNYLSYSEYLVPMDQFCTVWDVVFKNVLISPCMAWTSRCRGRCDH

SEQ ID NO: 130078 - protein, 254 aa, Oryza sativa
  unsure (1)..(254): unsure at all Xaa locations
  Clone ID: PAT_MRT4530_32274C.1.pep
MGWASCCKGVDGVLPGRRKKKKETTWRIFSLKELQSATNNFNYDNKLGEGGFGSVYWGQLWDGSQIAVKRLKSWSNKAETEFAIEVEVLATVRHKSLLSLRGYCAEGXERLIVYDYMPNLSLHSHLHGQHAAECHLGWERRMKIAIDSAEGIAYLHHQATPHIIHRDIKSSNVLLDKNFQARVADFGFAKLIPDGATHVTTKVKGTLGYLAPEYAMLGKASESCDXVFSFGVLLLELASGKRPVEKLNPTTKLT

SEQ ID NO: 130079 - protein, 61 aa, Oryza sativa
  Clone ID: PAT_MRT4530_32275C.1.pep
MAAGRGPRGKAVQGPEGHDLAPRGPDPPGHSCDCARDRRTPNAECAADRRAKCGARIPWAT

SEQ ID NO: 130080 - protein, 623 aa, Oryza sativa
  Clone ID: PAT_MRT4530_32276C.1.pep
MPLSATDAAAAAVKPLPRALSLAGAAVAAATTSLILISVVVSRAHHSASSSSSSPPPSSSASTAAPLPAPPTPSPVPEHLHHHPPPPPPVPPCPPNATHVVPCHEDDELSGERHCPPRPPPPPPPHPPEDPPPHPPHPPDHPPPPPPCRVPPPPGYRQPMAWPARRDRAWYANVELPPLAPAKLAGPPDPVRARGDWLVFPKGVGTYVEQLAGMVPLRGGEVRTALDVGCGVASFGDYLLNYGILTMSIDRRNRHKAQVQLALERGLPAMIGALGVRRLPYPTRSFDMVHCAGCLVPGNSHDELYMLEIDRLLRPGGYWVLAMPPISWKTQYDDLNRTAKGMPGEQLALEEIVKKLCWSKVSENGTIAVWRKPINHIQCEQDAKLLRSPPFCTGDDADSAWYVNTSMCLTRLPRDIAGGAVEKWPERLTAIPPRIASGETKGMPIQTYKLDSLDWNKRVDFYRTYLNLSDGSYRNVMDMNAGFGGFAAAMSEYPVWVMNVVPANLTDNTLGIIYERGLIGTYMDWCESFSTYPRTYDVLHANGVFSLYMDTCGIPYIMLEMDRILRPGGAAIIRDAPDVVHKVKDAADRLHWHSEIVDIENGGLDPEKLLIVDNSLPFPDHPA

SEQ ID NO: 130081 - protein, 163 aa, Oryza sativa
  unsure (1)..(163): unsure at all Xaa locations
  Clone ID: PAT_MRT4530_32277C.1.pep
RFRPGGFAYVWVGXNPGTQCPGQWGGRTPQPVAXPQGGPLTPXPKGKSWGDGKGKSPPPKIVGTVPKPFGKGFFQGDPNAPLEAPPPCPRRYGKGGDPGYPGSPLGDPANGANYNPKGGPGRKNLGPGLVKPHTGAWSPLGEICWKGKKDRFFVSPGEKVPPG

SEQ ID NO: 130082 - protein, 54 aa, Oryza sativa
  Clone ID: PAT_MRT4530_32278C.1.pep
YKIMLVMVPHLEKVAADIPQTIYEPVYTVLFNGHLNDKYMKVLYVYRVKKKKKK

SEQ ID NO: 130083 - protein, 143 aa, Oryza sativa
  Clone ID: PAT_MRT4530_32279C.1.pep
MPKIVLNVNSVCGEHICIFGKGTLAPHHHGRPRLDLLVGVVDNLDPWIRQLASWTTSPSSTSSLVDEHTWIYPSVLWMNSYASARRRRGGPRLYSPVVAVIFTTAGSRSSPQSSPQPTVVISAAVTTTRFGTPKRLHNQIRHG

SEQ ID NO: 130084 - protein, 492 aa, Oryza sativa
  unsure (1)..(492): unsure at all Xaa locations
  Clone ID: PAT_MRT4530_3227C.1.pep
LSSPPPLLIATTTSPPACLRRRRLVSPPTRLACYAAVVGRLRLHRXARFRRRRLVSPPARVAYYAAVVGRLQLHCRPASVAADXCPRLYGWLVTPPFMGVRVFTDXWPSPPPTGVSAYMVVFGPIXAPGGSLDGPSHSYACLGSAXADWIQILIGTKGIHGFKLISYALGMDQSEHHHRLAVVAADWCFRLHGWPVMPXIVGRLRLHRPACXLVRRRLVFPPARLAYYAAFVGRLPLHRLAASSAANWCFRLHGWPIMTPTDATFFTAGYVAVTANRRHHLQRKLSTSAADXFIHFHGYMILPVLIGLILFTAGHLVCCXLVPSPLCPVYTTTTTDGHHRLPSPTGAFIFTTARLHHRFASVAADSCSLHHSYATLSPWXSDFIYIIFGTGKPNCRYFASFATSPTTTSTRASTSRHALPYSMSCYSTTTSGVPIFNISTRTSSNXIFTQLMATRXHEATVLDSMFSCFSTNQRVGGXHKYQTQNLTSFMSR

SEQ ID NO: 130085 - protein, 396 aa, Oryza sativa
  unsure (1)..(396): unsure at all Xaa locations
  Clone ID: PAT_MRT4530_32280C.1.pep
MDARWCDLNADVLRLVHKRLPCLVDRRNMRRACKSWRAAVAAPAPPQQRPLPWILVPSSGGPTFSCAVGGCRRHDFGVPDYAREARYFGTYSGGWLFLDFGNTRGHGRHGLLNLRTKYCISIPGIVCLDLNPSIIRDMVMIAATLSSPPEDEHCIGAAISSYWPGMNGARMHAFWYMRRQVAVMPTASEGVFGPFLEDVIHHKEAFYFLTAQERLHAFAVPEFRVGRRGYLDIPPRKIPSFPHDGRDYDGRDVARYLVESRENLLMVVRFVSDPPQMPPRTSAFKVFEMVELAINNGEAQYAWNELQSLGGRMLFVARGCSKSYNVADXPGVGFSAGVYFLDDDRIYDEFTVLLDGTGRRYPCRDSGKWLLGAAEADNFLPEQAPSSYSPPAWLLP

SEQ ID NO: 130086 - protein, 396 aa, Oryza sativa
  Clone ID: PAT_MRT4530_32281C.1.pep
MDALWCDLNADVLRLVHKRLPCLVDRRNMRRACKSWRAAVAAPAPPQQRPVPWILVPSAGGPTFSCAVGGCRRHDFGVPDYAREARYFGTYSGGWLFLNFGNTRGHGRHVLLSLRTKYRIGLPGIVYLHLNPEFIRDMVMIAATLSSPPEDEHCIGAAISSYWPPGMNGARVHAFWRMRRQVAVMPTAIEGVIGPILEDVIHHKEAFYFLTAQEHLHVFALPEFRVNRRGHLHIAPMEIRSFPHDGRDYDGRAVARYLVESRENLLMVVRFVSDPPQMPPRTSAFKVFEMVELPINNGEARYAWNELESLGGRMLFVARGCSKSYEVADYPGLGFSAGVYFLDDGRIYDEFTVLDDTARRYPCRDSGKWLLGAAEADNFLPEQALSSYSPPAWLLP

SEQ ID NO: 130087 - protein, 173 aa, Oryza sativa
  Clone ID: PAT_MRT4530_32282C.1.pep
MVQSGQGAGRAGSRTGALLDQHVPLCARRCDRLCLAHERTFTSRSGVASGFRLAPERREIYAAQSQRVRACMPDASPGRRQGRPHACYAPLMAGYQSALAGRAVLVIDSRLAHHSWERDSDAARPGTFPSTGRFGGFSPPIWSPSGYSRVAGALSACGHYVSAQIGCFGMDGS

SEQ ID NO: 130088 - protein, 332 aa, Oryza sativa
  unsure (1)..(332): unsure at all Xaa locations
  Clone ID: PAT_MRT4530_32283C.1.pep
MARRRAAAAVVMVVAVVAVAVAKECTNIPTQLSSHTVRARLQSSSAAEWRWREEYFHGDHLNPTDEAAWMDLMPLAAASASEFDWAMLYRSLKGAAVAGDEAGGGGGGGFGFLEKVSLHDVRLDMDGGGDGVYGRAQQTNLEYLLLLEVDRLVWSFRTQAGLPAPGKPYGGWEGPDVELRGHFVGHYLSAAAKMWASTHNGTLAGKMAAVVDALHDCQAAAGTGYLSAFPAEFFDRFEAIRPVWAPYYTIHKARNATQSICISTMAMNLXIMQGLLDQHTVAGNGKALGMVVAMADYFAGRVRSVIQRXDQRHLVLAHLFDKPCFLGLLAVQ

SEQ ID NO: 130089 - protein, 35 aa, Oryza sativa
  Clone ID: PAT_MRT4530_32284C.1.pep
FYSNQAFDILPHHILNCQNDVNINVGFWITSHWIV

SEQ ID NO: 130090 - protein, 784 aa, Oryza sativa
  unsure (1)..(784): unsure at all Xaa locations
  Clone ID: PAT_MRT4530_32285C.1.pep
MARRRAAAAVVMVVAVVAVAVAKECTNIPTQLSSHTVRARLQSSSAAEWRWREEYFHGDHLNPTDEAAWMDLMPLAAASASEFDWAMLYRSLKGAAVAGDEGGGGGGGGFGFLEEVSLHDVRLDMDGGGDGVYGRAQQTNLEYLLLLEVDRLVWSFRTQAGLPAPGKPYGGWEGPDVELRGHFVGHYLSAAAKMWASTHNGTLAGKMAAVVDALHDCQAAAGTGYLSAFPAEFFDRFEAIRPVWAPYYTIHKARNATQSICISTMAMNLICSCKCLNEIMQGLLDQHTVAGNGKALGMVVAMADYFAGRVRSVIQRYTIERHWTSLNEETGGMNDVLYQLYTITKDQRHLVLAHLFDKPCFLGLLAVQADSLSGFHANTHIPVVIGGQMRYEVTGDPLYKEIATFFMDIVNSSHSYATGGTSVSEFWSNPKHLAEALTTETEESCTTYNMLKVSRHLFRWTKEIAYADYYERALINGVLSIQRGRDPGVMIYMLPQGPGRSKAVSYHGWGTQYNSFWCCYGTGIESFSKLGDSIYFEQKGDKPGLYIIQYIPSTFNWRTAGLTVTQQVKPLSSSDQYLQVSLSISAAKTNGQYATLNVRIPSWTSMNGAKATLNDKDLQLASPGTFLTISKQWDSGDDHLLLQFPINLRTEAIKGXRPQVASLNAILFGPFLLAGLTTGDWDAKTGGAATAASDWITPVPASYNSQLVTLTQESGGKTMLLSTVNDTSLAMLERPEGAGGTDAAVRATFRVVPPGSRAELRQRAGAHSFKNCLGVGLAVGIRTI

SEQ ID NO: 130091 - protein, 652 aa, Oryza sativa
  Clone ID: PAT_MRT4530_32286C.1.pep
MAEYATAKTSVWWDIENCQVPRACDPNLIAQNMSSALAAAGYTGPVSISAYGDIGRIGNAVTHALSSTGISLNHVPAGIKDASDKKILVDMLFWAIDNPPPANYLLISGDRDFSNALHKLTMRRYNILLAQPPNVSQALTAAAKSVWLWKSLVAGEPPLAESPYVSSTASGNMVELDKSKNINSDSSDTTTDTNPQNGLQSDHQKGGNGKADKQSKVKQPRRNQSDNVSKPASNEENSVEVADNSKEYTTDHPTQSSMPSSSSSSSSESQDGAKVNQSSKPKVQPFSLPKKPAKSAHCHQKTAPHDFNSKKSGASAESAAKNGTPDSGNGGGYNPKHHKPHTSQSPRPQNSITHPHSGSEIFHHTLSSQRTNSCSPSAGHNGAPTAPLQSWPSAPPYHSPPVNYPDLNRINISGYPRGIHDNQGVNMNYHPNHSGSPHNVQPAYNSYRPPTPPSMPSNMQNAGQWGVNPGYPQPSSDPQGLIRNILGALEVLKTEKIPPIEQHISDCIRYGEANLPNFDVKKALELAIQHQAIVLKMLGPMSFYLGKNQNLWKCVNIMDINAKYPKDTFDAVHRFISSTSGSSAIKNSRSKYQAAIVLKNQCLKHLALGEVLQILYIIINTKKWFVPHSSGWQPLSFNIIVVDATTGAGGKA

SEQ ID NO: 130092 - protein, 62 aa, Oryza sativa
  unsure (1)..(62): unsure at all Xaa locations
  Clone ID: PAT_MRT4530_32287C.1.pep
NQGRALAVLWLFKALLERPGXNLAFEFSSVLVDSVLGGGGAICNELAFHRMAEANRVLAHFR

SEQ ID NO: 130093 - protein, 148 aa, Oryza sativa
  Clone ID: PAT_MRT4530_32288C.1.pep
AVRIEKMDGGGTPDGDPVPDMDMLMLSSALDGLDSYTDLVAGSSVADSIFSALTCFPPSQERLLHVSTPVGSNSRQDDSDVSITKEGTTTRRGDCAAGLASGEPVAAGIGSVPKPFDGVTLTERMLRALAMLKRRRVAKRSLCRSGCL

SEQ ID NO: 130094 - protein, 87 aa, Oryza sativa
  Clone ID: PAT_MRT4530_32289C.1.pep
LKMVAGHQHDTFEVDPWLTMVYVDSFTFYTIWMDLLHIYHFRIAKVQFPGGHFFRINSFMCIFARCIRAILYNLGVDWHGMYRCRMP

SEQ ID NO: 130095 - protein, 317 aa, Oryza sativa
  Clone ID: PAT_MRT4530_3228C.1.pep
MEVKKPVGSRRRQLALKVMTPICGGGDVASREDNSTSWRHTRPPVGEDVDAQQRRHNKPAVQAETPVGGEVANVGTKSSINNNEDTSRRRRRRSTVKEKMPTNVGIIGQPCRQRHQSAAAKASRCGPSDIRRFAETTAASWPIIFDVSPKQPLLRGLRGGPSDIRRFAETTAASWNMIFDVSPKQPRLRGLCCGPSDIRHFVETTAASMPMLWTLRYSTFRRNNRCFVAYVVDPQIFDVSPKQPLLRGLCCGLSDIRRFAESTTASWPMLWTLRYSTFCRNNRCFVASEFSICIPRCRARQPTLMVRFVNALDTDIV

SEQ ID NO: 130096 - protein, 125 aa, Oryza sativa
  Clone ID: PAT_MRT4530_32290C.1.pep
RVARRRRSPTPHPWRDPGRRPPPPPGLGGPAPSPRRTPSSPPSRRRRHPPVPARAPAPPPRRRRRRPPPRRRASASSPPRDPPPPRIPRPGPGRRGARRSPARAPGTASPLSAAVEPGGPAPSPA

SEQ ID NO: 130097 - protein, 131 aa, Oryza sativa
  Clone ID: PAT_MRT4530_32291C.1.pep
MEAEQAGGADANTKEPKTALPDQKPRTPRNPHPKKPTSIPSQYPAPAEELIRRCLSFPPSLAPLLSADAYRWPFILLATAILGERESVPRECTYRSARPMNLDATLRQVHPASPAAARRAAWVEEEGRRRL

SEQ ID NO: 130098 - protein, 57 aa, Oryza sativa
  unsure (1)..(57): unsure at all Xaa locations
  Clone ID: PAT_MRT4530_32292C.1.pep
SFLAXSLMSLHLTIEGGHXKERKGEPNNTLHHGAIRHHLPSRLRRLFRWGGREKIFF

SEQ ID NO: 130099 - protein, 276 aa, Oryza sativa
  Clone ID: PAT_MRT4530_32293C.1.pep
MGGVTSSSAGGGGGGETALGDLPESCVAEVLRRLDPPEICRMARLSRTFRGAASGDGVWEAKLPRNYARLLAVAADGEAAALEAIPKKEVYARLCRRNRLDGGTKEFWLDKGGGGVCMTISSRALSITGIDDRRYWNFIPNDESRFHAVAYLSQIWWFEVRGEVEFCFPEGRPLKRLGRRVYSSEHIHGWDIKPVRFQLSTSDGQQAQSKCYLTDPGVWINHHVGDFVVKSSNELVKIQFAMVQIDCTHTKGGLCVDSVAVKPQYLAKKKASRIYV

SEQ ID NO: 130100 - protein, 113 aa, Oryza sativa
  Clone ID: PAT_MRT4530_32294C.1.pep
MAAYTTKIFALFALIALSASATTAITTMQYFPATLAMGTTDPYRQYMMQTLGMGSSTAMFISQPMAPQMMQSMQQVICAGLGQQQMMMNMAMQMPYMCNMAPVNFQLSSCGCC

SEQ ID NO: 130101 - protein, 133 aa, Oryza sativa
  unsure (1)..(133): unsure at all Xaa locations
  Clone ID: PAT_MRT4530_32295C.1.pep
MAAYTSKIFALFALIALSASATTAITTMQYFPPTLAMATMDPCRQYMMQTLGMGSSTAMFMSHPMALLQQQCCMQLQGMMPQCHCGTSCQMMQSMQQVIWAGLGQQQMMKMAMQMPYMCNXAPVNFQLSSWGC

SEQ ID NO: 130102 - protein, 334 aa, Oryza sativa
  Clone ID: PAT_MRT4530_32296C.1.pep
MCGGAILAEFIPAPSRAAAATKRVTASHLWPAGSKNAARGKSKSKRQQRSFADVDDFEAAFEQFDDDSDFDDAEEEDEGHFVFASKSRVVAGHDGRAAARAASKKKRGRHFRGIRQRPWGKWAAEIRDPHKGTRVWLGTFNTPEEAARAYDVEARRLRGSKAKVNFPATPAAARPRRGNTRATAVPPPATAPAAAPPRGLKREFSPPAETALPFFTNGFVDLTTAAAPPPAMMMTSSFTDSVATSESGGSPAKKARSDDVDSSEGSVGGGSDTLGFTDELEFDPFMLFQLPYSDGYESIDSLFAAGDANSANTDMNAGVNLWSFDDFPIDGALF

SEQ ID NO: 130103 - protein, 530 aa, Oryza sativa
  unsure (1)..(530): unsure at all Xaa locations
  Clone ID: PAT_MRT4530_32297C.1.pep
MATTTWCCGCCCSCLATARSRSSVLNSGDAGGGGGGGGGGGLFRFDLLASSPDDDECSGEQHQLPAASGIVTRQLLPPPPPAAPSPAPAWQPPRRAAEDAALAQRXVPHQTRILAHAPPPAPPPPPPQPQPQAAKKSRRGPRSRSSQYRGVTFYRRTGRWESHIWDCGKQVYLGGFDTAHAAARAYDRAAIKFRGVEADINFNLSDYEEDMRQMKSLSKEEFVHVLRRQSTGFSRGSSKYRGVTLHKCGRWEARMGQLLGKKYIYLGLFDTEVEAARAYDKAAIKCNGREAVTNFEPSTYDGELPTDAAAQGADVDLNLSISQPAASQQSPKRDSGSLGLQIHHGSFEGSEFKRAKNDAAPSELASRPHRFPLLTEHPPIWTAQPHPLFPNNEDASRSSDQKRKPSEGVAVPSWAWKQVSHHHPAPPHTLPLPFFSSSSSSPSSSSAAASSGFSKAATTAAAAQHTATLRFDPTAPSSSSSSRHHHHLDKKKKPSPTEICGNRQFFSGRPGVSTFSSAPAGGRVFLVVIS

SEQ ID NO: 130104 - protein, 76 aa, Oryza sativa
  Clone ID: PAT_MRT4530_32298C.1.pep
MLMWQPMTLLQKQCCMQLQSMMPQCHCGTSCQMMQSMQQVICAGLGQQQMMKMAMQMPYMCNMAPVNFQLSSCGCL

SEQ ID NO: 130105 - protein, 509 aa, Oryza sativa
  Clone ID: PAT_MRT4530_32299C.1.pep
MELDLNNVAEGVVEKHETAARSDSGTSESSVLNGEASGAAIAPAEEGSSSTPPSPPPPPAAVLEFSILRSSASASGENDADDDEEEEATPSPPPHHQHQQLLVTRELFPSAAPSPQHWAELGFLRPDPPRPHPDIRILAHAPPPAPPPPPPQPQPQAAKKSRRGPRSRSSQYRGVTFYRRTGRWESHIWDCGKQVYLGNFIEHIIFLLSIQRDIAMNNLTNTFIFSQTITGGFDTAHAAARAYDRAAIKFRGVEADINFNLSDYEEDMRQMKSLSKEEFVHVLRRQSTGFSRGSSKYRGVTLHKCGRWEARMGQFLGKKAYDKAAIKCNGREAVTNFEPSTYDGELPTDAAAQGADVDLNLRISQPAASQQSPKRDSGSLGLQIHHGSFEAPSELASRPHRFPLLTEHPPIWTAQPHPLFPNNEDASRSSDQKRKPSEGVAVPSWAWKQFGASYQVASRANTRDGNCARLPVYPRVKTLLGLGLFSILYPWVSYWFKSYARWVNGHGYG

SEQ ID NO: 130106 - protein, 646 aa, Oryza sativa
  Clone ID: PAT_MRT4530_3229C.1.pep
CPIHGIASSLVPHSSPGYGIRRGGWTRIGAATVAAGKKAAGDLDPRHHHHRVTHGGDGGGVGGGGSGGQEEADEQQQQQHDHHRLLQLHHHQGVQQDQEPPPVPVFHLQPASVRQLSGSSAEYALLSPMGDAGGHSHHHQHGFQPQLLSFGGVGHHHHLHQFTAQPQPPAASHTRGRGGGGEIVPATTTPRSRGGGGGGGGEIVAVQGGHIVRSTGRKDRHSKVCTARGPRDRRVRLSAHTAIQFYDVQDRLGYDRPSKAVDWLIKNAKDAIDKLDVLPAWQPTAGGAGAGNAAAPPSSSTHPDSAENSDDQAQAITVAHTAFDFAGGGSGGTSFLPPSLDSDAIADTIKSFFPMGGTAGGEASSSTTAAQSSAMGFQSYTPDLLSRTGSQSQELRLSLQSLPDPMFHHQQHRHGGGGGGGNGTTQQALFSGAANYSFGGGAMWATEQQAQNQRMLPWNVPDPGGGGGAAYLFNVSQQAAHMQAAAAALGGHQSQFFFQRGPLQSSNQPSERGWPETVEADNQMSHHQGGLSPSVSAAIGFAAPGIGFSGFRLPARIQGDEEHNGGGGGNGDKPPPPSSLAPPLPSRNCRLHSGGAKFGGSTSALLLMLLHIGWLVGWFSIDLFCCCACHWFLFQEFTRSFLELGL

SEQ ID NO: 130107 - protein, 251 aa, Oryza sativa
  unsure (1)..(251): unsure at all Xaa locations
  Clone ID: PAT_MRT4530_322C.1.pep
EVKAAEEAPKVEEQKRQPSPPLQQPAAEEKASSDAAANGASHGEDEGTTKETYEEDKGERLEFEDEPEYEEEAAVDYDEKDLEQYEEQYEDGDEVVEYTEDVIEEETDMVDEELDGGDDGEGEGYENAEEEHNVDVEDEEHHEMVKEHRKRKEFEVFVGGLDKDATESDLRKVFGEVGEITEVRLMMNPVTKKNKGFAFLRYATVEQARRXAVSELKNPSVRGKQXGVAPSHDNDTLXVGNICKTWTKEHL

SEQ ID NO: 130108 - protein, 105 aa, Oryza sativa
  unsure (1)..(105): unsure at all Xaa locations
  Clone ID: PAT_MRT4530_32300C.1.pep
PPHVAMGXLDPCSQYMMQTXGMGSSTXMFMSXPMALLQQQCXRQLQGMMPQCHXCGPSCQMIQSMQQVICAGLGQHQMMKMAIRCPYMCNMAPVQLSNSLPVGCC

SEQ ID NO: 130109 - protein, 115 aa, Oryza sativa
  unsure (1)..(115): unsure at all Xaa locations
  Clone ID: PAT_MRT4530_32301C.1.pep
TRTRARTTPTTTRRRRPPPRRRTTNTSSCSSPGSYSLPPLPRRSIGRSSAXSAPTHXAHTQTSESSSSPSSSSAAASSGFSKAATTAAAAQHTATLRFDPTAPSSSSSSRHHHHH

SEQ ID NO: 130110 - protein, 133 aa, Oryza sativa
  unsure (1)..(133): unsure at all Xaa locations
  Clone ID: PAT_MRT4530_32302C.1.pep
IPPPYTTNIFXLFPLNLLFSQAHSPITTIQYFPPTLPMATMDPCSQYMIQTXGMGSSTPMFMSTNGAPAAQCCMQLQGMMPQCHCGTSCQMMQSMQQVICAGLGTQMMKMXIQIPYMCNMAPVNFQLSSCGCC

SEQ ID NO: 130111 - protein, 112 aa, Oryza sativa
  unsure (1)..(112): unsure at all Xaa locations
  Clone ID: PAT_MRT4530_32303C.1.pep
MQYFPATLXPLGTPDPYRQYMMQTLGXMGSSTAMFISQPMAPLQQQCCMQLQGMMPQCNCDTQXQMMQSMQQVICAGLGQQPDDDEPLAMQMPIPCATLAPVNFPLSSCGCC

SEQ ID NO: 130112 - protein, 275 aa, Oryza sativa
  unsure (1)..(275): unsure at all Xaa locations
  Clone ID: PAT_MRT4530_32304C.1.pep
MVSHLPRQPRGCGPPSSPWRSLRWGASGCAGSSEVGGASTFIGEKLAGPAANXAHVFDVDRWPPSRVVKAAIQATVCVAEIVALFSQDALGLYVGRTWSRGQAQKDQRTASERAENAHRPGPGSSLATLISMFGNQGLSARDMTALSGAHTIGRAQCQFFRSRIYTERNINASFASLRQQTCPRSGGDANLAPFDVQTPDAFDNAYYQNLVSQRGLLHSDQELFNGGSQDGLVRQYSTNPSQFSSDFVSAMVKMGNLLPSSGTATEVRLNCRKVN

SEQ ID NO: 130113 - protein, 103 aa, Oryza sativa
  unsure (1)..(103): unsure at all Xaa locations
  Clone ID: PAT_MRT4530_32305C.1.pep
TGHPLDPCSQYTDANVGTLGSSTAXMFMSQPMALLQQQCCMQLXQGMMPQCPCGTSCQMMQSMQQVICAGLGQQQMMKMAMQMPYHCATLAPVNFXLSSCGCC

SEQ ID NO: 130114 - protein, 94 aa, Oryza sativa
  Clone ID: PAT_MRT4530_32306C.1.pep
METWESSPSQPLGLVSFLYHFRHSTSSRETTTNRLAPVGRVPCYPFSFPFRRRHHLLRPPLEQKLRRPCHRGVLPMLLAPHCDTKMGKEEDKGG

SEQ ID NO: 130115 - protein, 29 aa, Oryza sativa
  Clone ID: PAT_MRT4530_32307C.1.pep
RLTVNRRLFFPNPYFESFGSCGPLNVNVE

SEQ ID NO: 130116 - protein, 139 aa, Oryza sativa
  Clone ID: PAT_MRT4530_32308C.1.pep
RAGSNRQWRPSSSSDRGQRSQQGERESTRRRAQESETRKRQASSTVVGAGGGWARPVSVGWHCTNTVTSSSPSSSSVRLDAGGGGTCAHAGGGPAAGSREARFGAARERFPACFGLSSCGWGGVGEIWIPFAFFLNSDL

SEQ ID NO: 130117 - protein, 317 aa, Oryza sativa
  Clone ID: PAT_MRT4530_32309C.1.pep
MAGPARWALLLLLAVALLVPAALAAGGGGNGGASASTPTNGNGGNNGNNGDCATCGTVGDCNLPGAVCQDPRFIGGDGNTFYFHGRRDRDFCLLSDANLHINGHFVGNHVPGLKRDPTWVQAIAVQFSGGHRLYVGARRTAVWDDDSDRLAVVFDGETVQLQRVAHARWESGSGLSVTRTKAANGVLVELDGVFKITANVVPITKEDSRIHRYGVTDDDCLAHLDLAFKFYALTDDVHGVLGQTYRSSYVNRLDVSAKMPVMGGEKQFTSSGLFAADCAVARFGRAGDAGAVAVASEELVDVKCSTGLDGVGVVCKK

SEQ ID NO: 130118 - protein, 533 aa, Oryza sativa
  unsure (1)..(533): unsure at all Xaa locations
  Clone ID: PAT_MRT4530_3230C.1.pep
CLGNRQIVFSPARVAXMPPLLGVXVFTDRLAFAAADWCFRLHGWPLCRRCWASTSSPTGXLRRRRLVFPPARLAXMPPLLGVYVFTDRLAFATADWCFRLHGXTYYAAIVGRLHLHRPAASTAADWYFRLYGWPIMPPLLGVYVFTDRPPRPPPTGVSSCTAGLYAAVVGRLRLHRPACLRRRRLVFPPARLAFMPPLLGVYVFTDRLAFAAADWCPRLHGWPIMTAVVGHLRLHRLACLRRRRLVFPPARLAYYATVVGRLRLHRPACLRRRRLVFPPARLAFMPPLLGIYVFTDRLAFAAADWCFRLHGWPLCRRCWASTSSPTGLPSPPPTGVSACTXAFMPPLLGIYVFTDRLASTAAEWYFRLYGWPXLCHRCWAYTYSPTGRIVRRRMVFPPARMAXYAAVVGRLRLHRPAAFTAADWDFRLYGWPIMPPLWGVYFFTDRPPFPPPTGVSSCTAGLYSAGVGRVPFHRPACLSPRQLVVPPARLAFMPPLLGVYVFIHRVAFPPTNWGSLCTTGAYLPPVGGIYFYP

SEQ ID NO: 130119 - protein, 199 aa, Oryza sativa
  unsure (1)..(199): unsure at all Xaa locations
  Clone ID: PAT_MRT4530_32310C.1.pep
HSSGRTQAEWAKKQSPMDQHQVVGENYANPKTCFFHVLFKAGALAFYILSALFVTNFVIIFVITVLLAALDFWVVKNVSGRILVGLRWWNEIDDEGNSVWKFECLDGESLARMNKKDSWLFWWTLYLTAAAWIVLGIFSLIRLHADYLLVVGVCLSLSIANIVGFTKCNKDAKKKXADWTRTTLLSSGVRSTIQSAFGV

SEQ ID NO: 130120 - protein, 116 aa, Oryza sativa
  unsure (1)..(116): unsure at all Xaa locations
  Clone ID: PAT_MRT4530_32311C.1.pep
MRTRLRLLLPSLRTGRRLLSSEDVVVXHLPPTGITTHVTSAEMHHQAIXEALTCDNVTFNLNNLDLNDLKPGYMASISNDYPAKDAANFTSQVIIMNHPVQIGDGYSPILYCHTLH

SEQ ID NO: 130121 - protein, 197 aa, Oryza sativa
  Clone ID: PAT_MRT4530_32312C.1.pep
MAMAAESIDAELRLGLPGSGGGDGVAAKKRRSASSTVKSEASGTACCGGAGARDVEDGASPASKVQVVGWPPVGSYRRSTFQSSSSSTAAAAKGKGGGETDQGRKNKGGGLYVKVSMDGAPYLRKVDLRMYGGYRELRDALDALFGCFSADASASAAHFAVAYEDKDGDLMLAGDVPWDMFISSCKKLRIMRGSEAR

SEQ ID NO: 130122 - protein, 653 aa, Oryza sativa
  unsure (1)..(653): unsure at all Xaa locations
  Clone ID: PAT_MRT4530_32313C.1.pep
ARSSRPLLLALLAAAVNNFAPAGGVEVLAKSRLESCARGGSDDGRDRLTCDSKIVVDLAVPSGSVIALDSPPLSLSLSLSLLFVSLTFAVWGIKXGGEASLVARVAEVEENGTEAGEMPIRDPLIITINKSEVYALYDLTYLRDVAYKPEEKFVKTRKCEPEAGANVVKSCERLRDEKGSIIEHTEPVCCPCGPHRRVPSSCGNILTSFISIYFTVDKVAKGKANTAHCLRFPDDWTVVSEDSSLRVNLVGDFAGYTSLPSLENFYLVTPRKRVLFTLDGLECNKIGVGYEAFRSQPNFCSSPLDSCLGDQLSKFWENAGVHTFSVGIPEVLNTNLMIELSADDIEYVYQRSSGKIISINISSFEALSQVGSARVKTKNIGRLEASYSLTVCILSRNCCLFDCLSGINPVEEQYFIMKPDEKLIRTFDLRSSTDQASNYTCQAILKASDFSELDRKESQFSTTATVLNNGTQIGSSENHTKGGIWGFFEAIKAWCAKMWHMLINFFTGTTCRXSINSFQPALSLFSLRLMLLWLLHRKGLFDPLYYWWDGVVGSEAQERARRRHKRAHSHRHSHHHDAHKRHKTELAGHRRHHVLHIHDDDDPVAAAAAAEHQDRHGTHGVHMRHTDANERRRRRTRRSRRLPEAAAAAASRS

SEQ ID NO: 130123 - protein, 67 aa, Oryza sativa
  Clone ID: PAT_MRT4530_32314C.1.pep
GRARLHLVAFIGHRLPSQTNTSLFCTLCPHSCASRPGFPVSHPSQIASGQARLTLEFFRDWFPEKKL

SEQ ID NO: 130124 - protein, 162 aa, Oryza sativa
  unsure (1)..(162): unsure at all Xaa locations
  Clone ID: PAT_MRT4530_32315C.1.pep
DHLLDDTPLPVNEVSSSELLVXYSNQHLHTDHASSTACLGSSVPQVDRGFLVLIASDHPGIEVCDPNGQWYLADGISGPGDLLLLTGRALSHVTAGLRPTSRYRITNETRASLTFRLMPHAIAILDCSPIAAAVHCVPQMSQPISARQFMDDLCAEERAVSN

SEQ ID NO: 130125 - protein, 178 aa, Oryza sativa
  Clone ID: PAT_MRT4530_32316C.1.pep
MAPRRRRRAARSSRPLLLALLAAAVNNFAPAGGVEVLAKSRLESCARGGSDDGRDRLTCDSKIVVDLAVPSGSVIALDSPPLSLSLSLSLSLSLISPQISLHATVRFANVCGVGDQSGGEASLVARVAEVEENGTEAGEMPIRDPLIITINKSEVYALYDLTYLRVNPLLPNLLDSGF

SEQ ID NO: 130126 - protein, 497 aa, Oryza sativa
  unsure (1)..(497): unsure at all Xaa locations
  Clone ID: PAT_MRT4530_32317C.1.pep
EVIVGPENRTVVSEDSSLRVNLVGDFAGYTSLPSLENFYLVTPRKGVGGGQLEVLGDDFSRWMLLERVLFTLDGLECNKIGVGYEAFRSQPNFCSSPLDSCLGDQLSKFWEIDKNRVNNSQPPQYVVLGKFERINQYPFFDRYIYRMQEFIXFSVGIPQVLNTNLMIELSADDIEYVYQRSSGKIISINISSFEALSQVGSARVKTKNIGRLEASYSLTFDCLSGINPVEEQYFIMKPDEKLIRTFDLRSSTDQASNYTCQAILKASDFSELDRKESQFSTTATVLNNGTQVEKYSCLIIADLEFIVLLLLLKCNEIGSSENHTKGGIWGFFEAIKAWCAKMWHMLINFFTVLWLLHRKGLFDPLYYWWDGVVGSEAQERARRRHKRAHSHRHSHHHDAHKRHKTELAGHRRHHVLHIHDDDDPVAVAAPAEHVILRRHGRHESALGVQHRDGLKLNQHRRPGGKAVELLPPGEIIVRDGGGCGGVEPGDRRHHAWH

SEQ ID NO: 130127 - protein, 92 aa, Oryza sativa
  Clone ID: PAT_MRT4530_32318C.1.pep
AYMHVHVLYMCKEELALYRLLRAWLGGKVKLASHAWAQLAGRPTRAGHLACGLARGWPKVMYGRRPSRAALDKTTAQLGSAGACARRGGRSY

SEQ ID NO: 130128 - protein, 52 aa, Oryza sativa
  Clone ID: PAT_MRT4530_32319C.1.pep
RISSHSLCLPNADIYRHPIRHAACKVADHYDSERATDVSARQLRPAVPDWKV

SEQ ID NO: 130129 - protein, 106 aa, Oryza sativa
  Clone ID: PAT_MRT4530_3231C.1.pep
FSPPLLSWVSPSLATTSSSCSLLLLRGLLLVDSFDGFCASCRPSYGIRRGGWTRIGAATVAAVKKAAVDLDPRHHHHRVTHGGDGGGPRRGRRGGQDEAYEQQQQQ

SEQ ID NO: 130130 - protein, 34 aa, Oryza sativa
  Clone ID: PAT_MRT4530_32320C.1.pep
GQPRHRQCPPCSAAPPGLRSQLSHFTDPRAFYIW

SEQ ID NO: 130131 - protein, 109 aa, Oryza sativa
  Clone ID: PAT_MRT4530_32321C.1.pep
CLKSCPRLFGFFHAPQLCYRRFPLLVPWQLCLCCPPLVCSVFWRARLLRFLFPGFFLACIGAAFVLPGAKSCPPMCTTPSCYSFSANMVGSLAWVQGSGVVVLEPRTLL

SEQ ID NO: 130132 - protein, 151 aa, Oryza sativa
  Clone ID: PAT_MRT4530_32322C.1.pep
MDNAAEVAKREKRGHSVDAAVEEEEDASHHNAAGSGGDEGDEEERISSGGMGARHADDHREKRGTPTPTTTMPVARGLPPPQPPPPPSPPTGCRSLSVARRALARLPPPPLRASTPLRFVGSCTRTLPPSAALVAPPFFSPASAPPACREV

SEQ ID NO: 130133 - protein, 113 aa, Oryza sativa
  Clone ID: PAT_MRT4530_32323C.1.pep
ERKTKQSIRRRRKRSGGRRDALGIDSGHVVCVRRLRPAHRAAPRLEGSSAAHAHHDRPRHGVHHHYPHRHGRRRHHVQLEEIRCGLRPLHGLDLRPLLRLLMWRLPPLLPSLL

SEQ ID NO: 130134 - protein, 520 aa, Oryza sativa
  Clone ID: PAT_MRT4530_32324C.1.pep
MIDPTVEGTIIPPIQERVTFERLEADFCKNERKIHRFPQGLRRWIGGEGDRYIVPTFVALGPYHHGEPHLQKTEELKYATAHYLCMKWGRSVEEVYGKVLAVAGEAHGCYDNDDDAVAQFSDDEFAEMMFLDGCFLLKYMVLDNDCSLLENRMVLSTGPCIQRDIVLLENQIPWLVLDALMSIISPIDVHMFLTAVISDPIYVARERRLLITDRDVIVKSSVPHLLGLARSHLIDGMPTDHLELGFSDDDDDDHDTRLSISAADPKQERMACCSKEYPRDGFVVSSYLSLLAMLMDKEEDVHELRARHIVDSFFSDQEMLAFFKGLARHLRLGSRYFAAIQKIEAYKHDKRVFIAVHKFFYHNLKIIVRLIWSFFTVQQRASVPTRDRSVCVIRRSKTIGTWWYHHSVREVPSIQSALKGYNGLIASKSFGFSSSFPQRRHTSLEAPPPTASTRLRPPTYPLRRKELYLQAVDEILADHCLPCRCSAPSPPGQVPLSQRGCVVPKSLFLWPEGGATRLET

SEQ ID NO: 130135 - protein, 315 aa, Oryza sativa
  Clone ID: PAT_MRT4530_32325C.1.pep
MAAAAADRRFKIFAPADAFGQPLKDAVVAHLRAHPSVADVVDLGVDKYYAAAAAVARSVIATPTSSSDPALEARGVVVCGTGAGVAIFANKYPGVYATHCATAADAANTRSINACNVLALSGLATPPDAAAAIADAWLATPFRAPCPASGDAPWPDDIQRFFDSAPAEMAAIPDISSASVPDSACAICCLRKGMEFEPVGIMPGGEMRIVRESPTSAYVRFKAGSVEPAHHHTFGHDLVVISGKKKVWNLTKKESYDLVDGDFLFTPAGDVHRVKYFEDTEFFIRWDGHWDIFLDEDLDAARRAIDAELGAATAK

SEQ ID NO: 130136 - protein, 118 aa, Oryza sativa
  Clone ID: PAT_MRT4530_32326C.1.pep
MAAAARAVRHGARRRGRAAVERGRGRNGGEAAGVVERNLIVHADLESELNPHIALPLIFLHKASHTTRALSLAAVVDAFRMRAWSGYPSGNYVGAATSGRDRRGRRGPAVDFDSSLRG

SEQ ID NO: 130137 - protein, 120 aa, Oryza sativa
  Clone ID: PAT_MRT4530_32327C.1.pep
TPPPPPPPLPVDDAAASSDNAYTSYQSLLTLIRATGSTSDETRGGCRKCGRVGHLTFQCRNFLSGSASLSSPVPAPPPFLQVRSLLFPAALDSLALLSRHRVFPNKNLGIFLSSCTSFRS

SEQ ID NO: 130138 - protein, 244 aa, Oryza sativa
  unsure (1)..(244): unsure at all Xaa locations
  Clone ID: PAT_MRT4530_32328C.1.pep
PSPSSPRTRLLPHRXRHHCLHSHGRRRRCHRRQPPPPQTTAVPSPSATKQPATAPTTPPPASTPSHHRRQPLPPLPARPDAGRASKDAPTAVCRRPAGSGRHGVGPRPPLLHRASPSPPPPAGPTAGRLPARSRRGSGGTSTATISTNRRCSLSRAPLPLPRRRRLLRPTPRAAMASARCRKRCRQPPPLGLPASKTGGARAANPAAVLARRWLCRHLARAAARQEARVVGCSGGLGCRRPRVR

SEQ ID NO: 130139 - protein, 651 aa, Oryza sativa
  Clone ID: PAT_MRT4530_32329C.1.pep
MPPPPPSSRLLALLSARRPPPPLRRLLQIHAHLLAAGLLQDFSSLLAAAYALSTTATATDARTSPPSPLRHALALLSSLPASAYNAAIRALSLSDDGDRHGHGVVRRCLPLYRALLRSGTARPDHLTFPFLLKACARLREWGYGDAALAHVLRLGLDSDVFVVNAATHFLSIRGPMEDARRLFDRSPVRDLVSWNTLIGGYVRRGNPAEALELFWRMVAEDAVVRPDEVTMIAAVSGCGQMRDLELGRRLHGFVDSDGVSCTVRLMNALMDMYIKCGSLEMAKSVFERIEHRTVVSWTTMIVGFAKFGLMDDARKVFDEMPERDVFPWNALMTGYVQCKQCKEALSLFHEMQEASVVPDEITMVNLLTACSQLGALEMGMWVHRYIEKHRLVFSVALGTSLIDMYAKCGNIEKAIHIFKEIPEKNALTWTAMICGLANHGHANEAIEHFRTMIELGQKPDEITFIGVLSACCHAGLVKEGREFFSLMETKYHLERKMKHYSCMIDLLGRAGHLDEAEQLVNTMPMEPDAVVWGAIFFACRMQGNISLGEKAAMKLVEIDPSDSGIYVLLANMYAEANMRKKADKVRAMMRHLGVEKVPGCSCIELNGVVHEFIVKDKSHMDSHAIYDCLHEITLQIKHTADLLSISAAGAV

SEQ ID NO: 130140 - protein, 95 aa, Oryza sativa
  Clone ID: PAT_MRT4530_3232C.1.pep
MELERSGGGELVALEDALEPRAPPVAGAVGRGWRPRREGGREGPGGGHLVEDVLEAAVAGLELGHESTPSSAGFGANLEPFPPGRGWAARREALK

SEQ ID NO: 130141 - protein, 69 aa, Oryza sativa
  Clone ID: PAT_MRT4530_32330C.1.pep
RQDKPFTNHGACSTSSSDLHIHPKFITRTLYSDVLYSITTYIPILSRTLPNRTQIHMLYVYIIIYTVLN

SEQ ID NO: 130142 - protein, 311 aa, Oryza sativa
  Clone ID: PAT_MRT4530_32331C.1.pep
MNDLFSSGSFKKYADLKNQAALDDMESGGGGGGGGEGANLEQFFEEVEGVKGEMRGLEALHGRLQASHEGSKTAHDARAVRSLRARMDADVEQVLRRARAVKGRLQALDRANAASRKLPGRGPGSSTDRTRSSIVSGLGTKLKDLMDDFQGLRSRMAEEYKETVARRYYTVTGEKAEESTVEALISSGESETFLQKAIQEQGRGQVLDTISEIQERHDAVKEIERGLLDLHQVFLDMAALVEAQGHQLNDIESHVARANSFVRRGAVELETAREYQRSSRKWACIAILAGVVLVVIIVLPIIVNLHLLTIR

SEQ ID NO: 130143 - protein, 46 aa, Oryza sativa
  Clone ID: PAT_MRT4530_32332C.1.pep
VKETKGKHVIIHHNYITGFEKKIKRFRDHGLWLVDEHSDESPLGRI

SEQ ID NO: 130144 - protein, 92 aa, Oryza sativa
  Clone ID: PAT_MRT4530_32333C.1.pep
MAEQLRQRVIVFTLVVVACLVLATTTKVADARMLKRMERDGDAVVESPAVDLEAMDGSTEGAGDGGLQWLKSVSLDMLGGIKDSGPSPGAGH

SEQ ID NO: 130145 - protein, 514 aa, Oryza sativa
  Clone ID: PAT_MRT4530_32334C.1.pep
MGRSKREVAPPPQALPASFPSGMWLATPPMQASFAPGGWQGTAAAPGGWQGMAPPQPPQAPLFAYGANTSAPHLAQMKQGSDRSSMDDSLSDLQESGMDSRPPGGFLSYFQDPSSLQNHQPSIPLNYYATQQAAPWAPSPAEYRSPVTKSGPGEQHPINIDSGGEETPTVRTEKRLTWTHEEDIRLVSAWLNNLNDSINGNFKKNDCYWGDVTTAYNSTTPRNRMRQEKQIKDRFHKIKKNVGRFCCAYKEVKSIYVSGQNELQLMEKVHATYEADYKEGQFTFLHCWKALRDQPKWHAYLEELEKPNKTKSDNEVEVRELTSTPNSPEDIIRPEGTKAAKARRNGKDKRKRKAKVYLSDMDDEIDKPKEVQNMADKGRDELLETQRRVSSENLESKRLAHLAAMEHKEAVMLETYRALMLQDTKDMPDDVRFEHVMALKSMREKLFPKTKHNRMLILAACFGSASAREATYYIIFSNPPILSKQNLCSNYLLSMSLYGSLLWPMNDVWIIVID

SEQ ID NO: 130146 - protein, 133 aa, Oryza sativa
  Clone ID: PAT_MRT4530_32335C.1.pep
MRATAAAAFSLLTCSCLRSTSPTRLPSSSLRLPLRRGPLAAMATAASFRPEAARSPPAVQPPAPFFSKFKVALCQLSVTADKARNIARAREAIEAAAAGGAKLVLLPVSARLIITTSRFVCSSDLNGRRRGED

SEQ ID NO: 130147 - protein, 61 aa, Oryza sativa
  Clone ID: PAT_MRT4530_32336C.1.pep
PRGNHWMVRTNVRGHDLAYASSNTSWTSRGGRFTTFVAASLSLSTRAFGWTEFSFPMIYVL

SEQ ID NO: 130148 - protein, 65 aa, Oryza sativa
  Clone ID: PAT_MRT4530_32337C.1.pep
TIQNRSLKVPRQYIWVVSLTWHPNQPKKNLKILGAHMLAAHFFSSPSFSFSPLFSLLYFSLVREA

SEQ ID NO: 130149 - protein, 141 aa, Oryza sativa
  unsure (1)..(141): unsure at all Xaa locations
  Clone ID: PAT_MRT4530_32338C.1.pep
PQKKTCAKRGVFKKKKKWWFLAKGGKLKKRTSLIKGWGENEKPKGGPXVEKRYLLFFRGGSPKKANIEAHLKKIEEPLKKKKXELPKKIKTKGALVPKKVEEKKPMVEAKGGKKVLKAKEMAPKYGAPGHVPKKIMGCFGA

SEQ ID NO: 130150 - protein, 144 aa, Oryza sativa
  Clone ID: PAT_MRT4530_32339C.1.pep
MEVAYLIVDEVQDNLLQIGSCLVTCNQHQPWHLERLTFTQMNLEGDKMTYSGIFHVTVRFYGVPESLRLCSLVDKLIQYTATFSDSLRYKQDKNIIGLVVFGVTKKPPDTILIANSTYKINKICAFRRLLFHNCVLLSRTSFLS

SEQ ID NO: 130151 - protein, 1045 aa, Oryza sativa
  Clone ID: PAT_MRT4530_3233C.1.pep
MTQPDRQINTHSADSNPQTGVSCATPFYYCRIHVSTVGAPGRGCVELPIEKCDGIDYRRNGEINLDGSNLQSGAAPTDALRPPRHHGHMGAAAYSLLGEISCMHELIQQINIQLAYQAAVVGRLRLHRPACLRRRRLVSLPTRLAYYAAAVGRLRLHRRPASVAAEWCLRLHGWPIMPPLLGVYDFTTGLPPSPPSGASAYTAGLLLCRRCWASTTSPPACLRRRRVVPPPTRLAYYAAAVGRLRLHRRLASVAAEWCLRLHGWPIMPPLLGVYDFTTGLPPSPPIGASAYTAGLLCRRCWVSTTSPPACLRCRRVVPPPARLAYYATVVGRLHLHRRPASVAADWCLRLHGWPIMPPLLGVYIFTAGLPPSPPTGVFAYMVGWSHHRCWASTSSPPACLRRRRLVPPPTRLAYYASVVGRLHLHRRPASVAADWCLRLHGWPIMPPLLGVYIFTAGLPPSPPIGASVYTAGLLCRRCWASTTSPPACLRRRRVVPPPTRLAYYAAVVGCLHPHRWLTFVAVDWIQIQICIKGIHGFKLISYALGMDQSKHHHRPPRPPPTGVFACTAGLLCRRCWASTSSPTGLPSPPPTGVSACTAGLYAAIVGRLRLHRPACLRRRRLVFPPAWLAFMPPLLGVYVFTDRLAFAAADWCFRLHGRLIMLPLLGVYVFTDRLAFVAADWCPRLHGWPIMPPLLGAYVFTDRLAFAAADWCPRLHGWPIMPPLLGAYVFTDRLAFAAANCLYAAVVGRLRLHRPACLRRYRLVLPLARLAFYAAVVGRLRLHRPAASSAADWCFRLHGWPIMPPLLGVYVFTDRLAFAAADWCFRLYGWPIMPPLLGVYVFTDRLAFAAADWCLRLHGWPVITPTDAIFFTAGYIAVTTNRHQYLQHKLPTFAMAADWFLHFHGCMILPVLTGLTIFIAATTTDGHHRLPSPTDYAAADWCFYLHNCASSLPVCFCCRRLVFTSLRQYNFVIMVERLHLYYLRHWQTLLLLLRKFCYFTNHDVFVNLDISACDAVLFYYNKWLSNIQDFYLDIFNTYLQSSNDY

SEQ ID NO: 130152 - protein, 129 aa, Oryza sativa
  unsure (1)..(129): unsure at all Xaa locations
  Clone ID: PAT_MRT4530_32340C.1.pep
PXXFRRXMXXEHVXGAPRCVPGRAPXTRRTPPTLASSRTCSKPSPPPSAXSWATTLSSTLTSTASTPSRPALTVLLPLSKRLFFGGYFSRLVYTFFYTFYFCGKRRSWDICFRELAVLGFRALQRLIAS

SEQ ID NO: 130153 - protein, 98 aa, Oryza sativa
  Clone ID: PAT_MRT4530_32341C.1.pep
MELATGIVPPMLGSGRAPASDATSTIALRLSGSGGPGLGAAGGAGEGQGLAPMALENGGDRSGNVGEGRKHGVVQLIEGGEDATNGASCRPLAGVNGS

SEQ ID NO: 130154 - protein, 236 aa, Oryza sativa
  Clone ID: PAT_MRT4530_32342C.1.pep
MAFADPHLQIPDSYVRAGEVPAGEVVGGADDESLELPVVDMARLLDPEHREEEIAWLGSACRSWGFFQLVNHGVDEAVIQKMKDNTIRPWRQRMALQRYPPCRHPEKVMGIAPHSDGFGLTLLLQVNDTPGLQVSKDGRWRPVRPLPGAFVINVGEILEVLTNGYYKSVFHRVVVDTDKDRVTVVVFQDACIAGVVKPLPELGEQRYHATNRSEYYKGQLKALRRQGEKFVDTLKK

SEQ ID NO: 130155 - protein, 61 aa, Oryza sativa
  Clone ID: PAT_MRT4530_32343C.1.pep
FPFQTDRGGVRRLLGQPVRSPFRRGPSQASPILSGPPFPDIASANDPCFWNISSDGRHECV

SEQ ID NO: 130156 - protein, 53 aa, Oryza sativa
  Clone ID: PAT_MRT4530_32344C.1.pep
QEFGTGSLCPPKLGRSCTKPNLRAANEHHHTRVINDSVICCLSSFFLFSYIYM

SEQ ID NO: 130157 - protein, 370 aa, Oryza sativa
  Clone ID: PAT_MRT4530_32345C.1.pep
MLLQETRQRKEGGLACLLVCCTSHSWRQSHVQLQMLCQEMNKRNLQQAHVPSSPCVWRGRAPARSAPPSRRCTCRCSPAESSLSPPPPPPLNDCIGHWRLLLFSPVAVQPIPHTPHHYPTCPCPTPPLRSSPLLMTTRPDGGGGGGGAPDKQLVPASNANGTALAVRKPPSKDRHSKVDGRGRRIRMPIICAARVFQLTRELGHKSDGQTIEWLLRQAEPSIIAATGTGTTPASFSTSSPSSLRSNSTSNSNDLLLPRAAPFILGKRLRAADDHTTSPAPAPDATAPTQAFWALPARADFGQLWSFAAAPEMMVAAAAAPAMPGEASAARVGNYLPMAQGNLNLLASFSGGPGGAGATAATGRPEEESAR

SEQ ID NO: 130158 - protein, 133 aa, Oryza sativa
  unsure (1)..(133): unsure at all Xaa locations
  Clone ID: PAT_MRT4530_32346C.1.pep
GGGPGRLRGARGACSVAPWCCCAGCALVASAASSPVGVAGASRGGWSVVACVSAPRVGSSGCVVAPPARCXGSCLVAWPAAAGFALRCGPRPVPWRCSLRGCGGXGWPRSSWLCXGCSPPLVAFCCLCSAAGS

SEQ ID NO: 130159 - protein, 78 aa, Oryza sativa
  unsure (1)..(78): unsure at all Xaa locations
  Clone ID: PAT_MRT4530_32347C.1.pep
FPPGNVERLWSMVLPEQPADXAAPARRPCLDVTQLGYFXVLGKGLLPDKPXIIVKPKLICXVNKKKIKAAAGAVVLAA

SEQ ID NO: 130160 - protein, 100 aa, Oryza sativa
  unsure (1)..(100): unsure at all Xaa locations
  Clone ID: PAT_MRT4530_32348C.1.pep
MTVVTVGMVGNTLQPSLGLHFYRSAKTXIQRRRGRSGRTTRFGRTWGWPNPAQFRLAACSAASLCRLVNFGLIHYVKSAFLAHSYTSLVPDIVRLIYRMS

SEQ ID NO: 130161 - protein, 299 aa, Oryza sativa
  Clone ID: PAT_MRT4530_32349C.1.pep
MGDYFVALIHYPLAQLSFARAGSDKWTWLPPHTDFMDCLFEDGLLYALNSAGEVHAFDLSAPTVTQKVVLEDVKAYIEENMYFARAPSGDLLQIWRSLATNRDDYYVDQTDGDDSEHGSDHKNWIDDYVDQTDGDVLQFELDKYEDDLEHASEHENWRAGDGLKPESDEDEDEDDLEPEPNTDSLVVNTNMIKVFKVDFSAKMLVDINSLGNSVLFLGYNQTLCLNADVYPQLKPNHIYFTEDDSLYLFRCKKNRRDTGVLDLENDTIEPIVSPELWSNWPVPIWLIPNPRKMISASHN

SEQ ID NO: 130162 - protein, 1315 aa, Oryza sativa
  Clone ID: PAT_MRT4530_3234C.1.pep
MPPLLGVYDFTTGLPPSPPIGVSAYTAGLLCRRCWASTSSPTGLPLPLPIGVSACTAGLYAAVVGRLRLHRPACLRRCRLVFPPARLAFMPPLLGVYVFTDRPPRPPPTGASVCTAGLYAAVVGRLRLHRPACLRRRRLVPPPARLAIMPPLLGVYDFTAGLPPSPPIGASAYTAGLLCRRCWASTTSPSACLRRCRLVFPPARLAFMPPLLGVYVFTDWLAFAAADWCFRLHGWPIMPPLLGVYDFTTGLPPSPPIGASAYTAGLLCRRCWASTTSPPACLRRRRLVPPPTRLAYYAAAVGRLRLHRRPASVAADWCLRLHGWPIMPPLLGVYDFTAGLPPSPPIGASAYTAGLLCRRCWASTTSPSACLRRCRLVFPPARLAFMPPLLGVYVFTDWLAFAAADWCFRLHGWPIMPPLLGVYDFTTGLPPSPPIGASAYTAGLLCRRCWASTTSPPACLRRRRLVPPPTRLAYYAAAVGRLRLHRRPASVAADWCLRLHGWPIMPPLLGVYDFTAGLPPSPPIGASAYTAGLLCRRCWASTTSPSACLRRCRLVFPPARLAFMPPLLGVYVFTDGLASVAADWCLRLHGWPIMPPLLGVYDFTTGLPPSPPIGASAYTAGLLCRRCWASTTSPPACLRRRRLVPPPTRLAYYAAAVGRLRLHRRPASVAADWCLRLHGWPIVPPLLGVYDFTAGLPPSPPIGASAYTAGLLCRRCWASTTSPSACLRRRRLVPPPTRLAYYVAAVGRLRLHRRPASVAAEWCLRLHGWPIMPPLLGVYDFTTGLPPSPPIGASAYTAGPLCRRCWASTTSPPACLRRRRVVPPPTRLAYYAAAVGRLRLHHRPASVAADWCPRLYGRLVTPPLMGIVIFTAGLPPSPPTGASAYTAGLLCRRCWASSLSPSTAFVAADWIQIQICIKGIHGFKLISYAPGMDQSEHHHRLASTAADWCSRLHGWPIMPPLLGVYVFTDRLAFAAADWCFRLHGWPIMPPLLGVYVFTDRLAFAAADWCFRLHGWPIMPPLLGVYVFTDRLAFAAADWCFRLHGWPIMPPLLGVYVFTDRLAFAAADWCFRLHGWPIMPPLLGVYVFTDRLAFAAADWCFRLHGWPLCRRCWASTSSPTGLPSPLPTGVSACTAGLYAAVVGRLRLHRPACLVRRRLVFPPARLAFMPPLLGVYVFTDRLAFAAADWCFRLHGWPLCRRSWASTSSPTGLPSSPPTGVLACTAGLLCRRCWAPTSSPTGLPLSSPTDVLACTAGLYAAVVGRLRLHRPACLRRRRLVFPPARLAFMPPLLGVYVFTDRSPHPPLTGVTACTAGLL

SEQ ID NO: 130163 - protein, 61 aa, Oryza sativa
  Clone ID: PAT_MRT4530_32350C.1.pep
LGLAQGRSNTARPTRGLAHGKASFHPRFPHQGRRPHRSLALHSHAHQAGHDCGCPSCGHPT

SEQ ID NO: 130164 - protein, 94 aa, Oryza sativa
  Clone ID: PAT_MRT4530_32351C.1.pep
MTVVMVGMVGNTLQSSLGLHLHRPAKTWIQRRRGRFGRTWGWPNPAQFRLAASSAASLRRLVNFGLIHCVKSAFLAHPYTSLVLDIVRLIYRLS

SEQ ID NO: 130165 - protein, 100 aa, Oryza sativa
  Clone ID: PAT_MRT4530_32352C.1.pep
MTVVTVGMVGNTLQPSLGLHLNRPAKTWIQQRRGRFDRITRFDRTWCWPNPAQFRLAASSAASLRRLVNFGLILRVKSVFLAHSYTSLVLDIVRLIYCLS

SEQ ID NO: 130166 - protein, 97 aa, Oryza sativa
  Clone ID: PAT_MRT4530_32353C.1.pep
MWEVTVATGSGCGMPPTPLDLPAGSRTTPPDPPVEATGGRHHSRWGKGAVTASARAEGGRRHRRSRSGRITAGPRKLNGPRAGQWVQHNTVRGVEGR

SEQ ID NO: 130167 - protein, 366 aa, Oryza sativa
  Clone ID: PAT_MRT4530_32354C.1.pep
MASSKPSYYLSLLFSIACLLSLLPLSAANPSPSPPPPCEKSDKEMRFLFSRWMAQYGKAYSWPIEHEKRYQIWKDNSNFIGSFRSETEISSGVGAFAPQTVTDSFVGMNRFGDLTPGEFAEQFTGFNATGGLLHAAPPPCPIPPDSWLPCCVDWRSSGAVTGVKFQRSCASCWAFAAAAAIEGLNKIRTGELVSLSEQVMVDCDTGSSGCSGGRADTALGLVAARGGVASEEEYPYTGVRGGCDVGKLLSGHSASLSGFRAVPPNDERQLALAVARQPVTAYIDAGAREFMFYKGGVYRGPCSAERVNHAVAIVGYCEGFGGDKYWIAKNSWGSDWGEQGYVYLAKDVWWPQGTCGLATSPFYPTA

SEQ ID NO: 130168 - protein, 301 aa, Oryza sativa
  Clone ID: PAT_MRT4530_32355C.1.pep
MKRGGAGVGGGGGGGDPGAYAAVLKTKLDLYCAAVAKSMEAKLQESSLGYLNLQASDTSQLVSQDSFNGYGSTRVTNSNAIHEDDDQGKPANSGTSKEQSDDDGDLEEDTDPVNAKRTRRMLSNRESARRSRKRKQAHLNDLESQVSQLRSENASLQKRLSDMTQKYKQSTTEYGNLQDDMNAMRRKVNIAEEAVRRVTGIGLQLFTTSEMPASSMPVSSGVSDAASAAAAAALVEDDWTNCSLPDEAIPVPSAAMALRSPSVRRVASLENLQKRIHAGDVTHFEAASALSLPEATACDNK

SEQ ID NO: 130169 - protein, 41 aa, Oryza sativa
  Clone ID: PAT_MRT4530_32356C.1.pep
VVEYQKLLAQRLKEHMFCRSESLANRRSKFSSAAKLAALTA

SEQ ID NO: 130170 - protein, 131 aa, Oryza sativa
  unsure (1)..(131): unsure at all Xaa locations
  Clone ID: PAT_MRT4530_32357C.1.pep
KRGGGGQKKNKTLFQEKGVKGNPPNRKKPGGGGQKPPKFFFLNPPGGPQXRGLKNPPPPWGGGGETKPGKGEMGPWWPLGPQKRKIGPLNPHTPGLKKNGSTGGPYSGPXGGPPKKPGPPPEPQGGKPGGP

SEQ ID NO: 130171 - protein, 66 aa, Oryza sativa
  unsure (1)..(66): unsure at all Xaa locations
  Clone ID: PAT_MRT4530_32358C.1.pep
TDTWPXXXXGXPSFXXSEVXRXXPXXFLSALFFXRRCXXSPLXGGDKASDRSSETXXRGESGVCDV

SEQ ID NO: 130172 - protein, 160 aa, Oryza sativa
  unsure (1)..(160): unsure at all Xaa locations
  Clone ID: PAT_MRT4530_32359C.1.pep
MGMGPLENPVVDPAAEAVAAKTPVSGVGVGGLYPVLQCGEDSEYVRKAYGGYFXVFRALLAEDGERWRVYRPVRGELPGEEEAPGIDGFVISGSCNDAHPDDPWIVALVDLIRRQKAAGKGILGVCFGHQVPPPSSSSSAMDVSLCSFRLRFGLVCSGEG

SEQ ID NO: 130173 - protein, 50 aa, Oryza sativa
  Clone ID: PAT_MRT4530_3235C.1.pep
MAKGRKQISSSEQSPTRPDPLGGVGPEGDVAAPPLRLPEGSDHSRFGPEG

SEQ ID NO: 130174 - protein, 59 aa, Oryza sativa
  Clone ID: PAT_MRT4530_32360C.1.pep
MTTRRLAGELREACPVCQGHQLGGRRSAWRGNEEHWQGDKQHPQLCRWLKIAEGIDSEL

SEQ ID NO: 130175 - protein, 63 aa, Oryza sativa
  Clone ID: PAT_MRT4530_32361C.1.pep
LRQRSWHWHFTVAWIIASAASSWTGPDHKSGSSQWMNENAVDDHLLDQAEMPGASSPRWMIST

SEQ ID NO: 130176 - protein, 33 aa, Oryza sativa
  Clone ID: PAT_MRT4530_32362C.1.pep
RLYCVILHHGAGVQIRQIVKRGTDLAGSIQGTD

SEQ ID NO: 130177 - protein, 443 aa, Oryza sativa
  unsure (1)..(443): unsure at all Xaa locations
  Clone ID: PAT_MRT4530_32363C.1.pep
CPCVDCKNEEMLARRVDIXFHLICRGFIKGCTCWTKHGEQESINIADETSGGQNQEDEAELHWATEWLMSITSLEAMLRDGEEPDYDKKDFMKFARLVSDXQTPLYARCKAKHMSSGWXLLKDLLPEENTLPKTKNEAKXLLCLLGIEVHRIYACPNNCILYYKEYADLESCLVCKTSXTSDRQVLTKGEKVKVGGPAKVVRYLPIIDRSKXIFANSKKVELVYLHATDXRTNGKLMPQIESYVYIRICMNPFGDLCSCQSTXLVLIANYNLPPXLCFKRKRIIFCLLIQVLKQSSNDIDVLLELVIDDLETLWXDCVHTWDVFXSRENFNLRTLLFCSINDYLTLGNLSGQTIRQNKACSDYLENTHSKWLNKSRKIVXIGHRSRLPLRHSYRRMNKNFNNKRELLPIPSDVTREKVVDMVKDIHRGFDKKRKCIIRQRRKV

SEQ ID NO: 130178 - protein, 607 aa, Oryza sativa
  unsure (1)..(607): unsure at all Xaa locations
  Clone ID: PAT_MRT4530_32364C.1.pep
MAAAFDLPPVTTPAPAAPSDVLLPTQPQVSGPEEFPAAAVNSNDDDMMMVDDVVVAGGVGGSGSTGNRWPREETLALIRIRSEMDAAFRNATLKAPVWEELSRRLAELGYQRSGKKCKEKFENVDKYYKRTKEGRTGRQDGKSYRFFSQLEALHAAAPPPPPQQRQGMPVEDPQPLAMAWMMLPGAADLGFLSMSSESESDDESDEEEEEEEAVAPGGGGREGLGDDGDGDGEGGSSTRKLMAMFEGMMRQVTXSRTRCSGCSWRRWRSGRRSAXREEAWRRKEVARINREREQLSKERAAAASRDAALIAFLQRVGGAGGEPVRLSPSSAGATRHDAAAAGLQLVPVPAPRAKAEDAWAAAGGDGSGTTAPSRWPKEEVQALIDLRMEKEEQYNDMGPKGPLWEEIAAGMQRIGYNRSAKRCKEKWENINKYFKKVKESNKRRPEDSKTCPYFHQLDAIYRKKHFAGRGGGGGGVTIAASHSSLAIVTVSEQDNPSQRELEGKSSNDVGNVQLAVPLLVHNAPDKKVEGSEGEPNVTAAAEETDSDEMCGEYTDDGDDDDKMQYKIEFQKPTAGGGGDGNDAPVPATTAAATSSAPTSNTSFLAVQ

SEQ ID NO: 130179 - protein, 60 aa, Oryza sativa
  Clone ID: PAT_MRT4530_32365C.1.pep
RVKTWINENLPADHLLAEGKSKQRFSRHAPTLIYFSLNEVLFIGKKKVCHRKKREKKLVL

SEQ ID NO: 130180 - protein, 54 aa, Oryza sativa
  Clone ID: PAT_MRT4530_32366C.1.pep
PGGRPRPAPSLLTRPLLTAPMCPATSHTYTAASTRPSSSHSTGVRMPRMHYQMF

SEQ ID NO: 130181 - protein, 1635 aa, Oryza sativa
  unsure (1)..(1635): unsure at all Xaa locations
  Clone ID: PAT_MRT4530_32367C.1.pep
MSWHRAGVLLLGAQSCLPVPGVPAVGGIGSVLLSMARMGWKLCHVFRLYTVVMAGSINRRGLDLTGFVLELRGMCVVLGYAHGVDYQGRQLPEQEGDDAEPHAAWEVTAVILTGSPERTSLAVTTGGDSFSAACQNAALLAIGTLHQRYPDELQHSPYRYHPRRGGARDYATFRDASSEDDATIMHLARMVEAYDAARIDFHQMLKKDLDAAEAQLHQLKIAQGEVCRPKRRRVCRSQKITARKSTSRPELVRQSLAWTCFVETPRAEPAPMAPQEGEASGVDGDDQEKCCYGEGSHPEGSNHNNQGSPPPPPPPPLPPPPDTNAILTQILAQQANMMAALLHHIQNPPQHNAPPPPPQHSKLAEFLRIRPPTFSSSNNPVDALDWLHAVGKKLDTVQCSDEEKATQPEGQPITWARFTAAFRRTHVPAGVMALKKREFRELKQGNRSVMEYLHEFNNLARYAPEDVREDEEKQKKFLAGMDPELSVCLVSGDYPDFQRLVDKSIRLEAKHKELESHKRRLANFRNQQGANQRIRYTNPYPGGSSSQQQKQQQPRSAPRPQFVVCVPQPQQQQSQQGTRAPRPPTPAAQSGQGRRDVQGPQRLCFNCFEPGHFADKCPKPRRQQGQAPPRSNNGGKDVIRGRVNHVTAEDVLTTPDVIVGTFLIHSIPATILFDSGASHSFISVPFVGRNQLGVERLRNPLLITTPGGVMTAKYYSPAVPIEIQGIPFPSDLILLDTKNLDVILGMNWLAQFQGVVDCARRTVTLYRGPEQPVVFFAPPTSVSSSELHQIGLSEIPIVREFGDVFPEELPGMPPKREIEFWIDLAPGTTPLYKRPYRMAANELAEVKKQLEELKERGYIRPSTSPWGAPVIFVEKKDKTKRMCVDYRALNEVTIKNKYPLPRIDDLFDQLKGATVFSKIDLRSGYHQLRIREEDIPKTAFTTRYGLHEFTVMSFGLTNAPAFFMNLMNKVFMEYLDKFVVVFIDDILVYSQSEEDHQHHLRLVLGKLREHQLYAXLASLLKKEEKFVWSPQCEKAFXEKLVSSPVLILPDTRKDFMVYCDASRQGLGCVLMQEGHVVAYALRQLRPHEGNYPTHDLELAAVVHALKIWRHYLIGNRYEIYTDHKSLKYIFNQSDLNLRQRRWLELIKDYDVGIHYHPGKANVVADALSRKSHCNTLNVRGIPPELNQQMEALNLSIVGRGFLAALEAKPTLLDQIREAQKNDPDMRGLLKNMKQGKAAGFTEDEHGTLWNGNRVCVPDNRELKQLILQEAHESPYSIHPGSTKMYLDLKEKYWWVSMKREIAEFVALCDVCQRVKAEHQRPAGLLQPLQVPEWKWDEIGMDFITGLPKTQGGYDSIWVVVDRLTKVARFIPVKTTYGGNKLAELYFARIVSLHGVPKKIVSDRGSQFTSHFWKKLQEEMDTRLNFSTAYHPQTDGQTERLNQILEDMLRACVLDFGKTWDKSLPYAEFSYNNSYQASIQMAPYEALYGRKCRTPLLWDLVGENQVFGTDILREAEAKVIIARRGEVAYQLDLPASLGNVHDVFDVSQLKKCLRVPSEQADSEQIEVREDLTYVERPVKILDTMERGTRNRVIRFCKVQWSNHAEEEATWEREDELKAAHPDLFASSSESRGRNSV

SEQ ID NO: 130182 - protein, 833 aa, Oryza sativa
  unsure (1)..(833): unsure at all Xaa locations
  Clone ID: PAT_MRT4530_32368C.1.pep
MSSGANEGYTSCGPVVEMSWHRAGVLLLGAQSCLPVPEVPAVGGIGSMYTSDQSIIYSNSRALGYGQAEQCTQMAGSVTRRGLDMTGFVLELRGMCVVLGYPHGVDYQARPLPEQEGDDAEPHAGWEVTAVILAGSPERTSLAVTAGGDSFPAACXNAAFLAIGTLHQRYPDELQHSPYRYHPRRGGARDYATFRDASSEDDATIMHLARMVEAYDAARIDFHQMVRRGMVENNMKILELRQENLQLKKDLDAVEAQLHQLKIAQGEVCRPKRRRVCRSQKITARKSTSRPELVRQSLAWTCFVETPRAEPAPVVPQEGEASGVGSTEDALLLTFRPGPSQRRSAATGDGNQPEGSNHHQGSPPPPPPPPPPPPPDTNAILTQILAQQANMMTAFLHHLQNPPQHNAPPPPPQHSKLAEFLRIRPPTFSSSNNPVDALDWLHAVGKKLDTVQCSDEEKVIFAAHQLQGPASLWWDHFQATQPEGQPITWARFTAAFRRTHVPAGVVALKKREFRELKQGNRSVMEYLHEFNNLARYAPEDVREDEEKQEKFLAGMDPELSVRLVSGDYLDFQRLVDKSIRLEAKHKELESHKRRLANFRNQQGANQRVRYTNPYPGGSSSQQQQQQQQPRSAPRPQFVVRVPQPQQQQNQQGTRAPRPPTPTVQPGQGRRDAQGPQRLCFNCFEPGHFADKCPKPRRQQGQAPPRSNNGGKDVIRGRVNHVTAEDVLTTPDVIVGTFLIHSIPATILFDSGASHSFMSVPFVGRNQLGVERLRNPLLITTPGGVMTANVSRQSTNDRPDFSNLSKYQNGNGMKLGWISSPDFQKPKVDMILYG

SEQ ID NO: 130183 - protein, 86 aa, Oryza sativa
  unsure (1)..(86): unsure at all Xaa locations
  Clone ID: PAT_MRT4530_32369C.1.pep
FFSKALNEGEVLVFPVGLILFRFNHNPDXLSLAIAAIRSQILGAMTIANKVCGSHPPIXDDVLAEALQVEKGAIVWLQDQLWEIHR

SEQ ID NO: 130184 - protein, 926 aa, Oryza sativa
  Clone ID: PAT_MRT4530_3236C.1.pep
MVRGSHPLIPAGVGPPALVKARLTFPGVIGAQKSSPIKCPRISPAALDRTHKGRPHGSLVEEFIVRYLARQVGGTFVLFEVLSSASVISVASPMRGKAQPSQECRATLGRGLGPQHPHRVRLAAWSLWRVFGISDDPQSFGQPHGQIFVASLRNVRWPPKFQPNFTEMCNGSVNPSESLQIYTTIIEAVGGDDRVKANLFPMALQGQVQGTLMDMPPASWPALVPSASYGARPGSTDRPFKFQRLALVPLAGYGARPAQLWKGIAGSRVFQLSHSCKGSHPCRRERYWKEATERKEQTECVAWGHRLKISSWPKVPASESPSGWGEKGAWVLVPAKKEEEIGPTYHQTWKVASTLTTWGRFWSGLTPGATVGDMGPGGISALNRSVTGRMTDGTQDVRRTIACVKRRAARHIPSNNDGESRLVLPPFIGVHVFTVRLAFAAADWCFRLHGWPIMPPLLGVYDFIAGLPLAPPSTGVSAGWLHNIVGRLRFHRSACLRRHRLVFPPTWLAYYAAIDWASTTSPPACLYRRLLVSSPIRLVGHTTVHRCPHLHRPACLRHRRLVFPPARLAYYAAVVGHLRLHRWPVSVSVVADWCLRLRDWPIMPPLLSMNQIQICIIGIHGFKLISYASEMDQSEHHHWLVVVATDWCPRLHGWLLLGVYVFTDRLAFAGTDWCLRLHGWPIMPPLLGIYVFTTGLPLPPLTGVSAYTAGLLCRRCQASTSSPTGLPSPLPTSISPTQLAYYAAVVERRCLHRPAASPAADHCPRLYGWMVTPPLLGVYVFTAGSSPSPLTAGHVNATANRHHHPQHKLSMSAADWFLHFHGCMILLVLIGLIVFTAGRLVCSNWLCRRPAFLSSQLRVFATGSLLLLPTHVHFITTMKLYHHGGATLSSLSSAPANSIAATSQVLLLHQPGRLQELRHLGMRHHI

SEQ ID NO: 130185 - protein, 531 aa, Oryza sativa
  Clone ID: PAT_MRT4530_32370C.1.pep
MGSCLSSDLPPRAGAGAGASPGWPQRWRRRRQRGVERGGAVSGGGGGVFSIGVGGKKLHHGGGGGGEMTEEELAKVEGRVCVNGASAAACLHTQQGRKGTNQDAMVVWENFNTSDSVFCGVFDGHGPYGHFVAKKVRDSLPVKIRTLWKTSANEDTSSHQNGSISGSVNSEESPVVDDEWGEYADDSEKLPEMFLPLKQSYFKAFKLMDKELKMHPTVDCFCSGSTAVTLVKQGLDLVVGNLGDSRAIMGTRDAANNLTAVQLTVDLKPNLPREAARIQQCRGRVFALQDEPEVARVWLPNNDSPGLAMARAFGDFCLKDYGLISVPQISYRRLTEKDEFIILATDGVWDVLSNKEAVDIVAAAPSRATAARALVDCAVRSWRLKFPTSKSDDCAVVCLFLDHAKSPDLIQENESEEETTEDVAIPDTVAKVDQDIAQGDAHISSEEQITEPALQHSYTLRDVDEIVPVEEPPVSKEPERCGSARSLADCISTNEEEEWSALEGVTRVNSLLNLPRILSGEKRSTSWRKRR

SEQ ID NO: 130186 - protein, 447 aa, Oryza sativa
  Clone ID: PAT_MRT4530_32371C.1.pep
MMTAFLHHLQNPPQQNAPPPPPQHSKLAEFLRIRPPTFSSSNNPVDALDWLHAVGKKLDTVQCSDEEKVIFAAHQLQGPASLWWDHFQATQPEGQPITWARFTAAFRRTHVPAGVVALKKREFRELKQGNRSVMEYLHEFNNLARYAPEDVREDEEKQEKFLAGMDPELSVRLVSGDYPDFQRLVDKSIRLEAKHKELESHKRRLANFRNQQGANQRVRYTNPYPGGSSSQQQQQQQQPRSAPRPQFVVRVPQPQQQQNQQGTRAPRPPTPAVQPVQGRRDAQGQQRLCFNCFEPGHFADKCPKPRRQQGQAPPRSNNGGKDVIRGRVNHVTAEDVLTTPDVIVEKKDKTKRMCVDYRALNEVTIKNKYPLPRIDDLFDQLKGATVFSKIDLRSGYHQLRIREEDIPKTAFTTRYGLYEFTRKTINTISVWCWESCGNINCMPSLAS

SEQ ID NO: 130187 - protein, 121 aa, Oryza sativa
  unsure (1)..(121): unsure at all Xaa locations
  Clone ID: PAT_MRT4530_32372C.1.pep
TLFIFLVCCQIPIYGVQSAKSSDPPYWMRAILASNQGTTMELAISPTVTPGLIMQSIARSRIIXGDYNAKERRALFSGAQKLIGLPITTCEAITYSCSVMLGDLGSIGAANAVMIIDQVFC

SEQ ID NO: 130188 - protein, 1244 aa, Oryza sativa
  Clone ID: PAT_MRT4530_32373C.1.pep
MVMPMVTTRRSAATGDGNQPEGSNHHHQGSPPPPPPPPPDTNAILTQILAQQANMMTAFLHHLQNPPQHNAPPPPPQHSKLAEFLRIRPPTFSSSNNPVDALDWLHVVGKKLDTVQCSDEEKVIFAAHQLQGPASLWWDHFQATQPEGQPITWARFTAAFRRTHVPAGVMALKKREFRELKQGNRSVMEYLHEFNNLARYAPEDVREDEEKQEKFLAGMDPELSVRLVSGDYPDFQRLVDKSIRLEAKHKELESHKRRLANFRNQQGANQRVRYTNPYPGGSSSQQQQQQQQPRSAPRPQFVVRVPQPQQQQNQQGTRAPRPPTPTVQPGQGRRDAQGPQRLCFNCFEPGHFADKCPKPRRQQGQAPPRSNNGGKDVIRGRVNHVTAEDVLTTPDVIVGTFLIHSIPATILFDSGASHSFISVPFVGRNQLGVERLRNPLLITTPGGVMTAKYYSPAVPIEIQGIPFPSDLILLDTKNLDIGLLEIPIVREFGDVFPEELPEEDHQHHLRLVLGKLREHQLYAKLSKCEFWLSEVKFLGHVISAKGVAVDPETVTAVTDWKQPKTVTQVRSFLGLAGYYRRFIENFSKIARPMTQLLKKEEKFVWRPQCEKAFKTLKERLDGHVVAYASRQLRPHEGNYPTHDLELAAVVHALKIWRHYLIGNRCEIYTDHKSLKYIFTQSDLNLRQRRWLELIKDYDVGIHYHPGKANVVADALSRKSHCNTLNVRGIPPELNQQMEALNLSIVGRGFLAALEAKPTLLDRIREAQKNDPDMHGLLKNMKQGKAAGFTEDEHGTLWNGNRVCVPDNRELKQLILQEAHESPYSIHPGSTKMYLDLKEKYWWVSMKREIAEFVALCDVCQRVKAEHQRPAGLLQPLQVPEWKWDEIGMDFITGLPKTQGGYDSIWVVVDRLTKVARFIPVKTTYGGNKLAELYFARIVSLHGVPKKIVSDRGSQFTSHFWKKLQEELGTRLNFSTAYHPQTDGQTERLNQILEDMLRACVLDFGKTWDKSLPYAEFSYNNSYQASIQMAPYEALYGRKCRTPLLWDQVGESQVFGTDILREAEAKVRTIRDNLKVAQSRQKSYADNRRRNLEFAVDDFVYLRVTPLRGVHRFQTKGKLAPRYVGPFRIVARRGEVAYQLELPASLGNVHDVFHVSQLKKCLRVPSEQADSEQIEVREDLTYVERPVKILDTMERRTRNRVIRFCKVQWSNHAEEEATWERENELKAAHPDLFASSSESRGRDSV

SEQ ID NO: 130189 - protein, 2515 aa, Oryza sativa
  Clone ID: PAT_MRT4530_32374C.1.pep
MAGPEDKDEEGASHSPRTKGIIQYFTRQVKQHTEGLDTDLQVTNEKIGQLESTQISTNTKLTGLETAVARIDTSLAALVRHFDALNAGGNGGGNDDDIDGEYVEDNLEDEYIADTEQDDRDAQDRRRLHNNRRGMGGRRRREVRNNDDAFSKIKFKIPPFDGKYDHDAYLSWEIAVDQKFACHEFPENTRVRAATSEFTDFASVWWIEHGKKNPNNMPQTWDALKRVMRARFVPSYYARDLLNRLQQLRQGAKSVEEYYQELQICLLRCKLEETEDAAMARFLGGLNREIYDIVDYKDYTNMTRLFHLACKAEREVQGRRASAKANFSAGKTSSWQTRTTPPAGRTASPSSTPTTSRAAPPTSSDKSATKAAQPAPSASSMASTGRMRDVQCHRCKGFWHVQRDCPSNDFDDDTLALLAADLADNEPPEEHIRAAFADHYESLIVQRVLSAQMEKAEQNQRHTLFQTKCVVKERCCRMIIDGGSCNNLASSEMVEKLALSTKPHPHPYYIQWLNNSGKAKVTKLVHINFAIGNYHDVVECDVVPMQVCNILLGRPWQFDRDSMHHGRSNQYSFLYHDKKIVLHPMSPEDILRDDVAKAAKSKCESDKKAQSDGKKPETINLKPKCLLATKSDINELIASPSVAYALEYSDVFPKEVPPGLPPVRGIEHQIDLIPGASLPNRAPYRTNPEETKEIQRQVHELLDKGAINNITIRYRHPIPRLDDMLDELSGSIVFSKADLRSGYHQIRMKLGDEWKTAFKTKFGLYEWLVMPFGLTNAPSTFMRLMNEVLRPFIGKFVVVYFDDILIYSKSMGEHFNHLRAVFNALRDARLFGNLEKCTFCTDRVSFLGYVVTPQGIEVDQAKVEAIQSWPTPKTVSQVRSFLGLAGFYRRFVQDFSTIAAPLNALTKKGVPFTWGTSQENAFHMLKDKLTHAPLLQLPDFNKTFELECDASGIGLGGVLLQEGKPVAYFSEKLSGLVLNYSTYDKELYALVRTLETWQHYLWPKEFVIHSDHESLKHIRSQGKLNRRHAKWVEFIESFPYVIKHKKGKENIIADALSRRYTLLTQLDYKIFGLETIKDHMRMMLILMMCCCIEAHGGGLMGHFGAKKTHDILASHFFWPQMRRDVGRAVLKKNIKMWEECLPHIEFAYNRSLHSTTKMCPFQIVYGLLPRAPIDLMPLPSSEKLNFDAKQRAELMLKLHETTKENIERMNAKYKFAGDKGRRELNFEPGDLVWLHLRKERFADLRKSKLMPRADGPFKVLAKINENAYKIDLPADFGVSPTFNVADLKPYLGEEDELESRTTQMQEGEDDEDINTIDTSTSPHIQHDGPITRARARQLNYQDECPRGRVDAHHKFAATIGDGGSSSQQQQQQQPRSAPRPQFVVRVPQPQQQQSQQGTRAPRPPMPAMQPGQGRRDVQGPQCLCFNCFEPGHFADKCPKPRRQQGQAPPRSNNGGKDVIRGRVNHVTAEDVLTTPDVIIGTFLIHSIPATILFDSGASHSFISVPFVGRNQLGVERLRNPLLITTPGGVMTAKNYSPAVPIEIQGIPFPSDLILLDTKNLDVILGMNWLAQFQGVVDCARRTVTLYRGPEQPVVFFAPPTSVSSSELHQIGQSEIPIVREFGDVFPEELPGMPPKREIEFRIDLAPGTTPLYKRPYHMAANELAEVKKQLEELKEKGYIRPSTSPWGAPVIFVEKKDKTKRMCVDYRALNEVTIKNKYPLPRIDDLFDQLKGATVFSKIDLRSGYHQLRIREKDIPKTAFTTRYGLYEFTMMSFEEDHQHHLRLVLGKLREHQLYAKLSKCEFWLSEVKFLGHVISAKGVAVDPETVTAVTDWKQPKTVTQIRSFLGLAGYYRRFIENFSKIARPMTQLLKKEEKFVWSPQCEKAFQTLKEKLVSSPVLILPDTRKDFMVYCDASRQGLGCVLMQDGHVVAYASRQLWPHEGNYPTHDLELAAVVHALKIWRHYLIGNRCEIYTDHKSLKYIFTQSDLNLRQRRWLELIKDYDVGIHYHPGKANVVADALSQKSHCNTLNVRGIPPELNQQMEALNLSIVGRGFLAALEAKPTLLDQIREAQKNDPDMHGLLKNMKQGKAAGFTEDEHGTLWNGNRVCVPDNRELKQLILQETHESPYSIHPGSTKMYLDLKEKYWWVSMKREIAEFVALCDVCQRVKAEHQRLAGLLQPLQVPEWKWDEIGMDFITGLPKTQGGYDSIWVVVDRLTKVARFIPVKTTYGGNKLAELYFARIVSLHGVPKKIVSDRGSQFTSHFWKKLQEELDFGKTWDKSLPYAEFSYNNSYQASIQMAPYEALYGRKCRTPLLWDQVGESQVFGTDILREAEAKVRTIRDNLKVAQSRQKSYADNRRRNLEFAVDDFVYLRVTPLRGVHRFQTKGKLAPRFVGPFSIITRRGEVAYQLELSASLGNVHDVFHVSQLKKCLRVPSEQTDSEQIEVREDLTYVERPVKILDTMERRTRNRVIRFCKVQWSNHAEEEATWEREDELKAAHPDLFASFSESRGRDSV

SEQ ID NO: 130190 - protein, 63 aa, Oryza sativa
  Clone ID: PAT_MRT4530_32375C.1.pep
PAPPPPPPPSPSPPRPAPPRPPPRLHPRDGRWRRRPRSRPAPRRRGGRGRACGCGAGCGTATG

SEQ ID NO: 130191 - protein, 838 aa, Oryza sativa
  unsure (1)..(838): unsure at all Xaa locations
  Clone ID: PAT_MRT4530_32376C.1.pep
MSWHRAGVLLLGAQSCLPVPGVPAMAGSVTRRGLDMTGFVLELRGMCVVLGYPHGVDYQGRPLPEQEGDDGEPHAAWEVTAVILAGSPERTSLAVTAGGDSFPAASQSAALLAIGTLHQRYPDELQHSPYRYHPRRGGARDYATFRDASSEDDATIVHLARMVEAYDAARIDFHQMVRRGMVENNLKILELRQENLQLKKDLDAVEAQLHQLKIAQGEVCRPKRRRVCRSQKITARKSTSRPELVRQSLAWTCFVETPRAEPAPVVPQEGEASGVGSTEDALLLTFRPGPSQRRSANTGDGNQPEGSNHHHQGSPPPPPPPPPPPPPDTNAILTQILAQQANMMTAFLHHLQNPPQHNAPPPPPQHSKLAEFLRIRPPTFSSSNNPVDALDWLHAVGKKLDTVQCSDEEKVIFAAHQLQGPASLWWDHFQATQPEGQPITWARFTAAFRRTHVPAGVVALKKREFRELKQGNRSVMEYLHEFNNLARYAPEDVREDEEKQEKFLAGMDPELSVRLVSGDYPDFQRLVDKSIRLEAKHKELESHKRRLANFRNQQGANQRIRYTNPYPGGSSSQQQQQQQQPRFAPRPQFVVRVPQPQQQQNQQGTRAPRPPTPTVQPGQGRRDAQGPQRLCFNCFEPGHFADKCPKLRRQQGQAPSRSNNGEKDVIWGRVNHVTAEDVLTTPDVIXREFGDVFPEELPGMPPKREIEFRIDLAQETTPLYKRPYRMAANELAEVKKQLEELKEKGYIRPSTSPWGAPVIFVEKKDKTKRMCIDYRALNEVTIKTKYPLPRIDDLFDQLKGATVFSKIDLRSGYHQLRIREEDIPKTAFTTRYGLYEFT

SEQ ID NO: 130192 - protein, 349 aa, Oryza sativa
  unsure (1)..(349): unsure at all Xaa locations
  Clone ID: PAT_MRT4530_32377C.1.pep
MLMKPSKAFRQAASTAASAAITVSSSYTRVYYQEGRREWATSCLCRPRWSPTRPARRTPRPRRTACRTSGSPTGATRSAAGRTSASAAPSPGTAAPRAPPAPSRCGGTRSWPWPRRPRTPPRASPSPAPPARPPSASSRPRAGASAAPRCRPPPHRCRSRRSRRRPPRTRLPPRWPPAPARRPATSRPACRSSSPWSGPGTGSGTGAGRLSSSGPVSSSRTRRRRRRRRAMPAPWRPRSRRAPPRPRTACRGARPPSPGAGGEFQQTSGGRSPTSPAQPSAPRRPSRRRPRRTRTSTPSPRTQAPTQPGSRTRPXPGINANDTPASASKNPPPPPPEMRFPPPITSPLV

SEQ ID NO: 130193 - protein, 539 aa, Oryza sativa
  Clone ID: PAT_MRT4530_32378C.1.pep
RSWSCGRRTCSSRRTSTRWRRSCISSRSPRERSAAPSVAASAAARRSPPARAPPGLSLFVSPWRGPASSRPLVPSPRPWFPRRGKPPALAATTTTRATHLHLLLPPPPPPPDTNAILTQILAQQANMMTTFLHHLQNPPQQNAPPPPPQHSKLAEFLRIRPPTFSSSNNPVDALDWLHAVGKKLDTVQCSDEEKVIFAAHQLQGPASLWWDHFQATQPEGQPITWARFTAAFRRTHVLAGVVALKKREFRELKQGNRSVMEYLHEFNNLARYAPEDVREDEEKQEKFLAGMDPELSVRLVSGDYPDFQRLVDKSIRLEAKHKELESHKRRLANFRNQQGANQRVRYTNPYPGGSSSQQQQQQQQPRSAPRPQFVVRVPQPQQQQNQQGTRAPRPPTPAVQPGQGHRDAQGQQRLCFNCFEPGHFADKCPKPRRQQGQAPPRSNNGGKDVIRGRVNHVTAEDVLTTPDVIVEKKDKTKRMCVDYRALNEVTIKNNVSRQSTNDRPDSSNHSKYPNGNGMKLGWISSPDFQRPKVDMILYG

SEQ ID NO: 130194 - protein, 710 aa, Oryza sativa
  Clone ID: PAT_MRT4530_32379C.1.pep
MSWQRVGALLLGAQSCLPVPEMAGSVTRRGLDMTGFVLELRGMCVALGYPHGVDYQARPLPDQEGDDAEPHAGWEVTAVILSGSPERTSLAVTAGGDSFPAACQNAALLAIGTLHQRYPDELQHSPYRYHPRRGGAHDYATFRDASSEDDATIVHLARMVEVYDAARIDFHQMVRRGMVENNLKILELRQENLQLKKDLDAVEAQLHQLKIAQGEVCRPKRRRVCRSQKITARKSTSRPELVRQSLAWTCFVETPRAEPAPVVPQEGEASGIGSTEALSLFAGSVWGFQMVTTRRNAATGDGNQPEGSNHNHQGNPPPPPPPPPPPPPDTNAILTQILAQQANMMTAFLHHLQNPPQHNAPPPPPQHSKLAEFLRIRPPTFSSSNNPVDALDWFHAVGKKLDTVQCSDEEKVIFAAHQLQGPASLWWDHFQATQPEGQPITWARFTAAFRRTHVPAGVVALKKREFRELKQGNRSVMEYLHEFNNLARYAPEDVREDEEKQEKFLAGMDPELSVRLVSGDYPDFQRLVDKSIRLEAKHKELESHKRRLANFRNQQGANQRGRYTNPYPGGSSSQQQQQQQQPRPAPRPQFVVRFPQPQQQQNQQGTRAPRPPTPTVQPGQGRRDAQGQQRLCFNCFEPGHFADKCPKPRRQQGQAPPRSNNGGKDVIRGRVNHVTAEDVLTTPDVIVGSSEMCFRKNYPVCRPSERLSSG

SEQ ID NO: 130195 - protein, 152 aa, Oryza sativa
  unsure (1)..(152): unsure at all Xaa locations
  Clone ID: PAT_MRT4530_3237C.1.pep
TAATNGDGAQATEDGGDKPGWRRMGTEPELRWMAXRAQVPPPITAAPFLPPLVPAAAMGRRSVVARSHPPPELAVDGSPALKINDNGTPASHLLEERIPAWLLPXLLTPAPPLPAPPHSHRRPSAAAIRPHPXQSDAAAHLLLPCHGEVGKE

SEQ ID NO: 130196 - protein, 312 aa, Oryza sativa
  unsure (1)..(312): unsure at all Xaa locations
  Clone ID: PAT_MRT4530_32380C.1.pep
RSVMEYLHEFNNLARYALENVREDEKKQEKFLAGMDPELSVRLVSGDYPDFQRLVDKSIRLEXKHKELESHKRRLANFRNQQGANQRVRYTNPYPGGSSSQQQQQQQQPRSAPRPQFVVRVPQPQQQQSQQGTRAPRPPTPTVQPGQGRRDASGPQRLCFNCFEPGHFADKCPKPRRQQGQAPPRSNNGGKDVIRCRVNHVTAEDMLTTPDVIVGTFLIHSIPATILFDSGASHSFISVPFVGRNQLGVERLRNPLLITTPGGVMTAKYYSSAVPIEIQGIPFPSDLILLDTKNLDVIPGMNWLAQFQGVVD

SEQ ID NO: 130197 - protein, 1050 aa, Oryza sativa
  unsure (1)..(1050): unsure at all Xaa locations
  Clone ID: PAT_MRT4530_32381C.1.pep
MEPRSPRPIPPSPAALSPSRRYIFAPRAFLLRFRRSPLALAVGFVLATSTSLSAVAADLRYAADVAPGSLPTRRHLHPLRRVVVHPVRPFASPADRRSSVALVIPNRAAVFLRFGRRCRRRRRPGVSRRPSLRFPLLSSLSGAAPPRRWSPAVTIGARVRRLPSAVPARPPSGAPRGCQVGPGRQPPAPAGAADAWDPRRRPPPAACSRSTVDPPRPFKDRSSGLCCKALPYFHMSSGANEGYTSCGPVVEMSWQRVGALLLGAQSCLPVPGVPAVGGIGSMYTSNQSIIYSNSRALGYGQAEQCTQMAGSVTRRGLDMTGFVLELRGMCVVLGYPHGVDYQARPLPEQEGEDAEPHAGWEVTAVILSGSPGRTSLAVTAGGDSFPAACQNAALLAIGTLHQRYPDELQHSPYRYHPRRGGARDFATFRDASSEDDATIVHLARMVEAYDAARIDFHQMVRRGMVENNMKILELRQENLQLKKDLDAVEAQLHQLKIAQGEDCRPKRRRVCRSQKITARKSTSRPELVRQSLAWTCFVETPRVEPVPVVPQEGEASGVGSTEDAPLLTFXVTTRRNVNTGDGNQPEGSNHNHQGNPPPPPPPPPPPPPDTNAILTQILAQQANMMTAFLHHLQNPSQQNAPPPPPQHSKLAEFLRIRPPTFSSSNNPVDALDWLHAVGKKLDTVQCSDEEKVIFAAHQLQGPASLWWDHFQATQPEGQPITWARFTAAFRRTHVPAGVVALKKREFRELKQGNRSVMEYLHEFNNLARYAPEDVREDEEKQEKFLAGMDPELSVRLVSGDYPDFQRLVDKSIRLEAKHKELESHKRRLASFRNQQGANQRVRYTNPYPGGSSSQQQQQQQQPRSAPRPQFVVRVPQPQQQQNQQGTRAPRPPTPAVQPVQGRRDAQGPQRLCFNCFEPGHFADKCPKPRRQQGQAPPRPNNGGKDVIRGRVNHVTAEDVLTTPNVIVGTFLIHSIPATILFDSGASHSFISVPFVGKNQLGVERLRXNPLLITTPGGVMTAKYYSPAVPIEIQGIPFPSDLILLNTNNLD

SEQ ID NO: 130198 - protein, 104 aa, Oryza sativa
  Clone ID: PAT_MRT4530_32382C.1.pep
FRIDFYICNFVMNLFPLLPEAFKGNKQIGVIGWGSQGPAQAQNLRDSIAQVKSDVVVKIGLRKGSKSFDEACAAGFTEESGTLGDIWETVSGSDLMLLLISDTA

SEQ ID NO: 130199 - protein, 149 aa, Oryza sativa
  Clone ID: PAT_MRT4530_32383C.1.pep
MAHSLAAAASSFSPPAARRRLPGQLLVSEVTNVISRRSSVSFNSQRISFMSIRSRPSQLRFKICCSAKKETVDKVCNIVKTQLALPEGTAVTGESKFSELGADSLDTVEIVMGLEEEFNITVDETSAQDIATVQDAANLIEKLVLEKAA

SEQ ID NO: 130200 - protein, 113 aa, Oryza sativa
  Clone ID: PAT_MRT4530_32384C.1.pep
KNKVGAPTQKGGAPIKRGANLINLPPPPPPGGTKKKPPPFWERGPHKKKKKKGLKNPPRTFGGLEKGPPKKGHTGGAPGKTPGGGFSHPEERGDFKKPAGGQQQKKLKTGGGK

SEQ ID NO: 130201 - protein, 446 aa, Oryza sativa
  Clone ID: PAT_MRT4530_32385C.1.pep
MAAAGAGSSEVAARVLLQRYQPFAPPPGEYHQFGSGGAAAAGDMTEAVLIRTPLKRKHDREENEAAESNDWMMSPGYTNPAGSPVPTPLSGKGSKAFAKSKAAKGQKSCPQTPLCASSPGNPVTPVGGCRYDSSLGLLTKKFLNLLKGAPGGIVDLNNAAETLEVQKRRIYDITNVLEGIGLIEKKLKNNIRWKGIDDSRPGEVSDDMSILQADIEALSLQEHSVDQQISEMRDKLRGLTEDENNQKWLYVTEDDIKSLPCFQNQTLIAIKAPHGTTLEVPDPDEVNDYPQRRYRIVLRSTMGPIDVYLVSQFEEMSGMETPPRTVQPVSMDSLENPRTPLAAEPNKAAESQPNIQDGLLMPSDAPSSSQDIGGMMKIVPSELDTDADYWLLSDAGVSITDMWKTAPEVEWEGIEKFNAEDFLEVSTPRQQDKPSSDIMDGDSCIS

SEQ ID NO: 130202 - protein, 54 aa, Oryza sativa
  Clone ID: PAT_MRT4530_32386C.1.pep
GGPAGLIYSFPVTFSGGQWTIVQGFPIDEFSRKKMDANSQELSEEKTLGYSCLH

SEQ ID NO: 130203 - protein, 161 aa, Oryza sativa
  Clone ID: PAT_MRT4530_32387C.1.pep
MAGAAAATAATAAHGCTVLGRYRRRQAMARVATDSGDTGGPFIGARRRRRRPTATGDAMEEGVYAACGTAGVEAARADVKERGRSSNRSSGSSKPYCMESISVVFAGPRHRIVAVVRCGLGDIDRGRTAMMTYEACRSVASRRAGTGCDDALDYLNFDRCR

SEQ ID NO: 130204 - protein, 58 aa, Oryza sativa
  Clone ID: PAT_MRT4530_32388C.1.pep
RECPPTRRIHYTCMNCGPRLNKMHAARVQLCELEAGARQWRAACRQVDGKMRCTRSLN

SEQ ID NO: 130205 - protein, 145 aa, Oryza sativa
  Clone ID: PAT_MRT4530_32389C.1.pep
MVLHRSNCLVGVPLASLLHMYLSWTLDLPMWRRIGAANAADGLNENLSSISICSSSRCPSDWDVFFGQELALTLYKYVKRKERSVQERLTNDQWIEDIKHNLIVQLVKEYLEESRNSSTFLQGLLNISSRIVLLYDIFGRGPYVD

SEQ ID NO: 130206 - protein, 278 aa, Oryza sativa
  Clone ID: PAT_MRT4530_3238C.1.pep
MMFPLHFHYEDVLRQDLLLKLNHANVMEVPGLFEIRLVPKAASDFKIQFGKLAMEILCGQRFIQTQRGPYFKAGKSFRSNPFLGSEKDTGYVSDFARQSVLRGHGMYHFLVRILTVMSMLDSPVEIWENSIKFFMETEFCEFSPELEDHFEIFEHIRGFNVTIVTSANTKDETLLLWSGFLLKDEGETNISRFFDGHKEIVLVATTKPIEQSAEKTALNEKRTKARLVMCHCTGSSEKVEVLSFTLSVNSRFRYTRKIAYDINQLSPSVEEFLIAFDV

SEQ ID NO: 130207 - protein, 70 aa, Oryza sativa
  Clone ID: PAT_MRT4530_32390C.1.pep
MDLDKSTSTSASLKKLQEDGALPGRGTMEREPGGVGPEPVSGCIGFRLRDGLKSRYIPFQCPSSRSKWRA

SEQ ID NO: 130208 - protein, 95 aa, Oryza sativa
  Clone ID: PAT_MRT4530_32391C.1.pep
FLRGRNGPSSAAAAASLASPGATRWSTRPSSTTAAAARYRQNQTTSRKCHRPARRRPHRAQRRYPCAASPSAGTWPAAPPPAAAAATSPSPPGSS

SEQ ID NO: 130209 - protein, 1256 aa, Oryza sativa
  Clone ID: PAT_MRT4530_32392C.1.pep
MAVKKHNVAMQLQVVVLWLVGVALFSVMASSAPAAVAAAPPPAECPSKCGDVDIPFPFGVGDDCAWPGPDDFNVTCNHSFTPPRPYYSNMEMKDISLPKGEMRVYTSVLQNCFDLSNTSSSSESDVGSPWLDLAGTPFLVSPERNEFTATGCDTLGMMYGREDGSYLTGCVTTCASLDAAANDGDHCAGLGCCQIQSIPTNLTLLRIVLSANITDRKIAAWNPCRYAFITDRDGQFRYNFSRKDLGRSGNKIFANRDGEMVVPTELDWAIRGTNRSCSVCVSDQSDCANATNGDGYLCKCSEGYDGNPYLKGNGGCTATVCSVISLTVLVCLYKRRKRRMFANNNGGRLLKDMNIVLITEKDLNKMTKNRSTKILGEGSFGKVYMETHKNQPVAVKYSKGKRKLAQTTHGKDIKCMNKNMFQNAFCWSKVPSSPEEDSSSRVSGPELVDELRVQSLIQHENVRLDIAIGSAKALSYMHSSSLMHGDVKPANILLDDNLNPKVSDFGSSELILKFKHVCVDKNYVDPVCILTNKYTMESDVYSYGVVLLELITRKRAKYDDERSIRVEFVNQYKDNNERRKMYDQDMLSSTDSLYPYCMECLDRMAAVAVRCLKNKVDKRPTMAEVVEELKQLREQISTRRSKSNGSDTDLAALLAFKGELSDPYSLLATNWTAGTPFCRWMGITCSRRQQQRVTGVELPGVPLQGKLSPHIGNLSFLSVLNLTITNLTGSIPDDIGRLHRLELLDLGNNAFSGVIPASIGNLTRLGVLRLAVNRLTGPVPPGVFNMSMLGVIALALNGLTGPIPGNESFRLPSLWFFSVDANNFTGPIPQGFAACQQLQVFSLIQNLFEGALPSWLGKLTNLVKLNLGENHFDGGSIPDALSNITMLASLELSTCNLTGTIPADIGKLGKLSDLLIARNQLRGPIPASLGNLSALSRLDLSTNLLDGSVPATVGSMNSLTYFVIFENSLQGDLKFLSALSNCRKLSVLEIDSNYFTGNLPDYWLDLSENSLFGPIPSNIGVLKNIQRLFLGTNQFSSSISMGISNMTNLNLSFNNLHGQIPETGVFSNITLESLVGNSGLCGAPSNVLFNDDMTAHVSDFGIARLLLGDDSSMISASMPGTVGYMAPEYGALGKASRKSDVFSYGIMLLEVFTAKRPTDAMFVGELNIRQWVLQAFPANLVHVIDGQLVQDSSSSTSSIDGFLMPVFELGLLCSSDSPEQRMVMSDVVVTLKNIRKEYVKLIATMGRDDNRTAVFH

SEQ ID NO: 130210 - protein, 64 aa, Oryza sativa
  Clone ID: PAT_MRT4530_32393C.1.pep
YGAHPPQGPCVLHTHVYMMLCPARCPHIVCVFCVENVCVARELYPHVCAHTTENHALMCTPRDV

SEQ ID NO: 130211 - protein, 1030 aa, Oryza sativa
  Clone ID: PAT_MRT4530_32394C.1.pep
MALGSPVCIIMSALLLITLSPVVAAAAASPPGTSKSNGSDSDLAALLAFKGELSDPYNILATNWTAGTPFCRWMGITCSRRQWQRVTGVELPGVPLQGKLSPHIGNLSFLSVLNLTITNLTGSIPDDIGRLHRLELLDLGNNALSGVIPASIGNLTRLGVLRLAVNQLSGQIPADLQGLHSLRSINIQNNGLTGSIPNSLFNNTPLLSYLNIANNSLSGSIPACIGSLPMLQFLDLQVNQLAGPVPPGVFNMSMLGVIALALNGLTGPIPGNESFRLPSLWFFSIDANNFTGPIPQGFAACQQLQVFSLIQNLFEGALPSWLGKLTNLVKLNLGENHFDGGSIPDALSNITMLASLELSTCNLTGTIPADIGKLGKLSDLLIARNQLRGPIPASLGNLSALSRLDLSTNLLDGSVPSTVGSMNSLTYFVIFENSLQGDLKFLSALSNCRKLSVLEIDSNYFTGNLPDYVGNLSSTLQAFIARRNNISGVLPSTVWNLTSLKYLDLSDNQLHSTISESIMDLEILQWLDLSENSLFGPIPSNIGVLKNVQRLFLGTNQFSSSISMGISNMTKLVKLDLSHNFLSGALPADIGYLKQMNIMDLSSNHFTGILPDSIAQLQMIAYLNLSVNSFQNSIPDSFRVLTSLETLDLSHNNISGTIPEYLANFTVLSSLNLSFNNLHGQIPETVGAVACCLHVILKKKVKHQKMSVGMVDMASHQLLSYHELARATNDFSDDNMLGSGSFGEVFKGQLSSGLVVAIKVIHQHMEHAIRSFDTECQVLRTARHRNLIKILNTCSNLDFRALVLEYMPNGSLEALLHSDQRIQLSFLERLDIMLDVSMAMEYLHHEHCEVVLHCDLKPSNVLFDDDMTAHVSDFGIARLLLGDDSSMISASMPGTVRYMAPEYGALGKASRKSDVFSYGIMLLEVFTAKRPTDAMFVGELNIRQWVLQAFPANLVHVIDGQLVQDSSSSTSSIDGFLMPVFELGLLCSSDSPEQRMVMSDVVVTLKKIRKEYVKSIATMGRDENRTAVFH

SEQ ID NO: 130212 - protein, 74 aa, Oryza sativa
  Clone ID: PAT_MRT4530_32395C.1.pep
GHGVRGDEQGGHEQVGGEHQAQYGDGSRRGEARVGLRRLRDPLSRHLWLASTYMSEVGSKNTSLPKFEISTVSS

SEQ ID NO: 130213 - protein, 1309 aa, Oryza sativa
  unsure (1)..(1309): unsure at all Xaa locations
  Clone ID: PAT_MRT4530_32396C.1.pep
MATNPKGSNHNNHGSPPPPPPPPPPPPPDTNSILTQILAQQANMMAAFLHHIQNPPQHNAPPPPPPPQHSKLAEFLRIRPPTFSSSNNPVDALDWLHTVGKKLYTVQCNDEEKATQPEGQPITWARFTAAFRRTHVPTGVMALKKREFRELKQGNRSMMEYLHEFNNLARYAPEDVREDEEKQEKFLAGMDPELSVRLVSGDYPDFQRLVDKSIRLEAKHKELESHKRRLANFRNQQGANQRVHYTNPYPGGSSSQQQQQQQPRSAPRPQFVVRVPQPQQQQSQQGTRASRPPTPAVQPGQGRRDVQGQQRLCFDCFEPGHFADKCPKPRRQQGQAPPRPNNGGKDVIRGRVNHVTAEDVLTTPDVIVGTFLIHSIPATILFDSGASHSFISVPFVGRNQLGVERLRNPLLITTPGGVMTAKYYSPAVPIEIHGIPFPSDLILLDTKNLDMILGMNWLAQFQGVVDCARRTVTLYRGPEQPVVFFAPPTSVGSSELHQIGLSETPIVSEFRDVFPEELPGMPPKREIEFRIDLAPGTTPLYKRPYRMAANELAEVKKQLEELKEKGYIRPSTSPWGAPVIFVEKKDKTKRMCVDYRALNEVTIKNKYPLPRIDDLFDQLKGATVFSKIDLRSGYHQLRIREKDIPKIVFTTRYGLYEFTVMSFGLTNAPAFFMNLMNKVFMEYLDKFVVVFIDDILVYSQSEEDHQQHLRRVLGKLREHQLYAKLSKCEFWLSEVKFLGHVISAKGVAVDPETVIAVTDWKQPKTVTQIRSFLGLAGYYRRFIENFSKIARPMTQLLKKEEKFVWSPQCEKAFQTLKEKLVSSPVLILPDTRKDFLVYCDASRQGLGCVLMQDGHVVAYASRQLRPHEGNYPTHDLELAAVVHALKIWRHYLIGNRCEIYTDHKSLKYIFTQSDLNLRQRRWLELIKDYDVGIHYHPGKANVVADALSRKSRCNTLGVCDIPPELNQQMEALNLSIVSRGFLATLEAKPTLLDQISEAQKNDPDMHGILKNMKQGKAAGFTEDEHGTLWNGNRVCVPDDKELRQLILQEAHESPYSIHPGSTKMYLDLKEKYCVSRQSTNDRPDFSNLSKYQNGNGMKLGWISSPDFQKPRANMILYGXVVDRLTKVARFIPVKTTYGGNKLAELYFARIDKSLPYAEFSYNNSYQASIQMAPYEALYGRKCRTPLLWDQVGESQVFGTDILREVKAKIRTIRENLKVAQSRQKSYADNRRRDLEFAVDDFVYLRVTPLRGVHRFQTKGKLAPRFVGPFRIIARRGEVAYQLELPASLGNVHDVFHVSQLKKCLRVPSE

SEQ ID NO: 130214 - protein, 145 aa, Oryza sativa
  unsure (1)..(145): unsure at all Xaa locations
  Clone ID: PAT_MRT4530_32397C.1.pep
KGGKLGLCPPFPFPSMPMGPLVPRDRHKNGVFVQGAVFGFPVSYNGAFSFVDPVPDAFVVNFVHLLPSGAFXVLKSIEHRAMAPSSVARTSAGDSSFMPARWTCLVGSPKELVVDGGQRQYRAVTFQKIMSIIQEKIRQTAKKKE

SEQ ID NO: 130215 - protein, 662 aa, Oryza sativa
  Clone ID: PAT_MRT4530_32398C.1.pep
CSWRGPPYLLLISLKFRRVLDLATADLAATDAAFSSPSSSDHLPPLPVSTTTTTSTSPGNGNGNATLFQVQPFWHRYDRVSLPDIVARNRSALDRMADDAWALGLTAWEDAAAFAGDPWELAAVDTATTDKCPSAVSVRARGRVVFLPCGLAAGSSVTVVGTPRAAHKEYVPQLARMRQGDGTVLVSQFMVELQGLRAVDGEDPPRILHLNPRLRGDWSQRPIIEHNTCYRMQWGSAQRCDGSPPEDNDDKVDGFTKCEKWIRDDVVDTKESKTTSWLKRFIGRAKKPAMTWPFPFVEDRLFVLTMQAGVEGFHIYVGGRHVTSFPYRPGFTLEDATGLFVKGDVDVHSVYATALPMSHPSFSLQQVLEMSEKWRTRPLPKDPVFLFIGILSASNHFAERMAVRKTWMQSSEVRSSKVVARFFVALILYWSSKFHSAWLYGFSLCVEWDDGSMNRKNNSRKEVNVMLKREAEYFGDIVILPFIDRYELVVLKTIAICEYGVQNLAAVHIMKCDDDTFVRVDVVVRHIKLNNGGRPLYMGNLNLLHRPLRMGKWTVTTEVWPEDIYPPYANGPGYVISGDIAKFVVSQHANQSLRLFKMEDVSMGLWVEKFNSTSPVKYSHSWKFCQYGCLENYYTAHYQSPRQMLCLWDKLVQGRASCCNYR

SEQ ID NO: 130216 - protein, 652 aa, Oryza sativa
  Clone ID: PAT_MRT4530_32399C.1.pep
MSWHRAGVLLLGAQSCLPVPGVPAMAGSINRRGLDLTGFVLELRGMCVVLGYAHGVDYQGRQLPEQEGDDAEPHAAWEVTAVILTGSPERTSLAVTTGGDSFSAACQNAALLAIGTLHQRYPDELQHSPYRYHPRRGGARDYATFRDASSEDDATIMHLARMVEAYDAARIDFHQMLKKDLDAAEAQLHQLKIAQGEVCRPKRRRVCRSQKITARKSTSRPELVRQSLAWTCFVETPRAEPAPMAPQEGEASGVDGDDQEKCCYGEGSHPEGSNHNNQGSPPPPPPPPLPPPPDTNAILTQILAQQANMMTALLHHIQNPPQHNAPPPPPQHSKLAEFLRIRPPTFSSSNNPVDALDWLHAVGKKLDTVQCSDEEKVIFAAHQLQGPASLWWDHFQATQPEGQPITWARFTAAFRRTHVPAGVVALKKREFRELKQGNRSVMEYLHEFNNLARYAPEDVREDEEKQEKFLAGMDPELSVRLVSGDYPDFQRLVDKSIRLEAKHKELESHKCHLENFRNQQGANQRVRYTNPYPGGSSSQQQPQQQQPRSAPRPQFVVRVPQPQQQQNQQGTRAPRPPTPTVQPGQGRRDASGPQRLCFNCFEPGHFADKCPKPRRQQGQAPPRPNNGGKDVIQGRVNHVTAEDVLTTPDVIV

SEQ ID NO: 130217 - protein, 210 aa, Oryza sativa
  Clone ID: PAT_MRT4530_3239C.1.pep
MMPEVSNKDVIISICVSDGYILSFVIEGRTDTDLDHASPANLQSDLCKTATAIRSRPPDSYRHMQDQLICSGCRRVVQYRRGVAGVCCPGCNTLTAVNPSAVADMSELICSGCPTLLFYNRGASNIRCPSCNRLNSTRSANQIAHLTCGQCRTTLMHPPGASTVQCATCRYVNHVRDARPQTVLVENPKTLDDKGKLVSNVVVGVTSWKR

SEQ ID NO: 130218 - protein, 265 aa, Oryza sativa
  Clone ID: PAT_MRT4530_323C.1.pep
MGRGKIEIKRIENKTSRQVTFCKRRNGLLKKAYELAILCDAEIALIVFSSRGRLYEFSNVNSTRSTIERYKKASASTSGSAPVIDVNSHQYFQQEAAKMRHQIQTLQNANRHLIGESIGNMTAKELKSLENRLEKGISRIRSKKHELLFSEIEYMQKREADLQNENMFLRAKVAEAERAEHDDQQAAEDDEMAPAPAVGGGSSSGTELEALPATFDTREYYQPAPPVSMLAAAAAAAAAQYSSDHHQTALHLGYFKVDSGKGGLL

SEQ ID NO: 130219 - protein, 140 aa, Oryza sativa
  Clone ID: PAT_MRT4530_32400C.1.pep
MKIEKTNAGFLTNFEVLDFLRSRGAKTDPMGCLGAVAASECKVYEYLLKTPACNQTRESINEFVTRCESFKLTNADKLNVINWRPSSAADAYAMIEECGKRFSKDERGEACNEDERVEEFLELVKEAFPPPPPKPEAMIE

SEQ ID NO: 130220 - protein, 488 aa, Oryza sativa
  unsure (1)..(488): unsure at all Xaa locations
  Clone ID: PAT_MRT4530_32401C.1.pep
MVLIVAPRPYKDRSSGLCCKALPYFHMSSGANEGYTSCGPVVEMSWHRAGVLLLGAQSCLPVPGVPGVGGIGSMYTSDQSIIYSNSRALGYGQAEQCTQMAGSVSRRGLDLTGFVLELRGMCVVLGYPHGVDYQGRPLPEQEGDDAEPHAAWEVTAVILTGSPERTSLAVTAGGDSFSAACQSAALLAISTLHQRYPDELQHSPYRYHPRRGGARDYATFRDASSEDDATIMHLARMVXAYDAARIDFHQMVRPGMVENNMKILELRQENLQLKKDLDVVEAQLHQLKIAQGEVCRPKRCRVCRSQKITARKSTSRPELVRQSLAWTCFVETPRAEPAPVVPQEGEASGVGXHGGCAVAHLPXVTTRRNAATSDGNQPEGSNHNNHXXPPSPPPPPPPPPPDTNAILTQILAQQANMMAVFLHHIQNPPHHNAPPPPPQHSKLAEFLRIRPPTFSSSNNPVDALDWLHAVGKKVDLQACEXEDQIQTR

SEQ ID NO: 130221 - protein, 405 aa, Oryza sativa
  Clone ID: PAT_MRT4530_32402C.1.pep
MMTAFLHHLQNPPQQNAPPPPPQHSKLAEFLRIRPPTFSSSNNPVDALDWLHAVGKKLDTVQCSDEEKVVFAAHQLRGPASLWWDHFQATQPGEQPITWARFTAAFRRTHVPAGVVALKKREFRELKQGNRSVMEYLHEFNNLARYAPEDVREDEEKQEKFLAGMDPELSVRLVSGDYPDFQRLVDKSIRLEAKHKELESHKRRLANFRNQQGANQRVRYTNPYPGGSSSQQQQQQQQPRSAPRPQFVVRVPQPQQQQNQQGTRAPRPLTPTVQPGQGRRDASGPQRLCFNCFEPGHFADKCPKPRRQQGQAPPRSNNGGKDVIRGRVNHVTAEDVLTTPDVIVEKKDKTKRMCVDYRALNEVTIKNKYPLPRIDDLFDQLKGRPSTPSPSGVGKVAGTSIVCQA

SEQ ID NO: 130222 - protein, 134 aa, Oryza sativa
  unsure (1)..(134): unsure at all Xaa locations
  Clone ID: PAT_MRT4530_32403C.1.pep
XLSGPCGXGPSXGFXGAGXXGCXXXXXXFPFSXSXXXVWFXLXXXXXFWXXXXFXXXXXXXCLSSXXFXXFPFLFXXCSXLPLXXALXLXAPVWXXACXCSXXXSLXPLXXXCWSAVLXXXXQKXGPXAPLCSL

SEQ ID NO: 130223 - protein, 320 aa, Oryza sativa
  unsure (1)..(320): unsure at all Xaa locations
  Clone ID: PAT_MRT4530_32404C.1.pep
MMDGRMGLDRCESEVGVRCPRLIRSDAGGDLAALGSSESEQPTRPARPRGKRSRAAEVHNLSEKRRRSRINEKMKALQSLIPNSSKTDKASMLDDAIEYLKQLQLQVQMLSMRNGLYLPPVNLSGAPEHLPIPQMSAALDQNSAKASDPSVVLQPVNQTSGALLPFELASQHKPLFLPGVPNATALEPRFLVESSRSNLQSLRFTEPAEMIYPDEMMLKHRLTSASESTIVPGTDEKSVRQNTYMMNADRFDRYALSKDQLQHIMPKNTESVLDMPHLQRIXAEDSVSSVGQLTIQLPLLDRLQTSDTKVRVEGRIKVNP

SEQ ID NO: 130224 - protein, 71 aa, Oryza sativa
  Clone ID: PAT_MRT4530_32405C.1.pep
PHPASPSHGRRRRGYARRLVHVVLLLRRRGGRGVRGGDGGKTPEWLSQMAVIDSTLGAVCTCMTGLREDPD

SEQ ID NO: 130225 - protein, 766 aa, Oryza sativa
  Clone ID: PAT_MRT4530_32406C.1.pep
MSWHRAGVLLLGAQSCLPVPGVPAMAGSVSHRGLDMTGFVLELRGMCVVLGYPHGVDYQGRPLPEQEGDDAEPHAAWEVTAVILTGSPERTSLAVTAGGDSFPAACQNAALLAIGTLHQRYPDKLQHSPYRYHPRRGGARDYATFRDASSEDDATIMHLARMVEAYDAARIDFHQMVCRGMVENNLKILELRQENLQLKKDLDAVEAQLHQLKIAQGEVCRPKRRRVCRSQKITARKSTSRRELIRQSLAWTCFVETPRAEPAPVVPQEGEASGVGSTEDALLLTFRPGPSQRRSANTGDGNQPEGSNHNNHGSPPPPPPPPPPPPPDTNAILTQILAQQANMMTAFLHHLQNPPQQNAPPPPPQHSKLAEFLRIRPPTFSSSNNPVDALDWLHAVGKKLDTVQCSDEEKVIFAAHQLQGPASLWWDHFQATQPEGQPITWARFTAAFRRTHVPAGVMALKKREFRELKQGNRSVMEYLHEFNNLARYAPEDVREDEEKQEKFLAGMDPELSVRLVSGDYPDFQRLVDKSIRLEAKHKELESHKRRLANFRNQQGANQRIRYTNPYPGGSSSQQQQQQQPRSVPRPQFVVRVPQPQQQQSQQGTRAPRPPMPTVQPGQGRRDVQGPQRLCFNCFEPEHFADKCPKPRRQQGQAPPRSNKGGKDVIRGRVNHVTAEDVLTTPDVIVGVAVDPETVTAVTDWKQPKTVTQIRSFLGLAGYYWSVSRQSTNDRPDFSNLSKYRNGNGMKLGWISSPDFQKPKVDMILYG

SEQ ID NO: 130226 - protein, 661 aa, Oryza sativa
  Clone ID: PAT_MRT4530_32407C.1.pep
MAGSVTRRGLHMTGFVLELRGMCVVLGYPHGVDYQARPLPDQEGEDAEPHAGWEVTAVILSGSPERTSLAVTAGGDSFPAACQNAALLAIGTLHQRYPDELQHSPYRYHPRRGGASDHATFRDASSEDDATVVHLARMVEAYDAARIDFHQMVRRGMVENNLKILELRQENLQLKKDLDALEAQLHQLKIAQGEISRPKRRRVCRSQKITARKSTSRPELVRQSLAWTCFVETPRAEPAPVVPQEGEASGVGSSEVVWGMVTPMVTTRRNAATGDGNQPEGSNHNHQGNPPPPPPPPPPPPPDTNAILTQILAQQANMMTAFLHHLQNPPQQNAPPPPPQHSKLAEFLRIRPPTFSSSNNPVDALDWLHAVGKKLDTVQCSDEEKVIFAAHQLQGPASLWWDHFQATQPEGQPITWARFTAAFRRTHVPAGVVALKKREFRELKQGNRSVMEYLHEFNNLARYAPEDVRADEEKQEKFLAGMDPELSVRLVSGDYPDFQRLVDKSIRLEAKHKELESHKRRLANFRNQQGANQRVRYTNPYPGGSSSQQQQQQQQPRSAPRPQFVVRVPQPQQQQNQQGTRAPRPPTPAVQPAQGRRDAQGQQRLCFNCFEPGHFADKCPKPRRQQGQAPPRSNNGGKDVIRGRVNHVTAEDVLTTPDVIV

SEQ ID NO: 130227 - protein, 757 aa, Oryza sativa
  Clone ID: PAT_MRT4530_32408C.1.pep
MSWHRAGVLLLGAQSCLPVPGVPAMAGSVSRRGLDMTGFVLELRGMCVVLGYPHGVDYQGRPLPEQEGDDAEPHAAWEVTAVILTGSPERTSLAVTAGGDSFPAACQSAALLAIGTLHQGYPDELQHSPYRYHPRRGGARDFATFRDASSEDDATIMHLARMVEAYDAARIDFHQMVRRGMVENNMKILELRQENLQLKKDLDAVEAQLHQLKITQGEVCRPKCRRVCRSQKITARKSTSRPELVRQSLAWTCFVETPRAEPAPVVPQEGEASGVGSMEDALLLTFRPGPSQRRSAATGEGNQSEGSNHNHQGSPPPPPPPPPPPPPDTNAILTQILAQQANMMTAFLHHLQNPPQQNAPPPPPQHSKLAEFLRIRPPTFSSSNNPVDALDWLHAVGKKLDTVQCSDEEKVIFAAHQLQGPASLWWDHFQATQPEGQPITWARFTAAFRRTHVPAGVVALKKREFRELKQGNRSVMEYLHEFNNLARYAPEDVREDEEKQEKFLAGMDPELSVRLVSGDYPDFQRLVDKSIRLEDKHKELESHKRRLANFRNQQGANQRVRYTNPYPGGSSSQQEQQQQQPRSAPRPQFVVRVPQPQQQQSQQGTRAPRPPMPTVQPGQSRRDAQGPQRLCFNCFEPGHFADKCPKLRRQQGQAPPRSNNGGKDVIRGRVNHVTAEDVLTTPDVIVVGPESSAKEMVRTHQGLRCGNSLSSCVSRQSTNDRPDFSNLSKYQNGNGMKLGWISSPDFQKPKVDMILYG

SEQ ID NO: 130228 - protein, 42 aa, Oryza sativa
  Clone ID: PAT_MRT4530_32409C.1.pep
GTSYIIRIHSNCQCSKIGPYHHFVHRNLYQLPVQKLAEPCLS

SEQ ID NO: 130229 - protein, 86 aa, Oryza sativa
  unsure (1)..(86): unsure at all Xaa locations
  Clone ID: PAT_MRT4530_3240C.1.pep
RRRAPLLTVSAVAVAAGAQSWCLSTVSPRYHATFAASLASASPSWSSSSSNXCKIPASLRPRLIRKRWMLAATVSRVGMDASGHRL

SEQ ID NO: 130230 - protein, 1867 aa, Oryza sativa
  Clone ID: PAT_MRT4530_32411C.1.pep
MATTGTATGAERGGGTARVDGDGGVPAVGDRNGEVDEVGEDAAKLKEAVPKREMVRGNDGGEPELGGDGGERGRRRELDSDGERERRVAETVERGTGSVYIEPGAREGGRGREETGAGENDFYFGMNLSGRDTHGVDYQGKPVPEQEGDDAEPVAAWEVTAVILSGSPERTSLAVTAGGDSFSAACQNAALLAIGTLHQRYPDELQHSPYRYHPRRGGARDYATFRDASSEDDATIMHLARMVEAYDAARIDFHQMVRRGMVDNNMKILELRQENLQLKKDLDVLEAQLCQLKVAQGEVCRPKRRRVCRSQKITARKSTSRPELVCQSLAWTCFVETPRAEPAPVVPQEGEASGVGSTEDALLLTFRPGPSQRVVWGMVMPMVTTRRSANTGDGHQPEGSNLNNHGSPPPPPPPPPPPPPDTNAILTQILAQQANMMAAFLHHIQNPPQHNAPPPPPPPQHSKLAEFLRIRPPTFSSSNNPVDALDWLHAVGKKLDTVQCNDEEKATQPEGQPITWARFTAAFRRTHVPAGVMALKKRAFRELKQGNRSVMEYLHEFNNLARYAPEDVREDEEKQEKFLAGMDPELSVRLISGDYPDFQRLVDKSIRLEAKHKELESHKRRLANFRNQQGANQRVRYTNPYPGGSSSQQQQQQPPSAPRPQFVVRVPQPQQPQGQQGTRAPRPPAPAVQPGQGHRDVQGQQSLCFNCFEPGHFADKCPKPRRQQGQAPPRSNNGGKDVIRGRVNHVTAEDVLTTPDVIVGTFLIHSTPATILFDSGASHSFISVPFVGRNQLGVERLRNPMLITTPGGVMTAKYYSPAVPIEIQGIPFPSDLILLDTKNLDVILGMNWLAQFQGVVDCARRTVTLHRGPEQPVVLFAPPTSVSSSELHQIGLLEIPIVREFGDVFPEELPGMPPKREIEFRIDLAPGTTPLYKRPYRMAANELAEIKKQLEELKEKGYIRPSTSPWGAPVIFVEKKDKTKRMCVDYRALNEVTIKNKYPLPRIDDLFDQLKGATVFSKIDLRSGYHQLRIREEDIPKTAFTTRYGLYEFTVMSFGLTNAPAFFMNLMNKVFMEYLDKFVVVFIDDILVYSQSEEDHQQHLRLVLGKLREHQLYAKLSKCEFWLSEVKFLGHVISAKGVAVDPETVTAVTDWKQPKTVTQIRSFLGLAGYYRRFIENFSKIARPMTQLLKKEEKFVWSPQCEKAFKTLKEKLVSSPVLILPDTRKDFLVYCDASRQGLGCVLMQEGHVVAYASRQLRPHEGNYPTHDLELAAVVHALKIWRHYLIGNRCEIYTDHKSLKYIFTQSDLNLRQRRWLELIKDYDVGIHYHPGKANVVADALSRKSRCNTLGVRGIPLELNQQLEALNLSIVSHGFLATLEAKPTLLDQIREAQKNDLDMHGILKNMKQGKAAGFTEDEHGTLWNGNRVCVPDVRELKQLILQEAHESPYSIHPGSTKMYLDLKEKYWWVSMKREIAEFVALCDVCQRVKAEHQRPAGLLQPLQVPEWKWDEIGMDFITGLPKTQGGYDSIWVVVDRLTKVARFIPVKTTYGGNKLAELYFARIVSLHGVPKKIVSDRGSQFISHFWKKLQEELGTRLNFSTAYHPQTDGQTERLNQILEDMLRACVLDFGKTWDNSLPYAEFSYNNSYQASIQMAPYEALYGRKCRTPLLWDQVGESQVFGTDILREAEAKVRTIWENLKVAQSRQKSYADNRRRDLEFAVDDFVYLRVTPLRGVHRFQTKGKLAPRFVGPFRITARRGEVAYQLELPASLGNVHDVFHVSQLKKCLRVPSEQADSEQIEVREDLTYVERPVKILDTMERRTRNRVIRFCKVQWSNHAEEEATWEREDELKAAHPDLFASSSESRGRDSV

SEQ ID NO: 130231 - protein, 88 aa, Oryza sativa
  Clone ID: PAT_MRT4530_32412C.1.pep
LPPSPRCSRAPPLSDELRPPATAAPPTAAPIRHHRRLRGAVPQPGPYSISPLRLRNTAASRTTSLRRRHRLQPRATNAPTAVVLRRFH

SEQ ID NO: 130232 - protein, 50 aa, Oryza sativa
  Clone ID: PAT_MRT4530_32413C.1.pep
GRGARPPPLLLCSAPPARARPLVHASPPRCCPARRPPRALAGLPRGSTQD

SEQ ID NO: 130233 - protein, 1811 aa, Oryza sativa
  Clone ID: PAT_MRT4530_32414C.1.pep
MDEVGGRWTFSRANEGYTSCGPMAGSVTRRGLDMTGFVLELRGMCVVLGYPHGEDYQARPLPDQEGDDAEPHAGWEVTAVILSGSPERTSLAVTAGGDSFPAACQNAALLAIGTLHQRYPDELQHSPYRYHPRRGGARDYATFWDASSEDDATIVHLARMVEAYDAARIDFHQMVRRGMVENNMKILELRQENLQLKKDLDAVEAQLHQLKVAQGEICRPKRRRVCRSQKITARKSTSRPELVRQSLAWTCFVETPRAEPAPVVPQEGEASGVGSSEAVDEQLVGLRVCSFSFVFFGVVWGMVMPMVTTRRNAVTGDGNQPEGSNPNHQGNPPPPPPPPPPPPPDTNAILTQILAQQANMMNAFLHHLQNPPQQNAPPPPPQHSKLAEFLRIRPPTFSSSNNPVDALDWLHAVGKKLDTVQCSDEEKVVFAAHQLQGPASLWWDHFQATQPEGQPITWARFTAAFRRTHVPAGVVALKKREFRELKQGNRSVMEYLHEFNNLARYAPEDVREDEEKQEKFLAGMDPELSVRLVSGDYPDFQRLVDKSIRLEAKHKELESHKRRLANFRNQQGANQRVRYTNPYPGGSSSQQQQQQQQPRPAPRPQFVVRVPQPQQQQNQQGTRAPRPPTPTVQPVQGRRDAQGQQRLCFNCFEPGHFADKCPKPRRQQGQAPPRSNNGGKDVIRGRVNHVTAEDVLTTPDVIVGTFLVHSIPATILFDSGASHSFISVPFVGKNQLGVERLRNPLLITTPGGVMTAKFYSPAVPIEIQGIPFPSDLILLDTKNLDVILGMNWLAQFQGVVDCARRTVTLYRGPEQPVVFFAPPTSVRSSELHQIELSEIPIVREFGDVFPEELPGMPPKREIEFRIDLAPGTTPLHKRPYRMAANELAEVKKQLEELKEKGYIRPSTSPWGAPVIFVEKKDKTKRMCVDYRALNEVTIKNKYPLPRIDDLFDQLKGATVFSKIDLRSGYHQLRIREEDIPKTAFTTRYGLYEFTVMSFGLTNAPAFFMNLMNKVFMEYLDKFVVVFIDDILIYSQSEEDHQHHLRLVLGKLREHQLYAKLSKCEFWLSEVKFLGHVISAKGVAVDPETVTAVTDWKQPKTVTQVRSFLGLAGYYRRFIENFSKIARPMTQLLKKEEKFVSSPQCEKAFQTLKEKLVSSPVLILPDTRKDFMVYCDASRQGLGCVLMQDGHVVAYASRQLRPHEGNYPTHDLELAAVVHALKIWRHYLIGNRCEIYTDHKSLKYIFTQSDLNLRQRRWLELIKDYDVGIHYHPGKANVVADALSRKGHCNTLNVRGIPPELSQQMEALNLNIVGRGFLAALEAKPTLLDQIREAQKNDPDMHGLLKNMKQGKAAGFTEDEHGTLWNGNRVCVPDNRELKQLILQEAHESPYSIHPGSTKMYLDLKEKYWWVSMKREIAEFVALCDVCQRVKAEHQRPAGLLQPLQVPEWKWDEIGMDFITGLPKTQGGYDSIWVVVDRLTKVARFIPVKTTYGGHKLAELYFARIVSLHGVPKKIVSDRGSQFTSHFWKKLQEELGTRLNFSTAYHPQTDGQTERLNQILEDMLRACVLDFGKTWDKSLPYAEFSYNNSYQASIQMAPYEALYGRKCRTPLLWDQVGESQVFGTDILREAEAKVRIIRDNLKVAQSRQKSYADNRRRDLEFAVDDFVYLRVTPLRGVHRFQTKGKLAPRYVGPFRITARRGEVAYQLELPASLGNVHDVFHVSQLKKCLRVPSEQADSEQIEVREDLTYVEKPVKILDTMERRTRNRVIRFCKVQWSNHAEEEATWEREDELKAAHPDLFASSSESRGRDSV

SEQ ID NO: 130234 - protein, 1851 aa, Oryza sativa
  unsure (1)..(1851): unsure at all Xaa locations
  Clone ID: PAT_MRT4530_32415C.1.pep
MDISRTNEGYTSCGPVVEMSWHRAGVLLLGXSVLPTCPGGSGRRXGVGSMYTSDQSIIYSNSRALGYGQAEQCTQMAGSINRRGLDLTGFVLELRGMCVVLGYLHGVDYQGKQLPEQEGDDADPHAAWEVTAVILTGSPERTSLAVTAGGDSFSAACQNAALLAIGTLHQRYPDELQHXAYRYHPRRGGARDYATFRDASLEDDATIMHLARMVEAYDAARIDFHQMVRRGLVENNMKILELRQENLQLKKDLDAVEAQLRQLKIAQGEVCRPKRRRVCRSLKITARKSTSRPELVRQSLAWTCFVETPRAEPAPVVPQEEGASGVGSTEDALLLTFHPGPSQKRSAATGEGSHPEGSNHNNHGSPPPPPPPPPPPPPDTNAILTQILAQQANMMAAFLHHIQNPPQHNASPPPPQHSKLAEFLRIRPPTFSSSNNPVDALDWLHAVGKKLDIVQCNDEEKVIFAAHQLQGPASLWWDHFQAMQPEGQPITWARFTAAFRRTHVPAGVMTLKKREFQELKQGNRSVMEYLHEFNNLARYAPEDVREDEEKQEKFLAGMDPELSVRLVSGDYPDFQRLVDKSIHLEAKHKELESHKRRLANFRNQQGANQRVRYTNPYPGESSSQQQQQQQPRSAPRPQFVVRVPQPQQQQSXQGTRAPRPPTPAVQPGQGRRDAQGQQRLCFNCFEPGHFADKCXKPRRQQGQAPPRPNNGGKDIIRGRVNHVTAEDVLTTPDVIVGTFLIHSVPATILFDSGASHSFISVPFMGRNQLGVERLRNPLLITTPGGVMTAKYYSPAVPIEIQGIPFLSDLILLDTKNLDVILGMNWLAQFQGVVDCARRTVTLYRGPEXPVVFFAPPTSVGSSELHQIRLSEIPIVREFGDVFPEELPGMPPKREIEFRIDLALGTTPLYKRPYRMAANELAEVKKQLEELKEKGYIRPSTSSWGAPVIFVEKKDKTKRMCVDYRALNEVTIKNKYPLPQIDDLFDQLKGATVFSKIDLHSGYHQLRIREEDIPKTAFTTRYGLYEFTVMSFGLTNAPAFFMNLMNKVFMEYLDKFVVVFIDDILVYSQSEEDHQHYLRLVLGKLREHQLYAKLSKCEFWLSEVKFLGHVISAKGVAVDPETVTAVTDWKQPKTVTQIRXFLGLAGYYRRFIENFSKIARPMTQLLKKEEKFVWSPQCEKAFQTLKERLVSSPVLILPDTRKDFLVYYDASRQGLGCVLMQEGHVVAYASRQLRPHEGNYPTHDLELAAVVHALKIWRHYLIGNRCEIYTDHKSLKYIFTQSDLNLRQRRWLELIKDYDVGIHYHPGKANVVADALSRKSHCNTLNVRGIPPELNQQMEALNLSIVRRGFLATLEAKPTLLDQIREAQKNDPDMRGLLKNMKQGKAAGFTEDEHGTLWNGNRVCVPDDKELKQLILQEAHESPYSIHPGSTKMYLDLKEKYWWVSMKREIAEFVALCDVCQRVKAEHQRPAGLLQPLQVPEWKWDEIGMDFITGLPKTQGGYDSIWVVVDRLTKVARFIPVKTTYGGNKLAELYFARIVSLHGVPKKIVSDRGSQFTSHFWKKLQEELGTRLKFSTAYHPQTDGQTERLNQILEDMXRTCPRHTAVLPFSGTTWDKNLXPYAEFSYNNSYQTSIQMAPYEALYGRKCRTPLLWDQVGESQVFGTDILREAEAKVRTIRDNLKVAQSRQKSYADNRRCNLEFAVDDFVYLRVTPLRGVHRFQTKGKLAPRFVGPFRIIARRGEVAYQLELPASLGNVHDVFHVSQLKKCLRVPSEQADSEQIEIREDLTYVERPVKILDTMERRTRNRVIRFCKVQWSNHAEEEATWEREDELKAAHPNLFGSSSESRGRDSV

SEQ ID NO: 130235 - protein, 47 aa, Oryza sativa
  Clone ID: PAT_MRT4530_32416C.1.pep
SKLQSSPTRESCSFYRQTNMHQLSLQQLFIIYSLTFECTFVAVIMPL

SEQ ID NO: 130236 - protein, 93 aa, Oryza sativa
  Clone ID: PAT_MRT4530_32417C.1.pep
MRINPITLLALLAASQIGTQRRATTVGGIEAGHPGGVSGDGDGDGAAAVAHAPAAAAEGTGGDGRKASEVGEPERDDEACEAHTSLSYGPRPT

SEQ ID NO: 130237 - protein, 102 aa, Oryza sativa
  Clone ID: PAT_MRT4530_32418C.1.pep
RLKHHPQAQGQRPHTVMMSSLRSLKNLVIPDESLTRLEHVVKTLTQLCATSATFIELIKMDDSKTNQLHKAAEASSHLPVDVPVFGRDEVKEFILNVIIGSP

SEQ ID NO: 130238 - protein, 83 aa, Oryza sativa
  Clone ID: PAT_MRT4530_32419C.1.pep
VSLSLGFEGWSIFINQEFALFLLFWFLVFSWVAYIVGFVTVIWFTVRSKTFLPCDGICKVNVRFCCPFINVSPPGSHFSSMVL

SEQ ID NO: 130239 - protein, 278 aa, Oryza sativa
  Clone ID: PAT_MRT4530_3241C.1.pep
MAAAEFLSPEAAAAAGVGPVRQQQHPGEAAWRAVVGWLGFLLQILLQIVRGTPSSWAHLLSFLGLRHPLLSAAPPQPSPSPSPSVAFVRLPSEAPADASSTGPPPPLRRLTVVLDLDETLVCAYESSSLPAALRAEAVEAGLHCFDMECISAEKARYAKPLVDRIDAHNRFCHRLYRPSTVTTEYREHVKDLSCLSKDFHRIVLVDNNPYSFLLQPLNGIPCLTFSAGQPVDDQLMGVIFPLLKHLSLQNDVRPALYETFHMPEWFQRHGIPQIDQAA

SEQ ID NO: 130240 - protein, 192 aa, Oryza sativa
  Clone ID: PAT_MRT4530_32420C.1.pep
MATVSPGLFSYYDPIPIGRSRCADQKGPTHFAGPPPGPARRAAVKSSCAAGLAAPLPRRAPVHVAAVFVTHMHKDKSLIINKQRDLSLFSCLQLNDQTTWHAKKRALASRDGQDAKGRSLAPCLQPHRTKAGNTCWTRSGSSRAKGHDHVKPTATLPLNFESAGAVPLMEGNNVRGEAMREAETWEDGLPQM

SEQ ID NO: 130241 - protein, 125 aa, Oryza sativa
  unsure (1)..(125): unsure at all Xaa locations
  Clone ID: PAT_MRT4530_32421C.1.pep
XPDAXXGXCGXQXHIGXCRXIGXFGGVCVCISLIWGEKSGDVGVWGPRGRGGVWGPNYSVIESCGALERESAYRAXGGVGXRPYLGXGGSLGLLGEGECKGAGNLWXMWVXVXGLVRNLXXSQRR

SEQ ID NO: 130242 - protein, 95 aa, Oryza sativa
  Clone ID: PAT_MRT4530_32422C.1.pep
KLGAAVGATRAAVDAGFVPNELQVGQTGKIVAPELYMAFGVSGGGEPLAGMRDSKVIVAVNKDADAPIFQVADYGIVADLFEVLDELLKKLPDKK

SEQ ID NO: 130243 - protein, 62 aa, Oryza sativa
  Clone ID: PAT_MRT4530_32423C.1.pep
MAAGPPPPATAAGPPPGMAPPAAECLWGFQPGLKIILNSGSFWNRDYCGFGSTQQSHFSTSA

SEQ ID NO: 130244 - protein, 48 aa, Oryza sativa
  Clone ID: PAT_MRT4530_32424C.1.pep
KRNSIDSIHKRQGSQKLRLQVVRQLLLFRDYIHLFFNNYHTSYSLNTC

SEQ ID NO: 130245 - protein, 144 aa, Oryza sativa
  Clone ID: PAT_MRT4530_32425C.1.pep
MPAASSGPHRQLLGGILLLLLLLLGRTAAVGARVTAVIVFGDSTVDAGNNNAVQTVVRSNFPPYGRDFPGRRATGRFCNGRLATDFYSEAYGLRPFVPAYLDPDYGIRDFATGVCFASAGSGLDVTTAGVFIIHCNNLVTKGEL

SEQ ID NO: 130246 - protein, 147 aa, Oryza sativa
  Clone ID: PAT_MRT4530_32426C.1.pep
MEIDSRRDTVRPSRQEIERSREGESRRLTGGGEGETDQRGNEFGGELYQWQWSLCNFEKVQSPIGGSFNPRAEMCLWACRCGADIEHTKESKAAVAAVSWGDLNEYVEEMVAYCHADEYDYLRETCDSLRQFIADQRHAYLSVVSLG

SEQ ID NO: 130247 - protein, 194 aa, Oryza sativa
  unsure (1)..(194): unsure at all Xaa locations
  Clone ID: PAT_MRT4530_32427C.1.pep
MQKNEQKKLPHRRRHAPRHRPPPXRPDLRGEGRGAAAAVVVAAVAAAVVVAAVAAAAAVVVXPPLLHAVLAAVGLPXLPPPARSAREGGRGDAAGRPTPHHVRRRRRRRRRRPRXPPSLLRPDLGGRGRGETPPAAPRRRCRRRPRWPPPSLRPDLGGRGRGETPPATXPRAAAAAAPRRRRPRRAAGDERRGE

SEQ ID NO: 130248 - protein, 52 aa, Oryza sativa
  Clone ID: PAT_MRT4530_32428C.1.pep
NRGSTIFSARNTELLLGCWCIATEKNMHQLGAGIFMDYGSVGILTSSGNKRE

SEQ ID NO: 130249 - protein, 928 aa, Oryza sativa
  Clone ID: PAT_MRT4530_32429C.1.pep
MGSVERITSMPRRQVQARDGSVASLAKRTGSPCQQEDDYEGAKTMTNPWTFLPEDIWYHIHSLLPLKDAARTACVSHTFLRSWRYRPNLVFSDAKLGLSGLSESDEVTKELNEKVDLIMKNHSGIGLRTFGLEYYNLVDASYLDRWLQIAVTPAIEELILMFFPEIKAKYYDFPFSLLFDRGGNSIKHLRLSYCAFRPTTSLNFLQRLHLFEVRITGDELGCLLSNSFALEQLKLTHCKELNYLKIPCVLQRLSKLTVFGCTTLQVIEIKAPNLSTFDYDGNLAGLSDGGLLPVKNLHLSSFYQHHTIQYTCAKLPSVAPTIETLTIFSESERFNTQISPFRFLHLKCLTISLSIYRGGFSPSNDYLSLAYFLDASPVLEIFTLTVSQTRMKHHVISEDSSYLRQMPGHRHVNLKNVKIIGFCSAKSMVELTCHIIENATSLESLTLDTICDDYENPDRLSVHEIGECSPICRQMIMEAKNALLAIERYIVGKVPSTVSFNETEYYTAAPRQKEEGVLYCCFGTELEVLYYYESVASLAKRNGSPCQQGDDYQGVKTMRNPWAFLPEIAVTPAIEELILLLFPEDKANYYDFPFSLLFNRGGSSIKHLYLSYCVFRPTGGLNCLRSLFLYEVRITGHELGCLFSNSFVLEQLELTDCKELSYLKIPCLLQRLSKLAMYGWEASQVMEIKAPNLLNFHYEGNLARLSDGGLPYVKNLTIASIRWHNAIYYACANLPSIVPTIETLTVFSVSEIINTPIAPLRFLHLKHLTVFLHTVPRVVSPTYDYLSLAYFLDASPALETFTLKVSQTRMEHDVISEDSSHLRQMPGHHHDTIKNVKIMVELTCHILENATSLEGLTLDTIFDGNNNPADRLSVHEVGRCGRIHSPMVMEAKNALLAIERYIVGKVPSTVKLDVLKPCSWCHTNSSVE

SEQ ID NO: 130250 - protein, 156 aa, Oryza sativa
  unsure (1)..(156): unsure at all Xaa locations
  Clone ID: PAT_MRT4530_3242C.1.pep
AMDCLSWNCRGMGNAATIHDLLALVKXHNSHIAFLRETRQKLDRVCRLCSRXLNGSLALFWHEXEIKAINERYINAYVRVSPVAHLWRLTCVYGELRAENLYRMWTQLSFMILTSDDLIYRGLLIGDFNEALWQEEHLSATSRPAAQMQAFRDTLQ

SEQ ID NO: 130251 - protein, 81 aa, Oryza sativa
  Clone ID: PAT_MRT4530_32430C.1.pep
HSTRRDIFPAASWSWTALRKEWCPSPPRQTCASLTSASHCSIADLARGEPRPLVLPMWERHLLMARAPPSVTAAFPAFKPL

SEQ ID NO: 130252 - protein, 212 aa, Oryza sativa
  Clone ID: PAT_MRT4530_32431C.1.pep
MATTSTHAPPPHSPLPLPAAAAGDPSNPFPTTFVQADTTSFKQVVQILTGTPETAAAAAAGGAAAAAPPPAAAKPAPAPPGPKKPAFKLYERRSSMKSLKMLCPLLPAAAAFAAGGGGGFSPSPRGFSPRGGGMEVLSPSMLDFPSLALGSPVTPLPPLPGSDEAAAAEDRAIAEKGFYLHPSPRGNAGAAGELQPPPRLLPLFPLQSPGRQ

SEQ ID NO: 130253 - protein, 642 aa, Oryza sativa
  Clone ID: PAT_MRT4530_32432C.1.pep
MSWQRVGALLLGAQSCLPVPGVPAMAGSVTRRGLDMTGFVLELRGMCVVLGYPHGVDYQARPLPEQEGEDAEPHAGWEVTTVILSGSPERTSLAVTAGGDSFPAACQNAALLAIGTLRQRYPDELQHSPYRYHPRRGGARDYATFRDASSENDATIVHLAGMVEAYDAARIDFHQMVHRGMVENNMKILELRQENLQLKKDLDAVEAQLQQLKIAQGEDCRPKRRRVCRSQKITARKSTSRPELMVTTRRTAVTGDGNQPEGSNHNHQGNPPPPPPPPPPPPPDTNAILTQILAQQANMMTAFLHHLQNPPQQNAPPPPPQHSKLAEFLRIRPPTFSSSNNPMDALDWLHAVGKKLDTVQCSDEEKVIFAAHQLQGPASLWWDHFQATQPEGQPITWARFTAAFRRTHVPAGVVALKKREFRELKQGNRSVMEYLHEFNNLARYAPEDVREDEEKQEKFLAGMDPELSVRLVSGDYPDFQRLVDKSIRLEAKHKELESHKRRLANFRNQQGANQRVRYTNPYPGGSSSQQQQQQQQSRSAPRPQFVVRVPQPQQQQNQPGTRAPRPPTPTVQPVQVRRDAQGQQRLCFNCFEPGHFADKCPKPRRQQGQAPPRPNNGGKDVIRGRVNHVTAEDVLTTPDVIV

SEQ ID NO: 130254 - protein, 65 aa, Oryza sativa
  Clone ID: PAT_MRT4530_32433C.1.pep
MGTVGAAGCQATNPANKQAKQKKASKLNPTTVWQIIRGCPDEEDIFFNLYKKGGGNNNGMNPTMG

SEQ ID NO: 130255 - protein, 51 aa, Oryza sativa
  Clone ID: PAT_MRT4530_32434C.1.pep
PYLFFTRLRVFVVFTFSNLDMHIRSHHHIVYTYSQQMYTKIASNFRVNRIM

SEQ ID NO: 130256 - protein, 1171 aa, Oryza sativa
  Clone ID: PAT_MRT4530_32435C.1.pep
MALKKRAFRELKQGNRSVMEYLHEFNNLARYAPEDVREDEEKQEKFLAGMDPELSVRLISGDYPDFQRLVDKSIRLEAKHKELESHKRRLANFRNQQGANQRVRYTNPYPGGSSSQQQQQQPPSAPRPQFVVRVPQPQQPQGQQGTRAPRPPAPAVHPGQGHRDVQGQQSLCFNCFEPGHFADKCPKPRRQQGQAPPRSNNGGKDVIRGRVNHVTAEDVLTTPDVIVGTFLIHSTPATILFDSGASHSFISVPFVGRNQLGVERLRNPMLITTPGGVMTAKYYSPAVPIEIQGIPFPSDLILLDTKNLDVILGMNWLAQFQGVVDCARRTVTLHRGPEQPVVLFAPPTSVSSSELHQIGLLEIPIVREFGDVFPEELPGMPPKREIEFRIDLAPGTTPLYKRPYRMAANELAEIKKQLEELKEKGYIRPSTSPWGAPVIFVEKKDKTKRMCVDYRALNEVTIKNKYPLPRIDDLFDQLKGATVFSKIDLRSGYHQLRIREEDIPKTAFTTRYGLYEFTVMSFGLTNAPAFFMNLMNKVFMEYLDKFVVVFIDDILVYSQSEEDHQQHLRLVLGKLREHQLYAKLSKCEFWLSEVKFLGHVISAKGVAVDPETVTAVPDWKQPKTVTQIRSFLGLAGYYRRFIENFSKIARPMTQLLKKEEKFVWSPQCEKAFKTLKEKLEGHVVAYASRQLRPHEGNYPTHDLELAAVVHALKIWRHYLIGNRCEIYTDHKSLKYIFTQSDLNLRQRRWLELIKDYDVGIHYHPGKANVVADALSRKSRCNTLGVRGIPLELNQQLEALNLSIVSHGFLATLEAKPTLLDQIREAQKNDLDMHGILKNMKQGKAAGFTEDEHGTLWNGNRPFVMCASVSRQSTNDRPDFSNLSKYQNGNGMKLGWISSPDSQRPKVGMIPYGTAYHPQTDGQTERLNQILEDMLRACVLDFGKTWDKSLPYAEFSYNNSYQASIQMAPYEALYGRKCRTPLLWDQVGESQVFGTDILREAEAKVRTIRDNLKVAQSRQKSYADNRRRNLEFAVDDFVYLRVTPLRGVHRFQTKGKLAPRYVGPFRIIARRGEVAYQLELPASLGNVHDVFHVSQLKKCLRVPSEQADSEQIEVREDLTYVERPVKILDTMERRTRNRVIRFCKVQWSNHAEEEATWEREDKLKAAHPDLFA

SEQ ID NO: 130257 - protein, 92 aa, Oryza sativa
  unsure (1)..(92): unsure at all Xaa locations
  Clone ID: PAT_MRT4530_32436C.1.pep
RASPTRSFFXTARRRSVAPACISTPGGFSFVEISSPRASFRGGAPLGVASLFVLGGVFIRYFLFLCMGVDINVRNNISGVLFIYMVGVVVDV

SEQ ID NO: 130258 - protein, 713 aa, Oryza sativa
  Clone ID: PAT_MRT4530_32437C.1.pep
MSWQRVGALLLGAQSCLPVPGVPAMAGSVTRRGLDMTGFVLELRGMCVVLGYPHGVDYQARPLPDQEGDDAEPHAGWEVTAVILSGSPERTSLAVTAGGDSFPAACQNAALLAIGTLHQRYPDELQHSPYRYHPRRGGARDYATFRDASSEDDATVVHLARMVEAYDAARIDFHQMVRRGMVENNMKILELRQENLQLKKDLDAVEAQLHQLKIAQGEDCRPKRRRVCRSQKITARKSTSRPELVRQSLAWTCFVETPRAEPAPVVPQEGEASGVGSTEGSNHNHQGNPPPPPPPPPPPPPDTNAILTQILAQQANMMTAFLHHLQNPPQQNAPPPPPQHSKLAEFLRIRPPTFSSSNNPVDALDWLHAVGKKLDTVQCSDEEKVIFAAHQLQGPASLWWDHFQATQPEGQPITWARFTAAFRRTHVPAGVVALKKREFRELKQGNRSVMEYLHEFNSLARYAPEDVREDEEKQEKFLAGMDPELSVRLVSGDYPDFQRLVDKSIRLEAKHKELESHKRRLANFRNQQGANQRVRYTNPYPGGSSSQQQQQQQPRSAPRPQFVVRVPQPQQQQNQQGTRAPRPPTPTVQPGQGRRDAQGQQRLCFNCFEPGHFADKCPKPRRQQGQAPPRSNNGGKDVIRGRVNHVTAEDVLTTPDVIVGTFLIHSIPATILFDSGASHSFISVTFVGRNQLGVERLRNPLLITTPGGVMTAK

SEQ ID NO: 130259 - protein, 1708 aa, Oryza sativa
  Clone ID: PAT_MRT4530_32438C.1.pep
MDEVRGRWTFSRANEGYTSCGPMAGSVTRRGLDMTGFVLELRGMCVVLGYPHGVDYQARPLPEQEGEDAEPHAGWEVTAVILSGSPERTSLAVTAGGDSFPAACQNAALLAIGTLHQRYPDELQHSPYRYHPRRGGARDYATFRDASSEDDATVVHLARMVEAYDAARIDFHQMVRRGMVENNLKILELRQENLQLKKDLDAVEAQLHQLKIAQGEDSRLKRRRVCRSQKITARKSTSRPELVRQSLAWTCFVETPRAEPAPVVPQEGEASGVGSSEGALLLTFRPGPSQRSPSLFAGSVWGFQMNAPPPPPQHSKLAEFLRIRPPTFSSSNNPVDALDWLHAVGKKLDTVQCSDEEKVVFAAHQLQGPASLWWDHFQAAQPEGQPITWARFTAAFRRTHVPAGVVALKKREFRELKQGNRSVMEYLHEFNNLARYAPEDVREDEEKQEKFLAGMDPELSVRLVSGDYPDFQRLVDKSIRLEAKHKELESHKRRLANFRNQQGANQRVRYTNPYPGGSSSQQQQQQQQPRSAPRPQFVVRVPPPQQQQNQQGTRAPRPPTPTVQPVQGRRDAQGQQRLCFNCFEPGHFADKCPKPRRQQGQAPPRSNNGGKDVIRGHVNHVTAEDVLTTPDVIVGTFLVHSIPATILFDSGASHSFISVPFVGKNQLGVERLRNPLLITTPGGVMTAKYYSPAVPIEIQGIPFPSDLILLDTKNLDVILGMNWLAQFQGVVDCARRTVTLYRGPEQPVVFFAPPTSVRSSELHQIGLSEIPIVREFGDVFPEELPGMPPKREIEFRIDLAPGTTPLHKRPYRMAANELAEVKKQLEELKEKGYIRPSTSPWGAPVIFVEKKDKTKRMCVDYRALNEVTIKNKYPLPRIDDLFDQLKGATVFSKIDLRSGYHQLRIREEDIPKTAFTTRYGLYEFTVMSFGLTNAPAFFMNLMNKVFMEYLDKFVVVFIDDILIYSQSEEDHQHHLRLVLGKLREHQLYAKLSKCEFWLSEVKFLGHVISAKGVAVDPETVTAVTDWKQPKTVTQIRSFLGLAGYYRRFIENFSKIARPMTQLLKKEEKFVWSPQCEKAFQTLKEKLVSSPVLILPDTRKDFMVYCDASRQGLGCVLMQDGHVVAYASRQLRPHEGNYPTHDLELAAVVHALKIWRHYLIGNRCEIYTDHKSLKYIFTQSDLNLRQRRWLELIKDYDVGIHYHPGKANVVADALSRKSHCNTLNVRGIPPELNQQMEALNLSIVGRGFLAALEAKPTLLDQIREAQKNDPDMHGLLKNMKQGKAAGFTEDEHGTLWNGKRVCVPDNRELKQLILQEAHESPYSIHPGSTKMYLDLKEKYCVSRQNTNDRPDFSSLSKCQNGSGMKLGWISSPDFQKPKVARFIPVKTTYGGNKLAELYFARIVSLHGIPKKIVSDRGSQFTSHFWKKLQEELGTRLNFSTAYHPQTDGQTERLNQILEDMLRACVLDFGKTWDKSLPYAEFSYNNSYQASIQMAPYEALYGRKCRTPLLWDQVGESQVFGTDILREAEAKVRIIRDNLKVAQSRQKSYADNRRRDLEFAVDDFVYLRVTPLRGVHRFQTKGKLAPRYVGPFRIIARRGEVAYQLELPASLGNVHDVFHVSQLKKCLRVPSEQADSEQIEVREDLTYVERPVKILDTMERRTRNRVIRFCKVQWSNHAEEEATWEREDELKAAHPDLFASSSESRGRDSV

SEQ ID NO: 130260 - protein, 207 aa, Oryza sativa
  Clone ID: PAT_MRT4530_32439C.1.pep
MRPGAEYAMVHGGGPAPAAVAAAGPSSSAVVASTASVAARSPWQSPVPYLFGGLAAMLGLIALSLLALACSYWKLAAAGGGGDGEQDGGKEIPPGGGGGGGEKGSGGAAGGLARERRDHVVVIMAGDERPTFLATPASSRAEPAAPDVAAAVCCSCGAASGSSSSSSTEVKTPAAAAAPEFLAGDGEPQAQSPSEQTSSSHSSVITS

SEQ ID NO: 130261 - protein, 75 aa, Oryza sativa
  Clone ID: PAT_MRT4530_3243C.1.pep
MKARREKGKARREDGIDQIELEEVNGNRYGSMFGKKPIELLMAHGLLLTKKKFWAIAAEKREAAVQERDAAQVSK

SEQ ID NO: 130262 - protein, 1794 aa, Oryza sativa
  unsure (1)..(1794): unsure at all Xaa locations
  Clone ID: PAT_MRT4530_32440C.1.pep
VDEVGGRWTFSRANEGYTSCGPVVEMSWHRAGVLLLGAQSCLPVPGVPAVDGIGSMYTSDQSKIYSNSRALGYGQAEQCTQMAGSVSRRGLDMTGFVLELRGMCVVLGYPHGVDYQARPFPEQEGDDAEPHAAWEVTAVILAGSPERTSLTVTAGGDSFPAACQSAALLAIGTLHQRYPDELQHSPYRYHPRRGGARDYATFRDASSEDDATIVHLARMVEAYDAARIDFHQMVRRGMVENNMKILELRQENLQLKKDLDAVEAQLHQLKIAQGEVCRPKRRRVCRSQKITARKSTSRPELVRQSLAWTCFVETPRAEPAPVVPQEGEASGVGXHGGCAVAHLPSWPVAAVDEQLVGLRVCSTRRNAGTSDGNQPEGSNHNNHGSPPSPXXXPSPPPPDTNAILTQILAQQANMMTAFLHHLQNPPQHNAPPPPPQHSKLAEFLRICPPTFSSSNNPVDALDWLHAVGKKLDTVQCSDEEKVIFAAHQLQGPASLWWDHFQATQPEGQPITWARFTPAFRRTHVPAGVVALKKREFRELKQGNRSVMEYLHEFNNLARYAPEDVREDEEKQEKFLAGMDPELSVCLVSGDYPDFQRLVDKSIRLEAKHKELESHKRRLANFHNQQGANQRVRYTNPYPGGSSSQQQQQQQQPRSAPRPQFVVRVPQPQQEQNQQGTRAPRPPPPTVQPGQGRRDAQGPQRLCFNCFEPGHFADKCPKPRRQQGQAPPRPNNGGKDVIRGRVNHVTAEDVLTTPDVIVGTFLIHSIPATILFDSGASHSFISVPFVGRNQLGVERLRNPLLITTPGGVMTAKYYSPAVPIEIQGIPFPSDLILLGTKNLDVILGMNWLAQFQGVVDCARRTVTLYRGPGQPVVFFAPPTSVSSSELHQIGLSEIPIVREFGDVFPEELPGMPPKREIEFQIDLAPGTTPLCKRPYRMAANELAEVKKQLEELKEKGYIRPSTSPWGAPVIFVEKKDKTKRMCVDYRALNEVTIKNKYPLPRIDDLFDQLKGATVFSKIDLRSGYHQLRIRDEDIPKTAFTTRYGLYEFTVMSFGLTNAPAFFMNLMNKVFMEYLDKFVVVFIDDILIYSQSEEDHQHHLRLVLGKLREHQLYAKLSKCEFWLSEVKFLGHVISAKGVAVDPETVIAVTDWKQPKTVTQVRSFLGLAGYYRRFIENFSKIARPMTQLLKKEEKFVWSPQCEKAFRTLKEKLVASPVLILPDTRKDFIVYCDASRQGLGCVLMQDGHVVAYASRQLRPHEGNYPTHDLELAAVVHALKIWRHYLIGNRCEIYTDHKSLKYIFTQSDLNLRQRRWLELIKDYDVGIHYHPGKANVVADALSRKSHCNTLNVRGIPPELNQQMEALNLSIVSRGFLAALEAKPTLLDQIREAQKNDPDMHGLLKNMKQGKAAGFTEDEHGTLWNGNRVCVPDIRELKQLILQEAHESPYSIHPGSTKMYLDLKEKYWWVSMKREIAEFVALCDVCQRVKAEHQRPAGLLQPLQVPEWKWDEIGMDFITGLPKTQGGYDSIWVVVDRLTKVARFIPVKTTYGGNKLAELYFARIVSLHGVPKKIVSDRGSQFTSHFWKKLQEELGTRLNFSTAYHPQTDGQTERLNQILEDMLRACVLDFGKTWDKSLPYAEFSYNNSYQASIQMAPYEALYGRKCRTPLLWDQVGESQVFGTDILRQAEAKVRTIRDNLKMAQSRQKSYADNRRRDLEFAADDFVYVRVTPLRGVHRFRTKGKLAPRYVGPFRITARRGEVVTTGNNPTGIPYVRALILVPGGKAQHTQRLTRDSGRLG

SEQ ID NO: 130263 - protein, 70 aa, Oryza sativa
  unsure (1)..(70): unsure at all Xaa locations
  Clone ID: PAT_MRT4530_32441C.1.pep
LRRNSSTHTPGGYVSEENISRPHKNVQHHKDAVHVVSAAHLNIRSVXXCLRLVASQKLIMRFLQSVQASM

SEQ ID NO: 130264 - protein, 1786 aa, Oryza sativa
  Clone ID: PAT_MRT4530_32442C.1.pep
MSWHRAGVLLLGAQSCLPVPGVPAVGGIGSVLLSMARMGWKLCHVFRLYTVVMAGSVTRRGLDMTGFVLELRGMCVVLGYPHGVDYQGRPLPEQEGDDAEPHAAWEVTAVILAGSPERTSLTVTAGGDSFPAACQSAALLAIGTLHQRYPDELQHSPYRYHPRRGGARDYATFRDASSEDDATIMHLARMVEAYDAARIDFHQMVRRGMVENNMKILELRQENLQLKKDLDAVEAQLHQLKIAQGEVCRPKRRRVCRSQKITARKSTSRPELVRQSLAWTCFVETPRAEPAPVVPQEGEASGVGSTEDALLLTFRPGPSQRRSAATGDSNQPEGSNHHHQGSPPPPPPPPPPPPDTNAILTQILAQQADMMAAFLHHIQNPPQHNAPPPPSQHSKLAEFLRIRPLTFSSSNNPVDALDWLHAVGKKLDTVQCSDEEKVIFAAHQLQGPASLWWDHFQATQPEGQPITWARFTAAFRRTHVPAGVVALKKREFRELKQGNRSVTEYLHEFNNLARYAPEDVREDEEKQEKFLAGMDPELSVRLVSGNYPDFQRLVDKSIRLEAKHKELESHKRRLANFRNQQGANQRVRYTNPYPGGSSSQQQQQQQQPRSAPRPQFVVRVPQPQQQQNQQGTRAPRPPTPTVQPGQGRRDAQGPQRLCFNCFEPGHFADKCPKPRRQQGQAPPRSNNGGKDVIRGRVNHVTAEDVLTTPDVIVGTFLIHSIPATILFDSGASHSFISVPFVGRNQLGVERLRNPLLITTPGGVMTAKYYSPAVPIEIQGIPFPSDLILLDTKNMDVILGMNCSSELHQIGLSEIPIVREFGDVFPDELPGMPPKREIEFRIDLAPGTTPLYKRPYRMAANELAEVKKQLEELKEKGYIRPSTSPWGAPVIFVEKKDKTKRMCVDYRALNEVTIKNKYPLPRIDDLFDQLKGATVFSKIDLRSGYHQLRIRDEDIPKTAFTTRYGLYEFTVMSFGLTNAPAFFMNLMNKVFMEYLDKFVVVFIDDILVYSQSEEDHQHHLCLVLGKLREHQLYAKLSKCEFWLSEVKFLGHVISAKGVAVDPETVTAVTDWKQPKTVTQVRSFLGLAGYYRRFIENFSKIAQPMTQLLKKEEKFVWSPQCEKAFKTLKEKLVASPVLILPDTRKDFMVYCDASRQGLGCVLMQDGHVVAYASRQLRPHEGNYPTHDLELAAVVHALKIWRHYLIGNRCEIYTDHKSLKYIFTQSDLNLRQRRWLELIKDYDVGIHYHPGKANVVADALSRKSHCNTLNVRGIPPKLSQQMEALNLSIVGRGFLAALEAKPTLLDQIREAQKNDPDMHGLLKNMKQGKAAGFTEDEHGTLWNGNRVCVPDNRELKQLILQEAHESPYSIHPGSTKMYLDLKEKYWWVSMKREIAEFVALCDVCQRVKAEHQRPAGLLQPLQVPEWKWDEIGMDFITGLPKTQGGYDSIWVVVDRLTKVARFIPVKTTYGGNKLAELYFARIVSLHGVPKKIVSDRGSQFTSHFWKKLQEELGTRLNFSTAYHPQTDGQTERLNQILEDMLRACVLDFGKTWDKSLPYAEFSYNNSYQASIQMAPYEALYGRKCRTPLLWDQVGESQVFGTDILREAEAKVRTIRDNLKVAQSRQKSYADNRRRNLEFAVDDFVYLRVTPLRGVHRFQTKGKLAPRYVGPFRIVARHGEVAYQLELPASLGNVHDVFHVSQLKKCLRVPSEQADSEQIEVREDLTYVERPVKILDTMERRTRNRVIRFCKVQWSNHAEEEATWEHEDELKAAHPDLFASSSESRGRDSV

SEQ ID NO: 130265 - protein, 112 aa, Oryza sativa
  Clone ID: PAT_MRT4530_32443C.1.pep
HRLGVVDFHSPPCDAHAAPSRHTCRELSGIEGTTRSRRACEGSRSTPATGRGHYGACGCRARYRPSALDDDTMIMDKIYCAEEPTPASSANSYQRMRPERNNYALSYWMRNQ

SEQ ID NO: 130266 - protein, 3360 aa, Oryza sativa
  unsure (1)..(3360): unsure at all Xaa locations
  Clone ID: PAT_MRT4530_32444C.1.pep
MIGFVLELRGMCVVLGYPHGVDYQGRPLPEQEGDDAEPHAAWEVTAVILAGSPERTSLAVTAGGDSFPAACQSAALLAIGTLHQRYPDELQHSPYRYHPRRGGARDYATFRDASSEDDATIMHLARMVEAYDAARIDFHQMVHPGMVENNMKILELCQENLQLKKDLDAVEAQLHQLKIAQGEVCRPKRRRVCRSQKITARKSTSRPELFRQSLAWTCFVETPRAEPAPMVPQEEEASGVGSTEDALLLTFRPGPSQRRSAATGDGNQPEGSNHHNQGSPPPPPPPPPPPPPDTNAILTQILAQQANMMTAFLHHLQNPPQHNAPPPPPQHSKLAEFLRIRPPTFSSSNNPVDALDWLHAVGKKLDTVQCSDEEKVIFAAHQLQGPASLWWDHFQATQPEGQPITWARFTAAFRRTHVPAGVMALKKREFRELKQGNRSVTEYLHEFNNLARYAPEDVREDEEKQEKFLAGMDPELSVRLVSGDYPDFQRLVDKSIRLEAKHKELESHKRRLANFRNQQGANQRVRYTNPYPGGSSSQQQQQQQQPRSAPRPQFVVRVPQPQQQQNQQGTRAPRPPTPTVQPGQGRRDAQGQQRLCFNCFEPGHFADKCPKPRRQQGQAPPRSNNGGKDVIRGRVNHVTAEDVLTTPDVIVGLSEIPIVREFGDVFPEELPGMPPKREIEFRIDLAPGTTPLYKRPYRMAANELAEVKKQLEELKEKGYIRPSTSPWGAPVIFVEKKDKTKRMCVDYRALNEVTIKNKYPLPRIDDLFDQLKGATVFSKIDLRSGYHQLRIREEDIPKTAFTTRYGLYEFTVKSFGLTNAPAFFMNLMNKVFMEYLDKFVVVFIDDILIYSQSEEDHRHHLRLVLGKLRDHQLYAKLSKCEFWLSEVKFLGHVISAKGVAVDPETVTAVTDWKQPKTVTQVRSFLGLAGYYRRFIENLSKIALPMTQLLKKEEKFVWNPQCEKAFKTLKEKLGSSPVLILPDTRKDFMVYCDASRQGLGCVLMQDGHVVAYASRQLRPHEGNYPTHDLELAAVVHALKIWRHYLIGNRCEIYTDHKSLKYIFTQSDLNLRQRRWLELIKDYDVGIHYHPGKANVVADALSRKSHCNTLNVRGIPPELNQQMEALNLSIVGRRFLATLEAKPTLLDQIREAQKNDPDMHGLLKNMKQGKAAGFTEDEHGTLWNGNRVCVPDNRELKQLILQEAHESPYSIHPGSTKIVSRQSTNDRPDFSNLSKYQNGNGMKLGWISSPDFQKPKADMILYGTAYHPQTDGQTERLNQILKDMLRACVLDFGKTWDKSLPYAEFSYNNSYQASIQMAPYEALYGRKCRTPLLWDQVGESQVFGTDILREAEAKVRTIRDNLKVAQSRQKSYADNRRRDLEFAVDDFVYLRVTPLRGVHRFQTKGKLAPRYVGPFRIIARRGGVAYQLELPASLGNVHDVFHVSQLKKCLRVPSEQADSEQIEVREDLTYVERPVKILDTMERRTRNRVIRFCKVQWNNHAEEEATWKREDELKAAHPDLFATPRPYKDRSSGLCCKALPYFHMSSGANEGYTSCGPVVEMSWHRAGVLLLGXSVLPACPGGSGRRXGIGSVLLSMARMGWKLCHVFRPYTVVMAGSISRRGLDLTGFVLELRGMCVVLGYPHGVDYQGRPLPEQEGDDAEPHAAWEVTTVILTGSPERTSLAVTAGGDSFSAACQNAALLAIGTLHQRYPDELQHSPYRYHPRRGGARDYATFRDASSEDDATIMHLARMVEAYDAARIDFHQMVRRGMVENNMKILELRQENLQLKKDLDTVEAQLHQLKIAQGEVCRPKRRRVCRSQKITARKSTSRPELVRQSLAWTCFVETPRAEPAPVVPQEGEAFGVGSTEDALLLTFRPGPSQRRSANTGDGNQPEGSNHNNHGSPPPPPPPPPPPPPDTNAILTQILAQQANMMAAFLHHIQNPPQHNAPPPPPQHSKLAEFLRIRPPTFSSSNNPVDALDWLHAVGKKLDTVQCSDEEKATQPEGQPITWARFTAAFRRTHVPAGVMALKKREFRELKQGNRSVMEYLHEFNNLARYAPEDVREDEEKQEKFLAGMDPELSVRLVSGDYPDFQRLVDKSIRLEAKHKELESHKRRLANFRNQQGANQRVRYTNPYPGGSSSQQQQQQQPRSAPRPQFMVRVPQPQQQQSQQGTRAPRPPMPAVQPGQGRRDVQGPQRLCFNCFEPGHFADKCPKPRRQQGQAPPRSNNGGKDVIRGRVNHVTAEDVLTTPDVIVGTFLIHSIPATILFDSGASHSFISVPFVGRNQLGVERLRNPLLITTPGGVMTAKYYSPAVPIEIQGIPFPSDLILLDTKNLDVILGMNWLAQFQGVVDCARRTVTLYREPEQPVVFFAPPTSVSSLELYQIGLSEIPIVREFGDVFPEELPGMPPKREIEFRIDLAPGTTPLYKRPYRMAANELAEVKKQLEELKEKGYIRPSTSPWGAPVIFVEKKDKTKRMCVDYRALNEVTIKNKYPLPRIDDLFDQLKGATVFSKIDLRSGYHQLRIREEDIPKTAFTTRYGLYEFTVMSFGLTNAPAFFMNLMNKVFMEYLDRFVVVFIDDILVYSQSEEDHQHHLRLVLGKLREHQLYAKLSKCEFWLSEVKFLGHVISAKGVAVDPETVTAVTDWKQPKTVTQIRSFLGLAGYYRRFIENFSKIARPMTQLLKKEEKFVWSPQCEKAFQTLKEKLVSSPVLILPDTRKDFMVYCDASRQGLGCVLMQDGHVVAYASRQLRPHEGNYPTHDLELAAVVHALKIWRHYLIGNRCEIYTDHKSLKYIFTQSDLNLRQRRWLELIKDYDVGIHYHPGKANVVADALSRKSHYNTLDVRGIPPELSQQMEALNLSIVGRGFLATLEAKPTLLDQIREAQKNDPDMHGLLKNMKQGKAAGFTEDEHGTLWNGNRICVPDNRELKQLILQEAHESPYSIHPGSMKMYLDLKEKYWWVSMKREIAEFVALCDVCQRVKAEHQRPAGLLQPLQVPEWKWDEIGMDFITGLPKTQGGYDSIWVVVDRLTKVARFIPVKTTYGGNKLAELYFARIVSLHGVPKKIVSDRGSQFTSHFWKKLQEELGTRLNFSTAYHPQTDGQTERLNQILEDMLRACVLDFGKTWDKSLPYAEFSYNNSYQASIQMAPYEALYGRKCRTPLLWDQVGESQVFRTDILREAEAKVRTIRDNLKVAQSRQKSYADNRRRNLEFAVDDFVYLRVTPLRGVHRFQTKGKLAPRFMGPFRIIARRGEVAYQLELPASLGNVHDVFHVSQLKKCLRVPSEQADSEQIEVREDLTYVERPVKILDTMERRTRNRVIRFCKVQWSNHAEEEATWEREDELKAAHPDLFASSSESRGRDSV

SEQ ID NO: 130267 - protein, 283 aa, Oryza sativa
  Clone ID: PAT_MRT4530_32445C.1.pep
AETIGGLEQCLLHTPGLQTQVHYCIGQECCRRATTATAPSPAGDSHSLPSSPATSPTAFLDDHPSFLRSPSSSPTFLLDLPGVIPAAAAGAQEQYHLAPAVALHQAADQRKPTRKRPRAASRRPPTTVLTTDASNFRAMVQEFTGFPATPPLPCGGAMPPSSHLLSGEGVLFPSGSGSGSAAAPAFQAMMRASSSPATNTTTSLVLDALAMLAKSRAIATAAAAAAAAPPSSGSDLYGGYGNMLAGAVPFDDDFDAADGESAGAAAGHGLFSSASQFAGESRY

SEQ ID NO: 130268 - protein, 291 aa, Oryza sativa
  Clone ID: PAT_MRT4530_32446C.1.pep
MKHEKKKMKQKRRKRKKHRHYESDEPGTCSQSSPGSIGDRHLLDLEAVFTHDFSSGHPRRSKRRMRQHKVVVVEAALLPHIHGEVAIAVLGPQRLLDPLLPGGLLDGLLVMGLGGGADAAAHGERRGGAGFAADAFSSGDEIDEDAVVELGEADPVSRKRRKEKEKKKRRKEKRKQRKWAPPDKDETSLKLVFSFVSENPFRHLVTTGETIFAWLTKNYTSLGREGGDVGERRELNGGGDILSATEHFNDAYSIGKGSFGTVYSADLGGGRTDLGMKRLDASETGDACCGS

SEQ ID NO: 130269 - protein, 586 aa, Oryza sativa
  Clone ID: PAT_MRT4530_32447C.1.pep
MAGSDHHPGGRDGAPLVFDELRWVIQIRRSLQEDGGDDDDDNGIPVSVFNVPKQLQAHKPEAYVPQFIALGPYHHWRPELYEMERYKLAAARRAQRHLREGVKLEHLVEQFARAERKVRAHYHRYLDFSGETLAWMMVVDGAFLLEFLQIFAAAEAAASGGGGKPELRRVSSRMAHLVDFAGRKSAHNLILRDMLMLENQIPLFLLRKLLEPQCSSAEEASELLGRMVTGLMKELCPFKMMDNFPAIDVAKHAHLLELLYHLLVPKPSDDAAAAADGHDEGYDIEEQPVDGGGGGGEEKQQSAGCEYVKQLLAAVWGIVSSLKSGPMQYVAKPISFAVKAPWKMLTVVPGFSAMKHPVESFFMSGGGGDPSSSSTAAGQDHHHAISRPPLIEEIMIPSVTELAAAGVQFAPTNGDATTVSFDAKTATLHLPVVTLDGSTTEVVLRNLVAYEASAATGPLVLARYTELMNGIIDTGEDVAALRRRGVVLNRMKSDGEAARLWNGMSRSVRLTKVAAMDAAVEGVNRYHGARWRVKARRFMRRYVFGSWQLLTFLAAVLMLLLTTLQAFCSVYTCSRWFGAVAVAPPP

SEQ ID NO: 130270 - protein, 39 aa, Oryza sativa
  Clone ID: PAT_MRT4530_32448C.1.pep
KSRFATSITRAVHFEMQFVHKMRCGESVVVNSVVAFSCG

SEQ ID NO: 130271 - protein, 154 aa, Oryza sativa
  Clone ID: PAT_MRT4530_32449C.1.pep
MGCGPPAATALVIALGIARRHCTPYMHAFSARTGSELIHDDGWSRCEGVAVHDDRAGRSAAAYPLRRRHQQLPPATAGHALLDFVLATSADHPSRPKPCHHRSTRAELVTTMRPHVAATTFFADSAAAAARSQRRWLVAAAGLSIDLGLVLDLG

SEQ ID NO: 130272 - protein, 55 aa, Oryza sativa
  Clone ID: PAT_MRT4530_3244C.1.pep
NTNDHLTYLGIMTFHTLTTYYFLYTNYYWGIKDREKYIQIQMATTSPQSVNLRCN

SEQ ID NO: 130273 - protein, 298 aa, Oryza sativa
  Clone ID: PAT_MRT4530_32450C.1.pep
MVAAVAPEWATKEPCLMGIDEAGRGPVLGPMVYGCMYCARSYQDTLATLKFADSKTLKEEQREELFESLKDNSSIGWEVDVICPKELSAKMLKRSKVNLNEISHNSAMGLVKRALDMGVLLAEVYIDTVGDAEKYRIKLTEKFPGIKFVVAKKADSLFPVVSGASIVSKVTRDRALRNWVFDETAQNMHMNTGSGYPGDPSTKQWLEDHKHPIFGFPSLVRFSWGTCTPFFNDAIEVTWESNELEEDAGSNGSVKRQVKLSSLGFTGFKRKSEEIDSSGKGRCKFFQARKLELVRKFQ

SEQ ID NO: 130274 - protein, 57 aa, Oryza sativa
  Clone ID: PAT_MRT4530_32451C.1.pep
WSLLLDKVYQHCCYYTISNLCIFYIAIDIATVVFLESVLWRTVTLVYYQLSFVCCNV

SEQ ID NO: 130275 - protein, 292 aa, Oryza sativa
  unsure (1)..(292): unsure at all Xaa locations
  Clone ID: PAT_MRT4530_32452C.1.pep
GWQGNFPGXRXGLVYLVPLXFPKNFSRLVYSPPLENLKTFGXWFPFFLWRFFPGXKNFIPQGGRWGXTFPPFWNFXRNCHFPKKKGLFHLGGQXPSPKGNVXMASQPIWFAIGXXASXGWXLXSPGNPVXRHFGLAAWLHWGFFHPPLVFQNLYXVXKXGFXGGGFPXPKFPKGTPPIPKFXLXXPXXFLEKIXIFXPXXXNXFPLKXLFXXFXXXXXXGSXFPPXKXKKFGXPXPXXXFWLGGPSPXKXPCFFKXKKSXFXSXKGXXXFXXNXXXVXXXIFXGXFLXLGGF

SEQ ID NO: 130276 - protein, 102 aa, Oryza sativa
  Clone ID: PAT_MRT4530_32453C.1.pep
NHVFSGSTEKKACFWKFTLFDYQHPFTLLNCLIPIMDIVSIHILCIIIARVLLALSFYYYFTIPIIFFVLMISIIHHAILKLLHHVFHAIELIKLHVLLQRI

SEQ ID NO: 130277 - protein, 837 aa, Oryza sativa
  Clone ID: PAT_MRT4530_32454C.1.pep
MEDRVKAMLNLIGADGDSFGKKAELYFKSRPELINHVEEMFRSYQALADRYDRISSELHKANHTIATAFPDQIQFSMQDADGEGFQKAISGIDLSNVKFPALEGLPMGSRGASRGTSPVPKRTQMHRRITSHMNKENAQEEIDKLQKQILVLQTEKEFLKTSYDSALGRYLDIEKQVVELQDEVCSLQDAFSTGAAIEDNEARALMAARAIVSCEDTLVNLQDQQRRSSEEARTEFKRFIEAKKKLDTFKAECGQPHTQNDEPDNSDKEYIHAMPSGDVDDSVQNEIRFDLQEVCQKVKELIELHPGVSVTDLADKVDRLVEKVIDLELATTSQNAQINRMKTEIDDLHKCLQALEEEKSALVADSSKLVDRLKQVEEVLQAVQHLGNSIQNGTQNIHKEMNAACSELAEFVEKLHEPEPQNSGFMNSSQESSCQEEDSEVTSQYAKKQTSDSIDGSKNEVEKQDKGSEGPLVQQHPDTNGSDGEDKILLEGYASVLQSYKGTEQKLSEIEKTNQEYHSRSMSELKDLKSANAMKDEEIHSLRRMLSSLQRKMNAPAPENVDKSEETSKISTTPVTEDKEIAEIEEYMKQCQVEEQLASSISEEKFRAEIDRVLENNLGFWLRFSTSYHQIRNFQTSFDKLKTEMDKLIDAQAQCGADGVPISYQVAKLESAVLEKKFRDLNTDLQVWIEKNVLLKGELENRFSSLCGIQEEISKIATLDKSDEVHFTPFQAAKLQGEVLNMKQENNKVAKELEAGLDHVRGLQVEVGRVLLKLRENLELSIARSNRAQQNFRNLSTKAGVPLRTFLFGTKPKKPSLFSCMGPGVHKHHSGSRAGRR

SEQ ID NO: 130278 - protein, 485 aa, Oryza sativa
  Clone ID: PAT_MRT4530_32455C.1.pep
MALQTQPVPNASPLHVLRSVCVLLLAASATVAARRHGPAAPIAGQSMYLAPSCRAHTASLTDFGGVGDGTTSNTAAFKSAVDHLSQYSGEGGGGAMLYVPAGKWLTGPFNLTSHFTLFLHSDAVILGSQDMGEWPIIDPLPSYGRGRDKAGGRYASLIGGSNLTDVVITGANGTIDGQGAMWWSKFHSNKLKYTRGYLIEVMHSDTVVISNVTLVNSPAWNIHPVYSSNIVVQGVTILAPTHSPNTDGINPDSCSHVRIEDCYIVSGDDCVAIKSGWDEYGIAYGMPSQHIVVRRLTCVSPTSAVIALGSEMSGGISDVRAEDITAVNSESAVRIKTAVGRGAYVRDVFVRGMSLDTMKWVFWMTGNYKSHPDDGYDPNAIPVVDNISYQDVVATGVYKEAARLEGIQGAPFRGICIANVTATLSKSRKYPWTCTDIEGVSTGVTPAPCQPLQGAHDGACPFPTDTLPIDQLVMQQCAYSVPASI

SEQ ID NO: 130279 - protein, 64 aa, Oryza sativa
  unsure (1)..(64): unsure at all Xaa locations
  Clone ID: PAT_MRT4530_32456C.1.pep
HYTLXKSYHARCTRTGACIPYSRRPFFFFFETKTKTEHGTLIGETINKLGTLXSEGRHHRITDG

SEQ ID NO: 130280 - protein, 77 aa, Oryza sativa
  Clone ID: PAT_MRT4530_32457C.1.pep
WAALGPSPTGGGRTRTPFFVKTFWGDGFTPDPAVFYTGGAQAGLPLYILGYKNGGLFKGKKLNPEHFLLWVDGLKLN

SEQ ID NO: 130281 - protein, 70 aa, Oryza sativa
  Clone ID: PAT_MRT4530_32458C.1.pep
TRSRTFVCSKKGFCKVKKGAKEVKRPRPETKIGCPARMSIKITSDGKNGKFELVPDYNHQPAPTSTMHSF

SEQ ID NO: 130282 - protein, 84 aa, Oryza sativa
  Clone ID: PAT_MRT4530_32459C.1.pep
MERGKAAFEKEYKSSPRRRAQGELIRRAKRRLAASPLQLRAVVVGGGALSVLAGGSRLSSKELDGSVVRISDLLEMLIWFWDLV

SEQ ID NO: 130283 - protein, 136 aa, Oryza sativa
  Clone ID: PAT_MRT4530_3245C.1.pep
MARTKQTARKSTGGKAPRKQLATKAARKSAPTTGGVKKPHRYRPGTVALREIRKYQKSTELLIRKLPFQRLVREIAQDFKTDLRFQSHAVLALQEAAEAYLVGLFEDTNLCAIHAKRVTIMPKDIQLARRIRGERA

SEQ ID NO: 130284 - protein, 90 aa, Oryza sativa
  Clone ID: PAT_MRT4530_32460C.1.pep
KDPADAWGEIDMSVKMRTTCTWTERPYEALLFPGIGFGPFLRSLGGRRRRPPSGGARAISEIPLWKSSDSNLVSDPRAKGQSQVDSFYGA

SEQ ID NO: 130285 - protein, 53 aa, Oryza sativa
  Clone ID: PAT_MRT4530_32461C.1.pep
IHVKYPRRAQKLCELLHLQVYAGTGDGGFNKGMWSLTFSMTHTLVKIVLVQAL

SEQ ID NO: 130286 - protein, 245 aa, Oryza sativa
  unsure (1)..(245): unsure at all Xaa locations
  Clone ID: PAT_MRT4530_32462C.1.pep
MNWKGKYKREKGEIXRELEELNKWCKNHGVCEHRREREIXQPRFTTRKEMLKWLQRCKERDVLXGDNNTKXYHAKANGRRRKDMFFCLKQENVLIAGQEQLLSFIAYFYKDLFGPPERSNIRLQNLEMGQLSDDQKKELLKPFTLEEVKKVVFEMECXKAPRPVGFPAYFYKHFXVVIKNDLKAMIDDFHQMILDIKRLNYGVISLIPKCKDAGVLFKVDFEKSYDKIKWPFLWQMLEAKGFPSV

SEQ ID NO: 130287 - protein, 426 aa, Oryza sativa
  Clone ID: PAT_MRT4530_32463C.1.pep
MSNDRASDGASGPGMAARCGCKRKLIPIILYLHNGRLVIGSVEDALEHELANRLYTLARVLVLSFNYCLALEHPIPACYDDAWSTPQSPFAIRATSADPRWWAFVLGTMLLRKMEKRSEEGEEKESLIMWVPPVMSANNASHTIKKVDFLHPFSKMGETLYPVLRLRDAIQSGGRTREVGERLDEIGKKIKREPDTAGVVVAAVAGTGTGTATPIEHRVPHRLGLGGAVNTVTPCAACKLLRRRCAQECPFAPYFSPHEPHKFAAVHKVFGASNVSKMLLEVGEAERADAASSLVYEANLRLRDPVYGCMGAISMLQQQVNALEAELEAVRAEIFKRRYRQAGAATGLMDDVQVHITAGFAAPPPPPSMHARDVVSVADAGGQGQELAGAPVISSASPPVYPAGQPSTSTTDYSSLNTSEHAAYFG

SEQ ID NO: 130288 - protein, 131 aa, Oryza sativa
  Clone ID: PAT_MRT4530_32464C.1.pep
KRCVSYRSPFCPPIASGSWGNLRWLFRLVVPCHLLLLLLPMMMLLLPSSSSSCCCRCPGGQFHGAPPRVMAPCCGVTRVYIEKRLGVGGGNASSLQDMHRKELQARTRDQLQTLELSTPLYDTAWVAMVPL

SEQ ID NO: 130289 - protein, 179 aa, Oryza sativa
  unsure (1)..(179): unsure at all Xaa locations
  Clone ID: PAT_MRT4530_32465C.1.pep
MGYVVPLVFSTIYGSKSAWGRVTVVPVHFPYAEPCGRARVMRERGERAERIRTARSALDGPRSRAAGETSFLLEAFPRWIYAAGSSAAGRRSWEGSRAAARAWGAIEWSWTHGRASWTKVRENXMTMTVTRSRQSLGXMTPKSRCSRTVKDETSHRVCQTPGQHGTNARAGVANTARAR

SEQ ID NO: 130290 - protein, 124 aa, Oryza sativa
  Clone ID: PAT_MRT4530_32466C.1.pep
MTRCAIDLPPRDPACASASTKIGAAGWSSLLPGPGADAAAGTQAWLRCCAVEGGSTGAVEGDNEEGDEKLGAVTGSVERSERSRCEWERLWEGGEEGGENRVGWGNVLHGEVEAISFVQSDCRN

SEQ ID NO: 130291 - protein, 228 aa, Oryza sativa
  Clone ID: PAT_MRT4530_32467C.1.pep
MAIPLLLLLLLAMSTGSDGAFCVCKPDQSPAAMQKAIDYACWRGADCTQIMQSGACYQPSTIVAHCSYATNSYFQKNSPIGATCDFGGVATLTNTDPSSGTCKYPATASGVGTGMGTGTSTGTGTGVGTGGTGTGGAGVGAGTGTGVGTGTGTGAGMGTGAGAGTGITTPGSTTGTQGGALSPPFGGAYGPSAGAMNPDYNEAAPARSQLAAATSVLLAAAPFLFHLI

SEQ ID NO: 130292 - protein, 141 aa, Oryza sativa
  Clone ID: PAT_MRT4530_32468C.1.pep
ARGRFKRRRSPPSSSSSLPSSRPSRHSPRPRPSASASSPSPARRAPSSRLVPPTSTTTTTTTTTTTTMMTTTTTTTMMTTTTTTTTVVVVTTTTTATTTAAGITTVCAAATATTATAGAVATPPWSTSRRSWRATAAAARR

SEQ ID NO: 130293 - protein, 59 aa, Oryza sativa
  Clone ID: PAT_MRT4530_32469C.1.pep
TASAAGVAYCCYSDVEEYCRVIYATDINTVAYHLDYIQRYCSLAGNQIDSDTYTPQNVL

SEQ ID NO: 130294 - protein, 124 aa, Oryza sativa
  Clone ID: PAT_MRT4530_3246C.1.pep
HAAATATSCLRSCSSVDLPNLLSPSTKHIRLPNYDYLTTSRRKSLCLAWMPYNPTSCTYNLLLYEHNNRTCLEIVRTPYYFYTSIEEICIHLLASQHFVAAVRCIYDTWQCNKQQPQARTKYSF

SEQ ID NO: 130295 - protein, 60 aa, Oryza sativa
  Clone ID: PAT_MRT4530_32470C.1.pep
TLILLFQTDCQKVLIDMDDVAKGLEELITLHGITRLVMEAAADQHYSEYGPHLPNVAFFL

SEQ ID NO: 130296 - protein, 95 aa, Oryza sativa
  Clone ID: PAT_MRT4530_32471C.1.pep
MGTRGWNPSPGPGPAYMWGPVPAQPTGRKAAPSPSPKGRVPAPNGEITIPKLPSVARDGVCPTYSMSSSELDPATSIDFQAGPSLSADSSGSSSK

SEQ ID NO: 130297 - protein, 99 aa, Oryza sativa
  unsure (1)..(99): unsure at all Xaa locations
  Clone ID: PAT_MRT4530_32472C.1.pep
SSEHTRSPPHSPIHGALPLVALNPNPNRAIKPKSNEFEDEGGEPSNPAMDRPRSSKRAYHYDQDSPPPRSKPRFDRRGVPNXNNXYHRRGXPGXGGGDR

SEQ ID NO: 130298 - protein, 368 aa, Oryza sativa
  Clone ID: PAT_MRT4530_32473C.1.pep
MPAAAPRVASAASATRPATRGVRVARDKSGGGKLEERTAVAVAVKVVVVDPQRLRMAAFEPHRLQLLYFIAITVLASVFQPCTSIELHRELSGWSNGIATWYGDPNGAGSEGGACGYQYAVDQPPFSSRIAAGSPYIYDSGKGCGSCYRVVCAGNEACSGIPVTVVITDQGPGGPCLEELVDGQCMNEAAHFDMSGTAFGAMARPGQADQLRGAGLLQIQYTRVECEWTGVGLTFVVDSGSNPNYLALLVEYDDNDSDLAAVDIMPIGAGASGSWIPMQQSWGAVWRLNSGSALQGPFSVRLTFSSGQMFVASNAIPAGWNPGMAYQPGGVAMRVRGRNGGRRGYEAVGMLGGLCHLLLLLLLMLFEL

SEQ ID NO: 130299 - protein, 86 aa, Oryza sativa
  Clone ID: PAT_MRT4530_32474C.1.pep
TGETVRNVDDDPHTHIRSFAYSVCDIAIFHYPSISGFTLHAIRLPRKWNRWHCYGSLEIQIIQKFPPIKKLTARLTTTSTSENQLS

SEQ ID NO: 130300 - protein, 75 aa, Oryza sativa
  unsure (1)..(75): unsure at all Xaa locations
  Clone ID: PAT_MRT4530_32475C.1.pep
ARRCEENDEQGRQRGSLSGVXARGHQARGHDPHSAVASFFPASLDSFSNEERVPNFGYMNLVRSHSKPSWCRISG

SEQ ID NO: 130301 - protein, 47 aa, Oryza sativa
  Clone ID: PAT_MRT4530_32476C.1.pep
LKNNRGARVRRPPSVVAATVPPGLFKLGDDPGPKVMSQSKRVGVSKK

SEQ ID NO: 130302 - protein, 46 aa, Oryza sativa
  Clone ID: PAT_MRT4530_32477C.1.pep
TKCPRLTSTHNSHRSLKVHLLTTTQIYQLSPTCTCNKGIASRTVDA

SEQ ID NO: 130303 - protein, 373 aa, Oryza sativa
  Clone ID: PAT_MRT4530_32478C.1.pep
MAAASTGNLLQEVHAKLKINAADETIRNNGSPPVALLVLMAAAMVAGWFVNAVRPPPPTPCGAEGGPPVTAARVRVRDGRFLAYAESGVRREAARFKVVYSHGFSGGRMDSPRASQALLKELGVYMVAFDRAGYGESDPDPRRSLRSAAMDIQDLADALQLGPKFHLICSSLGCHAAWASFKYIPHRLAGAAMMAPVINYRWPGLPRGLARQLYRRQPVGDQWSLRVAYYAPWLLHWWMNQTWLPTSTVISGSGSFPNALDEKNRLMALSTGLFQKKARMATQQGVQDSFYRDMAVMFGRWPEFEPAELEKPPFPVHLFQGDEDGVVPVQLQRHICRRLGWISYHELAGVGHFLSAVPGLGDRIVTTLLPAAA

SEQ ID NO: 130304 - protein, 454 aa, Oryza sativa
  Clone ID: PAT_MRT4530_32479C.1.pep
MSTKIKCLYIIPYKILMFQVRNQKKNLLLTSGSGAKGADEKSSILKLNPKLDNQAKKKFSPYNYNNPADGYDRVYYDGDSDKHMLFEYEALKIKMKNLDMYWYSGTNQINKKPELDLANKKLSRHNNNNPSHGHDHILLDKMKLLRYIYSNPADRHVRVDYDGHNDNHMVFNTESMKLKKEFSYLYQFSAVKGIDQKPELNLVKKKSSRYVYGNPANDHLVHYDGRNDKYMVLNHKAKKLKKKNSDLYQHSEANGIDKESKLNMAKKKLSRYIYGNLADGHHHVCLVTKKFPRYIYDNPAVSRHVYYDGHNDKYMVLNYEAMKLKKKTSDLYQHSEVNGIDKKPKLKLAKNKFSRSIYGNLAHGHDHVHLAKKKFSYYYTFGNPEDGHEHANHHGGYDNHIVFNKQAVKLRKGNSNWYYYSGLKEINKRHKPDLVNKKFARYIFSNPENERPFL

SEQ ID NO: 130305 - protein, 320 aa, Oryza sativa
  Clone ID: PAT_MRT4530_3247C.1.pep
MSVQGLDLKTDLSLWVFGHTSVFRCCKPEQSAAAIVSFSLFRNCGGDIEPGPWRAYEVKKRMGSWIVNDSQQIRFWEDKWLGVTCYMTANLLATAHVLGELKIRFVILETGVGVPVMLFFTARDGNGESLQLVYFSIWKSYRSPMIVTGKPKFFFRWLVLSKLLASQLEERLPGSNLPPRYVFRHDTLHISIAKVLILLNCAKLTASVLIMSAARKSAPTTGGVKKPHRYPPWNCCSSYQKSTELLIRKLPFQRLVREIAQDFKTDLRFQSHAVLALQEAAEAYLVGLFEDTNLCAIHAKRVTIMPKDIQLARRIRGERA

SEQ ID NO: 130306 - protein, 143 aa, Oryza sativa
  Clone ID: PAT_MRT4530_32480C.1.pep
LMCGGGGGGQMVVVVLLVCVVLVSSAAMAGGARTGPVHLAGGTASSSSAPGPAVATPRGDAAGATTMTATTTTMTAAATTATFAADPYKDSKRKVPNGPDPIHNRFCKRGCRSLKKTRFGVEWKVSCQVDDDDDDDHIMDDGE

SEQ ID NO: 130307 - protein, 49 aa, Oryza sativa
  Clone ID: PAT_MRT4530_32482C.1.pep
TNQTKPPLINFTENSTGTLHNTNSYVVTPIDAEATSCLINKKHTGLIQQ

SEQ ID NO: 130308 - protein, 61 aa, Oryza sativa
  unsure (1)..(61): unsure at all Xaa locations
  Clone ID: PAT_MRT4530_32483C.1.pep
ETISDKDRCPGCKGEKVAQEKXVLXMVVEXGXQNGQKITFPXXXAXEXXDTFTXDIIFRPA

SEQ ID NO: 130309 - protein, 106 aa, Oryza sativa
  Clone ID: PAT_MRT4530_32484C.1.pep
MSGQHGSLLGGGAAPTTAWISAFSTLPHTPSFPTSTGHLPLPSAFSTAGGAARGTIGGRQLDFPSLHAADGLAPPKDGVLTGVVDVASHGLLPSSMDTDANAYVLV

SEQ ID NO: 130310 - protein, 144 aa, Oryza sativa
  Clone ID: PAT_MRT4530_32485C.1.pep
KNELGKTKKTRVLFTKTLLDLQISMVLEPKFFVEKEHWAFSWVDIIKNPPSPGRKRWMENLPFKQKPLLKWPACRDSSPPELWKKLVFGPGTGAHSKGKASPSNIHGKGPCRGGNFFWGSKPSLFGAFFLKKKGKGKKFFWPWW

SEQ ID NO: 130311 - protein, 208 aa, Oryza sativa
  unsure (1)..(208): unsure at all Xaa locations
  Clone ID: PAT_MRT4530_32486C.1.pep
RVVRRLSAPSPCQAPAPTPTGTPAPAPAPVVTPTPAPTPVPTPSPAPTPSPTVAPVNPPSPTPPPNAKPTRPHRLCSLRIKIXLPTLSYDPRPRPFAVVLHSLSCNVFATWPXSPCLATAPTPTETPAPAPALVVPPTPAPTPVPTPSPAPPPNPVCSNPLSYRPTPSPLDLFPGVPQKEPPSPQPTTNAPPPPAPATQCAAGTVSSL

SEQ ID NO: 130312 - protein, 186 aa, Oryza sativa
  Clone ID: PAT_MRT4530_32487C.1.pep
VDPRAAGEIFAGLWGTRRKSHPAKVLTLQKSGSAPFVESNIVEKVVDFTKKEIVTNPTYDVMWNNPLQTVNAPWTGSNLVPGQRNTLTGFVQDAYLNDYSFDSQHHLFQSKGVALDPGSNSIQIVKFENKKKRKKEKVEEPEEKVEGIENKKEEIPTTEVTEEGTESKTKKPKIEYQTTCTTHLPD

SEQ ID NO: 130313 - protein, 133 aa, Oryza sativa
  unsure (1)..(133): unsure at all Xaa locations
  Clone ID: PAT_MRT4530_32488C.1.pep
KYITVWRLRSXGLPHPDRCVLCDQHDETIDHILVAYPESRXQLWWVVLSSIGLPQCLPLNENSFYLWLCNSRLKVERASRRGFDTIVTLTAWTIWKEINNRIFNSQQRPWSEITRAMAAEATLWRLAYAALPV

SEQ ID NO: 130314 - protein, 67 aa, Oryza sativa
  Clone ID: PAT_MRT4530_32489C.1.pep
LQEKVCLCCNFHSELTNVFLCQKCASGCLKYQVAYYDIYVTDPQPPWRTLLDDCCEIVVCLGFSVLE

SEQ ID NO: 130315 - protein, 142 aa, Oryza sativa
  Clone ID: PAT_MRT4530_3248C.1.pep
MSASLVQQPGLTCSTPIDLKVDKQIYNWQTRCHPNAPIILIPWHRNTYMEEKTNQAARGGLPHRWSRSGCNRSNHSGRGPTRTLSQHGQIFGGTDEEVTPPCKEKPLPRPPSQPAVYGSPYLLQCHLSHDPRYPGPQAELWP

SEQ ID NO: 130316 - protein, 139 aa, Oryza sativa
  Clone ID: PAT_MRT4530_32490C.1.pep
MGLLFGRCRVLQTGLSASTQSNSRPIAACVHRLMKAKSNHTNQALTVQCLLNNFRIILHTVTTLLPIAREVEMLLLRGTIEKTRGSNLLSVEEISTVIRLKAETPGISSFVFCYERNQARSLFTFQYIDNYARIVIRDE

SEQ ID NO: 130317 - protein, 40 aa, Oryza sativa
  Clone ID: PAT_MRT4530_32491C.1.pep
MADDGVGVTAADFGAGARLRKGKRPNERRGVGFIGVFLQD

SEQ ID NO: 130318 - protein, 64 aa, Oryza sativa
  unsure (1)..(64): unsure at all Xaa locations
  Clone ID: PAT_MRT4530_32492C.1.pep
QVEGAXDMASADGSHAPGMEKEXVYDPITXPDVGKLNASYIXVHGRAMLGRSLWLRTSSLPQSA

SEQ ID NO: 130319 - protein, 543 aa, Oryza sativa
  Clone ID: PAT_MRT4530_32493C.1.pep
MALPAVGPRGATDPDPAPSPLRVHGIGIGSHASRGTAPRGEEEEEEEEWRGDGDAGSEEEEGEAVSDSFSHSLRECQKQRKLRAEGAALLLSPAKHELTGGGGGSIELLVLSPRCLVGGNVGGMSKSSTASSRSRSGTFPSPGTPNYHRHCASTMQYPKGWSSERVPLGGGTNRRYGGSGVVLPFNNGRKLPSKWEDAEKWILSPVSCDGIGRMSAPAPHHRRPKSKSGPLGHPGGIPGAYAAASPFVPCFDGVLAAANFAAHSPFSAGVLMPEHVRNGDFSSGRGRSGDDGSSRSYSAEKDPYILRSASIHAWTETLMEASAFANISEETAQDDKLQGLRGETPAISSPIIKKDVATQMSPDDSISSSPKARHSCSSLPSGHPIKEPNSNALKPEVRDVQVDDQVTVTRWSKRHVTRGSDRRSTNIVEWRKKTIETRAPSFDEKERESCVSKCKREEAKITAWENLQKAKAEAAIRKLEMKLEKKRSSSMDRILGKLRTAQKKAQDMRSAVSDVAAHVSQQIRINQEVRFFLAVAAGGDGVI

SEQ ID NO: 130320 - protein, 80 aa, Oryza sativa
  Clone ID: PAT_MRT4530_32494C.1.pep
LQYRFCSMTDLYHSTGTTGISSIRPCKFSLNNPVTSSCHSKEKSDFLINSDLLADMSCNVQKVSTKVHPLLRPRYQLCHN

SEQ ID NO: 130321 - protein, 246 aa, Oryza sativa
  Clone ID: PAT_MRT4530_32495C.1.pep
MLHKKGLCWNGKWKAEHMKVRNDIKDFVITEVPNDTTSKEGMQADFRNFFEIIFPYYEHEEIDSASGEKKKVLPCYFLQFQHNCMEVPEVHEREKLEKFQRFLGCHPAFMSPAALSTLICHLYRDCDSLRKPQDTVYEPLQVSETLLIEWRGVRHFGIPFSNVYWHFFVDVYELGYWFLLKYLRNFIEHAHRYTKDQGTVLDIVTTALMIGEYLSKFVPQLILFIVRNCDIDGPFSTTWTMFEDSE

SEQ ID NO: 130322 - protein, 337 aa, Oryza sativa
  Clone ID: PAT_MRT4530_32496C.1.pep
SPLYDPMKGEAMQKHVQEVELQYLYEMLGQGLRPVSSVCAGNVVAIQGLGHHILKSATLSSTKNCWPFSSMMFQVSPMLKVAIEPSNPADLGALVKGLKLLNRADPFVEYIVSQRGEHVLAAAGEIHLERCKKDLEERFAKVKLVVSDPLVSFKETIEGEGLALIESLKAPREFVERTTPNGRCTVRVQVLRLPNALIKVLEESEQLLGQIIEGKTAKRNGVLDPHLSQDDGDSAATLRQRLINAIDSELEAFSEQVDKEKLERYRNTWLGYLQRIWSLGPWQVGPNLLLLPDVKSSDSVITSQDGRQGILVRGRSHVSERLGFVCGSDAEANNDLD

SEQ ID NO: 130323 - protein, 401 aa, Oryza sativa
  Clone ID: PAT_MRT4530_32497C.1.pep
MAAAAQRLVAAVVVLVACLALPAARGLNITAMLNGYPDYKMFNKYLSETKVCDEINARESITLLVLGDGPMSTLVLDADQSLAGIKNALRLHAILDYFDPKKIRGLPDADTMTDTLYQAGGDAAGKMGNVKISTLDTGKIAFASANPGGKYEATMVKAIKQMPYKLSIMEISAPIEFDGLFDTPSATNLTRLLEKAGCKRFASLITSTGVLKTFEDAMDKGLTLFAPNDDAFDAKGAPDVKKMPSADLVTLLKYHALPSYNPKPTLKTVSRAMRTLASTASGKYNITVDTRGDAVTLNTGVDKSRVAATVIDDTPVCVLTVDNLLMPVELFGDAPAAAPSPDDAAPAPSPSVADASPPAPPPADAPSKPADHKEMKASSAVALRSVVLGALAAAVCSFVLL

SEQ ID NO: 130324 - protein, 347 aa, Oryza sativa
  Clone ID: PAT_MRT4530_32498C.1.pep
MASAKSSRSRPAGHSGVFPVSGAVGGGGGGGGGGGGGGGGGGDGGVQLADKLKIFKTDNFDPDAYVQSKCQTMNEKEIRHLCSYLQDLKKASAEEMRRSVYANYAAFIRTSKEISDLEGELLSIRNLLNTQAALIHGLSEGVQIDSLTSNTGRSAEDDISNVEDQEPSEIQKWSADFPDMLDVLLAERRVDEALDALDEAERLASDAKLKQTLTATEIAALRRAVSDNRQKLADQLAEAACQSSTRGIELRAAASALKRLGDGPRAHSLLLNAHNQRLQCNMQTIHPSSTSYGGAYTAALAQQVFSVVAQALSDSVEVFGDESCYASELVTWATKQVMSFALLVKRH

SEQ ID NO: 130325 - protein, 88 aa, Oryza sativa
  unsure (1)..(88): unsure at all Xaa locations
  Clone ID: PAT_MRT4530_32499C.1.pep
MEIQYELDSDKDPNRSPTGLGGPSDGSYIFVRGVTGGGIASSCEYGEENARGEEDRAGAIDYFLYIDXYFARIPSTSXRLLSLRSASS

SEQ ID NO: 130326 - protein, 212 aa, Oryza sativa
  unsure (1)..(212): unsure at all Xaa locations
  Clone ID: PAT_MRT4530_3249C.1.pep
LVFEREENGPEAPLTRDGPSSPEDPMPEAPSPWEDPEAPVGGGEALASGPEAYDPDMIRDPPGPLSKGAPDHLPPLGQILHNREGNGRVVNWAIELAEFNLHYEPRHAIKSQVLADFIAEWTPVDDPVPSNVPSLPGDGEDPNANIRGGHWVMHFDGSLNLQGASAGVTLTSPSGDVLKYVVRLDFRATNNMAEYEXLLAGLRAAAGMGIRH

SEQ ID NO: 130327 - protein, 558 aa, Oryza sativa
  unsure (1)..(558): unsure at all Xaa locations
  Clone ID: PAT_MRT4530_324C.1.pep
GCGGGPEDEGTTKETYEEDKGERLEFEDEPEYEEEAAVDYDEKDLEQYEEQYEDGDEXEYTEDVIEEETDMVDEELDGGDDGEGEGYENAEEEHNVDVEDEEHHEMVKEHRKRKEFEVFVGGLDKDATESDLRKVFGEVGEITEVRLMMNPVTKKNKGFAFLRYATVEQARRAVSELKNPSVGLKIWIFYIMVRGKQCGVAPSHDNDTLFVGNICKTWTKEHLKEKLKSYGVENFDDLLLVEDSNNPGMNRGYALLEFSTRPEAMDAFRRLQKRDVVFGVDRSAKVSFADSYPEVDDEIMAQVRTVFIDGLPPSWDEDRVKKYLKKYGAIEKVELARNMPAAKRKDFGFVTFDTHDNAVACADGITNSEIGEGDSKAKVRARLSRPLQRPPRMKHGLRGNFRVGQGAPRGGRFAYDRPPPLRRPPPRLLRPDVSRLPPPVRSRPLKRPVDIRDRRPVMSIPDRVRRLPPPERSYDRRPPAPVYPKRSPRREYGRRDELPPPRSRATFGDYSSRVPVDRRPYRDDYSPRGSAYSDLGPRSAPGLSDGRKFIVHDFSSGT

SEQ ID NO: 130328 - protein, 447 aa, Oryza sativa
  Clone ID: PAT_MRT4530_32500C.1.pep
MSEQNTDGSQVPVNLLDEFLAEDEIIDDLLTEATVVVQSTIEGLQNEASDHRHHPRKHIKRPREEAHQQLVNDYFSENPLYPSKIFRRRFRMSRPLFLRIVEALGQWSVYFTQRVDAVNRKGLSPLQKCTAAIRQLATGSGADELDEYLKIGETTAMEAMKNFVKGLQDVFGERYLRRPTMEDTERLLQLGEKRGFPGMFGSIDCMHWHWERCPVAWKGQFTRGDQKVPTLILEAVASHDLWIWHAFFGAAGSNNDINVLNQSTVFIKELKGQAPRVQYMVNGNQYNTGYFLADGIYPEWAVFVKSIRLPNTEKEKLYADMQEGARKDIERAFGVLQRRFCILKRPARLYDRGVLRDVVLACIILHNMIVEDEKETRIIEEDLDLNVPPSSSTVQEPEFSPEQNTPFDRVLEKDISIRDRAAHNRLKKDLVEHIWNKFGGAAHRTGN

SEQ ID NO: 130329 - protein, 187 aa, Oryza sativa
  Clone ID: PAT_MRT4530_32501C.1.pep
MKRGKNQELTCVEVDGIEAEAGLAPPTEIDRTGGVGATSNDECAAMTDDDHEDPLEGALEAAVMAEVCEITRNGGGGGGGGEGGGGGGGGGGGGGGGIESMAAAARVQAATATNFFVPLLFDSSFLLFLMLDVGCGGAAIEKRARKKRESVDAGGGVRGRAVRMPNQVAVDLGVPHTNKESDLQGGR

SEQ ID NO: 130330 - protein, 122 aa, Oryza sativa
  Clone ID: PAT_MRT4530_32502C.1.pep
MAMLELVQILRAQPGPFPPRPCRFRVRPRALPSVSPRCVILKLIQSMNARSVIVQLVAGIVGYVLYARVWIIIIHNYASAGAPQKQSNLRMLFRAPPRFGAGLLRRFVVSSPPPPRPFSISS

SEQ ID NO: 130331 - protein, 37 aa, Oryza sativa
  Clone ID: PAT_MRT4530_32503C.1.pep
MRSKPTLVGGAFSAPPTMRPLHGGRSCIRLPPKFQLH

SEQ ID NO: 130332 - protein, 76 aa, Oryza sativa
  unsure (1)..(76): unsure at all Xaa locations
  Clone ID: PAT_MRT4530_32504C.1.pep
FVGGLNLHGLPXCPPPPPPPRSXPXPSSPGQGTRPRRAAANCARRFPPPPPPSAPSPPPSSPSSRRRPPSSSXDPT

SEQ ID NO: 130333 - protein, 50 aa, Oryza sativa
  Clone ID: PAT_MRT4530_32505C.1.pep
MKLMRVSMTCTAALIDPKEDRRWQCRTEVKTWSPPPAACMHGWRNHLYSR

SEQ ID NO: 130334 - protein, 132 aa, Oryza sativa
  unsure (1)..(132): unsure at all Xaa locations
  Clone ID: PAT_MRT4530_32506C.1.pep
QPLPXHSAHAHIAXPRETQELGXPKYYAQAMPAPATSATRADGIPVAXQPPXNRTEAKHNTVLPTXVXGRSERLPXDVSPPAPHAXIMRPTRPLRPVHXXRCNRPGPEHPGMKGQRAFTQPDMESPGTKIHL

SEQ ID NO: 130335 - protein, 100 aa, Oryza sativa
  Clone ID: PAT_MRT4530_32507C.1.pep
LSTVDAPRLHRLQSLCWCAGITAPAPPTGQSPHAAISSTRCHQSVGTHRPPSPRRRACWPLAGHDVLHRHSSHACHCSTHPPGVAVSRPWSTVAGRRPTH

SEQ ID NO: 130336 - protein, 257 aa, Oryza sativa
  unsure (1)..(257): unsure at all Xaa locations
  Clone ID: PAT_MRT4530_32508C.1.pep
RLHRLQSLCWCAGITAPAPPTGQSPHAAISSTRCHQSVGTHRPPSPRRRACWPLAGHDVLLAISHDVLLLRRPLPRLLPRGCHARHHRHSSHACHCSTHPPXRGCQSPMVHGSRSPSDPSPVHAEAMDATSTCCRRRPPSAAPNDDASGPSPTAARAVSRCRLPSPPSRRLCAPGXIHRGSARSGRGGTGFAAPSRGLAGAAVVFAELLLASLAQEAERRWGLAPSPPSWLAARLSGRRAPAVERQRRGRRGAAVGG

SEQ ID NO: 130337 - protein, 108 aa, Oryza sativa
  unsure (1)..(108): unsure at all Xaa locations
  Clone ID: PAT_MRT4530_32509C.1.pep
MEEDDNTVAVDGGDRQAXGRRRLRRRHCFRTRRRSICFRSMLKRRLAHGERGGRHGDVYDSEAVKTAMATSIFGSVAGSGSYXVAAARLDXKWRHPDWRIRKFISTKS

SEQ ID NO: 130338 - protein, 494 aa, Oryza sativa
  unsure (1)..(494): unsure at all Xaa locations
  Clone ID: PAT_MRT4530_3250C.1.pep
MNPKRAPPPAPAHGAPPPKRLQIDAFRSGAEAFAQQAPTSSPVKRQLRRGMLVLFFVSAAQVKEERRNKNKNNARPARVAIHEESSTSQRKAPEDDAFQRGIMKAFDNALQKHLNPIYCSLQHLTKQTGTLSERIDTVSHEVGQIKKLISNRDANERYRSEVNQENAAVTEEVNQEQTALRFAANEVHEDQGVELRFLNKLKDHLVYTNDKITAEDGTAIKIAIFRDNKIVTAGQLSSARIEIFFLNDSHETFYDAAPDNWTACEFDAHIVSSSKGAVLGGVLRVKLKNGEASLSDVSFNMPSSKTGSKKLILAARVLSSDKAGLQIKEAVMNQPVEVQVNRNKSNKKSNCPKLKDEVHRLKGISGKGERAKWLKNNGVKSITGPXKALNKDEEKICTECFNMKKDNMLWKATVEHAEQCDLEGNYKLKSYRVEEKHVTLFFNCVHDLVGAKFRGRYVAKDNFSSDEKDEVNCLKIQAYDELDNIVFDHEMKDN

SEQ ID NO: 130339 - protein, 215 aa, Oryza sativa
  unsure (1)..(215): unsure at all Xaa locations
  Clone ID: PAT_MRT4530_32510C.1.pep
SSHLKLVVTEGLGMQPVDTITKKVLALGFLMWTYLPLIVLATNPTLLSLNVWMSLLVHNHAETITGVKANNSGFLDLSMIESFGAMVDRLGKNCVMPXVIQDNHVSESSXVAMMNDKNNFFGDWYFNPVAWVQGMSNMATLFVGVPNVVDMSGTSATALTYVRPKEVENTNEVCSCMALRGGMGSCSTPSSRSSMSSAQTPVVGCTRMTGTSPKP

SEQ ID NO: 130340 - protein, 212 aa, Oryza sativa
  Clone ID: PAT_MRT4530_32511C.1.pep
VNFGIYFNHGQACCAGSRIYVQEEIYDKFIQRFKERAAQNAVGDPFAADTFQGPQVSQLQFDRIMGYIEEGKKSGATVETGGNRKGDKGYFIEPTIFSNVTEDMKIQQEEIFGPVCTISKFKTKADVIKIGNNTTYGLAAAVHTSNLTTAIEVANALRAGTVWVNSYNTLHWQLPFGGYKESGIGRELGESALDNYIQTKTVSIRLGDVLFG

SEQ ID NO: 130341 - protein, 163 aa, Oryza sativa
  unsure (1)..(163): unsure at all Xaa locations
  Clone ID: PAT_MRT4530_32512C.1.pep
MIWKLNKSGIYTPRSLCRAILFGGXIDTNMQDLWKXSAPLKAKIFLWLMLKGRIQAAAQLKKMNWNGDPNCKLCGEKEDVDHLIFRCAPARFLWCCIRDVFNXDVVPSSRDDIVALMHGPKKKSLLVFVAAASWAIWLTRNDLVFNNKLMKDVLQLPHKIMNM

SEQ ID NO: 130342 - protein, 85 aa, Oryza sativa
  Clone ID: PAT_MRT4530_32513C.1.pep
KVPLHSSRCCASISSVPVRRRAAPPPSRGRGVPPLSRRSAAPPPSRGRGAPPFGSTAPPLPFHPPLRGPATKPSSCRCRPPVPST

SEQ ID NO: 130343 - protein, 53 aa, Oryza sativa
  Clone ID: PAT_MRT4530_32514C.1.pep
STAIEYALCSSAHSLDPPHLTKPQSKTELVLYRGYHRSSMYNIPPVHKMTLII

SEQ ID NO: 130344 - protein, 37 aa, Oryza sativa
  Clone ID: PAT_MRT4530_32515C.1.pep
TVGVSLTVFGSKKNSSSSSSPLRMKKSWNYSCPVSLS

SEQ ID NO: 130345 - protein, 60 aa, Oryza sativa
  Clone ID: PAT_MRT4530_32516C.1.pep
SFIPCLWAVFFGLKRCPCVYFSSCRGSSYIQVQCLCVLTALVDIQLDVIFDFGCCNMRIM

SEQ ID NO: 130346 - protein, 194 aa, Oryza sativa
  Clone ID: PAT_MRT4530_32517C.1.pep
GRPRVRGRVGGSMGKGQAWVNGHLIGRYWSLVAPESGCSSSCYYPGAYNERKCQSNCGMPTQNWYHIPREWLKESDNLLVLFEETGGDPSLISLEAHYAKTVCSRISENYYPPLSAWSHLSSGRASVNAATPELRLQCDDGHVISEITFASYGTPSGGCLNFSKGNCHASSTLDLVTEACVGNTKCAISVFNDV

SEQ ID NO: 130347 - protein, 1133 aa, Oryza sativa
  Clone ID: PAT_MRT4530_32518C.1.pep
MPLPPAERRLTVADLLRIRRPTTGAASLVSSSPSTSTAPPPRKKPRLPAAALTPTPRSTAPFAPIPHRVLLAGVLSLPASGSPVACRSHCLSLSDSPPPASSASVCCYLLDFDPDAVDREIHVLAWNYLPSLHHGGAGVLEVVRWRLAEEGTPAPGSGFLKTIPLDCVDAEPDSGTHGHVFGVVRSVSVVFSVPRAGQKSNAGGGDNSVGFIAEMMCCACRRCRVLPPESDQDHKFELEKFVYFVDSASWWRPVLARMVGRPVSVSGLKKRLVSIDRKGSYTMLVSTRKTMLRWCPSYPAVLKLDGSPGDCGGVYTGVVTGIYMQRMLIELDKIVWLLIDDQHLAPSHSLRVGAVISVKNGRAICLKLAWTRTLLLGTCIKTSITINSFSLVDSKSYIKAEDKGLLGKFVDSFELPARFWMLILIPCFKQKFTKLFSEKEILGSKNHDFFMKFSNHNCGSPRAELNLETFKLRSSVSGTLQLVDATGCIDVVIPDLPPNVCMDSIYEINDYKVVLEGPMAYLDPYDVTDPLSCKAICEHLSFRKRLNHLKIYVIINWSELNRIGPSSIPLQINACAKMFHLLKLTHIFPANKTFQHQNLSGPSLYAEAVILPYDLKFTELDECSEHAESFRISCIPSLGNSKVYTAKPCNILCTLSFGTTNLCGSLVSIYSCGSVSTIVNDTVCGERDHTFRILLEFKDGRFKYQSLRIGGYYLLECSTESMNYSMKGCGCLQISKVSLGYQSRFWSLAITFNGTINIKQTIGDQSIGVSSVKMDEPFSRKAVNNEIKLVHTWNDFHQYCDFHLKFHCDEKMDEYNSFCNVFNELCSYSNEVLSISSFIKTRVPKMPSGSSNLQRDKLVQGDLISLQGKVENIHPYGCKKEKFMVGNEKSSICIHVTDDNHRVRLFGYLSKYGYPVGLGPGASATFHRVLLTHKHELFVTPLTYIEVVTIHVLVLDGLQPSKSRCETINVKVRLAGFIVDDGSSLCCCWADDARAELLLGLQEVAVMNSSVTSRFSKDGVNIQQTVGSFLESLLKKHKSIIARNCGIPPDISCRDLELSSVLNKVLSCSEEKLLKSIILNACWKGTLNVIASALNANTLNGFNLELPNLHPMLRCTAERVSGVFAALWVARWN

SEQ ID NO: 130348 - protein, 685 aa, Oryza sativa
  unsure (1)..(685): unsure at all Xaa locations
  Clone ID: PAT_MRT4530_32519C.1.pep
VHPVFTSQLIRGFLTIGIRARFRAWTRDRALEEALMPRRXSSPCRWSVSPSARTPGGSSGRASGSGGNDRGLVIHRVVKESGSSTNYPVLTKTNYNDWALLMKIKLRARCLWDAVECGRAAVELHEDRMALDGICSTVPPEMISTLATKASVKEAWDCIKTMRVGDDRIRKASAQRVRTEYERIVFRDGXSVEDFAMRLTSVVNQLATLGDPEPDDKVVEKYLRVARPMFSQLVLSIETLLDISTLSLEEITGRLKAAEDYQPPPSSQNTDGKLYLTEEEWLECHKKEQEAKRSGAGSSGRNKRRGRKGCTGGSSDGSTYHTTSSLAHRDDKCRNCGKLGHWAKECRSKPKHEDQAHVAQDEPTLMLLTGGCVETAGSMLPPPPPPATPAPQCVCIELVEKKVFTALDDEADRDPRSWIMDSGASNHMTGCRAAFSDLDTSVTGNVRLGDGSIVPIEGRSTVLFTCKNGEHRTLANTYFLPWLAANIVSIGQLHKTGFQVLVEDGIMRVRDEQWRLLTQIPRSPGRLYVLDIKLARPVCLTARPGENAWRWHARFGHINFTALRKMSRETLVRGLPLLMHVDQVCEACLAGKHRRAPFPQRVLSRSNEPLQLLHGDLCSPISPATPSGNRYFLLLVDDYSRFMWIKLLLSKDVAPAAIKQIQAAAESKSGSXLCALRTDRGGEFT

SEQ ID NO: 130349 - protein, 1676 aa, Oryza sativa
  Clone ID: PAT_MRT4530_3251C.1.pep
MGCKMAGHPPNHHGEGMIDFVAELARMTLVVGYPNAPEYTTIPPLSGELPHRVRLEVHDYVAGENDTTFGHMCAVMRGLDRMHSDLHKATKALNDGKLMRIVALKDEIARLKRENAQLKGLPAPGGVRIRTTPRKTTTAPVRIQLAPRNPPPSAAPAAPPVPPVVPAAPAPAPASALSFAPASAARGPASGTGGCFFGMVYTRNGSRATGEGSNGEERTDGAHPHSDSGNGPPPLPENPTLAQVMAHQTQMMAAMMQQMQQQHQQMHQRMLQHAEQQHQQFGPPPPQSKLPEFLRVRPPTFSSTTNPMEANDWLHAIEKKLNLLQCNDQEKVAFATHQLQGPASAWWDNHMTTRPPGIEVTWAEFCRSFRKAQVPDGVVAQKKREFRALHQGNRTVTEYLHEFNRLARYAPEDVRTDAEKQEKFMAGLDDELTNQLISGDYADFERLVDKAIRQEDQRNKMDRKRKAAQFRAPQGSHQRSRFAPGQQGGPTTMIVRQHRPFNPSNFPQGTSGSQNHHGGQSNRGAAPRPPMAPAQSGPPAQAKKETGAKPGSCFNCGELGHFADKCPKPRRAGPRFIQARVNHASAEEAQAAPEVILGTFPINSIPAIVLFDSGATHYFISKKFVGMQGLIREELSTPMRVHTPGNSSTSVQFSPSITIEIQRSPFLANLILLESKDLDVILGMDWLTKFKGVIDCANRTVTLTNEKGETVVYKSPDSPKQGVSLNQIETEIPVDTVEKNLRKLEDIPIVCEYPEVFPEDLTTMPPKREIEFRIDLAPGTAPIYKRPYRMAANELAEVKKQVDEQLQKGYIRPSTSPWGAPVIFVEKKDKTKRMCVDYRALNEVTIKNKYPLPQIDDLFDQLKGAKVFSKIDLRSGYHQLRIREEDIPKTAFTTRYGLYECTVISFRLTNAPAFFMNLMNKVFMEFLDKFVVVFIDDILIYSKSEEEHEQHLRLVLEKLKEHQLYAKFSKCDFWLTEVKFLGHVITAQGVVVDPSNVESVTKWTPPKTVSQIRSFLGLAGYYRRFIENFSRIARPMTQLLKKDEKFKWTAECDKSFEELKKKLVSAPVLILPDQMKDFKVYCDASRHGLGCVLMQEGRVVAYASRQLRPHEGNYPTHDLELAAVVHALKIWRHYLIGNRCEVYTDHKSLKYIFTQPDLNLRQRRWLELIKDYDMSIHYHPGKANVVADALSRKSYCTALCIEGMCEELRQEFEHLNMGIVEHGFVAALEARPTLVDQVRAAQVNDSEIAELKKNMRVGKARDFHEDEHGTIWLGERLCVPDDKELKDLILTEAHQTQYSIHPGSTKMYQDLKEKFWWVSMRREIAEFVALCDVCQRVKAEHQRPAGLLQPLQIPEWKWEEIGMDFITGLPRTSSGHDSIWVVVDRLTKVAHFIPVHTTYTGKRLAELYLSRIMCLHGVPKKIVSDRGSQFTSKFWQKLQEELGTRLNFSTAYHPQTDGQTERVNQIMEDMLRACAVDFGGAWDKSLPYAEFSYNNSYQASLQMAPFEALYGQKCRTPLFWDQTGERQLFGTEVLAEAEEKVRIIRERLRIAQSRQKSYADNRRRELTFEAGDYVYLRVTPLRGVHRFQTKGKLAPCFVGPYKILERRGEVAYQLELPSNMIGIHDVFHVSQLKKCLRVPEEQADSEHIDIQEDLTYVEKPVRILDTSERRTRNKVT

SEQ ID NO: 130350 - protein, 193 aa, Oryza sativa
  unsure (1)..(193): unsure at all Xaa locations
  Clone ID: PAT_MRT4530_32520C.1.pep
MYTARKKIQKEKGLEPSEFEDSVAQAFFDLENGNQELKSELKDLYINNAVQMDIAGNRKXAVVIHVPYRLRKAFKKIHVRLVRELEKKFSGKDVVIVATRRIVRPPKKGSAVQRPRTRTLTAVHDGILEDVVYPAEIVGKRIRYRLDGAKVIKIFLDPKERNNTEYKLETFSAVYRRLCGKDVAFEYPMTETA

SEQ ID NO: 130351 - protein, 53 aa, Oryza sativa
  Clone ID: PAT_MRT4530_32521C.1.pep
NLIFTCYQCLSCITNLKQNGGICYAYTTSYPLSFWASCLMKFWSFLDGTVLFT

SEQ ID NO: 130352 - protein, 128 aa, Oryza sativa
  unsure (1)..(128): unsure at all Xaa locations
  Clone ID: PAT_MRT4530_32522C.1.pep
ILSHSRAWRQAGDRERRRGCGGGGERRRCAAEETSGGGVRRRRRAAAGCDGEDERRRRRGGGGVRRRRRXGGIAGHAEPPRLDERYHDHGEADRRRIRPVDLAVVAGHVEPSRLDERRHEHGETGRRH

SEQ ID NO: 130353 - protein, 109 aa, Oryza sativa
  unsure (1)..(109): unsure at all Xaa locations
  Clone ID: PAT_MRT4530_32523C.1.pep
MAMTGYKYQAQELMRDYLLADPLVPYTSVLVGIALCKMAYDLTRVLSSFYFKGYSSLTKIQRVEWNNKGXSSAHAIFITAISLYLVRSTDLFSDRLKGHITFRNSIIST

SEQ ID NO: 130354 - protein, 53 aa, Oryza sativa
  unsure (1)..(53): unsure at all Xaa locations
  Clone ID: PAT_MRT4530_32524C.1.pep
ASTDPIWCLWRPLLALATCCSQMSLYYVPGQGGLKXIXGLSPPLHPPQTYCGI

SEQ ID NO: 130355 - protein, 74 aa, Oryza sativa
  Clone ID: PAT_MRT4530_32525C.1.pep
SSFFWDTLVWRPKGATTGLQSPRAFSLGARTGARLHNGEKPHATWVLSFHLIWGFSTRYRVSGATGVHKPTFNL

SEQ ID NO: 130356 - protein, 61 aa, Oryza sativa
  Clone ID: PAT_MRT4530_32526C.1.pep
MAGLRYFSPVAASDLYVVTVSAVPRHSEKGATVIAEGVGRSEPLDAPPPPLWVTAFSAALR

SEQ ID NO: 130357 - protein, 70 aa, Oryza sativa
  Clone ID: PAT_MRT4530_32527C.1.pep
SDLSCFHVTYSAIFVPKKCSLVSSLGHSVKFICSPSSLGPISGYIEIGILAVTFLKYLARCKIIIKKKGR

SEQ ID NO: 130358 - protein, 80 aa, Oryza sativa
  Clone ID: PAT_MRT4530_32528C.1.pep
HKWLTTPAVVSILRYIYSGWHAQNRHRCIQWSSPLPRTDALTAPATTSVSSDLRNSDETTVAAGVVSASGLGSGDDHWMH

SEQ ID NO: 130359 - protein, 461 aa, Oryza sativa
  Clone ID: PAT_MRT4530_32529C.1.pep
MPHRAGEVSSSSSPGSMSKAMQCFGFAGWERDERRGRSSAVASAAAATTRSLSARSNSSTSTDRDARRSGSECSLNVSSEISAESFGRYRQLSLPQRASNNLRIFTFQELKSATRGFSRSLVLGEGGFGCVYRGTIRSVLEPRRSVEVAIKQLGRKGLQGHKEWVTEVNVLGVVDHPNLVKLIGYCAEDDERGMQLLLVYEFMPNGSLADHLSSRSPRPASWAMRLRVALDTARGLKYLHEESEIKIIFRDLKPSNILIDENWNAKLSDFGLARLVSQDGSHVSTAVVGTIGYAAPEYIHTGRLSSKNDIWSYGVVLYELLTGRRPLDRNRPRGEQNLIEWVKPYSTDSKKLEIIMDPRLEGSYSLKSAAKLASVANKCLVRHARHRPKMSEVLEMVQKIVDSTDLGTPEHPLISKSRELTRDEKKRKGLDLKRRFADIKAGGDQRWFTWQRWRPKLVRTQ

SEQ ID NO: 130360 - protein, 653 aa, Oryza sativa
  unsure (1)..(653): unsure at all Xaa locations
  Clone ID: PAT_MRT4530_3252C.1.pep
EPTSRRSRRAAAPKPPPRPRLRPSRATSTTPARAPHSPRPFPSLSRSRPRPRWPGFENRIPPLSPPHFPHVGRRIPPLPAKSGSPIPYLSIAGTPSRFFPIAPTSPELPNASAPCNHPPPPLLLLRPPLAAARLAAVSRRRRRXLRAAEVHLVHPSSVEGTPKLVRXPTPSSRGLPSPSAIAFLRAGHPRVVGRRLRLPPPFPVPPVAAVVACVPSPFNPAGRSALMPSRAGGRIYRRLAPLPHARRRRVSAAPPAPWSPLSRAAPARPXAARSPSPSDLPLGRSFRSLRRSGVLRDSRRGPSSSRARQMAGHPPNHRGEGMIDFVAELARMTLVVGYPDAPEYTTIPPLSGELPHRVRLEVHGYVGTCLANMAVEASGGTADHACQEAAYLMMARLRERHDYIFHDTAYRYHPRRAHGDGVSSFRPTAGENDTTFGHMCAVMRGLDRMHSDLHKATKALNDGKLMRIVALKDEVARLKKENAQLKGLPAPGGVRIRTTPRKRTTAPHQPPEVQPVVPEMVYTRTGNRTAGEGSNGEERADGVHPNGDSGNGPPPLPENPTLAQVMAHQTQMMAAMMQQMQQQHQQMHQRMMQHAEQQHQQFGPPPPQSKLPEFLRVRPPTFSSTTNPMEANDWLHAIXEKKLNLLQCNDQEK

SEQ ID NO: 130361 - protein, 70 aa, Oryza sativa
  Clone ID: PAT_MRT4530_32530C.1.pep
YIAHKRARQRRVKPPILKHWFALWTHVQYDLRMFCLRASYSTSFHLKFHNIFSRSHLFWLYDLVIKVVVL

SEQ ID NO: 130362 - protein, 338 aa, Oryza sativa
  Clone ID: PAT_MRT4530_32531C.1.pep
MAAPSKPQHGAIGPVPFKDVIGDAMAQRSSPEEEYAGVVSSLPSYPKLRLRHYQGMWLMEYTLPGIMAIQRSFVPRRHGDVVLASPGKCGTTWLKALAFAVLARGAYSPASDRHPLLRLNPHDCVPFMEGAISEGWGGKIDELPSPRLMSTHMQHAALPKSIADEPGCKVVYICREPKDILVSAWHFFRIIEPDLSFQEVFEAACDGKFLTGAIWDHIIGYWNACKANPEKVLFLVYEDLLRDPANIVRKLADFLGQPFSSTEEEAGLVTDIVRLCSFENLKSLEVNKMGEASFAFPNASYFRKGKAGDWKIHMTPEMVECFDTIVKEKMHGSGLVFA

SEQ ID NO: 130363 - protein, 155 aa, Oryza sativa
  Clone ID: PAT_MRT4530_32532C.1.pep
MARHGAARTQRRCEAATGGNRPAAEGGGVTATRAATGAAKRLGSGMAATSGAGERERLKGGGPHRQRLTTASDEGRWRRRDELRNHLANKMRGVRGREENGRGRGRRPKAAAMAVLTGERHGVGSGGGIQRRRGGRGGPHDGDRGGVVGAATRGG

SEQ ID NO: 130364 - protein, 115 aa, Oryza sativa
  Clone ID: PAT_MRT4530_32533C.1.pep
MMSIAVRRIGAESQRCTPSSIDIQQTNTGKKVGALDTMFQVSVTNRCTCTVRTVFLRADGFTSAVAVDPKLFRQAGSAGYLVGDGRRIPSAKSVTFQYAWDHYFKMTPASIQAEC

SEQ ID NO: 130365 - protein, 34 aa, Oryza sativa
  unsure (1)..(34): unsure at all Xaa locations
  Clone ID: PAT_MRT4530_32534C.1.pep
MPMITPSYNTPLYRESWFAYRCRSQILGPTQGFX

SEQ ID NO: 130366 - protein, 77 aa, Oryza sativa
  unsure (1)..(77): unsure at all Xaa locations
  Clone ID: PAT_MRT4530_32535C.1.pep
MAVAAVRAAAADAAVTFLWVLXVSTLGAXTAAVTSYLRIHEGXHYALLVTVSLLSVLLFAFNLLFEASGRXFQPQRP

SEQ ID NO: 130367 - protein, 112 aa, Oryza sativa
  Clone ID: PAT_MRT4530_32536C.1.pep
MPTVEEEATGVFRYSSPDLVEPGSGGQRSGGGGGGGQQPGEGSGGIGGWICLLEAKSGGQQSGGSGSVGNRRSEGGGGDRICISVARFIGHRSEGGSRQLVADDNILAPLCK

SEQ ID NO: 130368 - protein, 259 aa, Oryza sativa
  Clone ID: PAT_MRT4530_32537C.1.pep
TGAPDLEVPNSMKPRSGRIRKGEEELAAMVIWERKILGEASPPWPLHSTKLRGARCHGHSFYWLDLAECRERGGRGDSDGALERERMKRRRQPRKVEARLSTASSSRMGGDGAGEMAEALPLHNMKGGWRRFSGEQGAPQRWPARVERRSTHGARWLGAGHRRRGEAGRRKVAWQRLCSPNADVHRGALPLPAEAGRRKAASDGDNGLRGGGELGVGMATVTAQRLATVVVAHDDDPGRGAEAAEVVRLAESAEGGEAR

SEQ ID NO: 130369 - protein, 1190 aa, Oryza sativa
  Clone ID: PAT_MRT4530_32538C.1.pep
MFPDRASRTAHPAGEGGCVALLAPLPPRASPRPPSRGRLPPPIRPLQTPGPAPARGAAAGARGGGGGAAVWTPPRPPPMAAEDAGGGAGERMKLLCSLGGRILPRPGDGTLRYAGGDTRIVSVPRGVALGELFGRLAEAYGGATGASFAVKYQLPDEGLDALISVSSPEDLDNMIEEYDKLAGASPKLRVFIFPISDAAGGGGGEEAEGGGFDAGLRYLEAVNGIVRKDSVASLSSTQNSDGGPPPPAPTSGGGGGGGSPTALSPTSTCSNDAARSAFGVAAPPPLVDVFSNAAAPAPVPVKPQEIAAEVRAPPQANPQPEAARYRQPLSQLPPLPPVFMNDHREAMQGLNQAMPGNGGRLEDCNMCLKALPHAHSDPVVNDYGSDMHGGPGPETVPVYMSLRPEDVARIMMPERAVPVPMGAYGYTHMHPVPHEREMMYAQQVEGIPNTVLIDPSGLHQHVYVHQQQQVPPQQLPSTYGFNQIPVIPNEKDRVVSPGSAHSDISSSHQHIMQQPLPPQQQQLPSGQGMAQYPVKQNSPNNQLTGEGSLSGNARHREDGLTRRDNVSPVAPAAVPTYMANVDRMMDSLRLSPSEASSASTEQRKPVMPPENGVPQNAIPENSQGFPDTRAREVSQSNTNTFFDVSEPKVVLPTEPAPSPSIASSYLHNVQHTNVSHMPHMMSIGGPYSSYVVATVGPGGVPPSAYGVDLVYANSAVNPLSERKDVPHEVAPNANAQVPAAALVNHAPNVDQIQESGLQGQQFGNDDPWKVVTNTHALPPRPKRVASRENISPKDPHSHNSLLNCKGPDLNIPAEDVALHQQSDHKDAHTEHGRFIKGDDMTSPDLVSVEDSLPTSNTKSSEPQPPVVNDGVGAVTGKVDAEAHANEVNKSRPADWISGFPATDDLGRLQIIKNNDLEELQELGSGTFGTVYHGKWRGSDVAIKRINDRCFAGKPSEQDKMRNDFWNEASKLADLHHPNVVAFYGVVLDGPGGSIATVTEYMVNGSLRTALLKNAKTLDKRKRLIIAMDTAFGMEYLHNKNIVHFDLKSDNLLVNLRDPQRPICKVGDLGLSKVKCQTLISGGVRGTLPWMAPELLNGSSSLVSEKVDVFSFGIVLWELLTGEEPYADLHYGVIIGGIVSNTLRPAVPDSCDPEWRSLMEQCWSTEPSERPTFTEIAGRLRSMAASHKVQP

SEQ ID NO: 130370 - protein, 80 aa, Oryza sativa
  Clone ID: PAT_MRT4530_32539C.1.pep
MHFFTLKKKKKKKKKKKKKKKKKKKKKKKKKKKNFKKKKKINNKKKRGGGPFRGPKFTSGGMQGNSFFLGPPKLNPRAVF

SEQ ID NO: 130371 - protein, 372 aa, Oryza sativa
  unsure (1)..(372): unsure at all Xaa locations
  Clone ID: PAT_MRT4530_3253C.1.pep
MDRRTTRDPHIPSAQFLPPPSQPGQPPLPLPRLSSFFPSPSPCHLPPLRHPLPPTTQPPWPPAPPNVAVSRTPPYPPPPXTRPYPAVGPHRPRPCTPPQLLPAKSAPXPPPTPPTMMPPMSPPVAAPLGPDPAAPSPFKTIPTAPSPFXPISPSSPRPLPLSPRRSPSSPXPATICRPPPPLPPSPCRAICTTSIATPRRTPVFPPFPQSTTRSPPPPRXPMSPPHSPPPSVAPPLSPXSSLGCGPPLPVPPSAXPVAVSPLPLSVSTPLPLHLSPLCRPPPRPSRDVPPPAVAXAGSSSLCSASVPPPAMLGSRLPPPMPRGRSGPSDRPRPPSGPPPPSHSNRPSTRSRLGARSPPSPQPSSSATVPKLR

SEQ ID NO: 130372 - protein, 74 aa, Oryza sativa
  Clone ID: PAT_MRT4530_32540C.1.pep
RRGCDGAREFPLMAATCWRISWHKMHFFLFLNFLASMCTFNRILFSCYMQVTQQSCKYLMVGWRNVQPTLGVQQ

SEQ ID NO: 130373 - protein, 121 aa, Oryza sativa
  Clone ID: PAT_MRT4530_32541C.1.pep
GGGGGGGGRRRGGSGCARGTGSRCGGCGPSCSRSSASSAGGRGRRRRLRRRLEAAAHGAAARGSSSAAGSITSTAGGGQCRRRSCGPTRSTRRRSPTASSSSSGTQSRSRTTPAPAAGDHR

SEQ ID NO: 130374 - protein, 90 aa, Oryza sativa
  Clone ID: PAT_MRT4530_32542C.1.pep
KTQCLNILIRNWEANISITVIRSLLQFESKESVALPASAFSVLSLSSCHVFLQLHPEQLMEALHCCTPNVGCTFRQPTIKYLQDCCVTCI

SEQ ID NO: 130375 - protein, 185 aa, Oryza sativa
  Clone ID: PAT_MRT4530_32543C.1.pep
AKLGLYSYWRSSCSHRVRIALNLKGLEYEYKAVNLLKGEHSDPVFGDKYPEHPLLPQDLKMKALNLQIASIVCSGIQPLHNLTVLRFIEKKVGTGESIPWTQQQIDRGFAAAENLVKGCAGKYATGDEVRLADVFLAPQIYAAVTRFQINMLNYPTLARLHEEYMKHPAFQAALPDRQPDAPSST

SEQ ID NO: 130376 - protein, 59 aa, Oryza sativa
  Clone ID: PAT_MRT4530_32544C.1.pep
GYCVQKSLNCDLALKRPHGLRHQNKRLIHSVVHETNWSNSCVSVDSLDSNCSKERIAVI

SEQ ID NO: 130377 - protein, 165 aa, Oryza sativa
  unsure (1)..(165): unsure at all Xaa locations
  Clone ID: PAT_MRT4530_32545C.1.pep
MCGSLNYFLFCLWVEEFMKVNPMKFVPALVDGDAVIGDSYAIALYLEDKYPEHPLLPQDLKMKALNLQIASIVCSGIQPLHNLTVLRFIEKKVGTGESIPWTQQQIDRGFXADVFLAPQIYAAVTRFQINMLNYPTLARLHEEYMKHPAFQAALPDRQPDAPSST

SEQ ID NO: 130378 - protein, 107 aa, Oryza sativa
  unsure (1)..(107): unsure at all Xaa locations
  Clone ID: PAT_MRT4530_32546C.1.pep
GDGGHRGLHAVAKTRSGAGHPPPRRPPARPPRAPSPPGERRRPPPRRPVPXPLPPRAPPPARGAPPPRAPPPARGAPPPRWPPARPPAAPRPPYRRAPPGLTWGMRG

SEQ ID NO: 130379 - protein, 241 aa, Oryza sativa
  Clone ID: PAT_MRT4530_32547C.1.pep
MAEAAGAAVAPAKLGLYSYWRSSCSHRVRIALNLKGLEYEYKAVNLLKGEHSDPEFMKVNPMKFVPALVDGDAVIGDSYAIALYLEDKYPEHPLLPQDLKMKALNLQIASIVCSGIQPLHNLTVLRFIEKKVGTGESIPWTQQQIDRGFADLLLCHTMLTSFPNGVAAENLVKGCAGKYATGDEVRLADVFLAPQIYAAVTRFQINMLNYPTLARLHEEYMKHPAFQAALPDRQPDAPSST

SEQ ID NO: 130380 - protein, 529 aa, Oryza sativa
  Clone ID: PAT_MRT4530_32548C.1.pep
MTCATWMRMRSTSKESPAARRLLLLFPRPRAFSSAAAAAPSREPLHVCVVGSGPAGFYTADKMLKGHEGAQVDIIDRLPTPFGLVRSGVAPDHPETKSKAIEFDFLKKRASYNLGRREYFDCFILGQIVVNQFSRVAANDRCQFYGNVTLGRDVSLSELRKTYDVVVLAYGAESDRSLGIPGEDLRGIHSAREFVWWYNGHPDMCNLAPDLQSTDSAVVLGQGNVALDVARILLRCTSELAATDIADYALDALRGSTIKKVYLVGRRGPVQAACTAKELREILGLKNVHVFIKEADLVTLPADEEEIRNSRIKRRVYELLSKAAIAHKGKNNNGQKELHFVFFRRPTRFLPSEDGVTVGAVQLEKTCLKDDGVAGKQVAVGTGEFEDLKCGLLLGGSGYKSLPVEGIVPNLKGRVLSSESEIPPVDPGLFVVGWLKRGPTGIVATNLHCAEETVASILEDDKKGLFMGPSDSKKQGRRGLLEILEQKNIRFVPFDGWEKIDSKEKMAGELKNKPREKITTWNEILMASN

SEQ ID NO: 130381 - protein, 697 aa, Oryza sativa
  unsure (1)..(697): unsure at all Xaa locations
  Clone ID: PAT_MRT4530_32549C.1.pep
MYFRVVLGRDKSIGSVLIQELEGKERDVFYLSRRLLDAETRYSPMEKLCLCLYFSCTKLRRYLLSNECTVICKADVVKFMLSALILKGRVGKXIFALTKFDLRYESLKAIKGQAIADFIVDHRDVSIGSVEIVPWTLFFDESVCTHGCGIGLVIISPRGAGFEFAYTIKPYATNNQAEYEAVLKGLQLLKEVEADAIEIVGDSLLVISQLAGEYECKNDTLMVYNEKCQELMDGFPLVTLKHVSREQNVEANDLAQGASGYKPITKDIDVEVATIIAGDWRHDVFQYMQNPSQSASQKLRYKALKYTLLDDELYYRTIDGLLLKCLSADQAKVAIGEVHEGICRTHQSAHKMKWLLXVQGIFXPTMLEDCFKYYKGCQDCQKFRAIQRAPALAMNPIIKPWPFRGWGIDMIGMINPPSSKGRKFILVXTDYFTKWVEAIPLKKXDLGDAVQFVQEHIIYRFGIPQTITTDQGSIFVSDEFVQFADSMGIXLLNSSPYYAQAKGQAEASNKSLIKLIKRKISDYPRQWHTRLAKALWSYRMACHGSIQVPPYKIVYGHEAVLPWEARIGSRRTELQNELTADEYYDLMADEREDLVQSRLRALAKVTKDKERVAQHYNKKVVPKSFSQGELVWKLILPIGTRDNKFSKWSSNWEGPFQIHKVVSKGVYMLQGLDGEVYGRALNGKYLKKYYPSIWVNA

SEQ ID NO: 130382 - protein, 155 aa, Oryza sativa
  Clone ID: PAT_MRT4530_3254C.1.pep
MATTLKDAVARKPVLATIRLIVPAGAARPAPPVGPALGFYRLNLMAFCKDFNARTQKYKAETPMQVTLTAYKDSTFEFVVKSPSVSWFLKKAAGIETASGRPGHTVVSSLSLRHVYEIAKLKQSDPYCKHMSLEALCKSIIGTANSMGIEIVKDL

SEQ ID NO: 130383 - protein, 172 aa, Oryza sativa
  Clone ID: PAT_MRT4530_32550C.1.pep
MAGSAEVARVERGGRCLNPLCPMSGNSGGLSMGNCGGEVVAAVASWRCCGSGGGFGGCSDEVVVERGGGGRGIVVVMESLEPEDDTLIGVDLASKSTKDIQAALALAGTCQSGYTGGETIFAERRTWLRLPSTAGCVASEDVGDHPQPPHYSTSALRLPSSAGCIAPGMRTD

SEQ ID NO: 130384 - protein, 41 aa, Oryza sativa
  Clone ID: PAT_MRT4530_32551C.1.pep
LHIPLRPLGSVFHRIVVCSKQDTMLLWKVVHDSSEYHHMVD

SEQ ID NO: 130385 - protein, 106 aa, Oryza sativa
  unsure (1)..(106): unsure at all Xaa locations
  Clone ID: PAT_MRT4530_32552C.1.pep
IWGGRRFHSGVELLTQAYDAGEALLKMLWDYKDAILRCSFKEKPAFTFANXMGLNMLETSLVALQDLSLDKIFDEAGRKALYNEIPKLMEQGESHLQNPHFIFPMS

SEQ ID NO: 130386 - protein, 179 aa, Oryza sativa
  unsure (1)..(179): unsure at all Xaa locations
  Clone ID: PAT_MRT4530_32553C.1.pep
CSCSPLPWVVASSRSPPARAAVAASRPPSAASSGSSSPRPATSSARRRAGPERTGGTPPRPPATAPTRSGRPXGARRGGGRRGSPPRTASPPTCAGRRRCCAARGATGRAPVAASATSRPPSALSSARNACPPARFSSLVPRFHSAGCPGASPHDRYPFLFLVVMLTLHNLLSYIYRFS

SEQ ID NO: 130387 - protein, 605 aa, Oryza sativa
  Clone ID: PAT_MRT4530_32554C.1.pep
MVRQKRSKLEDCSQSLNESDDIHSESLPNNDDNYQCDSSDNSDSNHMDVPSQDHLNVISTNDLNDMDVSQPHVNEISTNELLKTLKRKLSKSKRSEDDNIKMKRSESIELDNDVMINQVLRDIIQMDQIINNLKKKLNIHHNIGDQNLKDKNVDTDLKSDAFSRFSVKYFSKVLDSLSPHHKTVIENSCFRSMLLFDKCFVPNSFALWIAKQVDVNCSDIVLGQKLIPLNKQSVHVVLGLHVGGSTIHSKFDSGKQKILHIFGKTSIPSVKFFGEKLIKNEELPDDQILICFMIVSLNCFLCPNSSLIPSTKYLSAFEDMDLIESLDWCKLVFDWLMDHISKLEKLKTFGGCLLHLTVNYLDFLNFGSQKVLLDTPRIKVWKRYMIKDYSKFDKISERVYGKTPVNDIASTCYQMVDNSSSSFADMLKSSVGDLLPNHEQDEEINDDVNQAVQKNNNITSSTKGNSKTVLDDDKLPIPNEEFNPVNKSTNLNSSEQIKYINIDEIMKKLNKTGHVPINPPDETEKNSALTDSPDKMYMVTLENSTSPTASLNENKENEKGCHMIKDSPDVVFVGEKKFSKKCADIGNKTNMMYNKMNRILLDSQK

SEQ ID NO: 130388 - protein, 250 aa, Oryza sativa
  Clone ID: PAT_MRT4530_32555C.1.pep
PHPLFRITEWKDHNPADASLAFTTPKFPETLSHQSNVANIVKKLSTKNMEKQLKKFSSFHNRYFNSAYGVEAAEWLHKEVQKVIKKSKHPLASVRLIQHQAWSQPSIAVSIPGKVRLKTVITGSHLDSVISNDRGAGRAPGADDNGSASIMLLNLLSAFLEDPRIAKGDHLNTVEFHWYSAEETGLLGSQDIFNSYSRLGIQVEAMLNQDMVGYKGRDGIERFGLVTDFTSPSQNEFLKLLIDEYADIPL

SEQ ID NO: 130389 - protein, 911 aa, Oryza sativa
  Clone ID: PAT_MRT4530_32556C.1.pep
MVMFPSVNQMVHQKRSKLDNCSQPISESDDINSESLPAKDDDYNCDSDDNSASHDMDVSQPHVNEISTNELLKTLKRKLSKSKRSEDDNIKMKWSESIELDNDVMINQVLRDIIQRDQIINSLKKKLNIHHNIGDQNFKDKNVDTDLKSDAFSRFSVKYFSKVLDSLSPHHKTVIENSCFQSMLLFDKCFVPNSFALWIAKQVDVNCSDIVLGQKLIPLNKQSVHVVLGLPVGGSTIHSKFDSGKQKILQIFGKTSIPSVKFIGEKLIKNEEFPDDQILICFMIVSLNCFLCPNSSLIPGTKYLSAFEDMDLIESLDWCKLGFDWLMEHISKIEKSKTFGGCLFHLAVNYLDFLNFGSQKVLLDTPRIKVWKRSMIKDYSKFDKISEGVYGKRPVNDIASTCYQMVNNSSSSFADMLKSSVGDLLPSDVQDKICHLLCNHFGKEDEIFEDKAKKLLIDVLLLLADCSSNYPTQPTTHENSGIEPDHEPVEENNDDVNQAVQKNNNFTSSPKGNSKTVLDDDKLPIPNEEFNPVNKSTILNSSEEIKHINIDEIMTKLNKTGHVPINPPDETEKNSALTARNNQVFHDQPSFKIWGSDDDLHHENDDFKKEITTAHLADSYQVIPDSYSPNHVLRNKITPRKLSQTFAAAVESLIICSDSPDKMYMVTLENSTSPNASLNENKENEKGCHIIKDSPDVVFIGEKKFSKKCADIGNKTNMMYNKMNRIMLDSQKQNFKTFASPERVLLCNMKNFNPSTSGTKPIHHDLRRLFFPILYKRHWFVFIVHLKDEMFVFLDSLHEEGSEYQDEVKNRLTSNFALAWNSIMEEYQINFDAFKIVYPPVPRQNNLFDCGVFTLKYMELWGPRVQLTNHFSQKDIQNIRIQYVNRLFFYPDNSVLGTGTKKLVIDFAQGN

SEQ ID NO: 130390 - protein, 862 aa, Oryza sativa
  Clone ID: PAT_MRT4530_32557C.1.pep
MQMVHQKRSKLDNCSQPISESDDINSESLPAKDDDYNCDSDDNSASHDMDVSQPHVNEISTNELLKTLKRKLSKSKRSEDDNIKVLRDIIQRDQIINSLKKKLNIHHNIGDQNLKDKNVDTDLKSDAFSRFSVKYFSKVDSLSPHHKTVIENSCFQSMLLFDKCFVPNSFALWIAKQVDVNCSDIVLGQKLIPLNKQFVHVVLGLPVGGSTIHSKFDSGKQKILQIFGKTSIPSVKFFGEKLIKNEELPDDQILICFMIVSLNCFLCPNSSLIPSTKYLSAFEDMDLIESLDWCKLVFDWLMEHISKIEKSKTFGGCLFHLAVNYLDFLNFGSQKVLLDTPRIKVWKRSMIKDYSKFDKISEGVYGKRPVNDIASTCYPMVNNSSSSFADMLKSSVGDLLPSDVQDKICHLLCYHFGKEDEIFEDKAKKLLIDVLLLLADCSSNYPTQPAAHENSGIEPDHEPVEENNDDVNQAVKKNNNFTSSPKGNSKTILDDDKLPIPNEEFNPVNKSTILNSSEEIKHINIDEIMTKLNKTGHVPINPPDETEKNSALTARNNQVFHDQPSFKIWDSDDDLHHENDDFKKEITPAHLVDSYQVIPDSYSPNPVLRNKITPRKLSQTFAAAVESPIICSDSPDKMYMVTLENSTSPNASLNENKENEKGCHIIKFIISSLRHAIEIDGVHCKFSSFGGSFNFGHEVSNFVVSVFCRYLFHLSHPSKSKKHYFFSSIGDDLLKHPSRTDFSSVRKCFDGASKARPIQSCEMTSNFALAWNSIMEEYQINFDAFKIVYPPVPRQNNLFDCGVFTLKYMELWGPRVQLTNHFSQKDIQNIRIQYVNRLFFHPDNSVLGTGTKKLVIDFAQGN

SEQ ID NO: 130391 - protein, 67 aa, Oryza sativa
  Clone ID: PAT_MRT4530_32558C.1.pep
LSRAPCHLEHQPQHLDLVPLFYLAFPILYLCQKDHTDDTSCVGGWNANYQIQHVFYLISTLSFSCHI

SEQ ID NO: 130392 - protein, 517 aa, Oryza sativa
  Clone ID: PAT_MRT4530_32559C.1.pep
MDYLKTVVPSQLMAERGANLVVINPGSSNAPRGFASQDVPFNIPHCIARHITQQKDDTPRLSVRDKMLNCHATPSQNAERERAYDIIASLLKIPFLDEDMPSANQALPPKMGRVDALSSQQNKDDSKFTWTDVMDRSIKSSTPIERPVDKDADVDPLQRSTPDDTEPNSEENMYKEIIFGEDALKIPPSESYCLSHPIRRGHFNISQDYSLHQVLEDLRTIWNWILTEKLHINPRDRHLYSAILVLGETFDNRGLEMLSIVLCDLGFSTAVIHQEALAAAFGNGLSTSCVVNIGAQVTQVVCVEDGVALPHTALALPYGGDDISRCLLWVQRRHCTWPNFQTDPVNKPIDMLMLNKLKESYSQIRSGSFDAVSVVHSYEHEKSVGHQKTKLSALNVPPMGLLYPRVLVPEEYPPPPRSWFQDYDDMLEDTWQTSDSLYSSGNGGFGRIELQRKLFCSIQLVGGTASTAGLAPVLEQRVLNTIPSNQPIEKAEVLQSRSYPLFVPWKGGVNNRFKEAH

SEQ ID NO: 130393 - protein, 606 aa, Oryza sativa
  Clone ID: PAT_MRT4530_3255C.1.pep
MASRKLCHYFQAHRVSVVTSYPLDQILHNREGTGRVVKWAIELAEFDLHFEPQHTIKSQVLADFVAEWTPVDDLVLSNVPSLPGDGEDPNADIRGGHWVMHFDGSLNLQGAGAGVTLTSPSGDILKYVVRLDFRATNNMAEYEGLLAGLRAAAGMGIRRLLVLGDSQLVVNQERLAQPSARPNPPRDPETTPSAPTLGDPRASGPEGVDPGPPRQVVWMTDIRAYLDKNTLPEDRVEAEKLARISKRYVLVEGILYRCAANGILLKCVSREQGIELIADTHQGECGAHSASRTLVGKAFRQGFYWPTTLQDAQEWVRRCKACEFHAKQTHQPAQALQGLDILGPLKAARGGYQHLYVAIDKLTKWPEAYPVVKIDKHSALKFIRGITSRFGVPNRIITDNGTQFTSELFGDYYDDMGIKLCFASPAHPKSNSQVERGNAEILKGLKTKTYTALKKHGDSWLEELPAVLWENRTTPSRATGETPFFLVYGAEAVLPSELSLGSPRVALYDEANQDYLRRDDLDYLEERRRHTALRAARYQQSLRRHHQRHVRARSLQVGDLVLRRVQSRLGLSKLSPMWEGPYKVITVPRLGSVRLTTEDGTELPNP

SEQ ID NO: 130394 - protein, 992 aa, Oryza sativa
  Clone ID: PAT_MRT4530_32560C.1.pep
MAGEQARIEDPRGLSSSRTVAEAHEQRSHHHHLVFAGSKCRWHGSRQDGAKELPVMVHQKRSKLDNCSQPISESDDINSESLPTKDDDYNCDSDDNSASHMKRSESIELDNDVMINQDKNVDTDLKSDAFSRFSVKYFSKVLDSLSPHHKTVIENYCFQSMLLFDKCFVPNSFALWITKQVDVNCSDIVLGQKLIPLNKQSVHVVLGLPVGGSTIHSKFDYGKQKILQIFGKTSIPSVKFFGEKLIKNEELPDDQILICFMIVSLNCFLCPNSSLIPSTKYLSAFEDMDLIESLDWCKLVFDWLMEHISKIEKSKTFGGCLFHLAVNYLDFLNFGSQKVLLDTPIIKVWKRSMIKDYSKFDKISEGVYGKRPVNDIASTCYQMVNNSSSSFADMLKSSVGDLLPSDVQDKICHLLCNYFGKEDEIFEDKAKKLLIDVLLLLADCSSNYPTQPAAHENSGIEPDHEPVEENNDDVNQAVQKNNNFTSSPKGNSKIVLDDDKLPIPNEEFNPVNKSTILNSSEEIKHINIDEIMTKMNKTGHVPINPPDETEKNSALTDSYQVIPDSYSPNPVLRNKITPRKLSQTFAAAVESPIICSDSPDKMYMVTLENSTSPNASLNENKENEKVCHIIKDSPDVFIGEKKFSKKCADIGNKTNMMYNKMNRILLDSQKQNFKTFASPERVLLCNMKNFNPSTSGTKPIHHDLRRVINPTKYCTDPYTPQRSNFTVSQYERQIYNAVCTLSTSRYQERHAVEIDGVHCKFSSFGGSFNFGHEVSNFVVSVFCRYLFHLSHPSKSKKHYFFSSIGDDLLKHPSRTDFSSVRKCFDGASKARPIQSCEMLFFPIFYKRHWFVFIVHLKDEMFVFLDSLHEEGFEYQDEVKNRLTSNFALAWNSIMEEYQINFDAFKNVYPPVSRQNNLCPIVLLLTGIFFDCGVFTLKYMELWGARVQLTNHFSQKDIQNIRIQYVNRLFFHPDNSVLGTGTKKLVIDFAQGN

SEQ ID NO: 130395 - protein, 129 aa, Oryza sativa
  unsure (1)..(129): unsure at all Xaa locations
  Clone ID: PAT_MRT4530_32561C.1.pep
MAAATTAAAARXVGLLYDERMCAHATPDGEEHPENPERLRAIWRKXSADGFASRCMIMKAKEAEDKYIASVHSQNHIKLMRSISSKEYDSRRNKIARKFNSIYFNKGSSESAFLAAGSGIEVTXKLLQE

SEQ ID NO: 130396 - protein, 240 aa, Oryza sativa
  Clone ID: PAT_MRT4530_32562C.1.pep
MDYLKTVVPSQLMAERGANLVVINPGSSNVRIGFASQDVPFNIPHCIARHITQQKDDTPRLSVRDKVVQILGANEVIDLQIASLLKIPFLDEDMPSANQALPPKMGRVDALSSQQNKDDSKFTWTDVMDRRRLEEQFCINSEVTYVLPILFYDINVLLNYSNWSERPVDKDADVDPLQRSTPDDTEPNSEENMYKEIIFGEDALKIPPSESYCLSHPIRRGHFNISQDYSLHQKGFAQMY

SEQ ID NO: 130397 - protein, 267 aa, Oryza sativa
  Clone ID: PAT_MRT4530_32563C.1.pep
DAWVNIGAQVTQVVCVEDGVALPHTALALPYGGDDISRCLLWVQRRHCTWPNFQTDPVNKPIDMLMLNKLKESYSQIRSGSFDAVSVVHSYEHEKSVGHQKTKLSALNVPPMGLLYPRVLVPEEYPPPPRSWFQDYDDMLEDTWQTSDSLYSSGNGGFGMWDNYPMFPTRLKKFDNIGLVEPIVSSILSTGRIELQRKLFCSLQLVGGPVSTAGLAPVLKQRVFNTFPSNPPIKKPEVFPSGGFPFFVPWKGGVVIFLKPVLGCRVN

SEQ ID NO: 130398 - protein, 190 aa, Oryza sativa
  Clone ID: PAT_MRT4530_32564C.1.pep
PDELVFGALKGGFTTECYDKQYFFDTDHPVGANPDGTSPTSVSNITDDGTSVTADGAWYLLDCSRALKPLIFQQRKPATPAQMTDANAQKVFEDNVYTRCNVGYGFWQMAHAVKGKLNAENLWKAIKAMRAVHSDGGHKLGIKPTHIVVPTSLQEEAVKLLERELRVEDGAAVDNEFKNMKLTLIVADYL

SEQ ID NO: 130399 - protein, 168 aa, Oryza sativa
  Clone ID: PAT_MRT4530_32565C.1.pep
GRPGRAPPPFRTDPGAGCECVRPNPQIPPPPRRRRRPSARRPPRRFTSSTIKMSRGGSAGGGQSSLGYLFGGNEAPKPAAKPAPAAAPAPAPAPAPAAAVAAPAEKPSPAKADATKQIPAGIQGSRSNNNYHRADGQNTGNFLTDRPSTKVHAAPGGGSSLGYLFGGN

SEQ ID NO: 130400 - protein, 72 aa, Oryza sativa
  Clone ID: PAT_MRT4530_32566C.1.pep
MGGGPPKKLESIFWWPGYVEARPLCQRVSDIYLALNPAAHKACMLLERYRRIQARRRAAMERYRRMRVQRRV

SEQ ID NO: 130401 - protein, 82 aa, Oryza sativa
  Clone ID: PAT_MRT4530_32567C.1.pep
MAGLRLITSPHMSIQAGVKESQARNQTKLRISQASLRLANSSQVRGAGVRLDDCAFVAAWQKCAGAIGLAKRLQQQLQAALQ

SEQ ID NO: 130402 - protein, 181 aa, Oryza sativa
  Clone ID: PAT_MRT4530_32568C.1.pep
NQHIFWHSLLRQFAEAASSRRRPKRPSTNISCPSNTMLQAAAAAAALAGGGLPPRRAEEGDALQVVPRARPLADEAGVGRRLQVRQLHPPPGVGAEAVVELAPAAALHGVAAQVHVVRHAVVHEDVVVLVGVGLPAGHGALRRRRGEEEEGGGGDDGGVDVGVRRPAIIVASSSAPGFPPS

SEQ ID NO: 130403 - protein, 300 aa, Oryza sativa
  unsure (1)..(300): unsure at all Xaa locations
  Clone ID: PAT_MRT4530_32569C.1.pep
SESMESSRSRKRARQDWDGAGAPPPPAERAVVARGGASPPWRDDDRDGHYVFDLGENLNRRYKILSKMGEGTFGRVLECWDRETHEYVAIKVVRSIRKYRDAAMIEIDVLHRLIESESMKSSRSRKRAGHDLDGALSVAXQAERAVVARGGASPPWRDDDRDGHYVFDLGENLNRRYKILSKMGEGTFGRVLECWDRETHEYVAIKVVRSIREYTDVVMIXHRCVQSPWNYRALEIILGLGWSLLCDLXSVGCIIVELCSGEALFQTYKNLEHLAMMERVLGLLPEHMIRKASLSPVCYK

SEQ ID NO: 130404 - protein, 408 aa, Oryza sativa
  Clone ID: PAT_MRT4530_3256C.1.pep
MAAAWVLAAAAALALWAAAAEGARSPAARVHRHLKRLNKPAVKSIESPDGDIIDCVHLSHQPAFDHPLLKNHTLQMRPAYHPEGLYDDDKRSVASDNAGEKPMLQLWHQKGRCPEGTVPIRRTKKDDLLRASSLRRYGRKRHTAVNPLSIDPNMLNEGGHQHAIAYVEGDKYYGAKATINVWEPKIQQPNEFSLSQLWILGGSFGEDLNSIEAGWQVSPDLYGDNNTRLFTYWTSDAYQATGCYNILCSGFIQINSEIAMGASIFPISNIAGSQYDISILIWKDPKEGNWWMQFGREYVLGYWPSFLFSYLVDSASMVEWGGEVVNSEPDGTHTSTQMGSGRFPEEGFGKASYFKNIQVVDSSNQLKAPKGVGTYTEQSNCYDVQNGNNGDWGTYFYYGGPGKNSNCP

SEQ ID NO: 130405 - protein, 114 aa, Oryza sativa
  unsure (1)..(114): unsure at all Xaa locations
  Clone ID: PAT_MRT4530_32570C.1.pep
ESSYSLTFKCSSGISPVEEQLYTMKPDEVIARSFEXRSTTDQAAMHQCEAILKASDFSELDREGYRFSTAATVYNNGAQIGPTNDHKKGGFWDSIKALWRNLIDFPYWQEFFFF

SEQ ID NO: 130406 - protein, 185 aa, Oryza sativa
  unsure (1)..(185): unsure at all Xaa locations
  Clone ID: PAT_MRT4530_32571C.1.pep
LPLWKNLPELLPLLKKTCSGSTKGPCLLPLTPPRPQPAGNGERKPHFPRGAGRPGCEFNPPPKREFAPRPKTSPKRVGPGGAAAGGAKRASPRVNCGQGRCSIGPALWNVRGRESSPLFSGRSGVGPPKGKALLWXTPRPPCSSLKNRASSFRTLNRGNPPSFPSKWGVSFPFPISPSVDCSKIN

SEQ ID NO: 130407 - protein, 97 aa, Oryza sativa
  Clone ID: PAT_MRT4530_32572C.1.pep
LPIGSVHVGKVDVVSCMRVHGAESKHIPTSTVSLIGHSASSFFVSQRVRSRSSNPGSPDSNPSSEPPLLVFYPGVLSHMSTPERCSRIPSENRRATS

SEQ ID NO: 130408 - protein, 686 aa, Oryza sativa
  Clone ID: PAT_MRT4530_32573C.1.pep
LFFYKPNLWWPNGMGKQSLYNVEIGVDANGFGESDSSNHHFGFRKIESTIDGSTGGRIFKVNGEPVFIRGGNWILSDGLLRLTRKRYMTDIKFHADMNFNMLRCWGGGLAERPDFYHFCDIYGLMVWQEFWITGDVDGRGIPISNPNGPLDHDLFLLCARDTVKLLRNHASLALWVGGNEQVPPVDINKALKNDLKLHPMFVSNHTTKSPGKDISEDPTDPSKYLDGTRVYVQGSMWDGFANGKGDFTDGPYEIQYPESFFKDSFYKYGFNPEVGSVGVPVAATIRATMPSEGWSIPIFKKRIDGYINEVPNPIWDYHKYIPYSKPGKVHDQIELYGHPSDLDDFCEKAQLVNYVQYRALLEGWTSFMWTKFTGVLIWKTQNPWTGLRGQFYDHLLDQTAGFYGCRCAAEPIHVQLNLDSYFIEVVNTTADELRDVAVEISAWDLDGASPYYRVTEKIAVPPKKVQQVTEMSYPKTKNPKPVYFLLLKLFKLSDNQVLSRNFYWLHLPGKDYKLLEQYRQKQIPLKINSKISISGSGYKVRMSIENRSKKPENANVSTMNLADANGSDRTGEEAIQDGHSSGLWGKIRRGLIITRSDDNVRTVEVKGADSGVSFFLHFSVHTSEPSSSQDVYKDTRILPVHYSDNYFSLVPGEKMAIDISFEAPQGSTPRVILKGWNYHLDHAVTL

SEQ ID NO: 130409 - protein, 52 aa, Oryza sativa
  Clone ID: PAT_MRT4530_32574C.1.pep
ILCLYKQKGRKVQTVHFIKQNIVMQVVHMQMVCITVRNFGDYLLIITNLRIS

SEQ ID NO: 130410 - protein, 394 aa, Oryza sativa
  Clone ID: PAT_MRT4530_32575C.1.pep
MGRPVATLLVLCFISVTARAAAFRVHGRLLADAATEGGAVVPIHWTQAMNYVANFTIGTPPQPASAVIDLAGELVWTQCKQCSRCFEQDTPLFDPTASNTYRAEPCGTPLCESIPSDSRNCSGNVCAYQASTNAGDTGGKVGTDTFAVGTAKASLAFGCVVASDIDTMGGPSGIVGLGRTPWSLVTQTGVAAFSYCLAPHDAGRNSALFLGSSAKLAGGGKAASTPFVNISGNGNDLSNYYKVQLEGLKAGDAMIPLPPSGSTVLLDTFSPISFLVDGAYQAVKKAVTAAVGAPPMATPVEPFDLCFPKSGASGAAPDLVFTFRGGAAMTVPATNYLLDYKNGTVCLAMLSSARLNSTTELSLLGSLQQENIHFLFDLDKETLSFEPADCTKLS

SEQ ID NO: 130411 - protein, 90 aa, Oryza sativa
  Clone ID: PAT_MRT4530_32576C.1.pep
MDVTRFPVQIIPIHLSPHGSLPFPQFDEPRRQAAAQEGRRRTTGGGGRWRRCGPAAGGGIGSDGRALPSTAAVCGGRSGGRPEAPSLRQI

SEQ ID NO: 130412 - protein, 174 aa, Oryza sativa
  unsure (1)..(174): unsure at all Xaa locations
  Clone ID: PAT_MRT4530_32577C.1.pep
WPNPLPPPGAPATSRPTGSSSTPSRTPAAAAATTRAPPPLGRGRATGTPSRSPSRSPIRLRSPAGSSTAPPAXRRASSPGRRPPSPPRTAPSSSSESSSPTAPTDAWPPTGSSTGSRARPGRRRRLSSSWSSAPTRSTSCPGTPASCPVATTASSSTPNGDSTTTTTTTVMIAG

SEQ ID NO: 130413 - protein, 71 aa, Oryza sativa
  Clone ID: PAT_MRT4530_32578C.1.pep
MVPGSEPRSTLISSPSAYELISGCSPVCKRGGTTGEGRGVPPVKILKWERGGEEGRLSKNARWIRIRKVRG

SEQ ID NO: 130414 - protein, 153 aa, Oryza sativa
  Clone ID: PAT_MRT4530_32579C.1.pep
MVRTGSMLRVEQRSSAVGIPCEQVTRVRILGGQLRLTVGIGTRLREELRSRRSRIPSEEVGYEMAYSGWTSWGRDLRNGLHEHAGHAQVQLVGWAGGFGWLASRVGPGSRERLGGSWLETELETGAYVGWRSNAESDMDGDRILARMILVTWN

SEQ ID NO: 130415 - protein, 117 aa, Oryza sativa
  unsure (1)..(117): unsure at all Xaa locations
  Clone ID: PAT_MRT4530_3257C.1.pep
HQLIIREEDIPKTAFTTRYGLXFFMNLMNKVFMEFLDKLVVVFIDDILIKWTPPKTVSQIQSFLGLAGYYRRFIENFSRIARPMTQLXVLILPDQMKDFQVYCDASRHGLGCVLMQE

SEQ ID NO: 130416 - protein, 113 aa, Oryza sativa
  unsure (1)..(113): unsure at all Xaa locations
  Clone ID: PAT_MRT4530_32580C.1.pep
AGPIDGQKARPARLGTVHQPSGRHGPIGTSCRAVPAHGLHFVYRGWLPAHRAGPAWSCWASPTCRWRGPGTARWSGRADTGPTSVGPCRAWARPKCRAMGXAVGPRAFWPSIA

SEQ ID NO: 130417 - protein, 224 aa, Oryza sativa
  Clone ID: PAT_MRT4530_32581C.1.pep
MAAAAAAAGYRAEEEYDYLFKVVLIGDSGVGKSNLLSRFARDEFSLETRSTIGVEFATKTVRVDDRLVKAQIWDTAGQERYRAITSAYYRGAVGALVVYDVTRRITFENAERWLKELRDHTDANIVVMLVGNKADLRHLRAVPAEDARAFAEAHGTFSMETSALEATNVEGAFTEVLAQIYRVVSRNALDIGDDPAAPPRGRTIDVSAKDDAVTPVNSSGCCSS

SEQ ID NO: 130418 - protein, 73 aa, Oryza sativa
  unsure (1)..(73): unsure at all Xaa locations
  Clone ID: PAT_MRT4530_32582C.1.pep
RAHACAHTSGYEVMVEYMXMVANTAYVEELTGVERNLLAAADKNVNAAHRACWRIALSIVQTEEGRANEEHVT

SEQ ID NO: 130419 - protein, 77 aa, Oryza sativa
  Clone ID: PAT_MRT4530_32583C.1.pep
PLPEVGDMVLSVTNGSSNFHEKVPSSVVIVEGFPDSALKWTRESSSSKGFQGGKQGNFHFIPFIAVRDKGGIGLSKA

SEQ ID NO: 130420 - protein, 205 aa, Oryza sativa
  unsure (1)..(205): unsure at all Xaa locations
  Clone ID: PAT_MRT4530_32584C.1.pep
MLSSSSPAGGALVLPLGLAESAGEEGRCVLSARHVLLSPRQSGRISQLVASNKESTTIHXGEGGWGFVIRDSEGEVILSSAGRISYLLDAFQAEVVACLAGARAANALGMGHVVFETDSIILKQAMDADDHRLAATGGLIYELKKLIGSSFLSCSFVFAPRECNRVAHALAALGCKCPRNTVEQWDSMPPGMEDLVASDFAESLS

SEQ ID NO: 130421 - protein, 140 aa, Oryza sativa
  Clone ID: PAT_MRT4530_32585C.1.pep
LAGAVDPFRLAGEAGGGAVGWWRRGSREDGVAAACDMNRWGGGEEKVDGHRTPSAQPSTTIVHCPRLTVVRTGHWSSPKSSVPLGRGGLDPSTVVIAGGRAVTAQHHHQRAPYRLAGCQRALPLPPPPGRLPACAVNENI

SEQ ID NO: 130422 - protein, 190 aa, Oryza sativa
  unsure (1)..(190): unsure at all Xaa locations
  Clone ID: PAT_MRT4530_32586C.1.pep
SPSPVASPPPYGASPPTPKMPPPFFSPKXPPGKFPPPPSFLAKNQGPPPPSPSPKFFEGNGFLGEKGPVFPNFPPAPGSLVSPPQKGDACPKNPGTSPFQMPFNPSKPLFFSPFSFRCPLFFFFPFGLQIDFFSLRQKGIGSPLAPKKVFYSLAFCPPKKKTWLGVKFFWSNFFFSPPFLGPLTLLFSPP

SEQ ID NO: 130423 - protein, 255 aa, Oryza sativa
  Clone ID: PAT_MRT4530_32587C.1.pep
MHTSPIRKRRLSPNQRKKEEEGRKEKKVSVRQELMSCVDMVSGNYALTHYVDMLNNVASCSSTRCASVNVKICRFFVNSLVRLSNARSSVYGRGGRSTAIDMDVGPPWCRGGEQTGGAVASAAHHRPDDIKNGQRLMAWRLAAAQRWRLPAGGGGCMGGDVSPPSSQIRLRQRRCRGGGYRREAEGAWAVASPLPPPRSSGGGAQRTVTVEGGAGEEVAATDGGEGFMGGSVSPPLLDLVEAASVGSGDLASGSG

SEQ ID NO: 130424 - protein, 44 aa, Oryza sativa
  Clone ID: PAT_MRT4530_32588C.1.pep
FVSDFFNQWLSIFSQKITKYSRKGLLKQQRRTTGRPHSPPMPKT

SEQ ID NO: 130425 - protein, 55 aa, Oryza sativa
  unsure (1)..(55): unsure at all Xaa locations
  Clone ID: PAT_MRT4530_32589C.1.pep
LLNSGTGLASETQGIHFLYCLITRILPIYVLVSSTPLGLYPSPPCLNXIHYRQKS

SEQ ID NO: 130426 - protein, 167 aa, Oryza sativa
  unsure (1)..(167): unsure at all Xaa locations
  Clone ID: PAT_MRT4530_3258C.1.pep
SPSPRGTFPPRSFKGPGTPALPVGSPPPPPGPPRPTPGLELLRVCPQLPFRFXEVELPLLVVPGGEDPVFAPGCPEELPPPPGSKDKTLRVFPGIWPPLVGEPQENFPKVFGDVLGWLKFPPPPPSPGGGEGQKKFGWSPVPRAWVIHGGFKTKVRGAHKRLWSLLV

SEQ ID NO: 130427 - protein, 430 aa, Oryza sativa
  Clone ID: PAT_MRT4530_32590C.1.pep
MAAAAEQQQQQQQQGFRPLDEASLVAYIKATPALAARLGGSLDALTIKEVGDGNLNFVYIVLSDAGSVVIKQALPYIRCVGDSWPMTRERAYFEASALQKHRGLCPDHVPEVYHFDRAMSLIGMRYIEPPHIILRKGLIAGVEYPLLAEHMADYMAKTLFFTSLLYNSTTDHKKGVAQYCDNVEMCRLTEQVVFSDPYMLAKYNRCTSPFLDNDAAAVREDAELKLEIAELKSMFIERAQALLHGDLHTGSIMVTPDSTQVIDPEFAFYGPMGYDIGAFLGNLILAYFSQDGHADQANDRKAYKKWILKTIEDSWNLFHKKFVELWNKHKDGNGEAYLPPIYNSSELLCLAQKKYMTSLFHDSLGFGSAKMIRRIVGIAHVEDFESIEDASKRASCERRALNCAKAILKGRRQFESIGQVIVHVQSFDRD

SEQ ID NO: 130428 - protein, 224 aa, Oryza sativa
  Clone ID: PAT_MRT4530_32591C.1.pep
MAAAAEQQQQQQQQGFRPLDEASLVAYIKATPALAARLGGSLDALTIKEVGDGNLNFVYIVLSDAGSVVIKQVPISSTRRRRATHVRIFSLRSSADDAAIQALPYIRCVGDSWPMTRERAYFEASALQKHRGLCPDHVPEVYHFDRAMSLIGMRYIEPPHIILRKGLIAGVEYPLLAEHMADYMAKTLFFTSLLYNSTTDHKKGGLLREHKLFFMEISTLVPSW

SEQ ID NO: 130429 - protein, 122 aa, Oryza sativa
  unsure (1)..(122): unsure at all Xaa locations
  Clone ID: PAT_MRT4530_32592C.1.pep
MFSRILAPNRRSRRSYPPAPSRSNRAPTTQYALAFRLPRARSLFAAFSPPFLSPARPRRPPRPADPPRRPTVLPHRPAPPPPSXPPRRPRRPPPXAPPLPPPSXSPPSSSPPSPSSPTSFDA

SEQ ID NO: 130430 - protein, 833 aa, Oryza sativa
  Clone ID: PAT_MRT4530_32593C.1.pep
MVEAASAAPATVVVPLTQTLCANAPATSVTVVSKQTVRPDGASAVGDVKLSVSDMPMLSCHYIQKGLFFPPPGVPIASLVSSLVCALSRALAVFPALAGRLVTLDDGRIVIRCDGVAVEFYHAVAPALSLGDFLVPNADVPTRLTKDLFPMDRTVSYDGHRRPLTSFQLTVLGDGAVFVGFVANHAVVDGTSFWHFFNTWAGLCRGTPVQPPDLRRNFFGDSTAVIRFPGGAGPAVTFDADAPLRERVLHFSAAAIRELKAKANQWKRSDKFAEANGKHVDETKAHGGYREISSFQSLCAHIWRAVTRSRRLLAADATTTFRMAVNCRHRLRPAISPLYFGNAIQSVATTATVAELASNDLRWAAARLNATVVAHEDGAIRRAAAEWEAAPRCFPLGNPDGAALTMGSSPRFPMYDGNDFGWGRAIAVRSGRANKFDGKMSAFPSQAGDGSVDVEFCLAPDTMARLLGDHEFLHCQKKITIGDLVIRHSRSKEMSAELLRARILGLDFTVCWRAMDTPTKSTLQTPLSAHTVALQLPTTRLRAASASLRPSGFRAPARFSPHSRRPPSRPLALAVLLDQLILPAVPPSSPTVPRHRRHRSSPPPTPSSTRSLPHCRHHRSSPPSSSPPSPSSPTSFDAIDPPRRPLFHPPPAPSPTVTVIPLNDQRHRLHRSSPPPSPFSSTRSLPHRRHRRKRRPRSPPRRPAPRCHSSRSPLVLLRIAPNLSSIVSRHHHRHRYHRSQPSATVPFAGSSTTAPRRSTCCCPRPSSSIATHPLQALPPAGRPPRRPPRRREPRPQPGLLAALRPRSALPRRRRRGRRHPRRDPRRARRGVAR

SEQ ID NO: 130431 - protein, 80 aa, Oryza sativa
  unsure (1)..(80): unsure at all Xaa locations
  Clone ID: PAT_MRT4530_32594C.1.pep
MAPSTMALCSPAALPGQAASNAKVAGEGSLTMRTPAAKPKTPPTWRSPFHRADRLLYLCPXAAEPAATSSHEIPCDYGWD

SEQ ID NO: 130432 - protein, 423 aa, Oryza sativa
  Clone ID: PAT_MRT4530_32595C.1.pep
LVAGLTVGAVSFVVVLGVSIWLLLHRRRKHAGLTMEQEMDEGDFFDDEAGDFEKGTGPKRFRYGELAIATDDFSDEHKLGEGGFGSVYRGFLKELNLDVAIKRVSKSSKQGRKEYASEVRIISRLRHRNLVQLIGWCHGGGELLLVYELMPNASLDTHLYGGGGGVLSANSSAGVLPWPLRHEIVLGIGSALLYLHEEWEQCVVHRDIKPSNIMLDAAFNAKLGDFGLARLVDHGRGPHTTVLAGTMGYMDPECMITGRANAESDAYSFGVLLLEIACGRRPIMADHQSEVDEDRIHLAQWVWDLYGNGRILDAADRRLTGEFDGGEMERVMVVGLWCAHPDRSVRPVIRQAISVLRGEAPPPSLPARMPVATFLPPIDAFGYTSSLAVTGSSSVVGKDRKDISCGGRDRERVSGINETLLLL

SEQ ID NO: 130433 - protein, 89 aa, Oryza sativa
  Clone ID: PAT_MRT4530_32596C.1.pep
MIKINKNTYLHDLHVLKVKETINKGGRGGATTDDGSGAVVQWRLRPDGGSAAEECLFEILRRLPGRCERGASTCVSRRWSIMEDDELSA

SEQ ID NO: 130434 - protein, 371 aa, Oryza sativa
  Clone ID: PAT_MRT4530_32597C.1.pep
KRAGEARELEMDEGDFFDDEADDFEKGTGPKRFHYGELAIATDDFSDEHKLGEGGFGSVYRGFLKELNLDVAIKRVSKSSKQGRKEYASEVRIISRLRHRNLVQLIGWCHGGGELLLVYELMPNASLDTHLYSANAGVLPWPLRHEIVLGIGSALLYLHEEWEQCVVHRDIKPSNIMLDAAFNAKLGDFGLARLVDHGRGSHTTVLAGTMGYMDPECMITGRANAESDVYSFGVVLLEIACGRRPIMADHQSEVDEDRIHIAQWVWDLYGNGRILDATDRRLNGEFDGGEMEAVMVVGLWCAHPDRSLRPTIRQAVGVLRGEAPPPSLPARMPVATFLPPVDAFNHTSSSGAAEGDGGGGSGPGEEGGRHG

SEQ ID NO: 130435 - protein, 112 aa, Oryza sativa
  Clone ID: PAT_MRT4530_32598C.1.pep
MAPNSKAQRVQFAHVLQNTRLNNAWNVLLDLKHGITSILKKVSTCGALLSSSIVNRTCELMSNGTIKASGGARNYIRLGLSYPNEQYENKAVYSLMVFAADFTVCIQFFFCK

SEQ ID NO: 130436 - protein, 273 aa, Oryza sativa
  Clone ID: PAT_MRT4530_32599C.1.pep
MRRLRLAAAAAAPHGVLLLLLILLPLVAAAGPAAAKAPAAPPAPPNVTTAMAKGGCKAFADLIAASPDASSTYQSAAGGGITVFCPTDDAVRAFLPRYKNLTADGKAELLLFHAVPVYYSRGSLKSNNGVMNTLATDGAAKNYNFTVQNEGDAVTIKTAASGDAARVKSTVVDADPVAIFTVDAVIEPVELFKPAPSPTPAPSPAPAADAPKASKPAHHPAPVVADAPGPAATDSPPADQKKEAKKSAAAGAPPCVRWFAAALAAVAMASTLA

SEQ ID NO: 130437 - protein, 115 aa, Oryza sativa
  Clone ID: PAT_MRT4530_3259C.1.pep
DDKELKDLILTEAHQTQYSIHPGSTKMYQDLKEKFWWVSMRREIAEFVALKVAHFIPVHTTYTGKRLAELYLSRIMCRLKLYTAGSAAHPSSGIRQASVNFEAGDYVYLRVTPLR

SEQ ID NO: 130438 - protein, 67 aa, Oryza sativa
  Clone ID: PAT_MRT4530_325C.1.pep
YKSIYIVIVSNYLDDIHPSSRETLFQTNIYRLPSVICSSNYSNIHTKQICCKKKHVNKMLVRQHLPE

SEQ ID NO: 130439 - protein, 152 aa, Oryza sativa
  unsure (1)..(152): unsure at all Xaa locations
  Clone ID: PAT_MRT4530_32600C.1.pep
LGKCPKEKFGFXGPWPKNPLPFGHFFFPELFSGGQEGLFSLPSGQALLSGPAFRPLVEKFSSDXKAFFLGFQGGPPQLSQLGFADALKGFCFLLLGPCPWGSFFAFRLGPVLTPRLPLWVASVIKFVWPLALPRSLSMFRWAVLVPCHAASP

SEQ ID NO: 130440 - protein, 74 aa, Oryza sativa
  Clone ID: PAT_MRT4530_32601C.1.pep
MAKVYATYEEAARSSSYTYYKIRVAISTESVPQLVKKALGFGTLCWDGSFVKDSAPSQDVTLLLPRHSSVWRAN

SEQ ID NO: 130441 - protein, 95 aa, Oryza sativa
  Clone ID: PAT_MRT4530_32602C.1.pep
ARGNILRSVGDRPLLSSDSKFPIQFFHLIEYLIQLQLEYTQLPPSLVSFRFEYLILPMMIGLGMVAAAVAATTVFNATGAAPPPVGVVVLLCAAF

SEQ ID NO: 130442 - protein, 235 aa, Oryza sativa
  Clone ID: PAT_MRT4530_32603C.1.pep
ITNQIHACKQRSKEWMMNKADKLKQAVRTLFRTCNDMVDKMHLVDAVQRLGIDHLFQEEISSTLSDINGSQFASNSLHEVALRFRLLRENGFWVSPDVFKIFKGEDGRFTDAISNEPRGLLSLYNGAHLLVHDETELVEAISFSRDHLQSICDSSELKPPLADQVKRALDLPLPRAYKRMEALHYMFEYGQEEGHIVVLLDLAKLEFNLLQHVHLKELKSFSQYASFLDIYTYTK

SEQ ID NO: 130443 - protein, 57 aa, Oryza sativa
  Clone ID: PAT_MRT4530_32604C.1.pep
RGSKPTNQTNERTNLFFFTKGWALRPTFICYYLLKESSCTTTIAPILKNQLALFFFF

SEQ ID NO: 130444 - protein, 271 aa, Oryza sativa
  unsure (1)..(271): unsure at all Xaa locations
  Clone ID: PAT_MRT4530_32605C.1.pep
MTSAMTSPPAAAARRLGQRTLAGERRRGDQRSGGRATDGAGDEEEAAAGFGSTVTAVLRRXLRRRRRSGRERRRLGDPDGGLPERRRRPERRRRTAGATAATAARGYSALGRYGRREAKARVAAGRGELGGPFKGVGGRRRRPTAAGDEKKRSGSEREKPIRFDFESNTFQADLADDSKGEKAEEIPEIVSPLLIRPEKERSGRIXEGNGGGARLXGFGRRRPKVDDDPDRWAPPVSGRTRARAAADWAGLGRGERKGFWADFRPKAKRRL

SEQ ID NO: 130445 - protein, 175 aa, Oryza sativa
  Clone ID: PAT_MRT4530_32606C.1.pep
MSSFTHFISLPVGIHPQLGDKLNEFKRSILTSNEYKAAGFRIDESIFAIPESLHLTVLMLELKGENIAKASSVLQSVSDKLMEALKNRPISIQLRGLACMKGSPDKAWVVYAPVLEVGEQGRLQQVCDIIIDAFTSSNLAPTSDEKRELKLHATVMNARFRKGYCPDASFDARKI

SEQ ID NO: 130446 - protein, 127 aa, Oryza sativa
  unsure (1)..(127): unsure at all Xaa locations
  Clone ID: PAT_MRT4530_32607C.1.pep
QRVERLDDKLDQQKALSGQISDDVTDARLKLENIGSEIKNIKQLVWGLDEKMDSMEAXQNFSCAGVMYLCQFIEQNGGKLPERLEGSKMAGKRFGSQNLIQGLQLAIETGNFDKETFNALKNNSDSR

SEQ ID NO: 130447 - protein, 84 aa, Oryza sativa
  unsure (1)..(84): unsure at all Xaa locations
  Clone ID: PAT_MRT4530_32608C.1.pep
KQGILTRKRSMHLRQTLIQDNKVXGLTLCMLLPEQLSLLLQELQSCSEGMTNNFIGPTSAKVIFVRAVSEGISSFQTTPSIEML

SEQ ID NO: 130448 - protein, 134 aa, Oryza sativa
  Clone ID: PAT_MRT4530_32609C.1.pep
IKLHVYLIIHSNFDYFITLKLAMFKREKKKKKKKKKKKKKKAEKRAGAQRKQRTGHGGRRHMVTKSHPHGLQWQRFTRENLEKTRGTPLKRIVWKTPGDTKNKTEEDPPPSPSQHLRKKDPHRDPPHKGPLMKG

SEQ ID NO: 130449 - protein, 196 aa, Oryza sativa
  unsure (1)..(196): unsure at all Xaa locations
  Clone ID: PAT_MRT4530_3260C.1.pep
MQLHHTSPSSLLTSTSVNLATPYCAADGQLHAVRPHDQSALIHPLDAQMEVNHIHQTRTAENFRALCTGKKRMQNSGKSLHYKWSTFHRAISXFMXQGDYFTRGNGTRAKSIYGQKLTNKGFKCPHDRPAILSMANACSNTTGTQIVICTXVPCSCLNTRYTTILYRVFTXMEGVKATHKGRSLPGKTDKPDVIGH

SEQ ID NO: 130450 - protein, 86 aa, Oryza sativa
  unsure (1)..(86): unsure at all Xaa locations
  Clone ID: PAT_MRT4530_32610C.1.pep
MALALSTSAAAAAAAAARALAAXVTTTXGYAASAASXAMKRAAAAVERKGAAGMTXAXDGSXSSAAKEVFLXPXPVTGHXRPPTSP

SEQ ID NO: 130451 - protein, 274 aa, Oryza sativa
  Clone ID: PAT_MRT4530_32611C.1.pep
MAQEPNNCIHECFSLERYKKTYQHVLQPVEHESAWPVSPNPKPLPPRVKKMPGRPKKNRRKDPSEPVKSGTKSSKVGTKIRCRRCGNYGHNSRTCCVKMQQEHAESYNPPATNASHSSPLQIEPAQSKQTKGKSIATSSSKSKMPEGSSFIQSGHKRRLVSFGKSAQASAKSSAQASAKASAGGSASVVIETNAGTASSFAKATINGCSTWEHARNLLPVSGPDQQQHKIGKNPCRHKIQSADWWLGLKICTPYPSTYRENMWWKPQIEQTWKL

SEQ ID NO: 130452 - protein, 73 aa, Oryza sativa
  Clone ID: PAT_MRT4530_32612C.1.pep
PPRFPKPRRAPNVKTGGEALTFGKVGLRPPLGQNTVFLRGPKNPRGTVNPFGPAPGGPPKNPNPLGGPKGRKF

SEQ ID NO: 130453 - protein, 125 aa, Oryza sativa
  Clone ID: PAT_MRT4530_32613C.1.pep
ACPKASSCKGNYRILLCPKIQTGSAIRLHPKVIGIKQAILSPTNKNKRACSIVLQFQFNKFGGVPRFARRESHGTKIPIPPTYKITGGSFFTEGGGDFKQEGQIRRPQKRDQGRRRPNRANPTHP

SEQ ID NO: 130454 - protein, 51 aa, Oryza sativa
  Clone ID: PAT_MRT4530_32614C.1.pep
IIVSYAQPFCYTSGLRMVGIFVAHREDVIRPKIMCDVDYRWQTQASKCKIK

SEQ ID NO: 130455 - protein, 228 aa, Oryza sativa
  Clone ID: PAT_MRT4530_32615C.1.pep
EKVGSAEQWNRKKREPKFSSARDNSCSQEEPLSPDSPILRDPNVIPIYMTPGSSPTVASCYNQNNTASGPDCTVEPRACPRGCRDMCYVHCPTCKLALGIRFGGHRLYLGVRRTVRWDAAVDRLVITFDGAPVELDAVPAASWSPASVPALSVFRTGPANGVVVRLDGRFRIVANAVPVTEEDSRIHGYGLTADDSLAHLNVAFKFYSISADVHGGLARQVSRLESGQ

SEQ ID NO: 130456 - protein, 177 aa, Oryza sativa
  unsure (1)..(177): unsure at all Xaa locations
  Clone ID: PAT_MRT4530_32616C.1.pep
MAGNASVFLLMVSGQIETAEVPXSFDDIYCXYSFVYGQDWIVTSRLDEGITQVARKSLDDRQTFVFSFPVXITFKSTNPYGWPQIVVYAFGNDAFGNEVVRGYGVTHIPLVPGKHTQRIAMFVPESSSKFQQFLSWLMSRRPEFTDPTVIARGEGREVTRVRSQGFMTLSFNLVTKD

SEQ ID NO: 130457 - protein, 86 aa, Oryza sativa
  Clone ID: PAT_MRT4530_32617C.1.pep
MAAVELRRLEVFVLHRWPSILASSALAAVEEEGSASSVPPTTTPTPSGPTGSLLNMGMSAIELRRLEVFALNRWTSFLTSSALAAG

SEQ ID NO: 130458 - protein, 355 aa, Oryza sativa
  Clone ID: PAT_MRT4530_32618C.1.pep
MVPVRPSAAALLLAATAFLVVAVGAQPLSPDSPILRDPNVIPIYMTPGSSPTVASCYNQNNTASGPDCTVEPRACPRGCRDMCYVHCPTCKLVCLCELTGTECYDPRFVGGDGNKFLFHGRKDADFCLLSDANLHINAHFIGKRNAAAARDFTWVQALGIRFGGHRLYLGVRRTVRWDAAVDRLVITFDGAPVELDAVPAASWSPASVPALSVFRTGPANGVVVRLDGRFRIVANAVPVTEEDSRIHGYGLTADDSLAHLNVAFKFYSISADVHGVLGQTYRPDYVSAGVDVGAKIPVMGSAGKYAVSDIFATDCEVARFAGEDGALASSVGMVDAPADALCGSGKGSAGLVCKK

SEQ ID NO: 130459 - protein, 383 aa, Oryza sativa
  Clone ID: PAT_MRT4530_32619C.1.pep
MEAPRSWRAPACVIFVLALVAQWWSSSMAASCSFTISNHCAQTIWPATLAGAGTPQLATTGFRLDPGQSVQVPAPAGWSGRIWARTGCDFSGAGGAAAAAAAGAAACQTGDCGGRLECGGTGATPPATLFEVTLGKVGGGAGAGDLDYYDVSLVDGYNLPVVAVPQAGGATGGGGGCATTGCTADLNRSCPKELQVDGVDGGGGSGTVACRSACEAFGEEEYCCSGAYATPATCRPTAYSAIFKTACPRAYSYAYDDGTSTFTCSAAAYTIAFCLPPTGSNTSGVTPLISSPSPANGQNGAGGSTPPPAGNNGAGIISYQPPPTEDINGAGSADQPAWMTMPSSASKRMMPSSSAASTRHNQLWSLLLLLPALLLFHFKQELL

SEQ ID NO: 130460 - protein, 956 aa, Oryza sativa
  Clone ID: PAT_MRT4530_3261C.1.pep
MVGQLGGPSTLIVCQHHPYHPSNFNNDYNGGSHNNSKQHNHNSTPPPLMAPAQSDLPAMLAQLEQLKKESGGKPGPCFNCGELGHFADKCPKPRRAGPRFVQAHVNHASTEEAQAAQEVVRGTFPVKSIPATVLFDSGATHSFISKKFVGMHGLIREELSTPMRVHTPGNSSTSVQFSPSITIEIQRSPFLANLILLESKDLDVILGMDWLTKFKGVIDCANRTVTLTNEKGETVVYKSLVSPKQGVSLNQIEVEIPVVIEEKNSRKLEDIPIVCEYPEVFPEDLTTMSPKREIEFQIDLAPGTAPIYKRPYRMAANELAEGAPVIFVEKKDKTKRMCVDYRALNEVTIKNKYPLPRIDDLFDQLKGAKVFSKIDLRSGYYQLRIREEDIPKTAFTTRQLLKKDEKFKWTAECDKSFEELKKKLVSTPVLILHDQMKDFQVYCDASRHGLGCVLMQEGRVVAYASRQLRPHEGNYPTHDLELAAVVHALKIWRHYLISNRCEVYTDHKSLKYIFTQPDLNLRQRRWLELIKDYDMSIHYHPGKANVVADALSKKSYCNALCIEGMCEELQQELEHLNVGVIEHEFVAALEARPTLVDQVRAAQVNDPEIAELKKNMRVGKARDFHEDEHGTIWLGERLKRLAELYLSRIMCLLGVPKKIVSDRGSQFTSKFWQKLQEELGTRLNFSTAYHPQTDGQTERVNQILEDMLRAYALDFGGAWDKSLPYAEFSYNNSYQASLQMAPFEALYGRKCRTPLFWDQTGERQLFGTEVLTEAEEKVRTVRERLRIAQSRQKSYADNHRRELTFEAGDYVYLRVTPLRGVHRFQTKGKLTPRFVGPYKILERRGEVAYQLELPSNMLGIHSVFHVSQLKKCLRVPEEQASPDQIEIQEDLTYVEKPTRILETSERRTRNKVIRFCKVQWSHHSEEEATWEREDELKAAHPHLFASSSKSRGRDSV

SEQ ID NO: 130461 - protein, 116 aa, Oryza sativa
  Clone ID: PAT_MRT4530_32620C.1.pep
PFAHSCLWHHAAEELDEVGGTGGQRRCELRRGGGVEPEPSSGGTAPGRERSSEPRRRRDVVVRPRPCVHGVLLLPSCLSCHRRRSNVLLDAVAVGARSCDTPITILWFSSSNIDPH

SEQ ID NO: 130462 - protein, 833 aa, Oryza sativa
  Clone ID: PAT_MRT4530_32621C.1.pep
MAFHYAAMPSSSSSSLSGVSPQPPLHLPRLRSPHQASRRLSALPFSRALPLPLRLRLRIPRPQLPPLPLAFSHGGGGDNDGDDNNNNGGGDGEGDGGAPDNRREALFVLAQLGRKLESLPSDLAAAVEGGRVTGEIVRRFAEMEGSALLRWLLQFQGFRERLLADDLFLAKLAMECGVGVIAKTAAEYEKRRENFVKEIDIVIADVVMAIVADFMLVYLPAPTVSLQPPLATNAGHIANFFHNCPDNAFQIALAGRSYSILQRLGAILRNGAKLFTVGTSASLIGTGVTNALIKARKAVDKELDDEVEDIPVLSTSVAYGVYMAVSSNLRYQILAGVIEQRMLEPLLHNHKLLLSALCFAVRTGNTFLGSLLWVDYASLSISSYFPKPLPPRSRRPSFPPLVQQPIAMSSWPPPPPVQLSMQFLPPRPEPAAAARTSICCTCGVPMAPNAANTCALCIRSRVDIAAGVPRHADVVHCPSCSSYLHPPRLWLRAAPESPELMSLLLRRVDRHIARLGVALAAAEFVFTEPHSRRLMLRLRLRGEVLHGSGGGVTLEQGHVVEFAVHDRLCDACAMARARAAEPPDQCGWSAVVQLCPVCRDDLVFLPKEASRDLGGLGPIVLCVKVTNALALLDTSTLRVVHLGIKEYDRCRLEPALTSRQLVEYVVLDVDHEPEPAAGVAYAQVARASDLGKNDTIFTVRTHLGHVLNAGHRALGDDLYGANVNNHDVESHGLPDAVLVKKINEKGSTRRQLQDGDGCRRRKRDGDEMEEIAMGIGCIDLNPPDEKELDELLRGPHNLRASAVTSPCLCQAHMSPHVSDNGTMKSTTEDLNPI

SEQ ID NO: 130463 - protein, 108 aa, Oryza sativa
  Clone ID: PAT_MRT4530_32622C.1.pep
LIGIYHDWCEAFSTYPRTYDLIHANHLFSLYKNKCNADDILLEMDRILRPEGAVIIRDDVDTLIKVKRIIAGMRWDAKLVDHEDGPLVPEKVLIAVKQYWVTNSTSTH

SEQ ID NO: 130464 - protein, 120 aa, Oryza sativa
  unsure (1)..(120): unsure at all Xaa locations
  Clone ID: PAT_MRT4530_32623C.1.pep
PLASHAQQSNDSLRSIYRCSQGFPYLYENSTSSDMTMTTLFIHQXAKYQLQTNLTANLEGISGPMSTCWKANGXYFHMVLVPRQNSFLNVVDRKCKPRITLLGKANRVLVWLITRGDVVL

SEQ ID NO: 130465 - protein, 355 aa, Oryza sativa
  unsure (1)..(355): unsure at all Xaa locations
  Clone ID: PAT_MRT4530_32624C.1.pep
MMNGGGGGRVPTWRERENNRRRERRRRAIAAKIYAGLRAYGNYTLPKHCDNNEVLKALCNEAGWTVEPDGTTYRKYWSLDRIEAAHVKKGLVKEAIMETKGCKPPASELADQLGRSPSASPCSSYQPSPRGTSSFPSSGSSSQITLGGGGGGEGSSLIPWLKTLSSAGVGIGGGSSSKFPAHYSYFGGGSISAPVTPPSGSPPRTPRLKTAAWEEYHHHHAGSVLPPWATVGASYAYAASSSLPNSTPPSPRRKVAXPPPPPGGGNDAAAWLAGFQISSAGPSSPTYSLVAPPPNPFGAAAAAAGSSSRVMSGACSPVAGGDVQMADAARREFAFGGEGGKMTGLVKAWEGERIH

SEQ ID NO: 130466 - protein, 56 aa, Oryza sativa
  Clone ID: PAT_MRT4530_32625C.1.pep
MGATANHSLAVPKIGCTTDPPLSLAKIDAAAPIEEWLAPSRQPLWRRPPADVAGRC

SEQ ID NO: 130467 - protein, 187 aa, Oryza sativa
  unsure (1)..(187): unsure at all Xaa locations
  Clone ID: PAT_MRT4530_32626C.1.pep
LGGIGEGGGDHLCVAMKIGGSSESSERRMREGAGLILALHEERPAVRLYAMENTTNLLLLAGEKAVXAHLTPDLQRDPRNXVRSSYITTAERPSLPRSRLHTIPDELEQLLHGIAPMNDLSLITTDYLAXLGQSMSTRIYDGHVIXIVVKALHYYAVDVGYITTLDLXNSGMLNYCYPAVARRLHAD

SEQ ID NO: 130468 - protein, 86 aa, Oryza sativa
  Clone ID: PAT_MRT4530_32627C.1.pep
LSPNYKIVIWHGVVKAHAQTYRVVRHRLLERYSQLTKTLDLARLSTSELNTSQDGHTQLNRPIFHIPAEQLNMKHICCRFGLKPVP

SEQ ID NO: 130469 - protein, 68 aa, Oryza sativa
  Clone ID: PAT_MRT4530_32628C.1.pep
FFFISFLIWEVAAAIMPGHCVPGHALLLPLKHWSLVWSYSLHHFVFATIFFDFVSSKHCVSSFSSFSS

SEQ ID NO: 130470 - protein, 82 aa, Oryza sativa
  unsure (1)..(82): unsure at all Xaa locations
  Clone ID: PAT_MRT4530_32629C.1.pep
LSPTASEFITYDSXDAVDEALHKNLNELTGTMVAAKRACPRLHSTGPVARTPAVGLTYAMRRLHSSLKASNQGYNPNPMGSY

SEQ ID NO: 130471 - protein, 265 aa, Oryza sativa
  Clone ID: PAT_MRT4530_3262C.1.pep
MAASATTTILVAAMLVVMAVESPVANGQAAAAAPAPAPAAPKTITAILTKAGQFTKFLQLLQSTQAGEQINNQIKGKASSSGGLTVFAPPDNAFAALPTGTLNKLSDQQKTSLVQFHVVSALLPMAQFDTVSNPLRTQAGETAAGKYPLNVTAEGSRVNISTGVVNATVDNTLYSGDRLVVYQVDKVLLPWALYGPPVPAPAPSPADKAKKKAGPVGVADAPAADTAAGTTTTTVATASEAAARGTVRRGLVGVAVAVAVAWCGM

SEQ ID NO: 130472 - protein, 161 aa, Oryza sativa
  Clone ID: PAT_MRT4530_32630C.1.pep
MEATSRASNTNNHPAATANEGMLSSSSASTTRLSTGRQPLLAPGRRQLLLRLPRRDGDSRSARIRRSRPSPSRVRWKRCDRLMRALRLSPFRAREAEEKLAAAGASNGCLPVDGRVVAANEKVRRRRRVVVGVADARCGLHGTAAASRRRGAALLLSRLTR

SEQ ID NO: 130473 - protein, 379 aa, Oryza sativa
  Clone ID: PAT_MRT4530_32631C.1.pep
MEATSRVSNTNNHPAATTNLLVGGDDAAVHGETAVARPCCRQLLLRLPRPGRRQPQRTHQAVAAFPSQCFSSRQTLRWRAQRQQQQVSSSHRRPWGPSPLRRCWKNRRTQDGDGRDSLMRALRLSPSRRGRRRRSCRLPGASNGCLPVDSRVVDVRRREGEHPLIRRRCGVVVGVAGAGCGLHGTAASPLRPPPAAVVAPLSSSPASPRWPPPQPPNSLPSAALLLSRLAPAASSPAAEQFAFHDDHVVTCLATTARGGHRPTPQRCPWRAPRRPTACGCRAQGRVPHRGQLGAHHEGGVAPSRVHNYSVTDDDCLVHLNLGRVTQPVGISHVGRPPSFHDKAFRKPTQVYHMPTRGVPDHTVPGSPGVLPDTTPANPH

SEQ ID NO: 130474 - protein, 374 aa, Oryza sativa
  Clone ID: PAT_MRT4530_32632C.1.pep
MAVPLVLVVLPLGLLFLLSGLIINAIQAVLFLSIRPFSKSLYRRINRFLAELLWLQLVWLVDWWAGVKIQLHADDETYKAMGNEHALVISNHRSDIDWLIGWILAQRSGCLGSTLAVMKKSSKFLPVIGWSMWFAEYLFLERSWAKDEKTLKWGLQRLKDFPRPFWLALFVEGTRFTPAKLLAAQEYAVSQGLPAPRNVLIPRTKGFVSAVTIMRDFVPAIYDTTVIIPKDSPQPTMLRILKGQSSVVHVRMKRHAMSEMPKSEDDVSKWCKDIFVAKDALLDKHLATGTFDEEIRPIGRPVKSLLVTLFWSCLLLYGAVKLFLWTQLLSTWKGVGFTGLGLALVTAVMHVFIMFSQSERSSSAKAARNRVKKD

SEQ ID NO: 130475 - protein, 596 aa, Oryza sativa
  unsure (1)..(596): unsure at all Xaa locations
  Clone ID: PAT_MRT4530_32633C.1.pep
MAGLIPPFSRFFHEVLDFYEIHALHLAPNSVMTLAIFAHLCEMFVGVRPTMRLFQSFFVPQLLQGAVVGGCYFQPRPGTAGQYIESHLRKKWEDWKKDWFYTALPNHPQLRLTGRPERSAAWLAVSELGEEYDAVRDHLRGLRSQGLTGAMGRRAVDDMVEVGCKMRQAQLAEIQACEETLDSVMREMEEERQAALIASSILDEALGDIRLQYEAHAEDLAKRVENARGVLVAAAAQERRASEADASLRARTAALEAERKALDERARSAQEFEATIRRCIEVLDRNQREQDARSRDQAQRAQELEGRAQALEERAHLLDQQESILAAHERTATEAEASLRLREEAAAERDRTTLAAKALAARRAEELWLWEEVCRERDAALAEREAEVNRREVAXRRLGEQLAKHEEAVAGREARHLESARAERAAMAAXGASELEAREKDLAAGGQPGGAELVSQLTAAQSTLADLGRLVQDQAGEIAALRLTHEIGPGQLSDAIDWLERAGHRVGIFVRRDRKLPPTQPALVIRLDGLAADLERLEEEVGEIVKSSLASLARAAVELVLASHQARHPDFVPWRALEDFPPGTEARARAIVPSCL

SEQ ID NO: 130476 - protein, 169 aa, Oryza sativa
  unsure (1)..(169): unsure at all Xaa locations
  Clone ID: PAT_MRT4530_32634C.1.pep
QEAAELREAEATGEQASSSREAKTIGEKGTPPAEEAAWDLGAERTNRRRXGPPEETKSNQTMHRRGCGRTPETLLARMEISAAGRRAEPARRLGTGRSXRLGQGGANTADEITPPPPSNSNHRKRAGRGXARKRRKAHRRSPAAGGVGGRRPPRGRLSRSNGGDMAVFH

SEQ ID NO: 130477 - protein, 58 aa, Oryza sativa
  unsure (1)..(58): unsure at all Xaa locations
  Clone ID: PAT_MRT4530_32635C.1.pep
MESSRGKPGLNGSGGGXPFGXYSSRRGYYTGAGXAXPXLDDGSRATTVDPCCVVLRVS

SEQ ID NO: 130478 - protein, 458 aa, Oryza sativa
  unsure (1)..(458): unsure at all Xaa locations
  Clone ID: PAT_MRT4530_32636C.1.pep
MAQDAGDAVLPASCITADRHLSLPRKIMPEGAAVRAGESRPXPQYPERSVHLLSFAMAGLVPPFSRFFHEVLDFYEIHALHLAPNAVMTLAIFAHLCEMFVGVRPTMRLFQFFFVPQLLQGAVVGGCYFQSRPGTAGQYIESHLRNKWEDWFYTALPDHPRLRLPAGPPERSAAWLAVSELGEEYDVARDRLRGLRNQGLTGAMVFGDYFRRRIAPLQERSREAWEYTGPNDPMRTHLRSPCRHHCALGTSALQMASQLTAAQSALADLGRLVQDQAGEIAALRLTNEIGPGQLSDAVDRLERAGRRVGISVRQDRKLLPTQPALVFRLDGLAADLERLEEEVGETVKSSSASLARAAVELVLASYQARDPDFVPWRALEEFPSGTEARAREQVREAADVIVSNFKGSAPRFTSGLASDEESGSEDEESGSGDGGDDVGGEDWDDVVNDTGLGGSGTP

SEQ ID NO: 130479 - protein, 67 aa, Oryza sativa
  Clone ID: PAT_MRT4530_32637C.1.pep
QNHWLKGLNKNPSYYGSHQQPKKFCTVCLHLCMLKITIKAVGFCIVPCHLTTPLVRDDSLHTVALVH

SEQ ID NO: 130480 - protein, 134 aa, Oryza sativa
  Clone ID: PAT_MRT4530_32638C.1.pep
MGPYTLDSGKAVLARNKARVLIEQDYVLSIYLSKHNILSTYDERAGTLGSEVGTLVFQPHRHFEFSGALFTYSLYELQVMGPGRVNPRGAIGFNPTGKAPLEPYVNFQPGNPRNPFPATKGFLLPGFRGFLLPR

SEQ ID NO: 130481 - protein, 165 aa, Oryza sativa
  Clone ID: PAT_MRT4530_32639C.1.pep
MSSSSSSLKALVAFMAVATVAELAAGSKTWAIKWASGGNYGDWSSKNTVAVGDSVVFTYGTPHTVDELSAADYTACSFAAPLSSDAGGSTTVVFDKPGTRYFACSSGSHCSMGQKVAITVSNSTAPPSSSKGGSSSYGAAAGGGAELASKLVVGLAVGAGAILAL

SEQ ID NO: 130482 - protein, 739 aa, Oryza sativa
  Clone ID: PAT_MRT4530_3263C.1.pep
MEKPKSPLNPFHCICSLQLDLFRENWDLFLWFKGKILVARLKVKKQVDEQLQKGYIRPSTSSWGAPVIFVEKKDKTKRMCVDYRALNEVTIKNKYPLPRIDDLFDQLKGAKVFSKIDLRSGYHQLRIREEDIPKTAFTTRYGLYECTVMSFGLTNAPAFFMNLMNKVFMEFLDKFVVVFIDDILIYSKSEEEHEQHLRLVLEKLKEHQLYAKFSKCDFWLTEVKFLGHVITAQGVAVDPSNVELVTKWTPPKTVSQIRSFLGLAGYYRRFIENFSRIARPMTQLLKKDEKFKWTAECDKSFEELKKKLVSAPVLILPDQMKDFQVYCDASRHGLGCVLMQEGRVVAWLELIKDYDMSIHYHPGKANVVADALSRKSYCTALCIEGMCEELRQEFEHLNVGIVEHGFVAALEARPTLVDQVRAAQVNDSEIEELKKNMRVGKARDFHEDEHGTIWLGERLCVPDDKELKDLILTEAHQTQYSIHPGSTKMYQDLKEKFWWVSMRREIAEFIALCDVCQRVKAEHQRPAALYGRKCRTPLFWDQTGERQLFGTEVLAEAEEKVRIIRERLRIAQSRQKSYADNRRRELTFEAGDYVYLRVTPLRGVHRFQTKGKLAPRFVGPYKILERRGEVAYQLELPSNMIGIHDVLHVSQLKKCLRVPEEQADSEHIDIQEDLTYVEKPVRILDTSERRTRNKVTRFCRVQWSHHSEEEATWEREDELKAAHPHLFTNFSESRGRDSV

SEQ ID NO: 130483 - protein, 77 aa, Oryza sativa
  Clone ID: PAT_MRT4530_32640C.1.pep
MAVVTTGGPVWRRWSGGADELCSLVVLHQSGEVAEQVINDVCPAIVQALLLEPSFKLHIKGFLRVQYINAGVFAGFP

SEQ ID NO: 130484 - protein, 47 aa, Oryza sativa
  Clone ID: PAT_MRT4530_32641C.1.pep
GFIQDHFGQRFAPKLLPCIYHGELDAVFVLCQSCCPASSFRLVSQPL

SEQ ID NO: 130485 - protein, 97 aa, Oryza sativa
  Clone ID: PAT_MRT4530_32642C.1.pep
MGREEVRAQPVKCALDAFVAGGGAGGDSAGSVGEDVGTDTVLVRGHLTPRDRNGAGPSWAETASPPTPDYIPRPWPRLEMWAKSGPVPDPSRAPQPD

SEQ ID NO: 130486 - protein, 262 aa, Oryza sativa
  unsure (1)..(262): unsure at all Xaa locations
  Clone ID: PAT_MRT4530_32643C.1.pep
PPWAYLSHFSVWKNDLLRQRXLGFTVDRVHRNGPWNERLRSNLNXTNGRDRSNLPRXTADXGADVDDDVITGGGSXTSCSPVNDSAAAQMDHTYGXEGDAMNSPRVRTTTDSNRRRRRRGPGGGGIPVDEDGDAPAIFGGNLANXDGGLPEQRRRLEQRRRTTGLAAATAAHGLMRRRYYKRRRAKVKVAANKGGLGGPFVGARGWRXRPTASGGGDGRIRVGEEKXIRIELESDDFQTILDEVSIGEKIEEIKGIISPLPI

SEQ ID NO: 130487 - protein, 180 aa, Oryza sativa
  unsure (1)..(180): unsure at all Xaa locations
  Clone ID: PAT_MRT4530_32644C.1.pep
MAQACLFCGKPKEDANAYLQQFLLSCSTLGKAAGMRHRPSSSWDGRVAHPAEFLQRINNGLTLSSWDQLDAAAGGAPFSKMVRDTTDLIEKRLSNMGWSEKQHKPVNALDLLMKRLDNNEKDAKQGTIKALGSHMACEVCGNDGHFGTNCPKTCEXSKLTNNNNGYHPQGDQGWSIASWG

SEQ ID NO: 130488 - protein, 550 aa, Oryza sativa
  unsure (1)..(550): unsure at all Xaa locations
  Clone ID: PAT_MRT4530_32645C.1.pep
MVAGRVKAAMGFQRSPKVSKSPAHVGRTPETPGRGSSSGSPAPGGSASKAVSFARSLGVHFPRSSAQVQPARAPPEVADLLRAIEQLQERESRLRVELLEQKILKETVAIVPFLEAELAAKSSELEKCKDTAARLESENMRLCAELDAAVLEVTSRKQRIVHMEKEMAELKKQQEAAAADADDCSSTASVSHEQPESASSAANPASLVQRGPPIPPPPPPVPPAAFKSKSYSASSRVSLPSTSAPSPSSSTSTSPTYSCSSSDTVTTPXNRKPELSKLTPIPPPPPMPALSVWSRAAAPPPPPPPPPARRTSGAASPAASGPRVTRVPEVVEFYHSLMRRDSRSRDGSGGGETANGGGVAATRDMXGEIENRSAHLLAIKSDVERQGDFIRFLIKEVEGAAFVDIRXTVVTFVKWLDNELSRLVXHGVYNLARFRDGATGRYSRFQIPCEWMQPDTGIVSQIKLQSVKLAMKYLKRVSSELEAIKGGPDEEELMLQGVRFAFRVHQFAGGFDVDTMRAFQELKEKASMCRIQRQEQNRHLRRQQKLVARA

SEQ ID NO: 130489 - protein, 78 aa, Oryza sativa
  Clone ID: PAT_MRT4530_32646C.1.pep
AHVGNIHAHNLPCILLQGLPPVSKFSTTLGKDSVQRRVSRGQLLIIPLHLCSCKEGSKRRMRLHVAVQRPIPRLYGKP

SEQ ID NO: 130490 - protein, 115 aa, Oryza sativa
  Clone ID: PAT_MRT4530_32647C.1.pep
QDPHRPGAHRRLHHPVRPRRVQPHRHERPEADRGDHLRVRDARSNPRRLIGIHHPPGGAALALSSIVTGNLEGLSRMLVLIPLRTEDIMEEAQIHMTITTTFFSAFLFIFWPEPM

SEQ ID NO: 130491 - protein, 49 aa, Oryza sativa
  Clone ID: PAT_MRT4530_32648C.1.pep
CFFFFFFFFFFFFFFFFFFFFFFFPGKRGTTSTFLLKRAGLGSRDPETF

SEQ ID NO: 130492 - protein, 309 aa, Oryza sativa
  Clone ID: PAT_MRT4530_32649C.1.pep
MRPPRGRGFGRGGGGRGDGGGRGGGGGRGFGRVGDSGGRGGRGGRGGRTPRGRGGGRGGGGRGGMKGGSKVVVVPHKHDGVFIAKAKEDALCTKNMVPGESVYGEKRISVQNEDGTKVEYRVWNPFRSKLAAAVLGGVDNIWIAPGTRVLYLGGASGTTVSHVSDIVGPTGLVYAVEFSHRSGRDLVNMAKKRTNVIPIIEDARHPARYRMLVGMVDVIFSDVAQPDQARILALNASYFLKNGGHFVISIKANCIDSTMPAEAVFASEVEKLKADQFKPSEQVTLEPFERDHACVVGGYRMPKKQKGTS

SEQ ID NO: 130493 - protein, 3350 aa, Oryza sativa
  Clone ID: PAT_MRT4530_3264C.1.pep
MGSKMAGHPPNHRGEGMIDFVAELARMTLVVGYPNAPEYTTIPQLSGELPHRVRLEVHGYVGTCLANMVVEASGGTADHACQEAAYLMMARLRERHNYIFHDTAYRFHPRRANGDDVSSFRPTAGENDTTFGHMCAVMRGLDRMHSDLHKATKALNDGKLMRIVALKDEIARLKRENAQLKGLPAPGGVRIRTTPRKTTTAPVRIQLAPRNPPPSAAPAAPPVPPAAPAVPAAPAPASALSFAPASAARGPASGNGGCLFGMVYTRNGSRATGEGSNGEERADGVHPSSDSGNGPPPLPENPTLAQVMAHQTQMMAAMMQQMQQQHQQMHQRMMQHVEQQHQQFGPPPPQSKLPEFLREKVAFATHQLQGPASAWWDNHMATRPPGTEVTWAEFCRSFRKAQVPDGVVAQKKREFRALHQGNRTVTEYLHEFNRLARYAPEDVRTDAEKQEKFMAGLDDELTNQLISGDYADFERLVDKAIRQEDQRNKMDRKRKAAQFRAPQGSHQRPRFAPGQQGGPTTMIVRQHRPFNPSNFPQGASGSQNHHGGQSNRGAASRPPMAPAQSGQPAQAKKEIGAKPGSCFNCGELGHFADKCPKPRSAGPRFIQARVNHASAEEAQAAPEVVLGTFPVNSIPATVLFDSGATHSFISKKFVGMHGFIREELSTPMRVHTPGNSSTSVQFSPSITIEIQRSPFLANLILLESKDLDVILGMDWLTKFKGVIDCANRTVTLTNEKGETVVYKSPDSPKQGVSLNQIEAEIPVDTVERNLRKLEDIPIVSEYPEVFPEDLTTMPPKREIEFRIDLAPGTAPIYKRPYRMAANELAEVKKQVDEQLQKGYIRPSTSPWGAPVIFVEKKDKTKRMCVDYRALNEVTIKNKYPLTRIDDLFDQLKGAKVFSKIDLRSGYHQLRIREEDIPKTAFTTRYGLYECTVMSFGLTNAPAFFMNLMNKVFMEFLDKFVEVFIDDILIYSKSEEEHEQHLRLVLEKLREHQLYAKFSKCDFWLTEVKFLGHVITAQGVAVDPSNVESVTKWTPPKTVSQIRSFLGLAGYYRRFIENFSRIARPMTQLLKKDEKFKWTAECDKSFEELKKKLVSAPVLILPDPMKDFQVYCDASRHGLGCVLMQEGRVVAYASRQLRPHEGNYPTHDLELATVVHALKIWRHYLIGNRCEVYTDHKSLKYIFTQPDLNLRQRRWLELIKDYDMSIHYHPGKANVVADALSRKSYCTALCIEGMCEELRQEFEHLNVGIVELGFVAALEARPTLVDQVRAAQANDSEIAELKKNMRVGKARDFHEDEHGTIWLGERLCVPDDKELKDLILTEAHQTQYSIHPGSTKMYQDLKERFWWVSMRREIAEFVALCDVCQRVKAEHQRPAGLLQPLQIPEWKWEEIGMDFITGLPRTSSGHDSIWVVVDRLTKVAHFIPVHTTYTGKRLAELYLSRIMCLHGVPKKIVSDRGSQFTSKFWQKLQEELGTRLNFSTAYHPQTDGQTERVNQILEDMLRACALDFGGAWDKSLPYAEFSYNNSYQASLQMAPFEALYGRKCRTPLFWDQTGKRQLFGTEVLAEAEEKVRIIRERLRIAQSRQKSYADNRRKELTFEAGDYVYLRVTPLRGVHRFQTKGKLAPRFVGPYKILERRGEVAYQLELPSNMIGIRDVFHVSQLKKCLRVPEEQADSEHIDIQGDLTYVEKPWVVLSLALLFPTSEFEFGSDEGVTTIIEKYDGSVNPAEFLQIYTTGIEAAGGDDRVMANFFPMALKGQARGWLMNLPPASVHSWEDLCQQFTTNFQGIYPRPDEEADLHAVQRRDDESLRSYIQRFCQVRNTIPCIPAHAVIYAFRGGVRHNRMLEKIASKEPQTTAQLFELADRVARKEEAWTWNSSGSGVAAPAAPGSAARSGRRDRRRKKGSARSDDESHVLAVEGASRAPRKGRPASNKKKEAGAPSRERPTGKWCTVHNTSLHDLADCRAVKSLAERTRKWEEEKRQERREGKTPAAPAGNRRGEAKQKATAEDIDDGDDDLGFQEPEATVATVDGGACAHASRRSLKAMKRELLAAAPTHEATWRARWSEVALSFDQTDHPPCVARGGQIAMPLGHIDLPVTFGGSANFCTERVDFDVADLSLPYNAVLGRPALVKFMAAVHYAYLQMKMPGPGGPITVHGDLKVTLACMEQRADHLAAAYKPAGGDERLSTSVPAAPRQRMVTCDEVSVKEEDALVSLLRANTDVFAWRPADMPEVPREVIEHRLAVQLGARPVRQKVRRQAPERQAFIREEVARLLEAGFIREVIHPEWLANPVVVPKANGKLRMCIDYTDLNKACPKDPYPLPRIDQIVDSTAGCDLLCFLDAYSSYHQIRMAREDEEKTAFITPIGTYCYTTMPFGLKNAGPTFQRTTRISLGSQIGRNVEAYVDDLVVKTRNQETLLSDLAETFKSLRSARIKLNPDKCVFGVPAGKLLGFLVSARGIEANPEKIRAIERMHPPSMLRDVQCVTGCMAALSRFISRLGEKALPLFKLLKRSGPFTWTEEAERAFTQLKAYLSSPPVLVAPEPDEPLLLYLAATPQVVSAALVVERDKDNPHSAHPHPVSTRPGREQGGEAPEPNGGPGPRRPELALRLLVRRCQVVGTEAECAPCGLSDEERPGDAAPGEEDRPRRKMQRPVYFVSEALRDAKTRYPQAQKMLYAILMASRKLRHYFQAHRVTVVTSYPLGQILHNREGTGRVVRWAIELSEFDLRFEPRHAIKSQALADFVAEWTPAPEPVSAPKASSGPSQLPHTAYWGAGAGVTLTSPSGDVLRYLVRLDFRATNNMAEYEGLLAGLRVAAGLGIRRLLVFGDSQLVVNQVCKEYQCSDPQMDAYVRQVRRMERHFDGIELRHVPRRDNTVADELSRLASSRAQTPPGAFEERLAQPSARPDPLGETDAPERPPRPVGVQASGPEGSAPSSPRLIAWITEIQAYLADKTLPEDREGSERVRRISKRYVLVEGTLYRRAANGVLLKCIPREQGVELLADIHEGECGAHSVSRTLVGKAFRQGFYWPTALNDAVDLVRRCRACQFHARQTHQPTQALQTIPLSWPFAVWGLDILGPFRRAPGGFEYLYVAVDKFTKWPEAYPVIKIDKHSALKFIRGITARFGVPNRIITDNGTQFTSELFGDYCEDMGIKLCFASPAHPRSNGQVERANAEILKGLKTKTFNILKKHGDSWIEELPAVLWANRTTPSRATGETPFFLVYGAEAVLPSELTLRSPRVTMYCEADQDQLRRDDLDYLEERRRRAALRAARYQQSLRRYHQRHVRARSLCVDDLVLRRVQTRAGLSKLSPMWEGPYRVIGVPQPGSVRLATGDGTELPNPWNIEHLRRFYP

SEQ ID NO: 130494 - protein, 176 aa, Oryza sativa
  Clone ID: PAT_MRT4530_32650C.1.pep
MASQRVFQLGLRRAAAPSLRVQPAGRMVQRRLAATEHASQSEAAEILAKQRVNRPVSPHLAIYKPQITWYASSLNRITGITLSCSLYLFGIAYLIAPYTGWHLETQSMVATVAAWPAAVKAGLKAFYAFPFFFHSFNGLRHLAWDVGIGFKNQQVIRTGWTACGLTVAFSLYYTPR

SEQ ID NO: 130495 - protein, 197 aa, Oryza sativa
  Clone ID: PAT_MRT4530_32651C.1.pep
MARQGSTTRRPRPTTSKCIAAALLAIVVLLVIIVILWLTVRPAKPLLVYVDHAAVTGFNFTSGGSLNGTFDITLRAYNQNKRAAVWYKSVEVGVWYGGTYLAGAVAPGFDLPPLNVKRIDVAAPAVRAALPRGVEATVKKDRSDGKLPVDVHIKGKVRFRYGLVRTRRYKLRASCSPVVVDFSSPSSFDRVNCHVHI

SEQ ID NO: 130496 - protein, 58 aa, Oryza sativa
  Clone ID: PAT_MRT4530_32652C.1.pep
PQETTSFEMVQSNTKQMKPYFKNQATLFGGWNSNQSYMSFGDRNTSQSYVNSIVIIVL

SEQ ID NO: 130497 - protein, 39 aa, Oryza sativa
  Clone ID: PAT_MRT4530_32653C.1.pep
ISKCLLKNVHQVTQNLLPKDRAICSTWKKLLTHPTHFSS

SEQ ID NO: 130498 - protein, 170 aa, Oryza sativa
  unsure (1)..(170): unsure at all Xaa locations
  Clone ID: PAT_MRT4530_32654C.1.pep
KLKKKGYEVLYMVDAIDEYAVGQLLAFKLLKLDESEDEKKRQEELKEKFEGLCKVIKEVLGDKVEKVVVSDRVVDSPCCLVTGEYGWTANMERIMKAQALXDSSMAGYMSSKKTMEINPENAIMDELRKRADADKXYKSVKTLVILLFXTXXXTSGXSXXPXTLDQVXRF

SEQ ID NO: 130499 - protein, 79 aa, Oryza sativa
  Clone ID: PAT_MRT4530_32655C.1.pep
YSSCARLAEGTKAHCLLLGISLFCGPHSSAISEMVEISLFGIPQLFGLCLHIAEISLLFTSLIIGPGRAEPAPCAEAEA

SEQ ID NO: 130500 - protein, 59 aa, Oryza sativa
  Clone ID: PAT_MRT4530_32656C.1.pep
MPPGSSVASAVEKLQAAAQDAANSSSRSAAAFSEQAHQVLVPRAAGYTLLSSSLALHLL

SEQ ID NO: 130501 - protein, 449 aa, Oryza sativa
  Clone ID: PAT_MRT4530_32657C.1.pep
MASETETFAFQAEINQLLSLIINTFYSNKEIFLRELISNSSDALDKIRTKIAELLRYHSTKSGDELTSLKDYVTRMKEGQSEIYYITGESKKAVENSPFLEKLKKKGYEVLYMVDAIDEYAVGQLKEFEGKKLVSATKEGLKLDESEDEKKRQEELKEKFEGLCKVIKEVLGDKVEKVVVSDRVVDSPCCLVTGEYGWTANMERIMKAQALRDSSMAGYMSSKKTMEINPENAIMDELRKRADADKNDKSVKDLVMLLFETALLTSGFSLEDPNTFGTRIHRMLKLGLSIDEDESAEADADMPPLEDDAGESKMEEVKYTFRETRLHSCCRSSGGLAMEATKETQQQQQQRKPDAGDTVQLPMDTSPYVQYKKDDGLEDYKLRAYGARGHLPVSDVPHGGCGTDAPTIPGTAVPVATQRRHQQGDTAAAAAGTGRVDTATDAINHHGVP

SEQ ID NO: 130502 - protein, 52 aa, Oryza sativa
  Clone ID: PAT_MRT4530_32659C.1.pep
MSAHMCPRGISSRTRTTAPFAKGLGPERLVVTPVIHGLSRVKGRDLEEETYS

SEQ ID NO: 130503 - protein, 121 aa, Oryza sativa
  unsure (1)..(121): unsure at all Xaa locations
  Clone ID: PAT_MRT4530_3265C.1.pep
WLAAIGTTVAHIQPRDSNIKPHKFXNQIQPPAAALTSNSPQICIRAPFWAHEYLIESSRSPLSNGSSLISKFXVSRRQIEKQDVAPPVIGLWACNFVWDLSLSRAHVGCAPTWWSTTLGSL

SEQ ID NO: 130504 - protein, 73 aa, Oryza sativa
  Clone ID: PAT_MRT4530_32660C.1.pep
MGGGGGGTTFTIPHNKRWHTVAGKGLCAVMWFWVFYRAKQDGAVLLGLRHPWDGHDDHSHGHGHEHEGSSSPH

SEQ ID NO: 130505 - protein, 487 aa, Oryza sativa
  Clone ID: PAT_MRT4530_32661C.1.pep
MKLKMNKACDIASISVLPPRRTGGSSGASASGSVAVAVASQPRSQPLSQSQQSFSQGASASLLHSQSQFSQVSLDDNLLTLLPSPTRDQRFGLHDDSSKRMSSLPASSASCAREESQLQLAKLPSNPVHRWNPSIADTRCQVTNEDVERKFQHLASSVHKMGMVVDSVQSDVMQLNRAMKEASLDSGSIRQKIAVLESSLQQILKGQDDLKALFGSSTKHNPDQTSVLNSLGSKLNEISSTLATLQTQMQARQLQGDQTTVLNSNASKSNEISSTLATLQTQMQADIRQLRCDVFRVFTKEMEGVVRAIRSVNSRPAAMQMMAVCKFMTQDQSYQVPVSNGWTQINQTPVAAGRSPMNRAPVAAGRLSAHLVYPAKVTDLKPKVEQGKVKAAPQKPFASSYYRVAPKQEEVAIRKVNIQVPAKKAPVSIIIESDDDSEGRASCVILKTETGSKEWKVTKQGTEEGLEILRRARKRRRREMQSIVLAS

SEQ ID NO: 130506 - protein, 50 aa, Oryza sativa
  Clone ID: PAT_MRT4530_32662C.1.pep
LFTGSVEPKRHDWLIGLPLSSGNKVHFTFFLVCGVSGGTHPGVRTQYFLP

SEQ ID NO: 130507 - protein, 76 aa, Oryza sativa
  Clone ID: PAT_MRT4530_32663C.1.pep
SIKKRIEYLNLLIAFPTRGPPGPRRSPPGGLGPSRRGQCGGSRGDEEVPSFLGWSASRGGGKSLGFLRRPGEGRGS

SEQ ID NO: 130508 - protein, 435 aa, Oryza sativa
  unsure (1)..(435): unsure at all Xaa locations
  Clone ID: PAT_MRT4530_32664C.1.pep
MASPAKERDGDGRRAHATMVGVQFINAGHHLLANQARPLGVNRFVLCVFLRVRALAVHARLAFLRHLVSSSQDRTPLTGPLLTTFFSCAVSATLAPHMLLLLSLTYTYPPSSSPIXCSIPVFTFILAALMGICIQVWFSSXTLILCTHAGRAQIWGTIVWVMRTVIMMLYRGPALFGSGELELDDAHSHGVIADMSQPEPVGPLSIVFGLQKWHIGVLCLTGNCLCMATYLAFQAPILMKYPCSLSLTAYSYFFGAVLMVISGVFATNCKEDWTLTRSEFGAVVYAGFISSALNTGLLTWANKILGPAMVSLYMPLQPVVSALLSKFFLGSSVYLASIIGGFLIISGLYLVTWARHREKLTIGVPYETCASELLESTSHVVKSRNMASKLVVSAITSFGYILSSLAQNVDTERSAAKKIQAKFCDSETNNTVDAA

SEQ ID NO: 130509 - protein, 781 aa, Oryza sativa
  unsure (1)..(781): unsure at all Xaa locations
  Clone ID: PAT_MRT4530_32665C.1.pep
ERARLPVLLRHPLQRGPQAHDRSLRQIPALSAPPLSDITGERGEHRAFLEGLRAFRSQNRPVGVARAVAAGAAIRDSTTRRRFRFTSHTLSKLLXALNECTEWGQVFILDSLSRYKAADAREAENIVERVTPRLQHANCAVVLSAVKIILLQMELITSTDVVRNLCKKMAPPLVTLLSAEPEIQYVALRNINLIVQKRPTILAHEIKVFFCKYNDPIYVKMEKLEIMIKLASDRNIDQVLLEFKEYATEVDVDFVRKAVRAIGRCAIKLERAAERCISVLLELIKIKVNYVVQEAIIVIKDIFRRYPNTYESIIATLCESLDTLDEPEAKASMIWIIGEYAERIDNADELLESFLETFPEEPALVQLQLLTATVKLFLKKPTEGPQQMIQAVLNNATVETDNPDLRDRAYIYWRLLSTDPEAAKDVVLAEKPVISDDSNQLDSSLLDDLLANISTLSSVYHKPPEAFVSRVKTAPRADDEEFADTAETGYSESPSQGVDGASPSSSAGTSSNVPVKQPAAPAAPAPMPDLLGDLMGMDNSIVPVDEPTAPSGPPLPVLLPSTTGQGLQISAQLVRRDGQIFYDISFDNGTQTVLDGFMIQFNKNTFGLAAGGALQVSPLQPGTSARTLLPMVAFQNLSPGAPSSLLQVAVKNNQQPVWYFNDKIPMHAFFGEDGKMERTSFLEAWKSLPDDNEFSKEFPSSVVSSIDATVEHLAASNVFFIAKRKNSNKDVLYMSAKIPRGIPFLIELTAAVGVPGVKCAVKTPNKEMVALFFEAMESLLK

SEQ ID NO: 130510 - protein, 83 aa, Oryza sativa
  Clone ID: PAT_MRT4530_32666C.1.pep
MPCNRHQELIRSVHAKGESQRLRSGFGRTLDWPNRPGFWPAASSSASIISWPKCGWIGLNKGSADPIWALLAPSFLQETSMWA

SEQ ID NO: 130511 - protein, 357 aa, Oryza sativa
  Clone ID: PAT_MRT4530_32667C.1.pep
MANLTDLVNLNLSDCSDKIIAEYIWVGGSGIDLRSKARTVKGPITDVSQLPKWNYDGSSTGQAPGEDSEVILYPQAIFKDPFRRGDNILVMCDCYTPQGEPIPTNKRHSAAKIFSHPDVVAEVPWYGIEQEYTLLQKDVNWPLGWPVGGFPGPQGPYYCAAGAEKAFGRDIVDAHYKACIYAGINISGINGEVMPGQWEFQVGPSVGIAAADQVWVARYILERVTEVAGVVLSLDPKPIPGDWNGAGAHTNFSTKSMREPGGYEVIKKAIDKLALRHKEHIAAYGEGNERRLTGRHETADINTFKWGVANRGASIRVGRDTEKEGKGYFEDRRPASNMDPYVVTGMIAETTLLWKQN

SEQ ID NO: 130512 - protein, 42 aa, Oryza sativa
  Clone ID: PAT_MRT4530_32668C.1.pep
IHHHTSRKKITMRLIHRKKETTTPTRLNLGFLVVRILPPRLT

SEQ ID NO: 130513 - protein, 85 aa, Oryza sativa
  unsure (1)..(85): unsure at all Xaa locations
  Clone ID: PAT_MRT4530_32669C.1.pep
DVGDDVTTGGDRMAQARRRTTTRRRXRRAPKXCGRRGELTGDERKRRGGRDRRRLGDHDGDLPERRRRLERRRRRAERTTATAAL

SEQ ID NO: 130514 - protein, 38 aa, Oryza sativa
  Clone ID: PAT_MRT4530_3266C.1.pep
LSNLAAHSLVGHADLSMCTVYRYIILDYIRGILCEDVA

SEQ ID NO: 130515 - protein, 692 aa, Oryza sativa
  Clone ID: PAT_MRT4530_32670C.1.pep
MAAPGSHTRRRAWPLLFLAVLMFHSLAIYLFTRGFLLTRTELDVHSHRDDRIGISPGCSSWPPPAVDRLVIVVLDALRFDFVAPSTFFQERQPWMDKLQVLQRLAADEKTSARIFKALADPPTTSLQRLKALTTGGLPTFIDVGNSFGAPAIVEDNIMHQFAKNGKRVVMMGDDTWIQLYPEHFNKSYPYPSFNVKDLDTVDNGVIEHLLPSLHKNDWDVLIAHFLGVDHAGHIFGVDSTPMIQKLEQYNRILEDVIDTLKSLSTSGGPHENTLLLVMGDHGQTLNGDHGGGTAEEVETSLFAWSPKTPPNAVLSVLGKNLCNADLHGKEVCVSTMQQLDFAVTIAALLGIPFPFGSIGRVNPELYALSAGTWDNQQIGANDCTQQNDLEAWMRRYAEALCINCWQVKRYIDRYSATSVIGFRAEDLNHVADLYSKAQANWSSVLRSTCPVETSSQDELKECANKECTSSALRLQIDAYSDFLESFAKLARSAWTEFDLWLMGIGLSVMILSVSTQASWCIIKLQQKNQRELKLDKGIHAADSVSVTQWSFLAVCLFYLTGHWCTFDGLRYGAAFIGFDHFHIIRQGLLLSIDTFGVSHILPVLSLPFIAICWYNSASKNSKVNDATVTRLIQVLLMYGLITSITTTLTIICVTIQRRHLMVWGLFAPKYVFDAIGLLLTDLLVVLASIYYS

SEQ ID NO: 130516 - protein, 175 aa, Oryza sativa
  unsure (1)..(175): unsure at all Xaa locations
  Clone ID: PAT_MRT4530_32671C.1.pep
RERELLRHRLGFTVDRVHDGGSRKRTIEIDPSKTNGRDLSAHDQSTGHGDDDVGDDVTTGGDRMAQARRRTTTRRRXRRAPKXCGRRGELTGDEVEAAEMIGSTTAAVLRRSSAKTEGRTRSATAWRPRRXPPRATTTTGATATQGXTNNGDGGAKRHGARALPATRDESEGGDG

SEQ ID NO: 130517 - protein, 949 aa, Oryza sativa
  unsure (1)..(949): unsure at all Xaa locations
  Clone ID: PAT_MRT4530_32672C.1.pep
MISLSFFNFALKSKFIIYATVTAYAMLARGMARELVPHDLRAALIWAASLVRARVEPRPAECRTAIIRSIEGNGHGHAQCIESRFFVDAHAYLATKIDPRSMSRFFLGGGGGGRRGRNVLSMVPGDSMTDVFEGVEFKWTSVPAEGRFADTEVSLELSFDAAHTDMALRRYVPFITEEVEQARRRDRELMIFMNEGSSWRGIAHHHPATFDTLAMDPELKQSIVADLDRFLKRKEYYRRIGKAWKRGYLLHGPPGTGKSSLVAAMANHLRFNLYDLDLSEVHSNSALQRLLIGMTNRCILIVEDIDCCFSARSREDGKERKKPTLTKLTLSGLLNFIDGLWSTSGEERVIVFTTNYKDRLDAALLRPGRMDMHVYMGYCGWDAFKTLAHNYFLVDDHPLFPEIRALLAGVEATPAEVSEMLLRSEDADAALSGLVEFLEEKKEKKKKQAMCEAGNDQAVEGGSLGQHPLHHHHPLARRRSPARRLPPPPVPRGARRLRVFSSISDVPXSPTSLLATAATVTAYAVLARGMARELVPHDLRAAVSWAATLVRARLGPRPAERRTVIIRRVDEDGRHDGCFADAHAYLATRIDPRALSRFRLSGGVGDGRGRRNALSMVPGDSMTDVFEGVEFRWTSVVAEGGGRFSESSLELSFDAEHTDMALGRYVPFITEEVEQARRRDRDLKIFMNERSSXRGIVHHHPATFDTLAMDPELKQSIVADLDRFLKRKEYYRRIGKAWKRGYLLHGPPGTGKSSLVAAMANQLRFNLYDLDLSEVHSNSALQRLLIGMPNRTILVIENIDCCFSARSREDGKDRKTPPAVCYGDVTLSGLLNFIDGLWSTSGEERVIVFTTNYKDRLDAALLRPGRMDMHIYMGYCGGDAFKTLAHNYFLVGDHPLFPEIRELLAGVEATPAEVSEMLLRSEDADAALAGLVEFLEEKKKLASSVDASR

SEQ ID NO: 130518 - protein, 114 aa, Oryza sativa
  Clone ID: PAT_MRT4530_32673C.1.pep
RKKVVWGTGPINHGCTHMHAWGLVQTLTWLFFIPEYRFDTSRTGYKIWVHTLAQGEFSWGEPGRWWIYLNRLFGRGVNLPWSTSWKRFWGKGPLPPTLGGSLGGFPGLAPLWPG

SEQ ID NO: 130519 - protein, 53 aa, Oryza sativa
  Clone ID: PAT_MRT4530_32674C.1.pep
YLRGPNLYKTHGLGLFYLSIAYTLVPSIPTPCKHRNSDIKCRQDPYFLACQYC

SEQ ID NO: 130520 - protein, 154 aa, Oryza sativa
  unsure (1)..(154): unsure at all Xaa locations
  Clone ID: PAT_MRT4530_32675C.1.pep
VCFKPAAVLHKSAAYLLPKGGHHSVPSNEEHGGHRRAQHGQCQGRVRLDPPGQVKVHVFDEYLDKSTGNIDLNDNIRLDTSVPNFLMAYNVQFRSFQLPYNCICCHDXVKNKKVQFILHDLEILRDAKENYXCQSNVFRNRDDLMMIIHRLTNH

SEQ ID NO: 130521 - protein, 68 aa, Oryza sativa
  Clone ID: PAT_MRT4530_32676C.1.pep
AGPSTVPRLTRGTALHSAGDRGDVGAQPPVQSDVTGDRPVTDRSFSLPPPHGSWAGASGQSGARARGA

SEQ ID NO: 130522 - protein, 57 aa, Oryza sativa
  Clone ID: PAT_MRT4530_32677C.1.pep
AAPNFYNGDSDPLHGQHGPCQLPTPFLWLFLFQPWFPVPYFLGVAYFRVPTLKIRSL

SEQ ID NO: 130523 - protein, 99 aa, Oryza sativa
  Clone ID: PAT_MRT4530_32678C.1.pep
QFERRKSCGRGRTCAYVRAYSNGNDGNIGSWTTSSGVLQMSHCHNYIKHFYKRLKVFLHPAAQTAFLIIYIKINIFSHGQHNRMKKVIFARNHPKPRRT

SEQ ID NO: 130524 - protein, 438 aa, Oryza sativa
  Clone ID: PAT_MRT4530_32679C.1.pep
MDTAVGGAFFAKTVRGAVDLIEKMVSSMGWSEERLQPRQRGMNTVKEMEMLAAKLELLMKHLDDKEKETKQGTVKALDSHMTCEICGNTGHSGTTVWRPMKRKLAANDKVLENINVRLDGFASALQNQSNFNKILETQLAQLAAFVLTHKSRKITGQPEPSLENVKAEGKNNAPFNTVGDIENPQQGKTTPPEYCDTNMLPFPQCNKKPSVDEQFAHFVEALYDLGARVSVLPKEVFDRLQLADSSVHYLLGIAEDIPVKIRDFFVHVDFVVLDMDSNKDMPLILGHPFLSTAETNIDVGAREIRLRINGKEEKFEFRPKMEQCSMVLVFHKDITRNMNSQQWRRNSPALKAEKNKDEEGEEHCLVPNPSLSFLSRYRAIFPKDCCNGLILCVYKNYTRDESDYVVYNPATQRWIILPKIDRVNPVSTVRFSFDPALL

SEQ ID NO: 130525 - protein, 874 aa, Oryza sativa
  Clone ID: PAT_MRT4530_3267C.1.pep
MVYTRNGTRTTGEGSNGEERTDGVHPNSDSDNSPPPLPENPTLAQVMAHQTQMMAAMMQQMQQQHQQMHQRMQQHAEQHHQQFGPPPPQSKLPEFLRVRPPTFSSTTNPMEANDWVHAIEKKLNLLQCNDQEKVAFATHQLQGPAKAQVPDGVVAQKKREFRALHQSNRTEKFLAGLDDELTNQLISGDYADFERLVDKAIRQEDQRNKMDRKRKAAQFRSSQGNHQRPRFTPGQQGGPTTMIVRQHRPFNSSNFHQGASGSQNHHGGQPHRGVAPRPLVAPAQSAPPAQAKKETRTKPGSCFNCGELGHFADKCPKPRRAGPRFVQARVNHASAEEAQAAPEVVLEVKKQVDEQLQKWCIRTSTSPWGAPVIFVEKKDKTKRMCVDYRALNEVTIKNKYPLPRIDDLFDQLKGAKEHELYAKFSKCDFWLTEVKFLGHVITAQGVAVDPSNVESVTKWTPPKTVSQIRSFLGLAGYYRRFIENFSRIARPMTQLLKKDEKFKWTAECDKSFEELKKKLVSAPVLILPDQMKDFQVYCDASRHGLGWKANVVADALSRKSYCTALCIEGMCEELQQLFERLNVGIVEQGFVAALETRPTLVDQVRAAQVNDPEIAELKKNMRVGKARDFLEDEHGTIWMGERLCVPDDKELKDMILTEAHQTQYSIHPGSTKMYQDLKEKLWWVSMRREIVEFVALCDVCQRVKAEHQRPAGLLQPLKIPEWKWEEIGMDFITRLPRTSSEVLAEAEEKVITIRERLRIAQSRQKSYADNRRRELTFEAGDYANSEHIDIQEDLTYVEKPIRILKTSERRTRNKVTRVVATPHRRRRRVREAELHPVRPSSVEGIPKLVRRLPSSSRGSPSPFDVVFLRAGHPR

SEQ ID NO: 130526 - protein, 1595 aa, Oryza sativa
  Clone ID: PAT_MRT4530_32680C.1.pep
MLATAFQLLQNWNNPAGATNVQVPTVQQQCKLSEFLKTEPPTFAIAVDPMEASDWLRTVEKKLGLIQCTDQERVGFATHQLVGPASEWWDSYEASRPEGYTITWNEFSSVFKRSHVPAGMITLRKREFRYLKQGDLTVTEYLHEFYHLAHYAPEDVETDEDKQEKFLQGLKDELAVQLLLEDYEDFEKLVDKAMQLESEHNRMTNCKRRIVNIPVFPGGNQRQRTEPLQITGSSVVHQEFLPQEDGRNADNNTSNTNDDDTTNNHGSCPISDHSNKACNVSSIHQDVNDSINVGTQNDNLSNFDTEKDSNGDSNYGTTDANVISLEIVHSRSVTCAITPAIMQEEDKSLALWSLEQTPYLRLCRLDRAPAGRAVASSSVAATSSTPACPPFRAVTAGGAFPPSPFSFLRAGRLQPPLPPRRSTVRPRRLLPRPRSHLLTLGQPSVSRGKHRRRVLAGKTVALPPLFHLRPPLSRFPCAGRRRHHLPRLRDAALHPDCSSVSPERRRRAGLSILFIAGVLSATHSSSSARRPAAPPPSPTSLRRVPRRPRLRAAAAGCPRRLLAGSAPVVVFVLGSASSSLVPAASRLRPRIAAEVVPSPFVSVVPGRLRRAPETFESLRSARIKLNPDKCVFGVPAGKLLGFLVSTRGIEANPEKIRAIERMRPPSKLRDVQCVTGCMAALSRFISRLGEKALPLFKLLKRSGPFTWTEEAENALTQLKAYLSSPPVLVAPEPDEPLLLYLAATPQVVSAALVVERDEDNSHFTLPHPVPTWPGREQGGEAPEPNGGPRPPTTGVGPLPACQTVLGAPDPQEGPEATVGRPHLSPFDPEANPVLTRPGKEQGEEAPEPNGGLRPLTTGVGPLPACPTTPGAPDPQDGPEATVGRPPLLSSDPEVISTEDKCAPRGCLDEECPRDAAPSEEDRPHRKVQRPVYFVSEALRDAKTRYPQAQKMLYAILMASRKLRHYFQAHRALADFVAEWTPAPEPVSIPEASTDPSQLPHTAHWVMQFDGSLSLQGAGAGVTLTSPNGDVLRYLVRLDFRATNNMAEYEGLLAGLRVAAGLGIRRLLVLGDSQLVVNQVCKEYRCSDPQMDAYVRQVRRMERHFDGIELRHVPRWDNMIADELSRLASSRAQTPPGAFEERLAQPSARPDPLGETDAPDRPPRPVGVQASGPEGSAPNSLRLIAWIAEIQAYLIDKTLPEDREGSERVHRISKRYVLVEGTLYRRTANGILLKCIPREQGVVLLADIHEGECGAHSASRTLVGKAFRQGFYWPTALNDAVDLVRRCRACQFHAKQIHQPAQALQTIPLSWPFAVWGLDILGPFRRAPGGFEYLYVAIDRFTKWPEAYPVVKIDKHSALKFIKGITARFGVPNRIITDNGTQFTSELFGDYCEDMGIKLCFASPAHPRSNGQVERANAEILKGLKTKTFNILKKHGDSWIEELPAVLWANRTTPSRATGETPFFLVYGAEAVLPSELTLRSPRATMYCEADQDQLRRDDLDYLEERRRRAALRAARYQQSLRRYHQRHVRARSLCVDDLVLRRVQTRAGLSKLSPMWEGPYRVVGVPRPGSIRLATGDGTELPNPWNIEHLRRFYP

SEQ ID NO: 130527 - protein, 693 aa, Oryza sativa
  Clone ID: PAT_MRT4530_32681C.1.pep
MAEQAKAHNLSPSVSGDDGEPNPRRRARTPPPPPRQSPKQGEALERAEGSATSTSTGGGKGRRDGEHRLLVYGDGSTPQGALQAAGALLRHPPVAHDPESPAQRWLDDVAKLVMTARQCIDAGGRSSATKASGAATTGSASSRRRARRAAAAVRHSATTPSSTPSARKDLRGRPDARTSIERRRNDRRATHATEGASSSRVSPQHRRGNQPSVPPVGGVGCRAFVASLRNVRWPPRFRPTIAEKYDGSVNPAEFLQVFTTGIEAAGGDDRVMANFFPMALKGQARGWLMNLPPASVHSWEDLCQQFTMNFQGTYPRPGEEADLHAVQRRDDESLRSYIQRFCQVRNTIPCIPAHAVIYAFRGGVRHNRMLKKIASKEPQTTAELFQLADRVARKEEAWTWNPSGSGVAASAAPGSAAQTGRRDRRRKKRALRGPPERGGLRATKRRKPTLPDLGYLEERRRRAALRAARYQQSLRRYHQRHVRARSLCVDDLVLRRVQTRAGLSKLSPMWAGAPDPQDGPEATAGRPRLSPSDPEVVGTEAECAPRGLSDGERPGDVAPDEEDRPRRKVQRPVYFVSEALRDAETRYLQAQKMLYAILITSRKLRHYFQAHRVTVVTSYPLGQILYNREGTGRVVKWAIELSEFDLRFEPSHAIKSQALADFVAEWTPAPELVSAPEASSSPSQLPHTALWVM

SEQ ID NO: 130528 - protein, 1992 aa, Oryza sativa
  Clone ID: PAT_MRT4530_32682C.1.pep
MAEQAKAHDLSPSVSGDDGEPNPRRRARTPPPPPRQSPKRGEALERAEGSATSTSTGGGKGRRDGERRLLVYGDSSTSQGALQAAGALLRHPPVAHDPESPAQRWLDDVAKLVMTARQRLDAGGRSSATKASGAATTGSASSRRRARRAAAAVRHSATTPSSTHSTREDLRGGPDARTSIERRRNDRRATHATEGASSSRVSPQHGRGYQPSVPPVGGVGCRAFVASLRNVRWPPRFRPTIAEKYDGSVNPAEFLQVYTTGIEAAGGDDRVMANFFPMALKGQARGWLMNLPPASVHSWEDLCQQFTMNFQGTYPRPGEEADLHAVQRRDDETLRSYIQRFCQARNTIPCIPAHAVIYAFRGGVRHNRMLEKIASKEPQTTAELFQLADRVARKEEAWTWNPSGSGVAASAASGSAAQTGRRDRRRKKRSVHSDDEGHVLAVEGASRATQKGRPASDKKKKAGAPSRERPAGKWCTVHNTSLHDLMDCRAVKSLAERTRKWEEERRQERREGKSPAVPSGNRRSEAKQKAPAEDIDDGDDDLGFQEPGATIATVDGGACAHVSRRSLKAMKRELLAAAPTHEATRRARWSEVALTFDQTDHPPCVAQGGQIAMVVSPTVCNVKLGHVLIDGGAALNILSPAAFDAIKAPGMMLRPSQPIIGVTPGHTWPLGHIDLPVTFGGPVNFRTERVNFDVADLSLPYNAVLGRPALVKFMAAVHYAYLQMKMPGPDGPISVHGDLKVALACMEQRADRLAVVSKPEGGDERLGTSAPAAPRQRIVTCDEVPEDALVSFLRANADVFAWRPADMPGVPREVIEHRLAVRPGARPVRQKVRRQALERQAFIREEVARLLEAGFIREVIHPEWLANPVVVPKANGKLRMCIDYTDLNKACPKDPYPLPRIDQIVDSTAGCDLLCFLDAYSGYHQIRMAREDEEKTAFITPIGTYCYTTMPFGLKNAGPTFQRTTRISLGSQIGCNVEAYVDDLVVKTRNQETLLSDLAETFESLRSARIKLNPDKCVFGVPAGKLLGFLVSARGIEANPEKIRAIERMRPPSKLRDVQCVAGCMAALSRFISRLGEKALPLFKLLKRSGPFTWTEEAERALTQLKAYLSSPPVLVAPEPNEPLLLYLAATPQVVSAALVVERDEDNPHSAHPHPVQTWPGREQGGEAPEPNGGPRPPTTGVGPLPACQTVLGAPDPQEGPEATVGRPHLSPFDPEANPVLTRPGKEQGEEAPEPNGGPRPLTTGVGPLPACPTMPGAPDPQDGPEATVGRPPLLSSDPEVISTEDNEALRDAKTRYPQAQKMLYAILMASRKLRHYFQAHRVTVVTSYPLGQILHNREGTGRVVKWAIELSEFDLHFEPRHAIKSQALADFVAEWTPAPEPVSIPEASTDPSQLPHTAHWVMQFDGSLSLQDASAGVTLTSPSGNVLRYLVRLDFRATNNMAEYEGLLAGLRVAAGLGIRRLLVLGDSQLVVNQVCKEYRCSDPQMDAYVRQVRRMERHFDGIELRHVPRRDNMMADELSRLASSRAQTPPGAFEERLAQPSARPDPLGETDAPDRPPRPVGVQASGPEGSAPSSLRLIAWIAEIQAYLTDKTLPEDREGSERVHRISKRYVLVEGTLYRRAANGVLLKCIPREQGVVLLADIHEGECGAHSASRTLVGKAFRQGFYWPTALNDAVDLVRRCRACQFHAKQIHQPAQALQTIPLSWPFAVWGLDILGPFRRAPGGFEYLYVAIDKFTKWPKAYPVVKIDKHSALKFIKGITARFGVPNRIITDNGTQFTSELFGDYCEDMGIKLCFASPAHPRSNGQVERANAEVLKGLKTKTFNILKKHGDSWIEELPAVLWANRTTPSRATGETPFFLVYGAEAVLPSELTLRSPRATMYCEADQDQLRRDDLDYLEERRRRAALRAARYQQSLRRYHQRHVRARSLCVDDLVLRRVQTRAGLSKLSPMWEGPYRVVGVPRLGSIRLATGDGTELPNPWNIERLRRFYP

SEQ ID NO: 130529 - protein, 1683 aa, Oryza sativa
  Clone ID: PAT_MRT4530_32683C.1.pep
MAEQAKAHDLSPSVSGDDGEPNPRRRARTPPPPPRQSPKRGEALERAEGSATSTSTGGGKERRDGERRLLVYGDGSTPQGALQAAGALLCHPPVAHDPESPAQRWLDDVAKLVMTARQHLDAGGRSSATKASGAATTGSASSRRRARRAAAAVRHSATTPSSTPSTREDLRGGPDARTSIERRRNDRRATHATEGASSSRVSPQHGSGNQPSVPPVGGVGCRAFVASLRNVRWPPRFRPTIAEKYDGSVNPAEFLQVYTTGIEAAGGDDRVMANFFPMALKGQARGWLMNLPPASVHSWEDLCQQFTMNFQGTYPRPGEEADLHAVQRRDDESLRSYIQRFCQVRNTIPCIPAHAVIYAFRGGVRHNRMLEKIASKEPQTTAELFQLADRVARKEEAWTWNPSGSVKSLAERTRKWEEERRQERREGKSPAVPSGNRRSEAKQKAPAEDIDDGDDDLGFQEPGATIATVDGGACAHVSRRSLKAMKRELLAAAPTHEATRRARWSEVALTFDQTDHPPCVARGGQIAMVVSPTVCNAKLGRVLIDGGAALNILSPAAFDAIKAPGMMLRPSQPIIGVTPGHTWPLGHIDLPVTFGGPANFRTERVNFDVADLSLPYNAVLGRPALVKFMAAVHYAYLQMKMPGPDGPISVHGDLKVALACMEQRADRLAVVSKPEGGDERLDTSAPAAPKQRIVTSDEVPVKEEDALVSFLRANADVFAWRPADMPGVPREVIEHRLAVRPGARPVRQKVRRQAPERQAFIREEVARLLEAGFIREVIHPEWLANPVVVPKANGKLRMCIDYTDLNKACPKDPYPLPRIDQIVDSTAGCDLLCFLDAYSGYHQIRMAREDEEKTAFITPIGTYCYTTMPFGLKNAGPTFQRTTRISLGSQIGRNVEAYVDDLVVKTRNQETLLSDLAETFESLRSARIKLNPDKCVFGVPAGKLLGFLVSARGIEANPEKIRAIERMRPPSKLRDVQCVTGCMAALSRFISRLGEKALPLFKLLKRSGPFTWTEEAERALTQLKAYLSSPPVLVAPEPNEPLLLYLAATPQVVSAALVVERDEDNPHSAHPHPVQTWPGREQGGEAPEPNGGPRPPTTGVGPLPACQTVLGAPDPQEGPEATVGRPYLSPFDPEANPVLTRPGKEQGEEAPEPNGGLRPLTTGVGPLPACPTMPGAPDPQDGPEATVGRPPLLSSDPEVISTEDKCAPRGCLDEECPRDAAPSEENRPHRKVQRPVYFVSEALRDAKTRYPQAQKMVYAILMASRKLRHYFQAHRVTVVTSYPLGQILHNREGTGRVVKWAIELSEFDLHFEPRHAIKSQTLADFVAEWTPAPEPVSIPEASTDPSQLPHTAHWVMQFDGSLSLQGAVDLVRRCRACQFHAKQIHQPAQALQIIPLSWPFAVWGLDILGPFKRAPGGFEYLYVAIDKFTKWPEAYPVVKIDKHSALKFIKGITARFGVPNRIITDNGTQFTSELFGDYCEDMGIKLCFASPAHPRSNGQVERANAEILKGLKTKTFNILKKHGDSWIEELPAVLWANRTTPSRATGETPFFLVYGAEAVLPSELTLRSPRATMYCETDQDQLRRDDLDYLEERRRRAALRAARYQQSLRRYHQRHVRARSLCVDDLVLRRVQTRAGLSKLSPMWEGPYRVIGVPRPGSIRLATGDGTELPNPWNIEHLRRFYP

SEQ ID NO: 130530 - protein, 350 aa, Oryza sativa
  Clone ID: PAT_MRT4530_32684C.1.pep
MATRGDGTARSSVGMASATATVRGAGGARGGDGAGEESTATGRQVTQRRQRAPAQGARQTATVKRRGSDRARGSKAQKRDGDGSRRAAMATRRRRRAAWQRGRDATATAHGAAAATGRDGNGGAGREAARRGAMTWVGSMQELGLEVVKRNNSGTRTRVASIRHVGADLGQHGGRPRKAVEPRLFPDIEHRLRFLLHLARPPCTSPKSFAFVSVLPLWSMLASRDHIETVEARQRKVAKIADQLTGVSDLLSLCGARMTPCRTATSCALRLCAEACTSSPPSPVLGLLGSLHEWPPPGGPLHIRDDLSAPVGHLHLSPSHLWSVRERRLPHCHGHLPASANLRCSKSQRR

SEQ ID NO: 130531 - protein, 1884 aa, Oryza sativa
  Clone ID: PAT_MRT4530_32685C.1.pep
MAEQAKAHDLSPSVSGDDGEPNPRRRARTPPPPPRQSPKRGEALERVERSATSPIAGDGEKRRDGERRLLVYGDGSTPQGALQAAGALLRHPPVAHDPESPAQRWLDDVAKLVMTARQRLDAGGRSSATKASGAATTGSASSRRRARRAAAAVRHSATTPSSTPSTREDLRGGPDARTSIERRRNDRRATHATEGASSSRVSPQHGRGNQPSVPPVGGVGCRAFVASLRNVRWPPRFRPTIAEKYDGSVNPAEFLQVYTIGIEAAGGDDRVMANFFPMALKGQARGWLMNLPPASVHSWEDLCQQFTMNFQGTYPRPGGGVRHNRMLEKIASKEPQTTAELFQLADRVARKEEAWTWNPSGSGVAASAAPGSAAQIGRRDRRRKKRSVHSDDEGHVLAVEGASRATQKGRPASDKKKKAGAPSRERPAGKWCTVHNTSLHDLMDCRAVKSLAERTRKWEEERRQERREGKSPAVPSGNRRSEAKQKAPAEDIDDGDDDLGFQEPGATIATVDGGACAHVSRRSLKAMKRELLAAAPTHEATRRARWSEVALTFDQTDHPPCVARGGQIAMVVSPTVCIVKLGRVLIDGGAALNILSPAAFDAIKAPGMMLRPSQPIIGVTPGHTWPLGHIDLPVTFGGPANFRTERVNFDVADLSLPYNAVLGRPALVKFMAAVHYAYLQMKMPGPGGPISVHGDLKVALACMEQRADRLAVVSKPEGGDERLGTSAPAAPRQRIVTCDEVPEDALVSFLWANADVFAWRPADMPGVPREVIEHRLAVRPGARPVRQKVRRQAPERQAFIREEVARLLEAGFIREVIHPEWLANPVVVPKANGKLRMCIDYTDLNKACPKDPYPLPRIDQIVDSTAGCDLLCFLDAYSGYHQIRMAREDEEKTAFITPIGTYCYTTMPFGLKNAGPTFRRTTRISLGSQLGRNVEAYVDDLVVKTRNQETLLSDLAETFESLRSARIKLNPDKCVFGVPAGKLLGFLVSARGIEANPEKIRAIERMRPPSKYRATWPGREQGGEAPKPNGGPRPPTTGVGPLPACQTVLGAPDPQEGPEVTVGRPHLSPFDPEANPVLTRPGKKQGEEAPEPNGGLRPLTTGVGPLPACPTTPGAPDPQEGPEATVGRPHLLSSDPEVISTEDKCAPRGCLDEECPRDAAPSEEGRTHRKVQRPVYFVSEALRDAKTRYPQAQKMLYAILMASRKLRHYFQAHRVTVVTSYPLGQILHNREGTGRVVKWAIELSEFDLHFEPRHAIKSQALADFVAEWTPAPEPVSIPEASTDPSQLPHTAHWVMQFDGSLSLQGAGAGVTLTSPSGDVLRYLVRLDFRATNNMAEYEGLLAGLRVAAGLGIRRLLVLGDSQLVVNQVCKEYRCSDPQMDAFVRQVRRMERHFDGIELRHVPRRDNMMVDELSRLASSRAQTPLGAFEERLAQPSARPDPLGETDAPDRPPRPVGVQASGPEGSAPSSLRLIAWIAEIQAYLTDKTLPEDREGSERVHRISKRYVLVEGTLYRRAANGILLKCIPREQGVVLLADIHEGECGAHSASRTLVGKAFRQGFYWPTALNDAVDLVRRCRACQFHAKQIHQPAQALQTIPLSWPFAVWGLDILGPFRRAPGGFEYLYVAIDKFTKWPEAYPVVKIDKHSALKFIKGITARFGVPNRIITDNGTQFTSELFVDYCEDMGIKLCFASPDHPRSNGQVERANAEILKGLKTKTFNILKKHGDSWIEELPAVLWANRTTPSRETGETPFFLVYGAEAVLPSELTLKSPRATMYCEADQDQLRRDDLDYLEERRRRAALRAARYQQSLRRYHQRHVRARSLCVDDLVLRRVQTRAGLSKLSPMWEGPYRVVGVPRPGSIRLATGDGTELPNPWNIEHLRRFYP

SEQ ID NO: 130532 - protein, 1545 aa, Oryza sativa
  unsure (1)..(1545): unsure at all Xaa locations
  Clone ID: PAT_MRT4530_32686C.1.pep
MAEQAKAHDLSPSVSGDDGEPNPRRRARTPPPPPRQSPGREKAPERAEGSATSTSTGGGKGRRDGERRLLVYGDNSTPQGALQAAGALLRHPPVAHDPESPAQRWLDDVAKLVMTARQRLDAGGRSSATKASGAATTGSVSSRRRARRAAAVARHSAATPSSTPSTREDLRGGPDARASIERRRNDRRAAHATEGASSSRVSPRHGRGDQPSVPPVGGVGCRAFVASLRNVHWPPRFRPTIAEKYDGSVNPAEFLQVYTTGIEAAGGDDRVMANFFPMALKGQARGWLMNLPPASVHSWEDLCQQFTMNFQGTYPRPGEEADLHAVQRRDDESLRSYIQRFCQVRNTIPCIPAHAVIYAFRGGVRHNRMLEKIASKEPQTTAELFQLADRVARKEEAWTWNPSGSGVAASAAPGSAAQTGRRDRRRKKRSVHSDDEGHVLAVEGASRATQKGRPASDKKKKAGAPSXSAQPASGAPSTTLPFTTSRTAVXVKSLAERTRKWEEERRQERREGKSPAVPSGNRRSEAKQKAPAEDIDDGDDDLGAALNILSPAAFDAIKAPGMMLRPSQPIIGVTPGHTWPLGHIDLPVTFGGPANFRTVRVNFDVADLSLPYNAVLGRPALVKFMAAVHYAYLQMKMPGPDGPISVHGDLKVALACMEQRADRLAVVSKPEGGDERLGTSAPAAPRQRIVTCDEVPVKEEDALVSFLRANADVFAWRPADMPGVPREVIEHRLAVRPGAMPVRQKVRRPHKTFESLRSARIKLNPDKCVFGVPAGKLLGFLVSARGIEANPEKIRAIERMRPPSKLRDVQCVTGCMAALSRFISRLGEKALPLFKLLKRSGPFTWTEEAERALTQLKAYLSSPPVLVAPEPNEPLLLYLAATPQVVSAALVVERDEDNPHSAHPHLVQTWPGREQGGEAPEPNGGPRPPTTGDGPLPACQTVLGAPDPQEGPEATAGRPHLSPSDPEANPVPIWPGREQGEEAPEPNGGPRLPTTGDGPLPACPTTPGAPDPQDGPEATVGRPPLSSSDPEVVGTEDECAPRGRSGEERPRDAAPSEEDRPHRKVQRPVYFVSEALRDAKTRYPQAQKMLYAVLMASRKLRHYFQAHRVTVVTSYPLGQILHNREGTGRVVKWAIELSEFDLHFEPRHAIKSQALADFVAEWTPAPELVSVPETGSGPSQLPHTAHWVMQFDGSLSLQGAGAGVTLTSPSGDVLKYLVRLDFRATNNMAEYEGLLAGLRVAAGLGIRRLXDKTLPEDREGSERVHRISKRYVLXRTPGGFEYLYVAIDKFTKWPEAYPVVKIDKHSALKFIKGITARFGVPNRIITDNGTQFTSELFGDYCEDMGIKLCFASPAHPRSNGQVERANAEILKGLKTKTFNTLKKHGVSWIEELPAVLWANRTTPSRATGETPFFLVYGAEAVLPSELTLRSSRATMYCEANQDQLRRDDLDYLEERRRRTALRAARYQQSLRRYHQRHVRARSLCVDDLVLRRVQTRAGLSKLSPMWEGPYRVVGVPRPGSIRLATGDGTELPNPWNIEHLRRFYP

SEQ ID NO: 130533 - protein, 536 aa, Oryza sativa
  Clone ID: PAT_MRT4530_32687C.1.pep
MADMKQEEISHPPMDQLQGLEYCIDSNPSWGEAIALGFQHYILCLGTAVMIPTLLVPLMGGNAHDKAKVVQTMLFVTGINTMLQTLFGTRLPTIIGGSYAFVIPVISIIKDPSLAQITDDHTRFIMTMRAIQGALIISSCIQIILGYSQLWGICSRFFSPLGMVPVVALVGLGLFERGFPVIGRCVEIGLPMLVLFVALSQYLKHVQVRHFPILERFSVLISIALVWVYAHILTASGTYKHTSLLTQINCRTDRANLITSADWIDIPYPLQWGPPTFSADHAFGMMAAVVVSLIESAGAFKAAARLASATPPPPYVLSRGIGWQEYNAFALYVNNQGIGLLFDGLFGTGTGSTVSVENIGLLGSTRIGSRRVIQISAGFMIFFSILGRFGALFASIPFTMFAAIYCVMFGYVGAVGLSFMQFTNMNSMRSLFIIGVSLFLGISIPEYFFRYTMSALHGPAHTRAGWFNDYINTVFSSPPTVGLIVAVILDNTLEVRDAARDRGMPWWARFRTFRGDSRNEEFYTLPFNLNRFFPPS

SEQ ID NO: 130534 - protein, 204 aa, Oryza sativa
  Clone ID: PAT_MRT4530_32688C.1.pep
MGLFSRLVSKFSRALRASAPAKPRSFSADVREACWNNAPKVIGRSGDRWRLDANGNPVLKALNGKHGGPNDQSNCQIIQTGANRSKSNRILRKDQMKGLSRTMNWTHPHLDTIEIAVYASVERDDLSCTCPTIDNLSDANFKKNICELPEFMTEEGIHCLQVADAMSRFMSNPLNEITCAADASTPNNLTASGTSRVAEKICPG

SEQ ID NO: 130535 - protein, 1073 aa, Oryza sativa
  Clone ID: PAT_MRT4530_32689C.1.pep
MARGSALLDGSVLPPSRIVSERQAGLARRFMPGSATGREIVTLGEGRPAPDYPGRSVFFLPFAMAGLVPPFSSFFMDVLEFYDLQMAHLTPNAVMTLAIFAHLCEMFIGVRPSLRLFRWFFTVQSVSPPSVVGGCYFQPREPVLNRYIPCALRKKWDDWKSDWFYTPLADEARLRLPSQPPAQASSWRAPVDLGDGYDAVLDRLAGLRSQGLTGAMVYGDYLRRRIAPLQRRARGAWEYTGSEDFMRTHQGVRWDWAPEDFKILVQRVLNLNSVEASLIPQGILPLCSDPDRVSILTIMMAVGASEERAPKGHDGAGGSRRGNNLPREGVVLLGPATGARGTAALPSGDDGEPNPRRRARTPPPPPRQSPKRGEALERVERSATSPIAGDGEKRRDGERRLLVYGDGSTPQGALQAAGALLRHPPVAHDPESPAQRWLDDVAKLVMTARQRLDAGGRSSATKASGAATTGSASSRRRARRAAAAVRHSATTPSSTPSTREDLRGGPDARTSIERRRNDRRATHATEGASSSRVSPQHGRGNQPSVPPVGGVGCRAFVASLRNVRWPPRFRPTIAEKYDGSVNPAEFLQVYTTGIEAAGGDDRVMANFFPMALKGQARGWLMNLPPTGGMRHNRMLEKIASKEPQTTAELFQLADRVARKEEAWTWNPSGSGVAASAAPGSAAQTGRRDRRRKKRSVHSDDEGHVLAVEGASRATQKGRPASDKKKKAGAPSRERPAGKWCTVHNTSLHDLVDCRAVKSLAERTRKWEEERRQERREGKSPAVPSGNRRSEAKQKAPAEDIDDGDDGLGFQEPGATIATVDGGACAHVSRRSLKAMKRELLAAAPTHEATRRARWSEVALTFDQTDHPPCVARGGQIAMVVSPTVCNVKLGRVLIDGGAALNILSPAAFDAIKAPGMMLRPSQPIIGVTPGHTWPLGHIDLPVTFGGPANFRTERVNFDVADLSLPYNAVLRRPALVKFMAAVHYAYLQMKMPGPGGPISVHGDLKVALACMEQRADRLAVVSKPEGGGERLGTSTPAAPRQRIVTCNEVPVKEVALGDGPSKTTRIGGLLDGK

SEQ ID NO: 130536 - protein, 320 aa, Oryza sativa
  unsure (1)..(320): unsure at all Xaa locations
  Clone ID: PAT_MRT4530_3268C.1.pep
LAYTPVELPVGVELKPSQFFANRFVVLPPSSFNLSSXNLDGXNSKTLLFALCVGMVAFPSLEXFIDEAERQPITWEEFTEGFKKXHVPVGVVALKKREFRALKQKDRTVAEYLHEFNRLARYAPEDVRTDEERQEKFLEGPKDELSVMLISHDYEDFQELVDKAIRLEDKKNKMDNRKRKMTVSQEAQGSSQRQRIKPLQIGESFSAGQEQSQQQSQQLGISGEINSETNASNEDNDEQATQSVSFQQDQSQEDNSNGREHRVCFNCYEPGHFVKECPKPKRQQPQGQVNNIVLTGANAVPVASQGIQLSHQFQSSSSFL

SEQ ID NO: 130537 - protein, 373 aa, Oryza sativa
  Clone ID: PAT_MRT4530_32690C.1.pep
MAEYEGLLAGLRVAAGLGIRRLLVLGDSQLVVNQVCKEYRCSDPQMDGLRAPTPNDAVDLVRRCKACQFHAKQIHQPAQVLQTIPLSWPFAVWGLDILGPFRRAPGGFEYLYVAIDKFTKWPEAYPVVKIDKHSALKFIKGITARFGVPNRIITDNGTQFTSELFGDYCEDMGIKLCFASPAHPRSNGQVERANAEILKGLKTKTFNILKKHGDSWIEELPAVLWANRTTPSRATGETPFFLVYGAEAVLPSDLTLRSPRATMYCEADQDQLRRDDLDYLEERRRRAALRAARYQQSLRRYHQRHVRARSLCVDDLVLRRVQTRAGLSKLSPMWEGPYRVIGVPRPGSVRLATGDGTELPNPWNIEHLRRFYP

SEQ ID NO: 130538 - protein, 1987 aa, Oryza sativa
  Clone ID: PAT_MRT4530_32691C.1.pep
MAEQAKAHNLSPSVSGDDGEPNPRRRARTPPPPPRQSPRREEVLERVEGSATSTSTGDGEGRRDGERRLLVYGDGSTPQGALQAAGALLRHPPIVPDPESPAQRWLDDVANLVMTARQRLGAGGRSSATKTSGAATTGSVSSRRRARRAAAVARHSAATPSSAPPTREDQRRGPDARIDIERRRNGRRAPHATEGASSSGVSPQHGRGDQPSVPPPPRFRPTIAEKYDGSVNPAEFLQVYTTGIEAAGGDDRVMANFFPMALKGQARGWLMNLPPASVHSWEDLCKQFTMNFQGTYPRPGEEADLHAVQRRDDESLRSYIQRFCQVRNTIPCIPAHAVIYVFRGGVRHNRMLGKIASKEPQTTAELFQLADRVARKEEAWTWNPSGSGVAASATPGSAAQTGRRDRRRKKRSAHTDDEGHVLAVEGASRATRKGRPASDKKKEAGTPSRERPTGKWCIVHNTSLHDLVDCRAVKSLAERTRKWEEERRQERREGKSPAVPSGNRRSEAKQKAPAEDIDDGDDDLGFQEPEATIATVDGGACAHVSRRSLKAMKRELLAAAPTHEATRRARWSEVALTFDQTDHPPCVARGGQIAMVVSPTVCNVKLGRVLIDGGAALNILSPAAFDAIKAPGMVLRLSQLIISVTPGHTWPLGHIDLPVTFGGSANFRTERVNFDVADLSLPYNAVLGRPALVKFMAAVHYAYLQMKMPGPGGPISVHGDLKVALACMEQRADHLTAASKPEGGDERLGTSAPAAPRQRIVTCDEVPEDALVSFLRANADVFAWRPADMPGVPREVIEHRLAVRSGARPVRQKVRRQAPERQAFIREEVARLLEAGFIREVIHPEWLANPVVVPKANGKLRMCIDYTDLNKACPKDPYPLPRIDQIVDSTAGCDLLCFLDAYSGYHQIRMAREDEEKTAFITPIGTYCYTTMPFGLKNAGPTFQRTTRISLGSQIGRNVEAYVDDLVVKTRNQETLLSDLAETFESLRSARIKLNPDKCVFGVPAGKLLGFLVSTRGIEANPEKIRAIEQMRPPSKLRDVQCVTGCMAALSRFISRLGEKALPLFKLLKRSGPFTWTEEAERALTQLKAYLSSPPVLVAPEPNEPLLLYLAATPQVVSAALVVERDEDNPHSAHPHPVLAWPGREQGGEAPEPNGGPRPPTTGAGPLPACQTVPGAPDPQDGPEATAGRPHLSPSDPEANPVPIRPGREQGEEAPEPNGGLRPLTTGVGPLPACPTTPGAPDPQDGPEATVGRPPLSSSDPEVVDTEDECTTRGRLDKERPRDVAPSEEDRPHRKVQRPVYFVSEALRDAKTRYPQAQKMLYAILMASRKLRHYFQAHRVTVVTSYPLGQILHNREGTGRVVKWAIELSEFDLHFQPRHAIKSQALADFVAEWTPAPEPVSVPEASSGPSQLPHTAHWVMQFDGSLSLQGAGAGVTLTSPSGDVLRYLVRLDFRATNNMAEYEGLLAGLRVAAGLGIRRLLMDAYVRQVRRMERHFDGIELRHVPRRDNTIADELSRLASSRAQTPPGAFEERLAQPSARPDPLGETDAPDRPPRPVGVQASGPEGSAPSSLRLIAWIVEIQAYLTDKTLPEGREGSERVQRISKRYVLVEGTLYRRAANGILLKCIPREQGVELLADIHEGECGAHSASRTLVGKAYRQGFYWPTALNDAVDLVRRCRACQFHAKQIHQPAQALQIIPLSWPFAVWGLDILGPFRRAPGGFEYLYVAIDKFTKWPEAYPVVKIDKHSALKFIKGITARFGVPNRIITDNGTQFTSELFGDYCEDMGIKLCFASPAHPRSNGQVERANAEILRGLKTKTFNILKKHGDSWIEELPAVLWANRTTPSRATGETPFFLVYGAEAVLPSELTLRSPRATMYYEADQDQLRRDDLDYLEERRRRAALRAARYQQSLRRYHQRHVRDRSLCVDDLVLRRVQTRAGLSKLSPMWEGPYRVIGVPRPGSVRLATGDGTELPNPWNIEHLRRFYP

SEQ ID NO: 130539 - protein, 87 aa, Oryza sativa
  Clone ID: PAT_MRT4530_32692C.1.pep
LYRGWSCPLQALLHVQLGVEIKGNPKHAFPSKETSKPDETESDSDLPVRPATQRQSDRPSTGGLTAQHKAVRPAHSEETGRLPNFGN

SEQ ID NO: 130540 - protein, 66 aa, Oryza sativa
  unsure (1)..(66): unsure at all Xaa locations
  Clone ID: PAT_MRT4530_32693C.1.pep
TQTLCANAPAXSVTVVXKQTVRPDGASAVGDXKLSVSDMPMLSCHYXQKGXLFLPAPWRCRSPSLE

SEQ ID NO: 130541 - protein, 105 aa, Oryza sativa
  Clone ID: PAT_MRT4530_32694C.1.pep
MESTGINLYKFYDFDVDRPIMPPLLGVYDFTTGLPPSPPTGVLAYTIGWSHHRSWASTSSPTGLPLLPPTGVSAYTASLLCLRWWAFSLSPSTAFVAADCCLHCY

SEQ ID NO: 130542 - protein, 96 aa, Oryza sativa
  Clone ID: PAT_MRT4530_32695C.1.pep
AVVCVGSRCSSDPTLLWLWYRPAAAAPVGPLAWEPPYAMGAALKRQKKKKKKKKKALDSCPSPPSSIPLPGNTVPDGTEFYFFMAGSSNMSFYSTQ

SEQ ID NO: 130543 - protein, 119 aa, Oryza sativa
  Clone ID: PAT_MRT4530_32696C.1.pep
KTAPGGFGSGCAPVGPLGTPRGPGPGAPPRLGFYFGGETSKGFGTPLPGGALLEGQVRAFGLLRVRFRVLPVFKGFPVTGGFWEPPRFWDWGPPFLKKKKKKKKKKKKKKKNPKKKKKQ

SEQ ID NO: 130544 - protein, 206 aa, Oryza sativa
  Clone ID: PAT_MRT4530_32697C.1.pep
MTTSEREPCPDRILDDVGGAFAMGAVGGTAFHFLRGAYNSPNGHRLSGGSQAVRMSVPRTGGNFAAWGGLFSAFDCAMVHARQKEDPWNSILAGAATGAVLSLRQGPRATATSALVGASLLALVEGAGILLTRTMATLPQEDHAYPFPVVPPPEEVSAHESSPIAWVRGIFGRKEEKPAAAGGDRKSDVLESFETPSPPIPSFDYR

SEQ ID NO: 130545 - protein, 66 aa, Oryza sativa
  Clone ID: PAT_MRT4530_32698C.1.pep
DKEGIPPDQQRLIFAGKQLEDGRTFCLTTNIQKDVHLSHPGAHALRGGQVISQVWWSCRCAWSSRA

SEQ ID NO: 130546 - protein, 129 aa, Oryza sativa
  Clone ID: PAT_MRT4530_32699C.1.pep
ISSPPPRPAAAAAPAEKEVSANVPSSRRLRPLELLPSTSSPSLPSLSPIAVDLPPPPPPPTDATVIAATNHLLQITRASRPKSSGRNGNPPVRELEEGGGIARRERDEASPSVEIKRRVGPTDMWALVI

SEQ ID NO: 130547 - protein, 75 aa, Oryza sativa
  Clone ID: PAT_MRT4530_3269C.1.pep
TAPPPPSSPGRAPRRRGTAPSRRPAGTWASRRRRSPSTSPPSPPPPTPPPPPPAAAAASPAPAPPPPPTSARSPP

SEQ ID NO: 130548 - protein, 74 aa, Oryza sativa
  Clone ID: PAT_MRT4530_326C.1.pep
GFGPPPQILKNLGYHGWQWAPPGILHHLAVFCPNPLKIPLKKRRSPGKGVFIQKCPFGPRSARAKCQPWALGGG

SEQ ID NO: 130549 - protein, 41 aa, Oryza sativa
  Clone ID: PAT_MRT4530_32700C.1.pep
RGFFVSGLKLTSRYTILAETSRIYNSRMCPLTEICLVGRLI

SEQ ID NO: 130550 - protein, 45 aa, Oryza sativa
  Clone ID: PAT_MRT4530_32701C.1.pep
SVGRVYYLYGVWTLYLMRDAYCRLAPVIYIRTCFDVCAALTKLFA

SEQ ID NO: 130551 - protein, 110 aa, Oryza sativa
  unsure (1)..(110): unsure at all Xaa locations
  Clone ID: PAT_MRT4530_32702C.1.pep
NSSGEYFQIWDAVQEVQLQGGEEDETMXKWAVNGRFTPASAYDLFFMVNTEARCCSLIWHTRLPSKVKFFKWLADKGRCLMADNLSKRGWPHQQSCPLCMTNDEDCKHLF

SEQ ID NO: 130552 - protein, 90 aa, Oryza sativa
  Clone ID: PAT_MRT4530_32703C.1.pep
RSAGTHSDRCRNRRNVIPSSSSCCIPRSAHQRRPYVRRRSSRRRGQKWIWHSLTCRRGDMRWRYGGSHAGALHRWPAGTRNDGGEAPLTG

SEQ ID NO: 130553 - protein, 51 aa, Oryza sativa
  Clone ID: PAT_MRT4530_32704C.1.pep
FLLGKEHICNGKWRVPLHMLSVNYSHDFRLVVSNTLDIPLYIPVKPLRLHL

SEQ ID NO: 130554 - protein, 109 aa, Oryza sativa
  unsure (1)..(109): unsure at all Xaa locations
  Clone ID: PAT_MRT4530_32705C.1.pep
NPIRPPETALNXNRPSAFMPTLIWVILDLMEGLSHYLXQTHPFSYSNSFRGSSTARHGXYDIVCGVAIARRPGLVLVGTHVVNVALNQSESYPXLTRKSGHERERHHHL

SEQ ID NO: 130555 - protein, 50 aa, Oryza sativa
  Clone ID: PAT_MRT4530_32706C.1.pep
TQIILKWTIIKVCDLCFTFNSWMRENDMYICLENHFHNITILLGYTNILK

SEQ ID NO: 130556 - protein, 573 aa, Oryza sativa
  Clone ID: PAT_MRT4530_32707C.1.pep
MESTCWSCGEGAVVADPDTGVLVCTSCGRIHDSGSSEFVHQSICTDNGVYDLRASSFVYHQSQSQYRDQKLSNGVVTIASIAARLGLSPTAADEALAMAKSATGGNLATQGSAFLPGLAFACAFLVARAHRLPLFLAEGAETAFCSVASLADLVFRIASHLSLPPLPFFDYAAALERAVRFSPSLSSAASERTEVILSQSRFLLRCASKWSLTTGRFPLPLIAALVAFAAEANGVTSITVEDIARDISARLHTSLRRYKELVDALVRVARELLPWGADVNAKNLLLNAPVLLRLMEMRSQSDPSEQFLESFAPDIAGIVQACSAVDDDESKYLQVAPQLASDDLDSNNSGQEGKELENFKISEECLSSAYQNVLKRLAQLQRLGQVGKGANRKRQRIGGLELEPCIDSLDDGWTKDMVLEDVVNIDVGFDVPPPSFAAGMKLQKKRRARIEAAKCRIDAIRKGPVESENKLQAALRNEDACSPQKPARKKRGKKRIAGSDRAMNGELPIEMPDGPGGEKKRRKGAPSDGIDWEDCIIELLLLHGANEEEIEQGQYRRLLDLHVFCAVSASGHK

SEQ ID NO: 130557 - protein, 466 aa, Oryza sativa
  Clone ID: PAT_MRT4530_32708C.1.pep
MAPGQETATTTAPPRRQAEKAPPPPARAGSDLDPSRCSAREEAGGGHTLSSSRAATARTGASGGAASWSVVKSAGVQVQLNNRPEHHHITGSKIGPEFNSGERFPSRPNRIKIRATRRQAYWAGPARLLSATGSQQKMGLGQVVDRLMSASGPAGLYSGIGWSVLGKLPGLGARFGTYELLTAFYKDGKEDNYVSYSEAMLAGIAAGAVESVLCTPFELLKLRSQVGSVKPMKATDPANITKVAFPLLSKLLPGYVPDIRVWNSSVSLLSNLSPKHPDMMGALKQHPWMLTGSGKPPLPSDVQVPSRVIALEGWGALWRGLRPGMTRDCVFGGMFFSTWQFIHTAMLTWSAVNMNPQPSKLEEAGPVSPFASSLAAGFSGVVAAAASHTFDTAKSRSECTVIPKYIAMERRLLKWKVPGNWIERKTGISPADRNVLFRGIGQRMARSGFASFLLVGSYYFVIDQFL

SEQ ID NO: 130558 - protein, 118 aa, Oryza sativa
  Clone ID: PAT_MRT4530_32709C.1.pep
LTAIDGRYTIVVIPNAPDLIDILATNDVDISVVEGDAAGLGEFLAFVGNLLFPFLAFASLFFIFRRAQGDPDTSPGSLGWRLDFDRSKSKFEQVPENCVTFVDVLGADQAKLEQARLP

SEQ ID NO: 130559 - protein, 147 aa, Oryza sativa
  unsure (1)..(147): unsure at all Xaa locations
  Clone ID: PAT_MRT4530_3270C.1.pep
TQYNKPTTHIVDGPDIVEREGDDKEVHGGSGEEQWEEQRWRDGVIEEEEAVPADGAEAAPGAEEDRAGHQPPQQRWSRRRRRRRRRAAPPRRRVHLRPGGQGRRPPQALRHLRRLIRLMHMHHGQPCRRRXSPFCMHASVAGHALYM

SEQ ID NO: 130560 - protein, 174 aa, Oryza sativa
  unsure (1)..(174): unsure at all Xaa locations
  Clone ID: PAT_MRT4530_32710C.1.pep
EQRHPCSSNASVTEQLRQRQGAAAATRMKRRPPYPSLGTCHQPHRSSHLLLCPRKRDGEEEERSARSSGTGSRDAGFGEDGRGTAHAASALSRVLDTKIRRQVRGSERFMQVGAQPPMLPTHTTRXIAPEALSPDDDDTAGRTRSRSWWHFPPRSEAVDEGXQCTCPNAACGCS

SEQ ID NO: 130561 - protein, 334 aa, Oryza sativa
  Clone ID: PAT_MRT4530_32711C.1.pep
MPKPNHQVPEAAGEIGSAGRTSVKGRRGIRRRPRSASASSSWGGGAAGCKKKKAQVGEEEKEASSTVPAVYDANADIEEEYRLFLENVRVYENDDFVVEYEGVVVRYGGEAVADHGAGRGAPPVKGVPDPNQLNGSVHRQKLTAIDGRYTIVVIPNAPDLIDILATNDVDISVVEGDAAGLGEFLAFVGNLLFPFLAFASLFFIFRRAQGDPDTSPGSLGWRLDFDRSKSKFEQVPENCVTFVDVLGADQAKLELQEVVDFLKNPDSRRPPPPRPPSSTRPASPSPSPSSPSSAPLVPPPYSSSSLPALTDASSPALAPPLAPTHKDRRGKRDG

SEQ ID NO: 130562 - protein, 243 aa, Oryza sativa
  Clone ID: PAT_MRT4530_32712C.1.pep
MVGFVDAVLAALKLVHAPPPEKLHALVSMYGHAMDASSLLWSQCRRVLITHQTTQAITFDAMENALFRKATELHGAISSTMEETKALVEAAADDDPTEIARGSGDDVHTSARVMVDCVASSSRSPTYGGFVASGGYIDGYFSASWAPVLSCLSSKSGLSPWSNKSSPLRKFELAFHETYTAQKLWKVPSPELRGRLRKTITERVVSGYREYLLEHPELKRLVSRGNSNTPADLEEMLAELFEG

SEQ ID NO: 130563 - protein, 277 aa, Oryza sativa
  Clone ID: PAT_MRT4530_32713C.1.pep
MRRDCQIRHSIGSRFVESLYICRNGWNARASDAVRCWGDKEHLYDRDIGNCTAGVDFHECGHFAFMVRPNFTRIGCARASASTTASSSPTTTTKTRSSRLHLLPTPSCTICSSSLSSTPYLLPACLPHAHTADRTTADAAAFSACLMYIQLTGPPSLHFRKGEGVGRKGKGKGVSSARGPPLQLHLVHRLCGRSRRHPRHFAALRSRHDDLRLECDNFHRDAALPPRPPPPCSLLCSTSGLPSVDSPARTPTLFFILYCADESVFGVSHSLINIQKI

SEQ ID NO: 130564 - protein, 83 aa, Oryza sativa
  Clone ID: PAT_MRT4530_32714C.1.pep
MEEHGKHVKIFHHLVLLLRWRPSTSDDREDICKVYCKDCAPRAHDRVHMLVVAVLLRVTCLAQHFCYTLFWSYACKDRLGWAP

SEQ ID NO: 130565 - protein, 702 aa, Oryza sativa
  Clone ID: PAT_MRT4530_32715C.1.pep
MATRFLVLLFLLATSASSSSTSTSLATNTTDVGRDGGDNAVSFSFSSFHAEARGVNVTVVGDANINGGALQITPDSLNDASRYLTNKSGRVLTVFTVNVFRPNGTVPGEGFAFVIAPSAAAPPAGSTGGFLGLTNAATDGNATNQIVAVELDTEEQPYDPDDNHIGLDVNGVVSVATTSLKPLGIEISPVDPVKYDVWIDYDGAARRIEAYMAVSGQARPASPVLAAPLDLGATVAEWSYFGFSASTGLKYQLNCVLAWNMTVERLPRDDDGGGDHGKGLTLALAIGVPVAAAALAAALGYLYVAKRRRKVSGGDDGSGITGTMIRSLAGGPREFEYRELRKATNNFDERMKLGQGGYGVVYRGVVVGDHTFPGGAGSAVEVAVKKFSRASTQGQNDFLAELSIINRLRHKHLVRLVGWSHDNGELLLVYEYMPNGSLDQHLFGAAAAERRLLGWDLRYSIVAGVASALHYLHDEYDQKVVHRDLKASNVMLDAAFSARLGDFGLARAIETDKTSYMEEAGGGVHGTVGYIAPECFHTEKATRESDVYAFGAVVLEVVCGRRPRCDIDGFCFLVDWVWRLHRDGRVLDAVDPRLDGAFDAGDAERLLLLGLACSHPTPAERPKTMAITQILLRSTPPPEVPPFKPAFVWPAIDGGIDTTTSTASSHVSTNMTSTSTWSGNFMRGSRSHAPPTPEQDASDSVV

SEQ ID NO: 130566 - protein, 86 aa, Oryza sativa
  unsure (1)..(86): unsure at all Xaa locations
  Clone ID: PAT_MRT4530_32716C.1.pep
PAGTVTTIQIDIHRSDARKAKERRSLSMLAHVAIRGMRWRPRKLSSLCXMNISKAQMPTTSSLASLLTSNDGNHLPSHLHASIRYS

SEQ ID NO: 130567 - protein, 117 aa, Oryza sativa
  Clone ID: PAT_MRT4530_32717C.1.pep
MTALCRCRLHVYRGCTAPSSAHRCSRHGSYLAPFFLQPCLSDLVTWIQELEGGKRKYEEITITLIPDSKPSEQDAKAYKEFFSEPLTTEHIQALADLFGMDLIQAPPVQGSPIAVEA

SEQ ID NO: 130568 - protein, 116 aa, Oryza sativa
  Clone ID: PAT_MRT4530_32718C.1.pep
MSPSPTWRLADLRYKRDSLGGPKASNLIAKTTTTAYEAGAYRSQVAGATTYERPNLKVGKRRFPVGQLEYDLTLLVTSHNYQHGIPATARKDTPSPTCHHRTPPVSDPHPLQIKPN

SEQ ID NO: 130569 - protein, 507 aa, Oryza sativa
  Clone ID: PAT_MRT4530_32719C.1.pep
MASSSSDLTLDDHHHLTAVAAASGQATQKLQEFLSRLEEERLKIDAFKRELPLCMQLLNHAMEAYRQQLEAYQMGSQHSAAAAAAARAPLVLEEFIPVKNIGIDVVAADKAAAAGGNSVSSEKASWMVSAQLWNAPASASAADTAAKGPQTPKEHSEHHPLDTSPKLITALDGGGGGGGAFLPFSKDNAMGDGSAAAAAALPELALAPAEKAADAITIAAGEVDKKPYAHDNGVVARSREAQNGGKPPSTPSDGQAVPPPPQPHRKARRCWSPELHRRFVNALQILGGAQVATPKQIRELMKVDGLTNDEVKSHLQKYRLHTRRPMPSPAPPTAATPQLVVLGGIWVPPEYATQAAGPAIYGAHPATQPHYTAAVAAQEYYHHHHHHLQHHPAAAALVHHRAVAPPPPLPPQQQLAPPYSAKSSASARLGSPDSDGRGSGGGGGAAASGAGRDMSESIEEEGEGEEREDDDDDDEMAATNNAHAVDGDDDNDEINTTTTTSAGAINY

SEQ ID NO: 130570 - protein, 63 aa, Oryza sativa
  unsure (1)..(63): unsure at all Xaa locations
  Clone ID: PAT_MRT4530_3271C.1.pep
FFFFFFFFFFFLLYXKRETVHFYRFXLYRTKWXKIEIXFXXHWRKPKEKQSAFLRXLNNXSRK

SEQ ID NO: 130571 - protein, 38 aa, Oryza sativa
  Clone ID: PAT_MRT4530_32720C.1.pep
MAIKGWPNLWADKAPKAIKEQKFESYFGRRIAVHASMS

SEQ ID NO: 130572 - protein, 247 aa, Oryza sativa
  Clone ID: PAT_MRT4530_32721C.1.pep
SCRLLLVALVSAAAVVAGALLPGCAAAAAAGEKVPLALYYETLCPYCSRFIVNHLAGIFEDGIVDAVDLRLVPYGNAHVVGANNTISCQHGSEECFLNTVEACAIDAWPDLRVHFRFIYCVEDLVVNHKQREWESCFGKLNLDPKPVTDCYKGERGHQLSLKYGRQTDALQPPHKYVPWVVVDGQPLYEDYENFEAYICKARPPTPTVLEVAEAVNRVSYYDSGDIRLKPDEDGHAKIKKVVPDDDD

SEQ ID NO: 130573 - protein, 256 aa, Oryza sativa
  Clone ID: PAT_MRT4530_32722C.1.pep
MAAIRRFRPALLLAAILLLAAGAVEGKKGGKVDVALYYESLCPYSAMFVVGSLAKVFRDGLLDAVDLSLVPYGNARVKDGKISCQHGSEECFLNTVEACAIDAWPDLRVHFRFIYCVEDLVVNHKQREWESCFGKLNLDPKPVTDCYKGERGHQLSLKYGRQTDALQPPHKYVPWVVVDGQPLYEDYENFEAYICKAYKGHPPKVCEGLARPPTPTVLEVAEAVNRVSYYDSGDIRLKPDEDGHAKIKKVVPDDDD

SEQ ID NO: 130574 - protein, 33 aa, Oryza sativa
  Clone ID: PAT_MRT4530_32723C.1.pep
SRKLEKAEDNTKIILVAYHSQAQNLNPVLANSK

SEQ ID NO: 130575 - protein, 212 aa, Oryza sativa
  Clone ID: PAT_MRT4530_32724C.1.pep
MDTTTNINDYINNNKDYTEDEVTFAQVEMVYDNEQTGQAQGSVAERRPRAAARRGGLGRGEEARGAGTAGSGEEAHGAGAAASGEEAHDRGAAGRVDAVHDGVAVTACGAGAVGAGEEDIDATTPPPRTAGGDRNSSHKRQVATTPKRRRRRGRPTAPLFLSAPFQSGETNKTKKESGAPSGLEMVKTDENRAAFSVSYGGRLLPCCRWGVR

SEQ ID NO: 130576 - protein, 96 aa, Oryza sativa
  unsure (1)..(96): unsure at all Xaa locations
  Clone ID: PAT_MRT4530_32725C.1.pep
IALLLHSYGSRSNLSFAHASSPPHRAPTLQSSPLPPPPQQLSPRSPXPPPPPPPPLVPFLPLATSSLFSEGEGEVTAARAKVVPGQREGKAAPAGR

SEQ ID NO: 130577 - protein, 958 aa, Oryza sativa
  unsure (1)..(958): unsure at all Xaa locations
  Clone ID: PAT_MRT4530_32726C.1.pep
MPSVSRAVCVQRASGNNGRRCRDGAAAAGRRSVVAQRARHGKPEVAIRSGSGGSARGGHCSPLRASGLCQGPTPQPTPMQRVFHFGKGKREGKKAMKDLRGGKGANLAEMECIELSVPPGLTVSAEARPKYQAAGKTVPGGLXREIVAESQWXVMEYMAAGLGDPALPLLLGVRTAARESLPRLMVTMLYLGLSDESAAGVVAISNQGFADDVFRRFLHMIGKLTARDLIMDIPHALFEEKLEAMKAVKGLHNDTDLTATDLKELVAQYKDVYVEAKGEPFPSDPKKQLQLAVLAVFNSWDSPRAIKYRSINKITGLKGTAVNVQTMVFGNMGNTSGTGVLFTRNPSTGEKKLYGEFLVNAQGEDVVAGIRTPEDLDAMRDHMPEPYEELVENCKILESHYKEMMDIEFTVQENRLWMLQCRTGKRTGKGAVKIAVDMVNEGLVERRTALKMVEPGHLDQLLHPQFENPSGYKDKVIATGLPASPGAAVGQIVFTAEDAEAWHAQGKDVILVRTETSPEDVGGMHAAVGILTARGGMTSHAAVVARGWGKCCVSGCSSVRVNDASKIVVIEDKALHEGEWLSLNGSTGEVIIGKQPLCPPALSGDLETFMSWVDEVRKLKVMANADTPEDATTARQNGAEGIGLCRTEHMFFASDERIKAVRQMIMASSLELRQKALDRLLPYQRSDFEGIFRAMDGLPVTIRLLDPPLHEFLPEGHVEDMVRELCSETGAAQDDVLARVEKLSEVNPMLGFRGCRLGISYPELTEMQARAIFEAAITMTNQGIQVFPEIMVPLVGTPQELGHQVDVIRQIANKVFTDMGKTIGYKVGTMIEIPRAALVADEIAEQAEFFSFGTNDLTQMTFGYSRDDVGKFLPIYLSQGILQHDPFEVLDQRGVGELVKLATERGRKARPNLKVGICGEHGGEPLSVAFFAKAGLDYVSCSPFRVPIARLAAAQVLL

SEQ ID NO: 130578 - protein, 89 aa, Oryza sativa
  unsure (1)..(89): unsure at all Xaa locations
  Clone ID: PAT_MRT4530_32727C.1.pep
SGFRAPFTTPPSTSMPPIVPPQVKGLVVDXIGFAQFGTTQAAHFSQAARSASQATVSASHSAQFXRXAGTSSQAAGTSSQGPPLDHAGT

SEQ ID NO: 130579 - protein, 195 aa, Oryza sativa
  Clone ID: PAT_MRT4530_32728C.1.pep
ELHDIPLFFSLHNICANVKCTSPSAVLFRSAVLNAGYRISSTHVNPLGLKTDAPWDVIWDIMRCWVKNHPVKEQPHDSVGTAILSKSPKLEANFSRAAAALSRAQAKKVKRFLPNPERHWGPKIRAGRKITSKHASLLGPDVVNRVINGAASTEDEKVAEPNNPTTETGGDATNEEDEPSTKRQKNGDVGLATEP

SEQ ID NO: 130580 - protein, 266 aa, Oryza sativa
  Clone ID: PAT_MRT4530_32729C.1.pep
MPRARVVHVMLLLFVALGACRATHNITAILADHRDLAEFGRQLTATGLADDIDGRNTITVLAVDDAHMAQLRARGLPREALRHVLSLHVLVDYYDDAKLHRLPGGSAVVSTLFQASGDAPGSEGMVKIAVRRGGRVAFVPQDVDDARANVFYVKSVHEAPYNISVLQVSAVITSPAPEAPSSATESKPNSTDASSKHGPPNAGAHAAPSPVGQGSSSDDGADEGKKSGDGGDGGKKNGASVGAAPRGLPFALAFLMAASAILVVNW

SEQ ID NO: 130581 - protein, 134 aa, Oryza sativa
  unsure (1)..(134): unsure at all Xaa locations
  Clone ID: PAT_MRT4530_3272C.1.pep
HEIRCMHMWPMDGIKKFETLWYLPPXTVEDLLKQIEHLLRSKWVPCLXCTKVGLVYRENDRSAGFYNGWXWTMWKLPMFGCTDSTQVLXELEEAKKALPXDHAVRIIXETTSGRCKLIIFIAYKPPGCEESGGN

SEQ ID NO: 130582 - protein, 262 aa, Oryza sativa
  Clone ID: PAT_MRT4530_32730C.1.pep
MASHGRDRDVLAAIRGGDFLLTRRLRDLDDGGAPLRWRVSDCRGGYLLLVNSDAGLVATVNPMAPRMTDFINMPFRINDSAANNAGAADATGQEEESSPISLDLHLICSGEDPMSFQLATVFSNGTNGWCHLPWVDIEARASPVAPHDGNKHWLKPGMQANGLIFWPFKNKEHMLVLDTNTMKFTVHEIPVFSEVQQGCSFAVGETKDDVPCIVCVVGTTVSVWMRKFDEKGVERWRFADSILSSEEANQLGIHGGLKVVTL

SEQ ID NO: 130583 - protein, 410 aa, Oryza sativa
  Clone ID: PAT_MRT4530_32731C.1.pep
MGAASCNLQGEKAVAQAGKEILTAIKGMNSNSAPGPDGFGPSFYSATWNVIKEDVLKLTTGFCSNSVQLERINRAHIVLIPKPGKENTVKILSKVLALRLQKILTRMIHMDQTGFLKGRCISENLIYATELIQACHARKCQTLIIKLDFAKAFDSVNWQSLFQILSVKGFPDNWISWIKNLLQTSKSAVLLHGIPGKWITCKKGLRQGDPLSPYLFILVADVLQRLLERNLQIRHPIYHDRPCATIQYADDTLVICRAVEDDVLALKSALLQFSKATGLQINFAKSTMISLHIDQSKESSLSELLQCKLESLPMAYLGLPLSLHKLTSTDFQPIVSKVDRFLAGWEAALLSQAERLILVNAVLSIVPVYAMSAFKLPPKVIEAIDKRRRAFFWTGEDVCSGAKCLVAWDE

SEQ ID NO: 130584 - protein, 89 aa, Oryza sativa
  unsure (1)..(89): unsure at all Xaa locations
  Clone ID: PAT_MRT4530_32732C.1.pep
ITEKKISSGGGERPQHVTRRCIHRQRGSVRGVHISXLASPACACAHQPARADRSETWSRHSRARNDRAREISDPCVVSLSPRPRARTRG

SEQ ID NO: 130585 - protein, 2078 aa, Oryza sativa
  Clone ID: PAT_MRT4530_32733C.1.pep
MSHCLRASPFLSPPPPLLHPSRRRRHRQGGCIHTSPGTRPLVARARFDPPPLLRLKVSDSSDCPAPHHPHSQHQPLLPTRRQQQQPPPPYQALVASLAPLWREGLFLVRCSVFAAALSVAAALSWYAQLRARSFVESRLLPAACAALGEFLQREVHLGRVRSVSPLGITLHTCSIGPHAEEFSCAEVPVMKIRVRPFASLRRGRVVVDAVLSEPSALVAQRKDFSWLGLPAPSEGSPKRHSGEEGIDYRTKTRRLAREKAAEQWNEERDKAAREAAEMGYIVPSAQSISPSIDEMMEDDGPVDTGKSSPHLCPDEMHRKDHHIDAGIDSSSKHADLEKSFGVKARIPGISFWSRMIPNPSRRRYRRKAHSKLISDTDNSSQQRILRRSAYAAVAYFQNECSGNPDDSLPGPGESSSDGGHTNGGGEEGSPNDGPTEYSETTSMDYGELPPEKSNFASTMLIGNTDVLNGSSHNQQPSQISSHSWENNEQVSEAPVLKKRKNISEDDYRQEFDFGAFGSCTYAHNWLSFWPFQLKGFPVGFNAPSASLNVQIQKLRSLFAIGPGDNSAELSQGVGQIHPGAVQQTLPITLDSVYFNGGNLMLLGYGDQEPREMKHANGHIKFKNSYNRVHVHVTGNCMEWRQDRTSQGGGYLSTDVFVDIAEQTWHANLNVVNAFAPLFERILEIPVVWNKGRATGEVHLCMSKGDSFPSIHGQLDVKGLAFQILDAPSSFSDIVATLSFRGQRVFLHNASGWFGDAPVEASGDFGLNPEDGEFHLMCQVPSVEVNALMKTMKMRPLMFPLAGAVTAVFNCQGPLDAPVFVGSGIVSRKSLSVSGMLPSAASEAVMQNKESGAVAAFDHIPFTHVSANFTFNLDNCVADLYGIRACLLDGGEIRGAGNVWICPEGEGDDSAMDINLSGSILLDKVLHRYIPGGIQLIPLKIGELNGETRLSGSLIRPKFDIKWAAPNAEDSFSDARGNIVIAHDYIMVNSSSVSFDLNTHIQTSYIDDYLLHKEMYQRKKIMPLIVEGVDLDLRMRGFEFAHIASSIPFDSPRPLHLKASGRFKFQGKVVKYSQLVDEKNHGAIQGTIDQSKLENDVSRLVGEISLSGIKLNQLMLAPQSTGFLSISPDSIMVRNLPLDELEFASLRGFVQKAELQLNFQKRRGHGLLSVIRPKFSGMLGESLDIAARWSGDVITMEKSVLEQANSKYELQGEYVFPGTRDRFPMESQSNGFIEKAMGGHLGSMMSSMGRWRMRLEVPGAEVAEMLPLARLLSRSTDPAIRSRSKELFMQTLHSVGFNAESLRDQLKALEMYPDWLDDDTIEDITLPGLAELRGYWRGSLDASGGGNGDTMADFDFNGEDWEWGTYKTQRVLASGSFSNNDGLRLDKLFIQKDNATLHADGSILGPLTNLHFAVLNFPVGLIPALVQAIESSTTDSIHFLRQWLTPIKGILHMEGDLRGTLAKPECDVQIRLLDGTIGGIDLGRAEVLASVTPTSRFVFDANFEPTIQSGHVNIQGSVPVTYVDSNSIEEDLEGGDGKQGIIRIPVWAKDRGLTNDISETRIMRDKPDEGWEFQLAESLKGLSWNMLEPGEVRINADIKDGGMTLITALSPYSNWLQGYAEVLLQVKGTVDHPVVDGSASFHRATVASPFLRTPLTNFAGNVHVISNRLCISSMESRVGRKGRLSMKGTLPLHNIEPSANDKIELKCEVLDIRAKNILSGQVDSQLQVTGSILRPDVSGMIRLSHGEAYLPHDKGNGAVATRLSSNKSISVPAGFDQRTVSRDVSHFLGSLSTSPDGQQSETERTPEHGSFKPNIDARLNDLKLTFGPELRIVYPLILNFAVSGDLELNGMVHPKYIRPKGVLTFENGEVNLVATQVRLKNDHLNVAKFEPDLGLDPILDLVLVGSEWQFKIQSRASMWQDNLVVTSTRSVDQDVLSPSEAAKVFESQLAESLLEGDGQLAFKKLATATLETLMPRIEGKGEFGQARWRLVYAPQIPSLLSVDPTVDPLKSLANNISFATEVEVQLGKRLQASVVRQMKDSEMAMQWSLIYQLTSRLRVLFQSTPSNRLLFEYSATSQG

SEQ ID NO: 130586 - protein, 131 aa, Oryza sativa
  unsure (1)..(131): unsure at all Xaa locations
  Clone ID: PAT_MRT4530_32734C.1.pep
MAGPLLVVMIVXVRVLLFXRPLSDRFIGLLTCWRWPXGLVSRVWCMFSGCPLLPGVGSGSVLMTRPCLPXFFSMFVVRGVSVLELLMLLIWSCCAVFAXFVSSVMRLVFVVRAALLVVVVSFLLAWLGLGD

SEQ ID NO: 130587 - protein, 125 aa, Oryza sativa
  Clone ID: PAT_MRT4530_32735C.1.pep
MKYMRMNAQLLQGLCSDGIWKYVLLWSFQGNRHHGILTWGDVYVDKVITEIKGDLYDSPIDSKNQIVMSTLYNNDQYQSYPLCPIEAALLSMSSHTYSLGEELIGKVALTGQHCWILPMSSLQHL

SEQ ID NO: 130588 - protein, 79 aa, Oryza sativa
  Clone ID: PAT_MRT4530_32736C.1.pep
RGENGTETFRIPDLFSKTESVGRNFFGIFRKRKRNRKYFLGNGIGNDKGSFRRNSESVGNFLEIFSEFSEIFSELPEIL

SEQ ID NO: 130589 - protein, 74 aa, Oryza sativa
  Clone ID: PAT_MRT4530_32737C.1.pep
SDGVHRVHDAPTQLHYAVNITCRTRESHDCLLQLEINIYIYIYIYMRCFTVFARYLKVLRGGTTCKRWNKFIVT

SEQ ID NO: 130590 - protein, 72 aa, Oryza sativa
  unsure (1)..(72): unsure at all Xaa locations
  Clone ID: PAT_MRT4530_32738C.1.pep
GPHVSXRXLRXXGXLWIDSYLCQSXXXXQLVVNLIXRFGXXKLKWMVGEKXXTGSXKTXLXLSALLQKPARD

SEQ ID NO: 130591 - protein, 163 aa, Oryza sativa
  Clone ID: PAT_MRT4530_32739C.1.pep
MAVTLGARSWASMCTEAFLSTHCMERDEIRGNETSVLRSHRCLLLLLRCCHHLLSLTAVVIACYCFWKVRGEGGFLYSHRCLLRPPMAANNLIAVGYPRRVIGHSALGAVCPCSGRLVMRRSAYSAKSRRRRHRSSARNGEEEMEKRRRWRIPGGTCEEEERR

SEQ ID NO: 130592 - protein, 47 aa, Oryza sativa
  Clone ID: PAT_MRT4530_3273C.1.pep
HRKSILACRGNRGIYLIGELVLNPHVQSNKHTRTLTCFHYISLIINL

SEQ ID NO: 130593 - protein, 178 aa, Oryza sativa
  Clone ID: PAT_MRT4530_32740C.1.pep
MAAHLRLNRILKCSLAQQSSVDASVHCRPATATATKYARALHRVNIKQILMGSSPAVWLLRCSGRRGEYEAPPNDDREKINKATTLKDVVGGVAEVLLANKLATREGVDKVAVAAAQNDRRHASGGRELTRSIQSRSESIKNPIPHCADVFFFSAGKAITDGRDKVRERTHSTKSSCS

SEQ ID NO: 130594 - protein, 239 aa, Oryza sativa
  Clone ID: PAT_MRT4530_32741C.1.pep
CRAGGVQFRRQRRRRLPACFCFLSLLFSPFLLRKRKGREKEEKSNQPKKERPSSSPDRFFFFFSRQHSTSWLDKAPWCPNSDRGTPRTSATPSSSTRCARTRPRPRRRRRRRRRTTTTTTGKRRRARRARTATGTATRRRRRTTTTTTGRRRRRSSSSITTTTRRRSVAAMATTGGAAATAAARRPRPAAAAASSRRPSRTSRGTAATATAVAAAAATGTAAPAPARWPRRRRATRCRR

SEQ ID NO: 130595 - protein, 69 aa, Oryza sativa
  unsure (1)..(69): unsure at all Xaa locations
  Clone ID: PAT_MRT4530_32742C.1.pep
MAAXLAXLHSLXERXXAXXSSHPNXLIXLFSRDXTQGKGILQRXQLLXRXFDALXXAXKEKYCSLLKDI

SEQ ID NO: 130596 - protein, 261 aa, Oryza sativa
  Clone ID: PAT_MRT4530_32743C.1.pep
TPIIKPSLVSLSCPAIIPACFCFLSLLFSPFLLRKRKGREKEEKSNQPKKERPSSSPDRFFFFFSRQHSTSWLASAPWCPNSDRGTPRTSATPSSSTRCARTRPRPRRRRRRRRRTTTTTTGKRRRARRARTVTGTATRRRRRTTTTTTGRRRRRSSSSITTTTRRRSVAAMATTGGAAATAAARRPRPAAAAASSRRPSRTSRGTAATATAVAAAPATVRAAPAPARTRRRRRCITTTSSSSTPRSRGWPRRCRATRCRR

SEQ ID NO: 130597 - protein, 255 aa, Oryza sativa
  Clone ID: PAT_MRT4530_32744C.1.pep
MGREERFPVWEAALLAGVAAAFATGLVGVYLSMPHSDYSFLKLPKNLQELQILTDHLEDYTSDYTVQVLVGYCAVYIFMQTFMIPGTIFMSLLAGALFGQLGGVALVVFAATAGASSCYFLSKLIGKPLVFSLWPDKLGFFQKQVAKRREKLLNYMLFLRVTPTLPNTFINLASPIVDVPYHIFFLATFIGLIPAAYVTVRAGIALGDLSSLSDLYDKQSIALLFLIGVVSVTPTLLGKNEKQQGKGPEMVASSS

SEQ ID NO: 130598 - protein, 78 aa, Oryza sativa
  Clone ID: PAT_MRT4530_32745C.1.pep
MSPTLSHTSNEGSRQRKKAALRPTSTIDTNVQVQQWAPPIVGDKTDPNHPFELGSICVQSHVDPRDTNRLASAHPLQG

SEQ ID NO: 130599 - protein, 217 aa, Oryza sativa
  unsure (1)..(217): unsure at all Xaa locations
  Clone ID: PAT_MRT4530_32746C.1.pep
SVLHTRIISHFWLGLMKANNTFLNMGSWIVNNGQQTRFWEDKWLSNXLAFKDKYPYLYAPVRRKNSSIATVMGSVPLNVSFRRALVGQNLVFCHDLCASIIHIQLNQFSDCVSWNYNQNSRLCVRSMYLALINNGYIERNKIIWKLKMLLKIKIFMWYLLKGMVLMKDNLARQNWNSCLRYCLCMKNETINYLFIDCHYAKFIWRAGALRLDAPLMH

SEQ ID NO: 130600 - protein, 248 aa, Oryza sativa
  unsure (1)..(248): unsure at all Xaa locations
  Clone ID: PAT_MRT4530_32747C.1.pep
MSPETETKENVKFQAGVKNYKLTYYTRDESTKPMTPIXAFRVTPQXGVPPKGEATIATKSSTGTWTIVWINGLTSLDCYKGLCYHIKPIVGKENQYIAYIAYLLDLXFEEGKSTASSIKXTEIVFGFKAPRALVLYVQXLRIPSTYSKTFQGPPHGIXVARDKFNKYDCPLLECISKLKLRLSAKXYGRAXYEFLCGGLDFTKDDENVKSQLFIRWRDCFVFSAKAIYKAQAETGXIKVHYLNATEKT

SEQ ID NO: 130601 - protein, 232 aa, Oryza sativa
  Clone ID: PAT_MRT4530_32748C.1.pep
MEKWRFYGGHQFQSYSFHEEENLFQDWSLDYLLLGEDEPFFTHHFSTSVHSNFVQDELYTLFDGDILSIWGDMKEDAYHRSDKDGGEKEEKLDHEKAMELQLQRLPSGRQSGEKTLTFELVSQYFCLPIKQAAQELNVGLTLLKRRCRVLGIPRWPHRKVKSLETIIKNVQELGMETGQDEDNTRNAVEMLQQTKKLIEQSPDAKLDDWTKMLRQACFKENYKRRRLLAIEG

SEQ ID NO: 130602 - protein, 173 aa, Oryza sativa
  Clone ID: PAT_MRT4530_32749C.1.pep
MSTESTQSSTSSASSGGSSSTTEFLHPYATVAVKSHVPITLENTLNASEGSCRMPIAYKSPLLQNVQERCSKFDDTMISQVHCAMGNLAILKSIMEVNDEECWIADPCMKRLPNRGNYVFSDQTLETIGHILVFPGIPAGEKYFNQLSKPWCQLSMRRKRHCRLTGATIQEFT

SEQ ID NO: 130603 - protein, 157 aa, Oryza sativa
  unsure (1)..(157): unsure at all Xaa locations
  Clone ID: PAT_MRT4530_3274C.1.pep
LIGLIGSNQWLSRGSVXXSRRRLIGGXMVANXSGAPAXXESENERFRDQXXCQRDGGRDSXRWTAVLWQVASTRLASPGAGREFSXXMFSPASGRSSCLLDAQCLPSSCQDREAASCRCAAIPPDGEGATEEKHADAPGARAGRRRRRSTTAGRGRR

SEQ ID NO: 130604 - protein, 60 aa, Oryza sativa
  Clone ID: PAT_MRT4530_32750C.1.pep
APTRPPTRPPTRPKKKRTNKEESLLCTVKYRLPKFTFRSQIRLCSIGTSQVKRSDELTYD

SEQ ID NO: 130605 - protein, 421 aa, Oryza sativa
  Clone ID: PAT_MRT4530_32751C.1.pep
MTRSRSVRQRSKKKRVHALEVATERWKVLTKVLAVVDALKKEEEHVTPLKRLEILRPQLGLTKPNKVAHFVRRSPQLFEVCRDSRGVMWAGLSPQAEALVEEEARLLEDHSRTAAEYVTRLLMMSVDRRLAIDKIAHFRRDMGLPHDFKTRWVHMFPEQFRVVRLEDGDYLELVSWNPNWAVTELEKKTAALTGDANANGIGSPPGELSLSFPMKFPPNFTSYYKFRGKVHHYVKKGNTEQFQKTTYLSPYAEAGGLTPGSPEFDKRAVAVMHEVLNFTLEKRLVTDHLTHFRREFVMPQKLMRLLLKHYGIFYVSERGKRFSVFLTESYDGTELIEKCPLVRWKEKVLQLTSYRGRIKNLGKFAELSDSEDYLFGNDDSSGATDSILDVKSEDSDDIMDDGALADDTEMDVGDLSDCCIE

SEQ ID NO: 130606 - protein, 55 aa, Oryza sativa
  Clone ID: PAT_MRT4530_32752C.1.pep
YACRPPFTVDAPSTIHATIWQSSSGGRRRCGRGAVEVRSQPSGSRTPSAFGRRPG

SEQ ID NO: 130607 - protein, 162 aa, Oryza sativa
  Clone ID: PAT_MRT4530_32753C.1.pep
AKVFLKGSFLTLFGWGAHPSVLEKACENPPKDGISCELINLKTLFPWGKKTVKAFVNKTGKLFFNHEAPIPGGFGAKISASIPEGCFQRLKAPLPKVLGLDTPFPFVYETFYMPPKNKVLGAIKTTVNFWGGGANYLWGVPWQDRQKFCAPYWWVEPEYAFP

SEQ ID NO: 130608 - protein, 132 aa, Oryza sativa
  unsure (1)..(132): unsure at all Xaa locations
  Clone ID: PAT_MRT4530_32754C.1.pep
IPAALTPPRESPPPSXAPTRFARILPPRDRPTKPHSRRRDLPHPPSPLQSTXPPRSSLPPPPPISPPIRCDHRPADRAPITVSPVSCHPPLLQPSPPRRQFLMLVAESETIRLVPPSRLPPPGKPSRSGICS

SEQ ID NO: 130609 - protein, 141 aa, Oryza sativa
  Clone ID: PAT_MRT4530_32755C.1.pep
PHPEGRGVILCIENALADAGVAKEDINYVNAHATSTQMGDLKEFEALNRCFGQNPQLRVNSTKSMTGHLLGAAGGIEAVAAIQAIRTGWVHPNINLDNPEKNVDVSILVGSQKERCDVKVALSNSFGFGGHNSSVLFAPFK

SEQ ID NO: 130610 - protein, 71 aa, Oryza sativa
  Clone ID: PAT_MRT4530_32756C.1.pep
ALHIHSKANLAPLVPAEPDCLHVDYTMNLSLKTSYLECWASMASFAIVFVKIPASSFDEATTLALDGQIRL

SEQ ID NO: 130611 - protein, 134 aa, Oryza sativa
  Clone ID: PAT_MRT4530_32757C.1.pep
ILLFNCMSVRDPMRLLPHLLDTSTQNGVHFEMALFVPNQSQYNKLGTNSSAPAEPEQIDLSWQLSLQRVWQKLLHGDKGMNNTNSSENSLVFESLPLAMEWLRTNARQNRSTSFQVLVTGSLHLVGDVLRLVKK

SEQ ID NO: 130612 - protein, 450 aa, Oryza sativa
  Clone ID: PAT_MRT4530_32758C.1.pep
MRCLPFLHGDSKEEDPVNKSASVRSLSTTSTERDVRSGSDFNSLNVSDMSAESIRRTQYPSFTDRPSNLRVFSFSELKNATRNFSRSLMVGEGGFGCVYRGVIKNSDEPTERTEIAVKQLNRKGLQASYFSSELYRLQAFNAHSNFLLLGQKEWLTELNVLGIVEHPNLVKLIGYCAEDDERGVQRLLVYEYMPNGSVDDHLSSRSNSTLSWPMRLKVALDAARGLKYLHEEMEFQVIFRDLKTSNILLDENWNAKLSDFGLARHGPSEGLTHVSTAVVGTLGYAAPEYMQTGRLTAKSDIWGYGVLLYELITGRRPIDRNRPKGEQKLLDWVKPYISDIKRFPIIIDPRLEGHYNLKSMTKLASVANRCLVRLPKSRPKMSEVYEMVQKIVASIETGTPQPPLHYHGSVSEPGSKRPKKGSLKRRFQEFKFGCRQIVWRSWKPEIIKTC

SEQ ID NO: 130613 - protein, 144 aa, Oryza sativa
  Clone ID: PAT_MRT4530_32759C.1.pep
LDPSSSRLLRTLTSKPSSSSNPLSPRLLRTLTSKPPSPLSSSDPPPPRLFPTAHRLPPPPPDPRGSMWGTAAVAGSKRGTIAVAPRCLLHAAVDVSTSAAASCLVTSPCPSPPSREPPLPATTSSASTPSRPPSRGEERRKEID

SEQ ID NO: 130614 - protein, 170 aa, Oryza sativa
  Clone ID: PAT_MRT4530_3275C.1.pep
SPSPPSPPPPSPPPPAPIFHPPCSPPPPPPPAPQPHPPCPELPPPPPPPPPCGGATPALSPPPPPPYYPGPWPPVHGLMATDPQRTIWITTSSPAALIEFLRRMFGNMHVFRSCSSHPANRQQRKSHTTTSVLGWLIDDYRREERSKVHKILFGYDLSASASKQFVLLWC

SEQ ID NO: 130615 - protein, 90 aa, Oryza sativa
  Clone ID: PAT_MRT4530_32760C.1.pep
PPLFLFFFLFFGKGAGLGLPLDPPFSIQFKQTAKTFNFFDLPENLGLVWQIFPAGRRNGLEINGNHPIGTKAKTSKKGLAYPQSKILPFH

SEQ ID NO: 130616 - protein, 71 aa, Oryza sativa
  Clone ID: PAT_MRT4530_32761C.1.pep
MQYQPLDSSGTDDDLPPTYQPRGPRVIFNGNGSLPQPNLHSNVDREIRQIEQQAYTGVLRAFKVQSDAITW

SEQ ID NO: 130617 - protein, 247 aa, Oryza sativa
  Clone ID: PAT_MRT4530_32762C.1.pep
MPELEVCSPASSGGASPPESPVEGRRGGGGGEKRGRSGDGGRHPSYRGVRMRAWGKWVSEIREPRKKSRIWLGTFPTPEMAARAHDAAALVVKGPAAVLNFPDMAASLPRPASASPRDVQAAAARAAAMEPPQPPPSSLTVQADSAAAAFLTPKNGGVSGAGAADDELEAIVELPRLDELDAAELVFGAAFQDTAAEHPWCDPVWIDGGYAAAAAAAAAAAAHDDLFGLDADHHGWAQSVGALLWNL

SEQ ID NO: 130618 - protein, 116 aa, Oryza sativa
  Clone ID: PAT_MRT4530_32763C.1.pep
MGPTCRRLRGAASRVAVPCQGKCVTDRWGLVVVPSWMARIVGVVHVFWARRNRACHVVIWTVRRVIDVGPRLWLIRDEKYQIIILVLVWVAVDAADVKVGVALAVRGIIGHVFKYV

SEQ ID NO: 130619 - protein, 148 aa, Oryza sativa
  Clone ID: PAT_MRT4530_32764C.1.pep
AEVTNQLLGKRKIQDLVSQVDPLGKVDPEVEDLLLEIADDFIDSVTAFACTLAKHRKSSVLEAKDVLLHLEKNWHLSVPGFLREDKNPQRHPVKVSVDPQQPECDASGIRSTGHKLVLTIQLPTIKQDLRLLSLYQCPQWGLCQKWPV

SEQ ID NO: 130620 - protein, 105 aa, Oryza sativa
  Clone ID: PAT_MRT4530_32765C.1.pep
FFFFWTWSHKNIASPRSKLFIPMPVVLAIRYFQTGIIYHSTIDFGTGVSPQFAYGKQLPTILLTLSGDTCPLAGIMKHHTCTYFWHCFLIPYALTINSGGSTCYF

SEQ ID NO: 130621 - protein, 149 aa, Oryza sativa
  Clone ID: PAT_MRT4530_32766C.1.pep
MLRSNMLPLLARGRGRHRSRYLARPRPLHIEVVATSANAVASPATRRGREAAPLLLLNEADVSARQSGLPPQLLPLALSYGYGFSRVGPNAIPMPPTQNKFTLGPLSCPRFCSHAVHTIGLYHYEYRFDYLVMKESFHPGGYGSIATFH

SEQ ID NO: 130622 - protein, 65 aa, Oryza sativa
  unsure (1)..(65): unsure at all Xaa locations
  Clone ID: PAT_MRT4530_32767C.1.pep
ISVHSSILSSSLGSILLDQCYMKDTEYMLQEHKSIRTPDNGVDHLXNYLCHIAMTDLIXKYIGYA

SEQ ID NO: 130623 - protein, 74 aa, Oryza sativa
  Clone ID: PAT_MRT4530_32768C.1.pep
MESSEIPNFFRDVTYRCRVIRTFGKRKPGQDRHLRSKKVNLICSPEMIPEMMEYLKIVLPLVEKCFLVPVRNPL

SEQ ID NO: 130624 - protein, 157 aa, Oryza sativa
  Clone ID: PAT_MRT4530_32769C.1.pep
MAGEVASSVSFWNSKVMLPLYNCIEQRSYLDTWMAPFHVSKLKYILSNSFSDISFWPISGDLRSALVNGEDRDYAQGGAEVTRVRILGGQLQSTVGIGTKLKEELRSRLLSISGDEVGYEMVHGGWIPCRRDIRNGLHEVAMQRLGWIQTVSPWRAR

SEQ ID NO: 130625 - protein, 469 aa, Oryza sativa
  Clone ID: PAT_MRT4530_3276C.1.pep
MSWRRLELAALCAYALGFYLVVIRKSLRLSHDYSGRLYGLRAGSLAGHLNDLSDAQWRNFRGNLPVLTIVMGAFLMLANMLRYCYSLKGRGASLVWLLLSVTYLCYLHGACVSFILLIALINYSIVKVLEVAYLSIEHMFVDVHNKHMQRCQVCYSGKTCYFALQVLSLDISVSYLPLFMERALIGDKYTLLTYLCYLTYAPLYIAGPIVSYNAFAAQLDAPQKNYSVAQISWYGVRWILSFLLMEAMTHFFHYNAFVVSRLWQQLSPFEIFIISYGVLNFMWLKFFLIWRYFRFWSLVGGVETPENMPRCINNCHDLESFWKSWHASFNRWLVRYLYIPLGGAQRKLLSIWVVFTFVAVWHDLEWKLISWAWLTCLFFVPEILVKSLSNKFQPRSALGLFIHRELSAIAGAVTISCLMVANLVGYVVGPSGIKLLMSRMLGKDALPVLAFIFISFYVGVKIMFHTQEP

SEQ ID NO: 130626 - protein, 132 aa, Oryza sativa
  Clone ID: PAT_MRT4530_32770C.1.pep
RTRNSGHVLVYMYLYARTYLSTYAIHMQSEIAAPHIMYGWINTFIVIYLSDTAICLMITSMRTASSRAICVVAGIRHAYLDPWDHPILLRVPVALKCQSASIYKLQIISLDIYVCLICWFAVLMHGGLNPYP

SEQ ID NO: 130627 - protein, 475 aa, Oryza sativa
  Clone ID: PAT_MRT4530_32771C.1.pep
MRYLYTYRIFMYALLSYTISIWSIHMIFLYIQTSLNYDRDRRFSKSFKEMVAMCLVKDQTKRPTAEKLLKHSFFKNAKPPELTMKGILTDLPPLWDRVKALQLKDAAQLALKKMPSSEQEALSMVGPNFSDEVAAFCGRTSTTAANSDGKGDFSFEAFDFGENNVDTKIMPNGYENARSENSSSPSTSKQDPESKYWRSTSGQKQQTSGTPAVHSGGVNSSTTEKGHGVERDATVQLASDKLRTETRRATNLSGPLSLPTRASANSLSAPIRSSGGYVDSLGDKSKRNVVEIKGRFSVTSENVDLAKVQEVPLSSLSRKSPQASPLKKSASVGDWLVNTKPMSNSHHVKELCNSSVSSSILIPHLENLVKQTMFQQDLIMNVLSSLQQNEKVDGVLSGISPQLRNTDSDTMVGSVNSEKERSLLVKISELQSRMITLTDELIAAKLKHVQLQQELNALYCREEIEDIRDDDNEET

SEQ ID NO: 130628 - protein, 71 aa, Oryza sativa
  Clone ID: PAT_MRT4530_32772C.1.pep
FLHRAGLLKCKAAAAAYNFTHVEFCLDRHTEQGSISPRSLNFGHLNIARMILAELRILLNCTHHGGWQSGD

SEQ ID NO: 130629 - protein, 1048 aa, Oryza sativa
  Clone ID: PAT_MRT4530_32773C.1.pep
SRSEAMETDKKLDLLLQLVEGNEKKRVEADERTRAEYQDLKRTVESRIPAVEKRVDELGAAFQELNLKVDKLESKMMQAAKKSGGCGGTMEISGSVPPMICPQFSGDNPQMWKANCEQYFDVYGIHPANWVKIATLNFSGNAAFWLQSVRSQMAGISWYGLCEAVCARFAKDKHQALIRQWIHLNQTGTVAEYVEKFDGLMHQLMAYDSSLIPVYFITKFVEGLRDEIRVVVMVQRPQDLDTACAIALLQEEAIEGIKSPAPKRSDSVLGIKGSRPISNYSNPLNTKSSNTSAEDRRGIEAARARDEKLAALRSYRRAKGLCFTCGERWGKEHKCASSIQLHVVEELLEALTVNSEADPDSSPEDSEIQQQGVLLAISQQAVWGTESTRSIKLRGWVQDMELLMLVDSGSTHSFIDKEVGLKLSGIQKLKQPLIVRIADGGTMSCTHEITNCKWWMQGYQFCNNFRMLPLGNYDIILGMDWLESISPMQVDWANKWMEFNHQGASIRVQGLLSTPVQCSPVTCHQLNGMSRRGSLSYLVQLQPITRQEDINIPDQVQHIIQDYKEIFQEPEGLPPRRTCDHIITLVPGAKPINLRPYRHNPALKDEIEKQISDMLSSGVIQHSQSPFASPAILVKKKNGTWRLVIDYRQLNAITVKTKYPVPVIEELLDELTGAQWFTKLDLWSGYHQIRMAAGEEYKTAFQTHSGHYEYKVMSFGLTGAPATFLKAMNDTLKSVLRKFVLVFFDDILIYSKDFSSHLDHIRQVLQLLKEHQWRVKISKCSFAQQQLSYLGHIIGVHGVSTDPSKIQDVLDWAVPVSVKKLRGFLGLAGYYRKFVKNFGIISKPLTQMLRKGIPYVWSHEADKAFNTLKQALASAPVFALPDFQKTFTVETDASECGIGAVLSQDKHPIAYISRALGPRTIGLSTYEKECMAILLAIDHWRSYLQHEQAIWEDLEDLKMRFPGALAWGQAKFHGEGIVRNLPVTMGTEEGEPDEAEAEQGEKEPEEGEPDEAEAEVQEEEIQTTTPGRARPTRGPKPNPRYHGSEWVA

SEQ ID NO: 130630 - protein, 832 aa, Oryza sativa
  Clone ID: PAT_MRT4530_32774C.1.pep
EEAIEGIKSPAPKRSDSVLGIKGSRPISNYSNPLNTKSSNTSAEDRRGIEAARARDEKLAALRSYRRAKGLCFTCGERWGKEHKCASSIQLHVVEELLEALTVNSEADPDSSPEDSEIQQQGVLLAISQQAVWGTESTRSIKLRGWVQDMELLMLVDSGSTHSFIDKEVGLKLSGIQKLKQPLIVRIADGGTMSCTHEITNCKWWMQGYQFCNNFRMLPLGNYDIVLGMDWLESISPMQVDWANKWMEFNHQRASIRPITRQEDINIPDQVQHIIQDYKEIFQEPEGLPPRRTCDHIITLVPGAKPINLRPYRHNPALKDEIEKQISDMLSSGVIQHSQSPFASPAILVKKKNGTWRLVIDYRQLNAITVKTKYPVPVIEELLDELTGAQWFTKLDLWSGYHQIRMAAGEEYKTAFQTHSGHYEYKVMSFGLTGAPATFLKAMNDTLKSVLRKFVLVFFDDILIYSKDFSSHLDHIRQVLQLLKEHQWRVKISKCSFAQQQLSYLGHIIGVHGVSTDPSKIQDVLDWAVPVSVKKLRGFLGLAGYYRKFVKNFGIISKPLTQMLRKGIPYVWSHEADKAFNTLKQALASAPVFALPDFQKTFTVETDASECGIGAVLSQDKHPIAYISRALGPRTIGLSTYEKECMAILLAIDHWRSYLQHEQAIWEDLEDLKMRFPGALAWGQAKFHGEGIVRNLPVTMGTEEGEPDEAEAEQGEKEPEEGEPDEAEAEVQERRYRLLLQEEQDPQEGQSPILVTMGPSGLRSPAICCTAGYCVCRILTIYYSIHGSASATGLALDMIVKLLEEGSVQSYHPLTDGLPHVLASALVNFCER

SEQ ID NO: 130631 - protein, 594 aa, Oryza sativa
  Clone ID: PAT_MRT4530_32775C.1.pep
MATSWSVAFTIFFSCILLLETISSSVASLDCSYGSAQVKILSSSVVSEQQNVYLFLKPFQSTRSCSARRLAGEFVNGVVVPNLRLNVTGVVVTANERQLGALRCTLESVQAELAVAGLGRSVKVSPELSLPSLRAMAKCRRRGEKHWRRVMEFVRRSGSFVVVEMGAEEKADLAVADVAAAFEEGVGVAFRISGRAARSAAEMARLIGDADKGRRWTGVLAEVASPSPRRELAAAARTTARDVFAPVTNPTTTPATNPVTVPATNPAMNPVTPGIVTVPSTNPATGYSNNPNLPPLYPEPTPVTMPDPTTTTTPTPFMNPVTAPTMPSPVTNPATTPAVTNPTTMPYPYPPQQGGVMPTTPTYQPPATMPAAGGQTWCVAKAGLMDAALQSGLDYACGMGGADCTAIQPMGACYNPNTLQAHASYAFNSYFQRNPSPASCDFGGAGMLVNINPTCITDRITLNDSCRFRNLLVSGIISRDLNVCSYGAGYSPGVTGTVPVGGGAGAGAGVGVGVTPMGPAVGGTGGAGVTPMGPAVGGGSGSTVLNANSPGGNSMYGSDSNPTSLTGAAAAALSSGWVLCLVWIFTFAYVKEKV

SEQ ID NO: 130632 - protein, 136 aa, Oryza sativa
  Clone ID: PAT_MRT4530_32776C.1.pep
KLDLLLQLVEGNEKKRVEADERTRAEYQDLKRTVESRIPAVEKRVDELGAAFQELNLKVDKLESKMMQAAKVEIGTGSQLKEEQTNGMGGSTQTHPSGMKSGGCGGTMEISGSVPPMICPQFSGDNPQMWKANWGA

SEQ ID NO: 130633 - protein, 175 aa, Oryza sativa
  Clone ID: PAT_MRT4530_32777C.1.pep
MDLVGAMASLVFLHLLCAGWRMLRMWTAAGWPWPYLAAGTLDQALRPQCKLCKQKMMAGAVVRALSCDHVFHKACVDERLRNRKHGMRCRICNRVARCMLPWKASPANLIDHNAQRFQHIRARGGVRTLDRALNDACPICQHRMVARDDVRTLSGGHDFHEDCDIAKWLRDNKKA

SEQ ID NO: 130634 - protein, 150 aa, Oryza sativa
  unsure (1)..(150): unsure at all Xaa locations
  Clone ID: PAT_MRT4530_32778C.1.pep
IGFPFPIPFPPFPLPSPPFRTPGPTRPQTEPLPGPPPRLYGPXXFDPPXLESPPGHPPTPRHRFSLDPPQTXPLEPXXXAPPRTLYRWPGPPTVAPXPRSRHSPWGPHVPRPAPTSRTLPRCXXPTXLVPHDKRXARPPPPYYTRPPEPP

SEQ ID NO: 130635 - protein, 143 aa, Oryza sativa
  Clone ID: PAT_MRT4530_32779C.1.pep
MAGAPAHSPLGARRSARLREERRAHALQLHKLRKTATRRCRNCNNPYRDQNPGGGKFMCSYCGHDSKRPVLDLGPAGTLPTGWPCSLDWPNAAGDPAYWLDLRCSSDNLVSGFSGSLFYFFCVSMRRFWREALRFGSLGDGDG

SEQ ID NO: 130636 - protein, 222 aa, Oryza sativa
  unsure (1)..(222): unsure at all Xaa locations
  Clone ID: PAT_MRT4530_3277C.1.pep
RNSRVDPRVRLNVPPGRWLTAPFNLTSHMTLFLAEGSEILGIPDERYWPLMPALPSYGYGRERKGPRFGSLIHGQNLKDVVITGHNGSINGQGEVWWMKHRRRILNNTRPPLLQLMWSKDIIVANITLKNSPFWHFHPYDCTNITVSNVTILAPISSAPNTDGIDPDSCQDVLIENCYISVGDDAIAVKSGWXDQYGIAYGRPSRNIVIRNVMARSLVSAGI

SEQ ID NO: 130637 - protein, 84 aa, Oryza sativa
  Clone ID: PAT_MRT4530_32780C.1.pep
RLRPRRKLVGRAEVHIKDLMLFSTDLIHSTRIYELPRSSQFSRGNATGEQPADATTTGVREGERRLGKAGALVCVTKQGKVGGQ

SEQ ID NO: 130638 - protein, 74 aa, Oryza sativa
  Clone ID: PAT_MRT4530_32781C.1.pep
ADRMFLLPYHSSERLSRLPDTDIVLKLKLGDVLLCLRQRFMHASEHLLKAVLDAMHRKHDSHDGGFNQDATNHG

SEQ ID NO: 130639 - protein, 90 aa, Oryza sativa
  Clone ID: PAT_MRT4530_32782C.1.pep
MAMAAAATANEPLSETLCVRVLPKKPSRIVGRHPIGSRTKAVATSSSLGGRERGKGPDKGHPYDQLYGEYNCLSTVSSGLRWVTVHCKVE

SEQ ID NO: 130640 - protein, 65 aa, Oryza sativa
  Clone ID: PAT_MRT4530_32783C.1.pep
YSLGRDWWSSARPQLIMTAKGRTVYSTRTHCLLAYFDRDNVALKGFANSSKNPAMRKDTQDYKPT

SEQ ID NO: 130641 - protein, 78 aa, Oryza sativa
  unsure (1)..(78): unsure at all Xaa locations
  Clone ID: PAT_MRT4530_32784C.1.pep
PITLSLHHTTPLSTLTQAISGEAPFSSPSXXSTFFFLHHSTARFXSRVSFSSPSTPTHLLVCCAQNHDYSYFSRRATS

SEQ ID NO: 130642 - protein, 676 aa, Oryza sativa
  unsure (1)..(676): unsure at all Xaa locations
  Clone ID: PAT_MRT4530_32785C.1.pep
VLDRVREPRDGKACRLVSRAFARAEAAHRRALRVXRREPLARLLRAFRALERLDLSACASLDDASLAAALSGADLAGVRRVCLXRASGVGWRGLDALVAACPRLEAVDLSHAXGAGDREAAALAAATGLRELSLEKCLGVTDMGLAKVVVGCPRLEKLSLKWCREISDIGIDLLSKKCHELRSLDISYLKLALGMICDSTATNKAVKCDLDSSLWVDFDMENVQSSELGLTDWLILVGNESLRSISSLEKLEELAMVCCSCIDDDGLELLGKGSNSLQSVDVSRCDHVTSQGLASLIDGHNFLQKLNAADSLHEMRQSFLSNLAKLKDTLTVLRLDGLEVSSSVLLAIGGCNNLVEIGLSKCNGVTDEGISSLVTQCSHLRVIDLTCCNLLTNNALDSIAENCKMVEHLRLESCSSISEKGLEQIATSCPNLKEIDLTDCGVNDAALQHLAKCSELLVLKLGLCSSISDKGLAFISSSCGKLIELDLYRCNSITDDGLAALANGCKKIKMLNLCYCNKITDTGLGHLGSLEELTNLELRCLVRITGIGISSVAIGCKNLIEIDLKRCYSVDDAGLWALARYALNLRQLTISYCQVTGLGLCHLLSSLRCLQDVKMVHLSWVSIEGFEMALRAACGRLKKLKMLSGLKSVLSPELLQMLQACGCRIRWVNKPLVYKD

SEQ ID NO: 130643 - protein, 850 aa, Oryza sativa
  unsure (1)..(850): unsure at all Xaa locations
  Clone ID: PAT_MRT4530_32786C.1.pep
KGQNVKTAIVSAVLSSLAPTLYALARDRYSLEENVRRDVQSVKAELDMMLAAIQVHAASHGSGPVVQAVWVDKARRLAHQMEDCVDRFVYDQLTAAHGSSRHAAPXRLASDVRALREESARLYELKTKYAGPMAPVPALRRNLVGMEAPRRELLELVEEEEEEEEAEGGKKRRQKVISIVGFGGLGKTALAKQVYDDVGGGQFSPMVWVSAAEKTAEEVLEEILIKKFGSQVRDDDDDMADVEHLSLRLRTHLRNKSLQFSSFLGFFSCRYFIVIDDMREELWCDTEHAFPADDGVSSRIVVTTNIQSIANACSTAEGYVYKMGKLNTEYSKGLFFQSASIEDXSPDMERGSEQLRKKCDGLPLALICNLGHHLENKSNSNALARMQRVLTRSYTCLSGDAAKACLLYLGMFPGNHSIRRKRLLRRWLAEGLVKRQPHPRLGDSAVESFKMLMDQNIVQPVDVSNNEGVKTCQLPGMMLEFIMHRSISEGFITIFRGEDEMLLLPDQYAVRCLSVQCRSTAAANIGLERNDLSLLRSLTVSGEVCQDFLDFKEYKLLQVLDLEECDGLMDGHLDGICKLLLLKYLSIGGAVTTLPKMIGRLKFLETFDVRRTKVEVVIMPAEVLVLPKLVHLFGKFELSGSIENGNDPNDARSLSVDFSECSEDILQISPRGDCNLRSLKLYGELQKIPKFFASLLALRELYLSSTTIRGDVLTALSELRYLVYLKLIAENLEDFMIKYGAFQSLQRLCFVIQRLTLPGIQEGALPQLVSLQLIYENLANVCLINIGGIKRLKEVMLDSSKFHIAPYILTKVSQWARAKPTFSLNTTYLCTSWHFGLGLSTLKEVMNKNK

SEQ ID NO: 130644 - protein, 137 aa, Oryza sativa
  Clone ID: PAT_MRT4530_32787C.1.pep
MLMQQLLLELEVVMNARNKPREKIEQSRVYALIVLLLAWTTPVKKTVMAVKTMEAEDKSSGAARALEITDLSDIHRNVMATMWFSSGSIATATIVVDWNYFVYQLATAKSRRPHADSLAAGCSPRENGSRQPPLRFR

SEQ ID NO: 130645 - protein, 112 aa, Oryza sativa
  Clone ID: PAT_MRT4530_32788C.1.pep
MQRLEKLGEGLVAWPDDVHMAVAATRDKGMHPKGSWERWRFIGGNGLPRIRSGARMIWRGFAHIALVRFVVWQICDYFCGINGFRCMKLRLKADEDEKSEILVDNLPGCPDS

SEQ ID NO: 130646 - protein, 86 aa, Oryza sativa
  Clone ID: PAT_MRT4530_32789C.1.pep
RIKYLNNCQGTIVLYGAEASLKCRSFWFIIGLVFVQLICAIQYRVVKEHADDAFYELQNPQQQIQAYAFDVVLALVPRMNLDDLFE

SEQ ID NO: 130647 - protein, 545 aa, Oryza sativa
  Clone ID: PAT_MRT4530_3278C.1.pep
MVETSGGGGRLHPHGQRRSVAAFLAANKTLLAAAWVIGFTLVFLWQSAKVSVGGGGGGGGFLRLRSAPPPPPSRPAPLLRPKAYELTDFGGVGDGRAVNTEAFERAVKAIAALAERGGGQLNVPPGRWLTAPFNLTSHMTLFLAEGSEILGIPSFREVQKLVLLSGFDRDERYWPLMPALPSYGYGRERKGPRFGSLIHGQNLKDVVITGHNGSINGQGEVWWMKHRRRILNNTRPPLLQLMWSKDIIVANITLKNSPFWHFHPYDCTNITVSNVTILAPISSAPNTDGIDPDSCQDVLIENCYISVGDDAIAVKSGWDQYGIAYGRPSRNIVIRNVMARSLVSAGISIGSEMSGGIANVTVEDVRIWESRRGLRIKTAIGRGGYIRDISYRNITFDNVRAGIVIKVDYNEHADDGYDRDAFPDITNISFKEIHGRGVRVPVRAHGSSDIPIKDISFQDMSIGISYKKKHIFQCSFIEGRVIGSVFPKPCENLDLYNEQGQLVKRAAMWKLHGYMTRSSGVKAVNKRSIMKQGWTELEEVVNFLF

SEQ ID NO: 130648 - protein, 696 aa, Oryza sativa
  Clone ID: PAT_MRT4530_32790C.1.pep
MRHHHLAVAAARSHASLLKSGVAAPTPWNQLLTAYSRSSPDGLAAARRVFDEVPRRDEVSWNALLAAQAASGAHPEAWRLLRAMHAQGLASNTFALGSALRSAAVARRPAIGAQLQSLALKSGLANNVFAASALLDVYAKCGRVRDARQVFDGMPERNTVSWNALIAGYTESGDMASALELFLEMEREGLAPDEATFASLLTAVEGPSCFLMHQLHGKIVKYGSALGLTVLNAAITAYSQCGSLKDSRRIFDGIGDIRDLISWNAMLGAYTHNGMDDEAMKFFVRMMQESGVHPDMYSFTSIISSCSEHGHDDHQGRVIHGLVIKSALEGVTPVCNALIAMYTRYNENCMMEDAYKCFNSLVLKDTVSWNSMLTGYSQHGLSADALKFFRCMCSENVRTDEYAFSAALRSSSELAVLQLGKQIHGLVIHSGFASNDFVSSSLIFMYSKSGIIDDARKSFEEADKSSSVPWNAMIFGYAQHGQAENVDILFNEMLQRKAPLDHITFVGLITSCSHAGLVDEGSEILNTMETKYGVPLRMEHYACGVDLYGRAGQLDKAKKLIDSMPFEPDAMVWMTLLGACRIHGNVELASDVASHLFVAEPRQHSTYVLLSSMYSGLGMWSDRATVQRVMKKRGLSKVPGWSWIEVKNEVHSFNAEDKSHPKMDEIYEMLRVLLQVEQMLSNCEDEDILMITSSGI

SEQ ID NO: 130649 - protein, 167 aa, Oryza sativa
  Clone ID: PAT_MRT4530_32791C.1.pep
MGMLALRRLMAAQRDRRRRRKAQARNGVITSMAKRKGAFLQGDDTSQGGKRLRYSEPYLTEDIWRHIHSLMPLRDAARAACISQAFLRSWRRYPNLILTAGTLGLELRKNWKVHMARVFCSEAFGSQRLQRDGVSEDTMFAGATQLPGCVLVPSANDREQSSEPVQS

SEQ ID NO: 130650 - protein, 200 aa, Oryza sativa
  unsure (1)..(200): unsure at all Xaa locations
  Clone ID: PAT_MRT4530_32792C.1.pep
CDLKAHITTYYSLFGSPIACSLTLDECQISDIPQISQLENNALLQDFSKKEIKYVIFQMEHNKAPSLNGFPSEFYQVFWNVIKHDLVDLCNDFHSGNLSLYSLNFGTIILLLKCKXALKIQQYRSICLLNVSFKXSFTKVATNRISGVAXKVISPTQTAFIPGRNIMEGVVNLHERIHELHPKKDIILVFSIDGAAHYPP

SEQ ID NO: 130651 - protein, 158 aa, Oryza sativa
  unsure (1)..(158): unsure at all Xaa locations
  Clone ID: PAT_MRT4530_32793C.1.pep
MGPTDMWAPHAXSSPFLLPPLPSLFLAPSPLQPSAGSERRRLELRRRPWAGAEAAAACRSSRTTTTHTTQRLASRRHQRPALRRRRRPSGGGPRAAXGREKQWEDEGNSGGREKQWEDEGNGGGRKKQAAAATSTLTPEMAMAMAAWSAAKRPKRNSD

SEQ ID NO: 130652 - protein, 73 aa, Oryza sativa
  unsure (1)..(73): unsure at all Xaa locations
  Clone ID: PAT_MRT4530_32794C.1.pep
MVAYILCVGLVAERIGCILGRENSKAPTTIRIKVWGXARSSTSTLGLVLPGFTTNGSTSGRVDXRTDVTMEGV

SEQ ID NO: 130653 - protein, 38 aa, Oryza sativa
  Clone ID: PAT_MRT4530_32795C.1.pep
MDQKYLKKNSESQNMSTVQKSVRRATVNMVFALCLDFS

SEQ ID NO: 130654 - protein, 312 aa, Oryza sativa
  Clone ID: PAT_MRT4530_32796C.1.pep
ARGAGDGMAGAQALVAVPSSSGACAGRTYNISGYALGEPGPIAFPASDLAAELGADGRVRVFGTLSLAAYGGAGVLNQVWQVGPAVTGGVPAPHAMGGANLAAKAKLDLLTQTTTAASSSDAITKKRNIHGLLNAVSWGILLPMGAILARYLKTFRSADPAWFYLHVSCQLIGYGVGVAGWATGINLGNMSNGITYTLHRNIGIIVFALGTLQIFALFLRPKKENKYRVYWNMYHHSVGYTVIILGITNIFKGMTILGVEQRWKTAYVAVLCLLGVAAIILEVVTWGMVVKRRNAESKTFNSASNGHLPRHV

SEQ ID NO: 130655 - protein, 62 aa, Oryza sativa
  Clone ID: PAT_MRT4530_32797C.1.pep
MARGELGGALAGFGAALSVDLSLLRSEAGRNGDDDEEEESLVDGDPFIPSGLCKSASWLRTA

SEQ ID NO: 130656 - protein, 37 aa, Oryza sativa
  Clone ID: PAT_MRT4530_32798C.1.pep
VSVSSALPVSTMFQLCLSGSCQFLCRQLFSTVVSVMG

SEQ ID NO: 130657 - protein, 175 aa, Oryza sativa
  unsure (1)..(175): unsure at all Xaa locations
  Clone ID: PAT_MRT4530_32799C.1.pep
MRTGRRDSRXSYYGVVEQYIPNHNDSVSTVXLSRFAAIGVDTEGAVALLGAHSVGRVHCFNLVGRLYPQVDGSMEAAYGEYLRGRCPTAAATEDTREVVYARNDRVTPMLIDNMYYRNLLAGRGLLLVDQQLASDARTAPYVRRMAADNDYFHQRFAAALLTMSENAPLTGAQGE

SEQ ID NO: 130658 - protein, 70 aa, Oryza sativa
  Clone ID: PAT_MRT4530_3279C.1.pep
MCSIEYRPWPLHRLPASTSPALDMATRPARCYPPIKSNARQKPKHCTSAAGCMTRMYEPATPTTGADDLP

SEQ ID NO: 130659 - protein, 60 aa, Oryza sativa
  unsure (1)..(60): unsure at all Xaa locations
  Clone ID: PAT_MRT4530_327C.1.pep
AAGTLMQPCNLAGRASSAALSSCTPLHVARAFAVYTGASGRITSCVQIDIRXAANKCADD

SEQ ID NO: 130660 - protein, 494 aa, Oryza sativa
  unsure (1)..(494): unsure at all Xaa locations
  Clone ID: PAT_MRT4530_32800C.1.pep
MTISVFSRFSIYFCVLLLCNGSMAQLFDPATNQWQTHRQGSFRECRFERLQAFEPLQNVRSEAGVTEYFDETNELFQCTGTFVIRRVIQPQGLLIPRYANTPGMVYIIQGRGSMGLTFPGCPATYQQQSQQFLFQGESQSQKFIDEHQKIHQFSQXYPILLEEASKTFKNTMGRQSMVHSLPDDTTTTPTQNSRMNLKARLQSNVTKXLILGKQNKGVIGSKXIKKISIEPLSEALNINTVTTKRLQSQNDQRGEIIHVKNGLQLLKPTLTQRQEQEQAQYQEVQYSEKPQTSSRWNGLEENLCTIKTRLNIENPSRADSYDPRAGRITSLDSQKFPILNIIQMSATRVNLYQNAILTPFWNVNAHSLMYVIRGRARVQVVSNFGKTVFDGVLRPEQLLIIPQNYVVLKKAQHEGCQYIAINTNANAFVSHLAGVDSVFHALPVDVIANAYCISREEARRLKNNRGDEYGPFPPRLQQQIYPEFSNESKGETSE

SEQ ID NO: 130661 - protein, 324 aa, Oryza sativa
  unsure (1)..(324): unsure at all Xaa locations
  Clone ID: PAT_MRT4530_32801C.1.pep
MAEKTLREFVAPSADNVPIGPHVNLGDGDFDLKTSLIMMAQASSFYGMPXAHLQQFLDICSTSTIKGVSPDTGRLRLFPFSLYGKAKQXFYANRAKIDTWNXCSTAFLSKFFPMESWERLQEYVAACPHHGMDDWLILPSFYNGLTPSSRDHLDASAGVAFFSKTIRGAVDLIEKMVSNMGWSKERLQTRGMHTIKEMEILAAKLDFLMKRLDDXEKNKLRXTVKALDSYITCEVCENAGHSGTDCLETREEEAMFMNNNRYCPQGGHRWNQPCLFYQGGNGNNGNFNNQPPLKDLVFAQAKTTDALSKKLTVNKIITEIVPPN

SEQ ID NO: 130662 - protein, 114 aa, Oryza sativa
  Clone ID: PAT_MRT4530_32802C.1.pep
QPQTPYNSRHIHHQVRKYQKGMTAGSSTTLTRATSFQAQPSNSKLSHLIPEYSDPLLPIFYLPSSVHLLLRRSYGSAHRAQCWAVCAHCPQVDVGPCSRAVDLDDVRATVWGNC

SEQ ID NO: 130663 - protein, 41 aa, Oryza sativa
  Clone ID: PAT_MRT4530_32803C.1.pep
FASDIVSFYNIPVTLLIVLQYAIGLGILFKNTQKNLRYIQD

SEQ ID NO: 130664 - protein, 128 aa, Oryza sativa
  unsure (1)..(128): unsure at all Xaa locations
  Clone ID: PAT_MRT4530_32804C.1.pep
XKXLLPRQPFPFSXSRRTRRPHTSSTIIIVVVVEVXGGSGNSSGPDTSAASAAGRHLERGRXRGHRRQVERGGHGRRRGDXPIRRVAXTLGVLHGHHHLSFQLWTTEMTEIANRGGLYLGEEEEERRW

SEQ ID NO: 130665 - protein, 123 aa, Oryza sativa
  unsure (1)..(123): unsure at all Xaa locations
  Clone ID: PAT_MRT4530_32805C.1.pep
PTQLPSPSLPFPSLLSSPLLFSPPNXPPPPLPLSSYPSPRRRREAARCVPXPXPXSAGAGAGLPLGEXGDPSGPGVXFPXSXXSQXVVILSIXSNEYPRKETHCGYTXRRXXXQEDKNSFLEL

SEQ ID NO: 130666 - protein, 601 aa, Oryza sativa
  Clone ID: PAT_MRT4530_32806C.1.pep
MAAAAEPPMVEQVITEFFAKSLHIILESRSPYESSRNFTRPSPPSSPLSGSQPRDRWFNLALRDCPAVLENFDLWRQSNLEPLVIDIVLLCRDSTSNTAAGSGKIIERWVIQYEARKSGGGNGNGSKNNGRKSRNSSAEDHSLYRATYQGSTVLLRSLHLLVRLLPAYSLFRELNSSGRIRPLNLSHKISSFVEPFTRAEDAEMKHYAFAPIETLFGRLSLSVSYVPVLEVVAASEPTSPMPPEIITDYVGSPTTDFLKKFNSLPSAGIAPACAAMTRRHSWSIEHGAGTSVSPSPSPTKAQSRGSPQLGVPLHVSLKTCSHPQNASSSGQKKYTPFEECYPSPPLSPSPSQSPSANYPKNPLFRYESAPVTIPTLKSGGGGGSGLPPSPCSKGKHQFSSHNDNLAHSPDHNSNVRKDLVRLGEFEKDMALQKVLSYSKYDLGYFHGLKLTRTSSKLFIMDELDEHELVFAWEDRDTIIDQLNRADISDREEQKNQDAGGSSTRSPAAAIGALVHLLKTAPSLREGLQSDAAAVVPQEPSSVQKVVTEEHGSIASSSTPVTATDALEELKKYREVKESILNRGKTQVSGTNLGEKLTDGEP

SEQ ID NO: 130667 - protein, 297 aa, Oryza sativa
  Clone ID: PAT_MRT4530_32807C.1.pep
MTSRRSTAPMSSRASGSWRHHDGLYEEQDARINIERRRDERRVARMGEGASSSGVQRSSTRGGPPPTFTLEGPVVGLSWRVFGTSGGPRSFAPTSRRSMTTWTSPAHPKSNGQVERANAEILKGLKTKTYNILKKHEDSWLEELPAVLWANRTTPSRATGETPFFLVYGAEAVLPLELSLRSPRVALYDEANQDDLRRDDLDYLEERRRRAALRTARYQQALRRYHQRHIRARSLQVGDLVLRRVQSRLGLSKLSPMWEGPYKVIGVPRLGSVRLTTGDGTELPNPWNVKHLRRFYP

SEQ ID NO: 130668 - protein, 60 aa, Oryza sativa
  Clone ID: PAT_MRT4530_32808C.1.pep
MMPRDMWIQRGGVGENPRASWHTSRSPDVAVLHGLGYPVAEEDEADPADEEFFQEQAGYD

SEQ ID NO: 130669 - protein, 71 aa, Oryza sativa
  Clone ID: PAT_MRT4530_32809C.1.pep
MTDQHPCFGLHGFNANCTAIAAGPLRQCQALAALDTSLSSLQLQPSKPALAVCRETVSAGQHRDSLRLKYR

SEQ ID NO: 130670 - protein, 267 aa, Oryza sativa
  unsure (1)..(267): unsure at all Xaa locations
  Clone ID: PAT_MRT4530_3280C.1.pep
CTPPPPPPTRPITPTPSPRHHPRPPWATQPTTHPHPPPPTPPTSPPPPHPPPPPTAPPPSPSPXPYPAPPPHSHSHPPPPPPHAYHHHHYPPPPPPHHHPYPPHPPPPTXPPPPPRPXSSPPSSSSAPPPSSSGSSSAPASRPSPSPPSPSPASPTPPPTPPSPPPSTPPSSPTTQTPSSPSPTSPRSPPSPSPRPPPSPSPRSRPSRSRRGTSPRSPSASRWMAHTWVPTTPRRSRAGALVPWRSRSGSPPSPSSIAVAGARAGGS

SEQ ID NO: 130671 - protein, 169 aa, Oryza sativa
  Clone ID: PAT_MRT4530_32810C.1.pep
MTMAGGGSAAAANAKKKKKMGEEKLIIMSEKVRFIDILSLLLLRRPITSYHFVDAGDATAAAAGELGSTPGEWLVALTEIIQKALAAAYYPAKYLGAAVEFFLNFVSLNGGVIGILWNIVRFKLVIPLNREAPNFRSMIAMIDGRTELKPMKPAATAGVEDDDLESGGC

SEQ ID NO: 130672 - protein, 58 aa, Oryza sativa
  Clone ID: PAT_MRT4530_32811C.1.pep
KQNEHVTILKANLIAPVTLPQSSLQDMITNSPYLKLFHNLQYTSNTRFQYNNHLRSTN

SEQ ID NO: 130673 - protein, 133 aa, Oryza sativa
  Clone ID: PAT_MRT4530_32812C.1.pep
DEIQRVVVEILVRKVAVHASLRERGDAAENKAPREVCHPVIQRVPPRSALAVLLHREVDQRRHGLVLGADHHHPPPDPVRREAHAAGPAAAAAAVPAGQRGASRWPTPRQCCSPSPPPKQPRSCGFRIPSVRV

SEQ ID NO: 130674 - protein, 84 aa, Oryza sativa
  Clone ID: PAT_MRT4530_32813C.1.pep
MTAEVLACKRAAKLAMEMGTDKVIIGIDSLEVVRTIVQLLEDRLKRFPEIKIKWVQQSANKAYPFSSKERTLNRCNIDLVIGFT

SEQ ID NO: 130675 - protein, 1818 aa, Oryza sativa
  Clone ID: PAT_MRT4530_32814C.1.pep
MDPSVPLANVDANHTARANGSSSRTDKEYIRLLKGSAAVLNTCTAFVAASYPDRSYYGPPTYECPYCGAMFWYQERVKSASAISKRKIIYNLCCKGGRIQLPKLRAPPEPLASLLNYNGDARSKNFLRQIRSYNSMFAFSSMGAAIDKSINTGNAPYVFKINGVVHHRIGTLVPSCGSPPKFAQLYVYDPENELQNRLNIFENDGDNSDKADPEIIRALSSMLDAENTLVQSFRYARERVIQHGNQQVTLRLLGCNAKDDVQYNLPTNSEIAAIIVGDFSAKEYKFDVLVYDKGRGLCQISPLHPSYMALQYPLLFPYGERGFHLGIKYSNYDGIGKKYVTMPEYYRYEMHYRLNEPNPFTCYGRLSDQIDVDIFSTIETNRLQYFIDHQKELRSESVDGIVDAIDKGVTDGDSVGKRVILPASFTGGRRYMVMNYQDAMAICRVYGPPDLFVTYTCHSKWQEIADAIRFEPGQQPSDRADIIVRVFNMKVNEFITDIREGRTFGKVLAVLYTVEFQKRGLPHIHCLVWLAAATADVSASIIDGFICAEIPDYDTDRLGYELVSEFMMHGPCSDANKKCPCMKNDKCSKHYPKDFQDETIVDESGFTIYRRRNDGRSIMKNGILLDNRSVVPYNMALLKKYEAHINVEWCNKSNLIKYLFKYITKGHDRARIYFETTGKTQNASPNHDLAPRNEILEYMDARFLSTYEALHRLFEFDIHYRVPPVERLVVHLPGKNFVRYEKGADLRAVLESPGAKRSMLTEWFETNKKNSKAHSLTYCEFPKEWTWEPSSKTWHERTPAPKIGRIYYVHPTAGELYYLRMLLMIVKGAQSYADVRTYDGVVYGTLKKALDNPHCVIPHDHLLNMLLHELIAVFANSGGNIKDFNLPHPSSVPHVLGTNRLIDEEITIDPLMLAMHADSFVQQLNNDQITVFSTICSRAIANEPGFFFVSGHGGTGKTFLWNTIIAKLRSQNKIVLAVASSGVASLLLPRGRTAHSRFKIPIDIDETSICNIKRGTMLAELLAETALIIWDEAPMTHRRCFEALDRTLRDILSETCPSNSIVPFGGKPIVLGGDFKQILPVIPKGSRQAIINASITNSELWKHVALLSLNINMRLLNPMLPDNQKKELHDFSQWVLAIGNGTLPMTAKEGENYPAWITIPDDLLVMTSGDKIAAIVHEVYSDFLTCYRDIEYLASRAIVCPTNTTVDEINDYIIGLVPGDSRVYLSCDTISKSSEQIPDFDLLYPPEFLNSINATNFPTHKLVLKEGVVVMLLRNLNQSIGLCNGTRLLVTVLGDRILQCIILTGSNIGETVYIPRITLGTTKMKWPFTLQRRQFPVRVCYSMTINKSQGQTLQRVGVYLKKPVFTHGQLYVAISRVTSRSGLKILIENDDGSCGTQTKNIVYSEVLSATVQAVISRTSKMAHVLISQLSCGDLNTRILARVSRLWDFCDLNGSGNIFHTDLVLLDQMGNSIHAQIYPPAIDSLRPLLKEQKVYYIDSFTVRYANRTYRPVDNSLMIVFSKWTTFEEYIEPAADFPGITFSLTPFSDIPNLVDKTIFYVGLYGMQPDVMGVITEVGSPTVVRPKSRNADSLKRTIQICDASNSTMPVTLWGERADAFDANSVYNAGQTQAQVIVFVGTLVKDYTGLGLTVTGSSPCKWYLNLDIPEVLELKESFSANFRPVSWVDNPATGYNQDTAEEKTIQEILALNPHKNRSTRFIVNVTVRRICSENSWWYNSCRLCYRTSKPYGSSYKCSSCSNIGIPDPRYKVVLIGGDASSNATFILFGRVAHRLIKKSVESLIEDNPPDSDYIPAEIAALV

SEQ ID NO: 130676 - protein, 1889 aa, Oryza sativa
  Clone ID: PAT_MRT4530_32815C.1.pep
MASACSYLTWNRSMLFALAAVSDCFGRLVRVCAVSMPVVGLLCDGFSAIGEAICMGCNGPLKVPDHLPLHVCGLLLRPSSSVPSSSLPLFTACVFASWCVLVDSACRRAYSMRKFRFIGRFTVFVRSKSHCTSQRAFVAASYPDRSYYGPPTYECPYCRAMFWYQERVKSASAISKRKIIYNLCCKGGRIQLPKLRAPPEPLASLLNYNGDARSKNFLRQIRSYNSMFAFSSMGAAIDKSINTGNAPYVFKINGVVHHRIGTLVPSCGSPPKFAQLYVYDPENELQNRLNIFENDGDNSDKADPEIIRALSSMLDAENTLVQSFRYARERVIRHGNQQVTLRLLGCNAKDDVQYNLPTNSEIAAIIVGDFSAKEYKFDVLVYDKGRGLRQISPLHPSYMALQYPLLFPYGERGFHLGIKYSNYDGIGKKYVTMPEYYRYEMHYRLNESNPFTCYGRLSDQIDVDIFSTIETNRLQYFIDHQKELRSESVDGIVDAIDKGVTDGDSVGKRVILPASFTGGRRYMVMNYQDAMAICRVYGPPDLFVTYTCNSKWQEIADAIRFEPGQQPSDRADIIVRVFNMKVNEFITDIREGRTFGKVLAVLYTVEFQKRGLPHIHCLVWLAAATADVSASIIDGFICAEIPDYDTDRLGYELVSEFMMHGPCGDANKKCPCMKNDKCSKHYPKDFQDETIVDESGFTIYRRRNDGRSIMKNGILLDNRSVVPYNMALLKKYEAHINVEWCNKSNLIKYLFKYITKGHDRARIYFETTGKTQNASPNHDLAPRNEILEYMDARFLSTCEALHRLFEFDIHYRVPPVERLVVHLPGKNFVRYEKGADLRAVLESPGAKRSMLTEWFETNKKNSKAHSLTYCEFPKEWTWEPSSKTWHERTPAPKIGRIYYVHPTAGELYYLRMLLMIVKGAQSYADVRTYDGVVYGTYREACEARGLLEGDNEWHLLFDEAIVTASSAQLRQLFVTVLLYCSVGDVRSLFDKYWLYMTDDIHNRLKKALDNPHCVIPHDHLLNMLLHELIAVFANSGGNIKDFNLPHPSSVPHVLGTNRLIDEEITIDPLMLAMHADSFVQQLNNDQITVFNTICSRAIANEPGFFFVSGHGGTGKTFLWNTIIAKLRSQNKIVLAVASSGVASLLLPRGRTSHSRFKIPIDIDETSICNIKRGTMLAELLAETALIIWDEAPMTHRRCFEALDRTLRDILSETCPSNSIIPFGGKPIVLGGDFKQILPVIPKGSRQAIINASITNSELWKHVALLSLNINMRLLNPMLPDNQKKELHDFSQWVLAIGNGTLPMTAKEGENYPAWITIPDDLLVMTSGDKIAAIVHEVYSDFLTCYRDIEYLASRAIVCPTNTTVDEINDYIIGLVPGDSRVYLSCDTISKSSEQIPDFDLLYPPEFLNSINATNFPTHKLVLKEGVVVMLLRNLNQSIGLCNGTRLLVTVLGDRILQCIVLTGSNIGETVYIPRITLGTTKMKWPFTLQRRQFPVRVCYSMTINKSQGQTLQRVGVYLRKPVFTHGQLYVAISRVTSRSGLKILIENDDGSCGTQTKNIVYSEVLSATVQAVISRTSKMAHVLISQLSCGDLNTRILARVSRLWDFCDLNGSGNIFHTDLVLLDQMGNSIHAQIYPPAIDSLRPLLKEQKVYYIDSFTVRYANRTYRPVDNSLMIVFSKWTTFEEYIEPAADFPGITFSLTPFSDIPNLVDKTIFYVGLYGMQPDVMGVITEVGSPTVVRPKSRNADSLKRTIQICDASNSTMPVTLWGERADAFDANSVYNAGQTQAQVIVFVGTLVKDYTGLGLTVTGSSPCKWYLNLDIPEVLELKESFSANFRPLSWVDNPATGYNQDTAEEKTIQEILALNPHKNRSTRFIVNVTVRKRCSENC

SEQ ID NO: 130677 - protein, 615 aa, Oryza sativa
  unsure (1)..(615): unsure at all Xaa locations
  Clone ID: PAT_MRT4530_32816C.1.pep
MKEKRGLEAAAAGGDGHPEAKRARPPALASVIVEALKVDSLQRLCSSLEPILRRVVSEEVERALGRLGPATITGRSSPKRIEGPDGRNLQLQFRTRLSLPLFTGGKVEGEQGAAIHVVLLDAGTGCVVSSGPESCAKLDIVVLEGDFNNEDEEGWSGEEFESHVVKEREGKRPLLTGDVQVTLKEGVETVGELTFTDNSSWIRSRKFRLGLKISSGFSEGIRIRLAXVGELTFTDNSSWIXKKHYPPALKDEEDFVRVFAXDGSFHKRLNIAGISTVEDFLRLVVRDPQKLRSILGSGMSNKMWDILVEHAKTCVLSGKYYIYYSDEXRSIGAIFNNIYAFCGLITGEQFXSSESLYDSHKLYADALVKKLYDNCIYAIEYDGEALLNSKPKKKAAPTGQVETHPPLSQPASYEQRISSTSMTGPSPAEGCTPGTTATQPSQLQSTSANVPVPYDDTFSFLPPSMLMGSDNQETGNDGMGLELGQLQQAISQSQSIQPANVGYDDWTRSQNGQFADDFTEDIRMKSHQMLESEDMQQLLRVFSMGGASTSLQEDAFGFPTYMPSPLPNLGFEGERTRSSGKAVVGWLKIKAAMRWGIFVRKKAAERRAQLVELDD

SEQ ID NO: 130678 - protein, 95 aa, Oryza sativa
  unsure (1)..(95): unsure at all Xaa locations
  Clone ID: PAT_MRT4530_32817C.1.pep
MGVFFGAVFFVFPIIGGVSLSLFGKGEFFGLSLARVFFSFPPPIKDFFGNPPPGGFFLSKYGGVCFSLFXIFWKGFLGTPEKAKVRGFFRLNPPL

SEQ ID NO: 130679 - protein, 112 aa, Oryza sativa
  Clone ID: PAT_MRT4530_32818C.1.pep
WLYVRKYQDHHCGCRWPVPTINSIEKRKERKRAERPRAGGSIISYHHGPDSASVATIDGWPLRSDPAAAAAAASLDFISLSWGVRQPRRSAGPLAVPRHAPPVAAADGDGCG

SEQ ID NO: 130680 - protein, 130 aa, Oryza sativa
  Clone ID: PAT_MRT4530_32819C.1.pep
EATHFNNHFPNIHYIRFKGRLCKTEQVRDIRPVLYNETALPSLNLFFPARNRFEMPPHFWDKGETIYLHGFFSIKRSRDHISSKASIKIIVHSTQQKILVCHDSILCMEIEEHINTYAFAETWKAAAHTD

SEQ ID NO: 130681 - protein, 336 aa, Oryza sativa
  unsure (1)..(336): unsure at all Xaa locations
  Clone ID: PAT_MRT4530_3281C.1.pep
MAHHHFFAPRKQRRSAAQERGKRELDGMDQEVWADMGTAVRVGAPPLLHLCTQLLPHPTAAGKLLLSSSNGMQPPHCTKKKQIAKMSSTNSSGDPAAVRVVGGWASPFMNRVVVALKLKGVEHEMLQETVGKKSELLLRSNPVHKKIPVLLHHGKPIAESLIIVXYIDEVWPASDGAPAILPRDPYCRAVERFWAQYIDDKPDDFALILDNLCAVSSGDSRVERNRGRRGTVVEMSTALKHLEEAFVKCSQGKKYFGGDKIGYLDIALGSFLGWIKAVEKFAGVELLDEAKVPNLAAWADRFCAHPAVVDAMPDADKLVEFAVKHAASMKALDAPK

SEQ ID NO: 130682 - protein, 102 aa, Oryza sativa
  Clone ID: PAT_MRT4530_32820C.1.pep
TRVLNDDHQVRTICAAASIQLCPMHNCRAHGRCGHNTLTKITRTQHISTWEHMQTDHFCNRKWASNVYITLWGLWQPCVTLWRPVVGPILSTTYTLIDAKRG

SEQ ID NO: 130683 - protein, 95 aa, Oryza sativa
  Clone ID: PAT_MRT4530_32821C.1.pep
VSDTTVHSHMHLPSGQSPTPPEKEREREREREKEKKKQLWQKARSSSNKIAPQKKAAKALKKGGLAARAVEVSPPCQDRRKAQHRSLEAINKHSL

SEQ ID NO: 130684 - protein, 117 aa, Oryza sativa
  unsure (1)..(117): unsure at all Xaa locations
  Clone ID: PAT_MRT4530_32822C.1.pep
LISKPIGPVPINLDFCGGPPPPPRAPXPTPPLPSPSXPAPPSPPPPPSLPPLWRRLPLPHPHQHLLPPLPPPPPSPPPPPPPPMLPPPLLSVPQPHPHPELQELPPLLPPPPPPPSP

SEQ ID NO: 130685 - protein, 96 aa, Oryza sativa
  Clone ID: PAT_MRT4530_32823C.1.pep
MAPTTTCQRILLLLLLLLLLAIARPASSQLFTPAPPPPVQAADGGGSAGFNVATSLLFVGVVIALFLLGFFSAYLRRCSEAATAAHRLRGGGGGGA

SEQ ID NO: 130686 - protein, 87 aa, Oryza sativa
  Clone ID: PAT_MRT4530_32824C.1.pep
TFLEKSPFSGKKKGGFFSIGKISPPDKNKRFSQKGGIIFPPYNVLTGWPSFFTNLGYYPLCTPPHIFIDPPWGVFYFFPPFSLGRVF

SEQ ID NO: 130687 - protein, 87 aa, Oryza sativa
  Clone ID: PAT_MRT4530_32825C.1.pep
MSHVPLEELPAVSAAWRALQLCRRCLFLGAAGESAPQRRKASRNSARLLEWSRWGSDLHAHRTRHSGWPIALSTGQKDHQGTRRTWD

SEQ ID NO: 130688 - protein, 76 aa, Oryza sativa
  Clone ID: PAT_MRT4530_32826C.1.pep
FPVGHCDLLTLGRVDTSGILGSGFSSFRRPVAAAAGIRARVSGGARKASLPAARHGVDRETVAPPRGACWFGTRGS

SEQ ID NO: 130689 - protein, 104 aa, Oryza sativa
  unsure (1)..(104): unsure at all Xaa locations
  Clone ID: PAT_MRT4530_32827C.1.pep
XTGIXXNSXXTIXTYXHHQXXNFXQTKKXXXSSNLKHHETIXHWTQTHTNQRCNTNRLAXXPXLXXXXSTXXXGXSIXXHXXKXAXNTXXXLXSXVPRRWRAPP

SEQ ID NO: 130690 - protein, 83 aa, Oryza sativa
  unsure (1)..(83): unsure at all Xaa locations
  Clone ID: PAT_MRT4530_32828C.1.pep
VAGRFPHQVVPSAAGRRARVLLLHVLILGRVVRTSTRSFDDRPYKSTYPAARWPAMVVGVTWSLLGRRHYLRSXDAASAMEQR

SEQ ID NO: 130691 - protein, 86 aa, Oryza sativa
  unsure (1)..(86): unsure at all Xaa locations
  Clone ID: PAT_MRT4530_32829C.1.pep
LRCXMVELRLIADLYCLIXXISNRLLKSDLHLCRNXWYKLXKKILSIFHLCSDNLSIYILCRKSMXXXHTLASHSFLPLANVXLHV

SEQ ID NO: 130692 - protein, 214 aa, Oryza sativa
  unsure (1)..(214): unsure at all Xaa locations
  Clone ID: PAT_MRT4530_3282C.1.pep
MVLMAGMLPGVECARRRRLRQGGGEAPCGTRRPSLCLTIVDQILNLQSXLGIAIMLQQQRSACEEQQPGWWTLDSNVREAKERLDQKLRSQRESAVVVVKRHNKAQVAGTSSDGGEQSTATTAAPQWEVYTRKEGRRRMWFRRLGRRPTPEEEEECAVCLEELRAGEAVAHLPCTHRFHWGCAVPWVQTASRCPVCRAAVYLTSPAPAASNNYN

SEQ ID NO: 130693 - protein, 63 aa, Oryza sativa
  Clone ID: PAT_MRT4530_32830C.1.pep
REEGTAIRLGVRGAGDVYAARRAGGVAGAARRAGIGVLPPRARGGVASVVSCVGESDRDDAVE

SEQ ID NO: 130694 - protein, 89 aa, Oryza sativa
  Clone ID: PAT_MRT4530_32831C.1.pep
KKKKNTIKTQKLIIKLPIYKKKHSQRRRMETIKSIYKTNKKDCGGAVLEIQNLITLASNLILFFSGPLNKFYCPPFNTIFSGKPLVFPN

SEQ ID NO: 130695 - protein, 63 aa, Oryza sativa
  Clone ID: PAT_MRT4530_32832C.1.pep
TYLKSVPLGACMPVRSLHYCAVRYQINLRFFWRARLMNLSMIKCSFNLSDMVTFNLDLFMIFP

SEQ ID NO: 130696 - protein, 90 aa, Oryza sativa
  unsure (1)..(90): unsure at all Xaa locations
  Clone ID: PAT_MRT4530_32833C.1.pep
HMVLKVVLMTIKDWFASYCCETLTVPTTSQHGQRLYLLYSMVHYGVPDXEAARSPWGSLGVHXLVVEEVIMIXERCTVVSCVMRRVLSRF

SEQ ID NO: 130697 - protein, 49 aa, Oryza sativa
  Clone ID: PAT_MRT4530_32834C.1.pep
IGLVKMWTFTVCIYGVAREGCVCVCIHCRVKQAYRAWWTALEFEEGLKF

SEQ ID NO: 130698 - protein, 110 aa, Oryza sativa
  Clone ID: PAT_MRT4530_32835C.1.pep
MRSIYVQEKLPDVSGPGLGEVRAIYVQEKLPDVSGPGLGEVRAIYVQEKLPNAVYVQEKLLDVSGPGLGKARRYRCPDNSSALSRSNLTDAALSIKGNIIFDNQAPLTDF

SEQ ID NO: 130699 - protein, 55 aa, Oryza sativa
  Clone ID: PAT_MRT4530_32836C.1.pep
KKKKKKKKKKKKKKKKKKKKKKRGGKKKKKKGRKTKKKKERKQGKEKIMREGMHT

SEQ ID NO: 130700 - protein, 45 aa, Oryza sativa
  Clone ID: PAT_MRT4530_32837C.1.pep
CGQWVKSGHVCCSIRDLPLGVRGPIHLYRWHHWFRQYIPVSQFVW

SEQ ID NO: 130701 - protein, 227 aa, Oryza sativa
  Clone ID: PAT_MRT4530_32838C.1.pep
MTMTSTTTKAMAMAAAVLAAAAVAATNAQTCGKQNDGMICPHNLCCSQFGYCGLGRDYCGTGCQSGACCSSQRCGSQGGGATCSNNQCCSQYGYCGFGSEYCGSGCQNGPCRADIKCGRNANGELCPNNMCCSQWGYCGLGSEFCGNGCQSGACCPEKRCGKQAGGDKCPNNFCCSAGGYCGLGGNYCGSGCQSGGCYKGGDGMAAILANNQSVSFEGIIESVAELV

SEQ ID NO: 130702 - protein, 99 aa, Oryza sativa
  unsure (1)..(99): unsure at all Xaa locations
  Clone ID: PAT_MRT4530_32839C.1.pep
SSVPGDPFQESSFLQXGLGTDARFNSNTFQGFIEDWQRIGSMPQYDLLLFSPSTQXYMSVATIADGAKLLVKPGGYVLLDNMFRKNXDYQTGMFSNCLS

SEQ ID NO: 130703 - protein, 927 aa, Oryza sativa
  Clone ID: PAT_MRT4530_3283C.1.pep
MDISRTNEGYTSCGPVVEMSWHRAGVLLLGAQSCLPVPEVPAVGGVGSELEHLNLGLVEYGYVAALEARPTLTDQVRAAQVNDPEIAELKKNMRVGRARDFHEDEHGTIWLGERLCVPNDKELKDLILTEAHQTQYSIHPGSTKMYQDLKEKFWWVSMRREIAEFVALCDVCQRVKAEHQRPADNRRRELTFEAGDYVYLRVTPLRGVHRFQTKGKLAPRFVGPYKILERIGEVAYQLELPSNMLGIHDVFHVSQLKKCLRVPEEQADSEHIDIQEDLTYGEKPVRILETSERRTRNKVTRLVRAVEDACGVVFPLQTKRDTVQRQQRGHGHAVAMWPACGHTAAARPGRGHGRPSRPCGGMAGGDHARPDGGGTARSTGGARPCGGDSQARSAGGARPCVGEVQMWSTAVLRGGVAAMHSAASAAAGGGSRRRRAAAMRAACDGAVRGRGQRRRATAPCGARRARGGAVRSTAGGGSRQCAWWPGMAAHGATPCGGVASGSRRSRRGCAVRCRGAAMYGADGQWPVMELRQSAFAGDSESADSAAAAPPAGRLTRPPPPPPPSSSQPLPVPAPRTTAERLGSLREMRRVWWVCGLGYWVQGFRCFPWLALNFHLTRGLGLTPAALQLVQNAGNLPLVAKPLFGVLSDAVYVGRAHRLPYISIGALLQLMAWGTLAVIPVTGDTFPTQMACILIGNLGASVTEVVSDAVVTEFSRTQKAGVLQSYAFIILAAGSLLGNLSGGYVLLRTQEPKTMFSAFSILLGLQLALSLSTKETLPSSHRNWNICHVRTSLSDNLRKQFSNLRTAISEEQIFYPLMWIMTSFAVVPILSGTMFCFQTQYLKLDPSVIGLSKVVGQVMVLSLTVLYNKYLKKIPLRRLVAGVQTMYALAVLSDLVLVKQVNLMLGIPNEIHVLCFSALAEAIAQFKQ

SEQ ID NO: 130704 - protein, 147 aa, Oryza sativa
  unsure (1)..(147): unsure at all Xaa locations
  Clone ID: PAT_MRT4530_32840C.1.pep
MLRRMVTMLNLAQMSAVKXNFYHNALLAPVXNINAHSGAXIAQGTAPDQVFNNNEQTVFEGELRRGLLIIIPXHHAMLXLAHREGCFYMALTTNPDSLVRLLARKNCICRTLSDDVGAEAYAIXREEALMLXHNRRDELRVYTLFHA

SEQ ID NO: 130705 - protein, 68 aa, Oryza sativa
  Clone ID: PAT_MRT4530_32841C.1.pep
LCELEKAANCSAQTRLKFILKYKMSVRKKKSTRYTSQLLLSYLRRRLYFLCIIIVEQSCYNLGASYDP

SEQ ID NO: 130706 - protein, 186 aa, Oryza sativa
  unsure (1)..(186): unsure at all Xaa locations
  Clone ID: PAT_MRT4530_32842C.1.pep
CRCALASHRSREESSPATTTMAQPLPWSASRAGWRDREEGERGRRGGSLPSPHLVAIRLRAAHKHAGHTAHLDPDSQRALLLLAVVSVLVVDESFHCTTLCLLDSSHSQGSALSPFALRRHYIFLSKSLHSGLASSSPTIKDVLRCATDAYAXLAEPATPPPPSPVPPTFWTACAGSKGPAEAVAA

SEQ ID NO: 130707 - protein, 109 aa, Oryza sativa
  unsure (1)..(109): unsure at all Xaa locations
  Clone ID: PAT_MRT4530_32843C.1.pep
DTAVSSPAFVWLPVPRGAVAVXMMQRRLKGKEVLSCVRSRHSRSXGRSFHIVPQAMDQSIARNTMVTECTVSMNTQLNVDLKGXHACHSVLVYTDLHNSVLMGFSKWLQ

SEQ ID NO: 130708 - protein, 182 aa, Oryza sativa
  Clone ID: PAT_MRT4530_32844C.1.pep
MSAGSPSPGGGDGGGGGGSIFGSGGIGGFGYGVGASVGVLLVVSTVALAIYFCSRTSMPVAAAAAGRPPSPPRPRDDGDVETGTGIDDATLEAFPEVVYGEARKARGGAAATQTCCPVCLENYGDGDVLRALPDCGHLFHRECVDPWLRQRPTCPVCRTSPLPSPMPTPLAEVTPLALVRPS

SEQ ID NO: 130709 - protein, 340 aa, Oryza sativa
  Clone ID: PAT_MRT4530_32845C.1.pep
MIAARAANLQVAMKALALAVLALAYAAATARAEQCGRQAGGARCPNRLCCSRWGWCGLTDDYCKGGCQSQCRVSRDGGDDDVAAVLLTAPGGGRAGVASVVTSDQFERMLPHRDDAACPARGFYAYRAFVAAAGAFPAFAATGDADTRKREVAAFLAQTSHATSGGPYSWGYCYKEVKGATSDFCVPNARWPCAPGKAYHARGPMQIAYNYNYGAAGEAIGADLLGNPELVATDPTVAFKTALWLWMTARSPSQPSPHAVVTGQWTPTPADSAAGRAPGYGLTTNILTGGLQCAGGNGGADRVAFYKRYCDVLGVGYGPNLDCFGQAPFDGDIMSASAAK

SEQ ID NO: 130710 - protein, 86 aa, Oryza sativa
  Clone ID: PAT_MRT4530_32846C.1.pep
MARGELRGTPATNGATELGGGAAQARRRLSFSSSDWRPERQRLRDLQLGMADMYMRRIFDEEESLVDGDPFIPSGLCKSASWLRTA

SEQ ID NO: 130711 - protein, 581 aa, Oryza sativa
  Clone ID: PAT_MRT4530_32847C.1.pep
MACTREVAFGVNLIGNNGAAPADEASSLAGWAPVGSRTTLSAHVEKDDPPAAMLPAVDDGGREHRPSGSRYVLAARRDGEEDGLRHPVPAGALVPRVTYRVAGWVAVQSGGGEHAGGESHVVRVSLHVDDGGECRVLGCGAVCAGVAGGWVEINGAFRLKATPRGATAVHVHGAPAGVDVKLMDLRVFAADRKARFRHLKEKTDKVRKRDVVLKFSGGAGVEATASIPGAAVRVVQMDNVFPLGTCINGSVIQDPNFVDFFTNNFDWAVFENELKWYWTEAQRGLLNYRDADALLDFCDRHGKPARGHCIFWAVDGSVQQWIKDLGRDDLASAVRGRLTGLLSRYAGRFPHYDVNNEMLHGRFYRDRLGDDAAALMFREAARLDPAARLFVNDYNVECANDPNATPEKYIELIDALRRGGAAVGGVGIQGHVSNPSGEVICGALDKLAASTGLPIWITELDVSEPDVSLRADDLEVVLREAYAHPAVAGVVLWGFMQGRMWRQDASLVDADGTVNEAGQRLVNLRREWTSDARGTIDGDGHFTFRGYHGTYVVQVTTATGKILKTFTVDKGDTSLVLDMEI

SEQ ID NO: 130712 - protein, 103 aa, Oryza sativa
  Clone ID: PAT_MRT4530_32848C.1.pep
MSDVVLGATVGDMGPGPRGLGVPCRAPRAFALPHLKALAQLPCGGGTSFGVPSVEEDHRKSSPIYEGMKGLSPVSGGGQHWVPLKDGLLLSFRAKARIVARSR

SEQ ID NO: 130713 - protein, 391 aa, Oryza sativa
  Clone ID: PAT_MRT4530_32849C.1.pep
MADGEDIQPLVCDNGTGMVKAGFAGDDAPRAVFPSIVGRPRHTGVMVGMGQKDAYVGDEAQSKRGILTLKYPIEHGIVSNWDDMEKIWHHTFYNELRVAPEEHPVLLTEAPLNPKANREKMTQIMFETFNVPAMYVAIQAVLSLYASGRTTGIVLDSGDGVSHTVPIYEGYALPHAILRLDLAGRDLTDSLMKILTERGYSFTTTAEREIVRDIKEKLAYVALDYEQELEAAKSSSSVEKSYELPDGQVITIGAERFRCPEVLFQPSFIGMEAPGIHETTYNSIMKCDVDIRKDLYGNIVLSGGSTMFPGIADRMSKEITALAPSSMKIKVVAPPERKYSVWIGGSILASLSTFQQVNLTPTLYEVARMQMWISKGEYDESGPAIVHRKCF

SEQ ID NO: 130714 - protein, 52 aa, Oryza sativa
  Clone ID: PAT_MRT4530_3284C.1.pep
FQIHKAYGSTNHPHAAHTCFNQLDLPEYTSKEQLQERLLLAIHEANEGFGFG

SEQ ID NO: 130715 - protein, 125 aa, Oryza sativa
  Clone ID: PAT_MRT4530_32850C.1.pep
MAVDGEAKDKHITASREAIISVVESPETRTLDVGPSAVPASHIGDSGMVDEGSRGEVAQRQVRSEHDLQHRHIPLEERMEWDLLAGEGIHDLGSLTIVEGEPTIAGERIVASLWWRAMEIREDTH

SEQ ID NO: 130716 - protein, 88 aa, Oryza sativa
  Clone ID: PAT_MRT4530_32851C.1.pep
VVVGFMRFITVVVLDLCVLLPYNPLFRDMGYEEGVAWSHRPRRQETAPALPTPTACAADTCRPAPAPPSAPPNHPRPGTAYQSALHAA

SEQ ID NO: 130717 - protein, 86 aa, Oryza sativa
  Clone ID: PAT_MRT4530_32852C.1.pep
HCIRHLKICLATALVYRNSSSKYVLEIPLVFGLWGNLVLLPFPMVCGYRVFVVPVPTFLRSVVAQQIPLLFPAYCGRCLCNIIALV

SEQ ID NO: 130718 - protein, 53 aa, Oryza sativa
  Clone ID: PAT_MRT4530_32853C.1.pep
WAKSPVKLGLNKPNYVMHVKDSSVVNPQLHSMHLPPELDQALFLTSSFFFSIF

SEQ ID NO: 130719 - protein, 47 aa, Oryza sativa
  Clone ID: PAT_MRT4530_32854C.1.pep
EHIILLPFFSVTTDYSFYPFGIQLALWDKLETQIVSQKKKKKTRGGA

SEQ ID NO: 130720 - protein, 648 aa, Oryza sativa
  Clone ID: PAT_MRT4530_32855C.1.pep
MGKLLFLLAWITLLQVPCTIAAAAAGAACHCLPEPPEPQYGGGVVRNADFSAGLHGWSAFGYGSLAEGSSPAGNRYAVATNRTRPYQSVSQKVLLQNDTHYTLSGLVVKKSHVSDGVADVRVVVKAAGDFIHAGGVAAKSGCWSMLKGGLTTVSGGRAEIYFESNATADIWVDSVSLKPFTKEEWSNHRDASASTARRKTVRLQATDSAGNPLPGAAVSLENVRNGFPLGAAMSGEILRNPSYQRWFASRFTVTTFENEMKWYSTEPAPGREDYSVPDAMLEFARSHGIAVRGHNVFWDDPNQQPRWVQGLPYPQLLAAASRRIRSVVARYAGKLIAWDVVNENLHFSFFERRFGWDASTAFYAAARMLDTGSTLMFMNEYNTLEQPGDMAALPARYVQRLKQIIGGYPQNGAGMAIGLEGHFTAPVNIPYMRAALDTLAQAGVPVWLTEVDVGGGASQAYYLEEILREAYAHPAVQGVILWAAWRPQGCYVMCLTDNDFNNLPQGDVVDRLITEWSTAPRAGTTDAEGFFQAELAHGEYKVTVTHPSLNTSVSQSVKVEMGSGSHYFIQGASKQEPRVTKRGYLRARGCLAGAPTRGSLSPAALAHAFISLLLLLLLSPAAGHRERLRAAERDAEAAGAKFLPERED

SEQ ID NO: 130721 - protein, 317 aa, Oryza sativa
  Clone ID: PAT_MRT4530_32856C.1.pep
MGKASKDKRDIYYRKAKEEGWRARSAFKLLQIDQEFNIFHGVKRVVDLCAAPGSWSQVLSRNLYVPAKQSPDCKEGDLPLIVAIDLQPMAPIEGVIQVQGDITNARTAEVVIRHFDGCKADLVVCDGAPDVTGLHDMDEFVQSQLILAALTIVTHVLKVGGKFVAKIFRGKDTSLLYCQLKLFFSQVTFAKPKSSRNSSIEAFAVCENYSPPEGFKEKDLYHLLEKVGTPSGADDLDCRSGWLEGPNKVYIPFLACGDLSGYDSDRSYPLTSTEGGSYQSLDPVQPPIAPPYKTALEMKKVASHGIGADISKLSLDS

SEQ ID NO: 130722 - protein, 491 aa, Oryza sativa
  Clone ID: PAT_MRT4530_32857C.1.pep
MAVAQASLLQSFPFRAAVFAACVLLLPLVPSPQAPAAGGDGGGGGGRGEAFLAKVWELLHLLVVGIAVSYGLFSRRNNAGRRGDEKDAAAQAKADSAGYVSQMIHDSLVFDDGGGDVALDSPGGNRVRSWSAMHHPDEPVVVVATGGAGGGRSHAVEAAQQAPPLSLPVRTLKPQGESSSSAGYGDGGEPWAARPRRISQDTPGGGGGGHETVLPSPIPWRSRSGRFDASAPSPPSPSPKRLSPASSLSKETLAKASEDYSSRRRSPYKSSPPAPPPPPPPFLVHGYHPPAAERRTAAKSFNEDLQEQTSHSFTTSEFSRSSSNSSSAKPRISIDSSSSSSSYYPVAKSVRTIRGGRESLQSQSQEQPDVAVAGDAPALLHGSDSDDPYGGYRAYQSIPRFQYERGSSDPILGNVTVSSESSDDDDSDVDGDGELSTRGNSPRRESSPEVDENEVDKKAEEFIARFREQIRLQRIESIKKSAGPRGVKHGK

SEQ ID NO: 130723 - protein, 89 aa, Oryza sativa
  Clone ID: PAT_MRT4530_32858C.1.pep
MASSRWVRPEVYPLFAAMGVAVGICGFQLFRNITGNPEVRVNKVGRAAGVLENHEEGRRYAEHGLRNYVRDKTPEIMPAINKFFTEPTK

SEQ ID NO: 130724 - protein, 90 aa, Oryza sativa
  unsure (1)..(90): unsure at all Xaa locations
  Clone ID: PAT_MRT4530_32859C.1.pep
MQSIMNPCNEFERQQCSPMNLPWEQARRIQLMSCQVMREQCXQDMRLMAEEYHCQDICTMAEGMMQASACLMLASAGMPLGDASGTLGSL

SEQ ID NO: 130725 - protein, 399 aa, Oryza sativa
  Clone ID: PAT_MRT4530_3285C.1.pep
MDDFVAELARMTLVVGYPNAPEYSTIRPLSGELPHRIRLVVHRYVGTCLANMVVEASGGTADHACQEAAYLMMARLRDRHNYIFCNTAYRFHPRQASGDDISTFRPIAGKNDTTFGHMCAVMRGMDRMHSDLRKASKALNDGKLVRIIVLKDEIARLKKENAQLKGLPAPRGVRIRTTPRKSTTAPVHIQLAPRNPPPPAVPPATPPAPPAVPAAPAAPAPAPAPVPVSAPMSALSFTPASATRGPASGNGGWLPANSSGSRDHSSSSSSGSEPGNGETYLPDSRSRLEGPSDKQEDAFDSTNREGSNGKERTDGGYPNSASGNGPPPLPENPTLAQHQQMHQRMQQQAEQQQQQFGPPPPQSKLPEFLCVRPPTFSSTTNPMEANDWLHAIEKKLNLL

SEQ ID NO: 130726 - protein, 64 aa, Oryza sativa
  Clone ID: PAT_MRT4530_32860C.1.pep
YILITYDCNIAQDQGPLYWVSYRNKIESQAWRSKSRTPTSLSRKEKKIKNPNLRSVLGPRMWMN

SEQ ID NO: 130727 - protein, 79 aa, Oryza sativa
  Clone ID: PAT_MRT4530_32861C.1.pep
MGDIGHARPYGASASGGVTCGRATSTTPLADKHSSKAPPRARARLEPTRRRSQPAQRMNAFTWTSQGLATQGNGRALSR

SEQ ID NO: 130728 - protein, 42 aa, Oryza sativa
  Clone ID: PAT_MRT4530_32863C.1.pep
DQHPPPDPVVGKAQVSGRACSAEACSRRPAGTSMLADADALA

SEQ ID NO: 130729 - protein, 63 aa, Oryza sativa
  Clone ID: PAT_MRT4530_32864C.1.pep
RMDLCLRECTPSIDSFQNSIAQLYRRRKVLTTCGMLANHVKDLTICTRALFILHRSRTVKLSN

SEQ ID NO: 130730 - protein, 40 aa, Oryza sativa
  Clone ID: PAT_MRT4530_32865C.1.pep
QNLNNGVLVLIPRTSYMIITSSITQALMHRLHIASIDTGD

SEQ ID NO: 130731 - protein, 208 aa, Oryza sativa
  Clone ID: PAT_MRT4530_32866C.1.pep
MGTTPPSPSFLFLQIRLSSSSVVLLPVLSGGAAPAPLILGETPIIGSSKKNIVGKKHQDCRPKRLSIVKKERRRAISQQHKPLRKEPSTRSATAKHGLLSLGLNLRLEPDCLPSYLWWPHHPSTQLPPNTITYTWSPHGPQTNTPLLANPCSTMGFKESPLLLLPSVGNPHWPSDHHIHPHHGAPRLDRETDWTYDGRSSKEKVGTQP

SEQ ID NO: 130732 - protein, 202 aa, Oryza sativa
  Clone ID: PAT_MRT4530_32867C.1.pep
PLAPSIGAAKDADEKVRPQALYGRPKLQLAPCRPLYGRQGPNRNFGQRRQTARSTHRLPRTHTREIQKDRTTRNASDCCTGHRPGPGGGRSVRLSKPPKPSKQIVGPSSPSAEQRPCYCPPLPSPPSPAATPPTAEQCPVPARRCPLLHFPQQRCLPSLPNCVRENREEKVKEERMTSGPHVYILILMLHKCHVNTATQVPR

SEQ ID NO: 130733 - protein, 210 aa, Oryza sativa
  unsure (1)..(210): unsure at all Xaa locations
  Clone ID: PAT_MRT4530_32868C.1.pep
IFLDISKYFPIMSEREISPGFLXDVVFPKFKSLRGVLLSVEEPTMSQVFSSSILMRLHKCTSPSTKGISFLSEVSSTTKSNKCKKDFLGINLNKYLQSXQQALKQTKINHSHTHVHSXKSKLVDWWRGRSEKGKAQKWISRLKRAKDFTKFQHEHSRXTGQKSISEKNLKTPVLILRQHCISRISEAIFKNSEKHQYRFCKLEVVREFPK

SEQ ID NO: 130734 - protein, 122 aa, Oryza sativa
  unsure (1)..(122): unsure at all Xaa locations
  Clone ID: PAT_MRT4530_32869C.1.pep
VHGDGTQGVQGEGPNQDGNTAQLQFNNFQDQVDYAVHHALMXSMVDGSMAEYQATGPIYLPGGVFPNYRPLITDNQQFVQSIPLNAPSAQPTAPVSAPAPAVPPSAPGQLINPRLFQQTPPR

SEQ ID NO: 130735 - protein, 89 aa, Oryza sativa
  Clone ID: PAT_MRT4530_3286C.1.pep
MASHGSYGGIFGGDGIDPVEVTGPMAWVASMRLRQWILVHGVGEGSSSMAAIDVVTATTTPPSHRRWRKETRRGQRCSARLVQRDSRSC

SEQ ID NO: 130736 - protein, 97 aa, Oryza sativa
  Clone ID: PAT_MRT4530_32870C.1.pep
SLSLSLTDKKTGLMPKEKPEILVKRSKDIKRCVYVTEKDISACYKALNEHHGLLEGYIMKAGMATGGSEFNKAPREVILDYTDHALQRTVPAAEPAM

SEQ ID NO: 130737 - protein, 160 aa, Oryza sativa
  Clone ID: PAT_MRT4530_32871C.1.pep
MIAGVSELCISPESNKIFNKGMPSKTEERCMAPIDSNENDTYNFYQVSDGQHLILHPLNMKCLINHYGSSDMLPPRIHGKILELETVTQSEATRKRYRYLSHFSLTTTFQFCEIDLGDMLPPSSLAPFMDEIKKREKQRKRTAKKEESDRVKAEVAAAAQ

SEQ ID NO: 130738 - protein, 74 aa, Oryza sativa
  Clone ID: PAT_MRT4530_32872C.1.pep
SRARGEEMARGAGDRAPSPGIVREIERNCPGSRGKGGDRAGAGWRGEGISIGYGGEGIGCCEWGPQIAFFIAQV

SEQ ID NO: 130739 - protein, 148 aa, Oryza sativa
  unsure (1)..(148): unsure at all Xaa locations
  Clone ID: PAT_MRT4530_32873C.1.pep
HASEHFGARLLTIDSSMLFGGKTTKESDSYKKGDRVRYIGSLQSTGIILDGESPPDFGSQGEICLPFEENRSSKVGVRFDEQIPGGIDLGGNCEVDHGLFCSVDSLCLDAPGWEIRSKHPFDVIIXFISEEIEHGPLVLFLKDTERIC

SEQ ID NO: 130740 - protein, 84 aa, Oryza sativa
  Clone ID: PAT_MRT4530_32874C.1.pep
MPYWAVLGRYNTMHGMGLTASATGGVEAGGEGEGSGEWQQMAARRRGSREVPVRGNPIWTQGRADGGGDLGSEAGWECAGERVL

SEQ ID NO: 130741 - protein, 136 aa, Oryza sativa
  Clone ID: PAT_MRT4530_32875C.1.pep
RGSRRTREASCCAASETPTGRRRRHRPSPRRRTDGNGACRRGRGRAPARSRPHHSRRRRSAAASSRAPAAAAPLPRPAPGRTSARSRRPPPPPPAGRQRRTAARRRSAPTSPLRAAAAAAPSTAPGSCARLLAIAS

SEQ ID NO: 130742 - protein, 77 aa, Oryza sativa
  Clone ID: PAT_MRT4530_32876C.1.pep
VVYGAEFGDVKRAAGAGSHSCGRPVDALSDLHGLLVVSVGVGVGSHHESVIRRGPCERPGFLNKFLPFFFLIIGGRL

SEQ ID NO: 130743 - protein, 208 aa, Oryza sativa
  Clone ID: PAT_MRT4530_32877C.1.pep
MGCLPLERATGSGGACTDEKNTVVERFNVGLQDMIARLNDELGDGEMIVYGDVYRPVAAGGVRGGERRQQHRAHAGQPAAAHLCHLLRHVRPRRRRRRARRPFLRRARGRKTVLENGHRRPRQGGSGGGGGNMRRRRRQARQVTRRGQRQPAVGPWGREWRRPRLDAVRISAVIELPHKRHVKCHVGATSAKTTIKPRRDLICTGFNS

SEQ ID NO: 130744 - protein, 135 aa, Oryza sativa
  Clone ID: PAT_MRT4530_32878C.1.pep
MAREIRERKLCFLSLTSRSVDVDDSVISDGKRLQNLHCESSHFQMHQLPEKGSRAICFQPLKIPASPTNIHYQLRWKGKLSTSGSCKHSETEKLLYRGLSKSERYTSTFWMVCMDNQSIKKLDNNYMHAAQQYCP

SEQ ID NO: 130745 - protein, 507 aa, Oryza sativa
  Clone ID: PAT_MRT4530_32879C.1.pep
MGLPPAAAALSSSPAVPASAASACSRRRRRFPLASASGGCSPAPPSAPAPSSGKVAALASTGDRAGGVRAPKRCSCSGTVGAPRRSHPTGGEHVEADGTGEPPPVDPRGHGAVAYILHPANEKIRGGIVVAGAGGGEACAGGKAAHVDARAQGPGRAAAARTPRSEVDGKGPDEKKPRREPRPRSPRPPPWRPPPRRGRLSLLARQPQPQPQQLRLRLQRVAAFTGVGGGGRRLMVAAAAKKRRGKGGEGEEEEERVDTHSFAPKAGEATGPFPEAVLLRKKMVKDDGQVAPEFADADEEKLYEFLNIQMESDLNLKRMRHYEVVYLIHEDRVEEVEDVVSKVQDFVREKKGRIWRLNNWGLRRLAYKIKKARHANYILMNFEIQAKYINDFKTLLDKDERIIRHLVMKRDEAITEDCSPPPEFHTLRAQQQYMDDEYIDDEDDGKEEQEPEEDWDDKGEMENAGYEDDDEPEIILVDEVERDNNENIRRRNRTMKVEKYAAEKVLR

SEQ ID NO: 130746 - protein, 80 aa, Oryza sativa
  Clone ID: PAT_MRT4530_3287C.1.pep
HSSTALYFIVLYIYIYIYILLLQHKPHTDDDTHFIEKKRTKKENTKDTTSTHAHIHSLTGAHSVTRPLHDQPCMYVRIFI

SEQ ID NO: 130747 - protein, 93 aa, Oryza sativa
  unsure (1)..(93): unsure at all Xaa locations
  Clone ID: PAT_MRT4530_32880C.1.pep
IGGVQGGWGLGEGRMPGSGRAARDGAARSDDXQRRREGRKATAARRGAAAARVGEGRRRAGPGRGAGRSAAAQSAVRGWRCRRRPSRACGVGG

SEQ ID NO: 130748 - protein, 216 aa, Oryza sativa
  Clone ID: PAT_MRT4530_32881C.1.pep
MDISRANEGYTGCGSVVEMSWHRAGLKHLCNNAAGFVAVVGQSATPNPSPPLPNPAGLRAARFVAVVGQSAAPTVIRRHRRRIRMGTGRRHRIDVEVAPPPDPRRGRAAAARSTPSSRRGGGRGSRRRQQREVEAADQRGTGRRGRAAAAGSTPSSRRCRIDVRSRRRRRIDTPAASGTGARGRSRPPPPPPPRPPRPAPLEFDGRKRHHFYMRPA

SEQ ID NO: 130749 - protein, 156 aa, Oryza sativa
  Clone ID: PAT_MRT4530_32882C.1.pep
MDAPIHRLSTKMPDEGSAHLESNANMLSVCNCMLWFEVMINEIEGDCLGPFAIILIKYASDKFEIIAISYLDQCITMDEKDIWPKGGYDSIIDLKMVSRLDQEQTLAIRKMMDRTLNQVDELTLLFRGLNYRRISIVERQYTQRWFQSELIQILDV

SEQ ID NO: 130750 - protein, 153 aa, Oryza sativa
  Clone ID: PAT_MRT4530_32883C.1.pep
MSKKTVIRADLIGRSCKKDILHAVSTLQGIKSMDIDEEKCTLTVLGPVDPVKIVHRLKKKCFAAAVVSVEDDKPKEPDPPAPEKKKEDDDDPCQCQCKEAECACVKVCAASCHHSPCSLPDCYFYKSYSYSYKPSPSFGFGYHLESGGHCIIQ

SEQ ID NO: 130751 - protein, 95 aa, Oryza sativa
  Clone ID: PAT_MRT4530_32884C.1.pep
LVAPSNRLSCVEIFLGVTPGPTPLSCCCTPQGVWCCFRRFQLWGGKLHCRFHPLQVGPHFWLFLLPLQFKEIFFPPFFRGSPGFPFPFFCPVLAP

SEQ ID NO: 130752 - protein, 44 aa, Oryza sativa
  Clone ID: PAT_MRT4530_32885C.1.pep
LLLSFAAAGATEAEVGCSAFLFHRYVSEIMCSIFKSNIVMLYAG

SEQ ID NO: 130753 - protein, 51 aa, Oryza sativa
  Clone ID: PAT_MRT4530_32886C.1.pep
NFVRTFFVCVSSVCRVTIFVTATYSFPISFCFCLRVYSWTSQMPVKIRGSW

SEQ ID NO: 130754 - protein, 111 aa, Oryza sativa
  Clone ID: PAT_MRT4530_32887C.1.pep
MGGFAASNIVSESGEKASNLVYRGRLQGAGRAVGMLLPQQDAQLYLEPSSRNQQLFSSSSHHERYSSGFRHQTAILGVAFSTVQSSTITKKEQRQSNHTSTRQGASGNSGN

SEQ ID NO: 130755 - protein, 27 aa, Oryza sativa
  Clone ID: PAT_MRT4530_32888C.1.pep
PKRSRAGQMLEHDGGEGQDVRSQHEMN

SEQ ID NO: 130756 - protein, 57 aa, Oryza sativa
  Clone ID: PAT_MRT4530_32889C.1.pep
LSRGLFILIDLARVAESRPWGARFKVVGMRGSLCGRRNKRPMTRTKGPCHGGRGGGE

SEQ ID NO: 130757 - protein, 1202 aa, Oryza sativa
  unsure (1)..(1202): unsure at all Xaa locations
  Clone ID: PAT_MRT4530_3288C.1.pep
MADHPPNHRGEGMEDFVAELARMTLVVGYPNAPEYSTVPPLSGELPHHVWLEVHGFVGTCLANMVVEASGGTADHACQEAAYLMMARLRDRHSYTFCNTAYRFHPRRASGDDVNTFRPMAGENNTTFSHMCAVMRGMDRMHSDLHKASKALNDGKLVRIIPLKDEIACLKKKNAQLKGFPVLGGVRIRTTPCKSTTAPVRIQLVPRNPAPPADPPVLPAVPXAPAAPAPACNVPPSPRPGPLTSDSFHSPRPGCYTAPAPVPVSAPASALSFAPASAVKGPAXATEMVNTRNGSREAGEGSNGEECTDGGHPNSASGNGPPPLSENPTLAQVMAHQTQMMAAMMQQMQHQHQQMHQRMQQQTEQQQQFGPPSPQSKRPEFLRVRPPTFSSTTNPMEANDWLHAIEKKLNLLQCNDQEKVAFATHQLQGPASAWWDNHMATRPPGMEVTWAEFCHSFRKAQVPDGVVAQKKREFRALHQGNRMVTEYLHEFNRLARYTPEDVRTDAEKQEKFLAGLDDELTNQLISGDYADFEKLVDKAIRQEDQRNKMDMKRKAAQFRSNQGSHQRPRFTPEQQGGPTTMIVQQHRPYNASNFHPGSSGSHHGQGQHNRGVASRPPMAPVQQAAPAPPKPGAGFNCAEEAQAAPEVVLGTFPVNSVPATVLFDSGATHSFISKQFVGIHGLIREKLSTPMRVHTPGNSSTSVQFSPSVTIEIQRSPFLANLILLESKDLDVILGMDWLTKFKGVIDCANRTVTLTNEKGGTVVYKSPVSPKQGVSLNQIEMGIPVVTKEKNSRKLEDIPIICEYPEVFPKDLTTMPPKREIEFQIDLAPGTAPIYKKPYKIAANELAEVKKQVEEQLQKGXKVFSKIDLXLGYHQLRIREEDIPKTTFSTRXKDFQVYCNASRRGLGCVLMQEGRVVAYASRQLRPHEGNYPTHDLELAAVVHTLKIWRHYLIGNRCEVYTDHKSLKYIFTQPNLNLRQRRWLELIKDYDISIHYHPNKANVVADALRRKSYYNALCTEGMCKELQQELEHLNLGFVEHGAAQVNDSEIAELKKNMRIGKARDFHEDEHGTIWLGERLCVPEDKDLKDLILTEAHQTQYSIHSGSTKMYQDLKEKFWWASMRREIVEFVALCDVCQRVKAEHQRSARLLQPLQIPEWKWEEIGMDFITGLPRTLLMKNTRLGRSAYLQCRSKTRLRVYERAS

SEQ ID NO: 130758 - protein, 413 aa, Oryza sativa
  Clone ID: PAT_MRT4530_32890C.1.pep
MEGAADDGLMGRGIPASTPLGTGANVGARSPVRSDVTGNRPVTVWVLRIDGGSAWASSPLAPLATWRLPEGLGARQREGPRGEICVGDDARQQALARCRVGSKAGLADCLTYLSGQSSDEDKLEGGIYAGKLNPGYFESLNAKKKLLLRAHAQRRSLRATPPPRRVGDCKAACRMRRPPEFAAVAAVAVVAALVLAAGAGAAPLPAALRLERALPHKGVAVEHLRERDRARHGRRGLLGGGGGGVAGVVDFPVEGSANPFMVGWITAAVSPSVRSLVSKGNQCFVTSSSVDSSFPTVSLYFMGGVAMTVKPENYLLQQASIDNNVLWCIGWQRNQDLVLKDKIFVYDLANMRMGWTDYDCSTSVNVTTSSGKNQYVNTGQFDVNGASPRPPYSGLVPAVAVAVALIFGGFSRR

SEQ ID NO: 130759 - protein, 504 aa, Oryza sativa
  Clone ID: PAT_MRT4530_32891C.1.pep
MRRPPEFAAVAAVAVVAALVLAAGAGAAPLPAALRLERALPHKGVAVEHLRERDRARHGRRGLLGGGGGGVAGVVDFPVEGSANPFMVGLYFTRVKLGSPPKEYFVQIDTGSDILWVACSPCTGCPSSSGLNIQLEFFNPDTSSTSSKIPCSDDRCTAALQTSEAVCQTSDNSPCGYTFTYGDGSGTSGYYVSDTMYFDTVMGNEQTANSSASIVFGCSNSQSGDLTKTDRAVDGIFGFGQHQLSVVSQLNSLGVSPKVFSHCLKGSDNGGGILVLGEIVEPGLVYTPLVPSQPHYNLNLESIVVNGQKLPIDSSLFTTSNTQGTIVDSGTTLAYLADGAYDPFVNAITAAVSPSVRSLVSKGNQCFVTSSSVDSSFPTVSLYFMGGVAMTVKPENYLLQQASIDNNVLWCIGWQRNQGQQITILGDLVLKDKIFVYDLANMRMGWTDYDCSTSVNVTTSSGKNQYVNTGQFDVNGASPRPPYSGLVPAVAVAVALIFGGFSRR

SEQ ID NO: 130760 - protein, 83 aa, Oryza sativa
  Clone ID: PAT_MRT4530_32892C.1.pep
FFFFFFYQVQKSHIKGGREGPGAICPRVCLTGAAPAVFRPICRQDGREGLGPSPCCLRPACHPAAACACTSTLLACRRRHVLN

SEQ ID NO: 130761 - protein, 531 aa, Oryza sativa
  Clone ID: PAT_MRT4530_32893C.1.pep
MPPKPERRLFQYVSKPRRPAREPAPAPEVCGGGGEEVVASDADADAVYRMVTAAPTPSAMESALSASGVAISAPLLDLVLRRFRFAHGDPLRALSLLSLALDRHGVAPSPFALDTALYVLGRARRFAHMWDLLRSSRRLVPDAVTPRTAMVVLGRVAKVCSVRETVDSFRRLSRMLRGRGDDQEGQLFNALLRTLCQEKSMSDARNVYHALKYEFKVNRQTFNILLSGWKSAEDAEAFVAEMRELGVEPDLVTYNSLIDCHCKNRGVENAYKLLDEMREKDISPDVITYTSLIGGLGLIGQPDKAKHLLKEMHELGCYPDVPAYNTAIRNFVIAKRLGDAFALMEEMASKGLMPNATTYNLFFRCYYWAYDIGSAWQLYERMRSEGCFPNTQSCMFIVRLCHRHGRVAQALELWSDMVNNGFGSFTLVSDVLFDLLCDEGKLDEAERCFHQMIELGQKPSNVAFRRIKILMQLANREESIARLTAQMAQFGRLAPEDCRRVDHTLQSTHQSSDRTDTDTIVKHSNTFESRR

SEQ ID NO: 130762 - protein, 168 aa, Oryza sativa
  Clone ID: PAT_MRT4530_32894C.1.pep
PQGPAPVGKQKPPLAPETRTPPPAPLPQSFSHLAWPVSLLEMGRWAPPLECGLGPPLGPPGLPPSFAPSGFAFNCAGQAFSPSSQLRPIPRRPLLRPPIGQAVTPPGTGPGGPGPPPPPPLGGGPKHWLLGREGGPGWGPWQAPQEKKQKKKKKKKKKKKKKKKTHPN

SEQ ID NO: 130763 - protein, 70 aa, Oryza sativa
  Clone ID: PAT_MRT4530_32895C.1.pep
VVFTTQETSRSGNKEAFFGQKKYRSWSKKVQFFWRKKKREENPVSVFSVDLGDCSLPYRLSFPSTFALMW

SEQ ID NO: 130764 - protein, 86 aa, Oryza sativa
  Clone ID: PAT_MRT4530_32896C.1.pep
LGAAGFAVSRRRHRRRIRHLHASPLLVSPALCLPTTRSAAAVQGERGRRRIRMGNGRRASPLLDRLPPCLPTVRSAAAVQGECGRH

SEQ ID NO: 130765 - protein, 133 aa, Oryza sativa
  Clone ID: PAT_MRT4530_32897C.1.pep
KGQKGKGTWGERLGDKPPPQLWGGVPPQPGGGARKIKKLGGAPGRPAQKKGRGGGKNWNGAPFRPKIYKEPEIGPRGFPPPKKVFKGSLHQSPKKLWKPPLPMSIRNSKTKRAHRGGTTQRGNRGPLRIWAPG

SEQ ID NO: 130766 - protein, 100 aa, Oryza sativa
  Clone ID: PAT_MRT4530_32898C.1.pep
FSVNDVWEEVLPSSINGESDDKVRADGLDTGWHFTVNMPKHSDPFSGKEKVIHAKYADKEFVQKYSMDEIQLAQQMWDTVTAKDKRAVYSLIVQSRANVN

SEQ ID NO: 130767 - protein, 116 aa, Oryza sativa
  unsure (1)..(116): unsure at all Xaa locations
  Clone ID: PAT_MRT4530_32899C.1.pep
SNPSVHYLYQLHQSTAPFKRKGRSYPPRTRDGWRHQAYLKPSTCRAIDLTVSASRVCGGVPAYGETMDLAHRRLLPVEPXQMLRATRVSASSSMILHLTLVCGLIGPTTTPVAPPA

SEQ ID NO: 130768 - protein, 59 aa, Oryza sativa
  unsure (1)..(59): unsure at all Xaa locations
  Clone ID: PAT_MRT4530_3289C.1.pep
LHHAERQCPYTTTISPITCTTVFTLRWTHEWVSLVSETGTGFRSGXQTTCTRCHNISWS

SEQ ID NO: 130769 - protein, 494 aa, Oryza sativa
  unsure (1)..(494): unsure at all Xaa locations
  Clone ID: PAT_MRT4530_328C.1.pep
MEPPAGGSSDHRRGAGTGAGAGGAAAPSGLRRYGFRFSASSLLQAPLAALLEYSGVVPSGPGAPQAGPPSALSSSPSSSSSSSEADGLLSAPAAGDGEVSIRIQGGPGEADAAGVAGAASSGEDSIEATAAGDVDPASAAAGRGGGADAEASGGGADGASGNGGGDRAYQRYDVHHVARWIEQILPFSLLLLVVFIRQHLQGLILILLCSCHCVIISGFFVTIWIAAVMFKSNDILRKQTALKGERKIAVLVGITVIFMIHVFGVYWWYRNDDLLRPLFMLPPKEIPPFWHAIFIIXVGISNQMPLADTMVRQAAMAIKCMLLMYYKNSRGRNYRXMLTLVEYLLLLYRALLPTPVWYRFFLNKEYGSLFSSLTTGLYLTFKLTSVVEKVQSFLAAVKALSRKDVHYGSYATAEQDTPLNSHSILFKELVFCWNLVQEKMHVPVLLRCKHIFCEDCVSEWFERERTCPLCRALVKPADIRSFGDGSTSLFFQLF

SEQ ID NO: 130770 - protein, 107 aa, Oryza sativa
  unsure (1)..(107): unsure at all Xaa locations
  Clone ID: PAT_MRT4530_32900C.1.pep
GPNKGQKVFPPPLGGARPPGPPQGKPPLLNPPKNWAGRPQQKGGGPPPGPKFRGPQPPLEQKPPQKFKLAPPNXKGAPRGVGPPPQKNPPPQKGPSGGDTPPGPYPP

SEQ ID NO: 130771 - protein, 46 aa, Oryza sativa
  Clone ID: PAT_MRT4530_32901C.1.pep
MARESDSYIVWYVCATCAGEIEGDKWGTDRCHASWPRPFAFGGRLD

SEQ ID NO: 130772 - protein, 88 aa, Oryza sativa
  Clone ID: PAT_MRT4530_32902C.1.pep
PPFLFVKKAQKKGFVSIAFKPTPYFLVTPLAGKGSFFRVFPTVVLANAFRFSKKRVQGFKHTKGVGFGAFPPPQSKSFQAVFIVGESF

SEQ ID NO: 130773 - protein, 63 aa, Oryza sativa
  unsure (1)..(63): unsure at all Xaa locations
  Clone ID: PAT_MRT4530_32903C.1.pep
SIFXHXSFSVLCNNRSIIDLTKAIKRTRQQNRHQTVQKPPSSDIRMMCCERXSILPDLQLRLR

SEQ ID NO: 130774 - protein, 130 aa, Oryza sativa
  Clone ID: PAT_MRT4530_32904C.1.pep
MLLSPLCETQFKLPALTGRSVPPTSLISKLIIRIKVIIRTHKTSTSHILDPHLKLNNSKARANDQKRNLEAGRARAWKEADGFYSPVARRIECVDSLMPVCHGRVSPSGRLAGSIIYGCLVRIQALSPPH

SEQ ID NO: 130775 - protein, 558 aa, Oryza sativa
  Clone ID: PAT_MRT4530_32905C.1.pep
MSGKGKRRSARLLKLEEQKNDDTTATGCLLDPWQIIRNSIAGVRGKRKRNEEIQHLQGEASSSQALCATTDINNLSSKSSAVQIIEYILDTLEMRDTHELFAMPDDIQVTDYAERVNRPGDFATLRQKNKDGMYNTLEQFENDVYMVFQKAMSINSEDTIPYREAMSLLHQAKQVFLSLKSNQMYSESELAAWRQKNLVSQSPAKLNGKFDGSKVGSGSGAGGAAPTTPQRPSAPARKKIAAKTGAVAAATSVKSTTRQRAARESNGAPGRRARKAASVTPGTAEHGGAGASATVEQRRLAYADEADHGGWRPVPVVSTGQHATLVYRPQTAAHTYQDSLRRFVRHAGLKARVAAEFRNLECDVRARQARPAPGYCRTVVSLPAPAPARPAGRSSRNGRCPPPSPPSAAFGGGGAAAASSADAAGNKAPPRCRLKTDEVLKLLVLIGRPAFMERARRVLGHERQESSSKQGHDQKPAVTRAGDDDGGAKAGVTAAKPGKKKGSASKPAAVEFGPFAPPKLVIPGRQLGFSQFAGSSSQPFKVTPTTPNVPDKKKKKRG

SEQ ID NO: 130776 - protein, 139 aa, Oryza sativa
  Clone ID: PAT_MRT4530_32906C.1.pep
SRRLAASARRLHWPARHSRLRKPGQDSLRRFVRHAGLKARVAAEFRNLECDVRARQAAPAPGYWPNCGFASSSGAGTPSRSFLPHGRCPPPSPPSAAFGGGGAAAASSADAAGNKAPPRCRLETDEVLKLLVLIGRTAF

SEQ ID NO: 130777 - protein, 118 aa, Oryza sativa
  Clone ID: PAT_MRT4530_32907C.1.pep
YGVYHNHIIDVSCIKTLMIISSLIRMDVFFVSSLLQAMSLLHQAKQVFLSLKSNPDVLGVRARNVAPEKSAEPVAGQAKREIRWQQSRLRLRRPAAPLRPHHSGPSAPGEEEDRRQTG

SEQ ID NO: 130778 - protein, 145 aa, Oryza sativa
  Clone ID: PAT_MRT4530_32908C.1.pep
EDGDEHDMFVHSPLGGEMVDVDHNLLQDMLRDVENLAYNERDSIKFNKLASDSEMSLYAGCKAKHTKLSATLDLMKLKASSGWTGKIFIDLIGILKAMLPNENTLSEMTYEANQVLCPLGLEVSRIHACPNHYILYHKQYPNIDL

SEQ ID NO: 130779 - protein, 68 aa, Oryza sativa
  Clone ID: PAT_MRT4530_32909C.1.pep
PTLNLPLYPPPQLYSNYAHLCTPISYLDSDKTRQLYLHSAVCNTLELEAIRAKVAFSSELYEQCSSSH

SEQ ID NO: 130780 - protein, 844 aa, Oryza sativa
  Clone ID: PAT_MRT4530_3290C.1.pep
MDWLTKFKGVIDCANRTVTLTNEKEETVVYKSPVALKQGISLNQIEVENSVVTEEKSWRKLEDIPIVCEYPEVFPEDLTTMPPKREIEFRIDLAPGTAPIYKRPYRMAANELAESTSPWGAPVIFVEKKDKTKRMCVDYRALNEVTIKNKYPLPRIDDLFDQLKGTKVFFKIDLRSGYHQLRIREEDIPKTAFTTRYGLYECTVMSFGLTNAPAFFMNLMNKVFMEFLDKFVVVFIDEILIYSKSEEEHQQHLRLVLEKLQEHQLYAKFSKCDFWLSEVKFLGHVITAQGVAVDPSNVESVTKWSPPKTVSQIRSFLGLAGYYRRFIENFSRIARLMTQLLKKDEKFKWTAECDKSFGELKKKLVSAPILILPDPTKDFQVYCDASRHGLGCVLIQEGRVVTYASRQLRPHEGNYPTHDLELAAVVHALKIWRHYLIGNRCEVYTDHKSLKYIFTQPDMNLRQRRWLELIKDYDMSIHYHPSKANVVADALSRKSYCNALCTEGMCKELQQELEHLNLGIVEHGFVAALEARPTLVDQVRATQVNDPEIAELKKEYEVPKKIVSDRGSQFTSKFWQKLQEELGTRLNFSTAYHPQTDGQTERVNQILEDMLRACALDFGGAWDKRLPYVEFSYNNSYQASLQMAPFEALYGQKCRTPLFWDQTSERQLFGTEVLTEAEEKKSYVDNRRRELTFEAGDYVYLCVTPLRGVHRFQTKGKLAPRFVGPYKILERRGEVAYQLELPSNMIGIHDVFHMSQLKKCLRVPEEQADSEHIDIQEDLTYVEKPVRILETSERRTRNKVTRFCRDQWSHHSEEEATWERKDELKAAHPYLFASSSESRGRDSV

SEQ ID NO: 130781 - protein, 65 aa, Oryza sativa
  Clone ID: PAT_MRT4530_32910C.1.pep
MEAWRHATDKAFFTTVLAIRTSGGNLLSAMPLALDTAILYGRCSHGEGDLRCRLSWHKVEHLELA

SEQ ID NO: 130782 - protein, 280 aa, Oryza sativa
  Clone ID: PAT_MRT4530_32911C.1.pep
MQIGIKESEGPTSLDPKLAPVLWFHNNYDQYVEESDDEDGEVSGDDEEVSDEDEFSATSDEDESIEETDDDGISDDDDSNDDEEESNEVNDTLLLYSISSQQLLANSGLDDLKDLFYWITPQVGGKFCTAFFSTVVTLDFSPNPTFDIVAVTLVQNSVYNFREIYLLESRGELFCLYFYPPGACSNKTVEISVYKLDIPTTAWVKVDTLGDRAFIINTRKGYGASVNAKEACLQENCIYFSRHRDKGLYVYSMERGTTAAINPSTDLVDDVAAQILMPAS

SEQ ID NO: 130783 - protein, 152 aa, Oryza sativa
  unsure (1)..(152): unsure at all Xaa locations
  Clone ID: PAT_MRT4530_32912C.1.pep
SFIGGIDLCDGRYDDENHTLFRDLDTTYRHDFMQNNFKHAGLRRGGPXEPWHDVHCRLEGRAAWDVLANFEQRWRKQAPPEMAGCLLDLSQAXXPDPGSFGDDEPWNVQVFRSIDDASVVGFPXEPVAAAAMGLTNGKDVTIDRRRPVLEAI

SEQ ID NO: 130784 - protein, 263 aa, Oryza sativa
  Clone ID: PAT_MRT4530_32913C.1.pep
MASPSAAPNPRIHARASTRGAVKECQGKSKFFLEHQAKWEKEGNKGYDTNAHGWRFAYELTFPEGEIPSDWGYSKPLWDEHAKDEARRRHREAKQRKNEALQRQQRIEQVRTRWREKYAAGKAPRKEQLQKEAMDDMFDWQVLAEKRHTKNVQMALNIINRKHPGRNYELWEISAKSTIVEMELSYCHYNFTAYSPSSGFGFFFAETSDDVKCEDQVHSWCSIETGEIGCCVRCMSYEIYLVHPSTDKFLFGDESLHCCCADH

SEQ ID NO: 130785 - protein, 54 aa, Oryza sativa
  Clone ID: PAT_MRT4530_32914C.1.pep
AQRMGQKLFLFIEGKPFFYYIGLAFLHKGWALPSNTKLGPFFIFTGGPSGSRGF

SEQ ID NO: 130786 - protein, 82 aa, Oryza sativa
  Clone ID: PAT_MRT4530_32915C.1.pep
HEATRRKNPCAPVLSLVPLPLPSPSPNLPNFQSGDNPEINRWRRANQVNQLWMQLDWILRRARVARARAHVGCCTCRRAISM

SEQ ID NO: 130787 - protein, 66 aa, Oryza sativa
  unsure (1)..(66): unsure at all Xaa locations
  Clone ID: PAT_MRT4530_32916C.1.pep
XVXXTXXEXXSDNDXXDXHGXXXRDSMXRHXXXAXXXAXXXGREXVCVXEIARLDXDXVMIVVRXG

SEQ ID NO: 130788 - protein, 43 aa, Oryza sativa
  Clone ID: PAT_MRT4530_32917C.1.pep
LLPLCLVTLMILSPVHMLFAFEQLEGSLYETYLCLSYGTFPFP

SEQ ID NO: 130789 - protein, 197 aa, Oryza sativa
  Clone ID: PAT_MRT4530_32918C.1.pep
FCNSTTQKAFIEEQCRENELSNVEIIVADISKFEMERSFDRIISIEMFEHMKNYKALLKKLSRWMKEDSLLFVHYFCHKTFAYHFEDNNEDDWITRYFFTGGTMPSANLLLYFQDDVSIANHWLVSGTHYARTSEEWLKRMDKNITSIRPIFEKTYGTWAATKWIAYWRTFFISVAELFGYNNGDEWMVAHFLFRKK

SEQ ID NO: 130790 - protein, 27 aa, Oryza sativa
  Clone ID: PAT_MRT4530_32919C.1.pep
GLMPSSHHRLSCRNLLCLGSVTDLLKC

SEQ ID NO: 130791 - protein, 669 aa, Oryza sativa
  Clone ID: PAT_MRT4530_3291C.1.pep
MVYKSPVSPKQRISLNQIEVENPVTTEEKSSRKLEDIPIVCEYPEVFPEDLTTMPPKREIEFRIDLAPGNAPIYKRPYRMVANELAEVKKQVDEQLQKGYIRLSTSPWGAPVIFVDKKDKTKRMCVDYRALNEELEHLNLGLVEYGYVAALEARPTLVDQVRAAQVNDPEIADMKKNMRVGKARDFHEDEHGTIWLGERLCVPDDKELKDLILTEAHQTQYSIHPGNTKIYQASLQMAPFEALYGRKCRTPLYWDQTGERQLFATEVLTKAEEKVRTVRERLRIAQSRQKSYADNRRRELTFEAGDYMYLRVTPLRGVHRFQTKGKLAPRFVGPYKILEQRGEVAYQLELPSNMIGIHVMFHVSQLKKCLRVPEEQADSEHIDIQEDLTYVEKPVRILETSERRTRNKVTSRRKPPLEAVPSRAVDAIAFAVVRAVPSTPPPSESAAGIHSSPCAGGSGARHAVAITLRRSPSSIVVGEAPPPLSPSLPRRLAAALTPNRLAAAVAIRVAATPPLSAAGRSPPVAALRRRCVKPRRRAPWPPGRLEPHVRAGRVPPPPPSDPPRVDRGRRFGCPRGCRVCAASAPRVHHVAHRSFPASSVPSRMPVEWGSRCADEREDLVQSRLRALAKVTKDKERVAQHYNKKGVPKTFSDGDLTCCKDSMEKFMDER

SEQ ID NO: 130792 - protein, 177 aa, Oryza sativa
  unsure (1)..(177): unsure at all Xaa locations
  Clone ID: PAT_MRT4530_32920C.1.pep
HHQALCVKPPLWLXCYACKNSSYIPSSYCPLNATGDEINPSRVEVKLKGYGIPEQGFYCLNSKAECXLNLEEGDARLRRIVARITIELNHLFKKIKWDWKVKQRSEIDFLIDLPFADARSQVTEFKGFAKTPQVVRDLTELMGECKEIDENGGXSVRIKTGCLNPSAVNYSLRAPLN

SEQ ID NO: 130793 - protein, 58 aa, Oryza sativa
  Clone ID: PAT_MRT4530_32921C.1.pep
IITQMRTLQEFRGATECRCCNKSEFLVHTPSCLGYSNGHSWEAKCTQSIPRVSREMLE

SEQ ID NO: 130794 - protein, 174 aa, Oryza sativa
  Clone ID: PAT_MRT4530_32922C.1.pep
MSLLSDLALVVGVATAGPRIAATGYPIPLEPHHHRSRNCICLHESKLALISSSSLNHRLLPPDLASAALASGKNGEQERGSIWDRVVGFEARDKSNATMLILAQDLGAPLFVWLVALSHGGIKHYLGPIEIVKDTIHHQGWFYSITYTGVVEQWDCHDGAASGKFTIEQDRLRH

SEQ ID NO: 130795 - protein, 1481 aa, Oryza sativa
  unsure (1)..(1481): unsure at all Xaa locations
  Clone ID: PAT_MRT4530_32923C.1.pep
MAYLFSSPDSKSLSVATSTLFLSSLASLPSPHSEPPSASAASPLSPVPASVPPTALIPGSRFLVDAFRHAGDFTASYFLSHFHSDHYTGLGPSWRRGLVFCSPLTARLLVSVLSVPPQLVVVLDAGVRVTVDGWCVVAVDANHCPGAVQFLFRSSGPNAERYVHTGDFRFSQSMITEPNLLEFIGADAVFLDTTYCNPKFTFPPQKESLEYVVNSIKRVKEESRASGERVLCLIATYVVGKERILLEVARRCGCKIHVDSRKMEILTLLGIGGEDGVFTEDAAATDVHVTGWNILGETWPYFRPNFVKMKEIMVERGYNKAVGFVPTGWMYETKKEGFAVRTKDSLEIHLVPYSEHSSYNELRDYVKFLHPKRVIPTVGLDGGKLDSKEAFALQKHFAGLVDETANKQEFLMAFHRSSRNATLGPEDAVTGLSQQEGEVQELEEATLLPASLAFERSDSFQEKITVEMKKELSDFLPSWVSQDLILDLLIKSGGDVVQAATDFFEKERDFFEEANVYNSETPKSEIDLSSDHGSSADASSQQEVPLFSQKPMDHSSKLLNLNAMRMKSNLSKRERKRGSNSADKPKKKGRSTAFKPLTESSGRKQSTITNYFARTMLAASKSDTSDKVTVDANQNNVRNDDQFTEVVESEKQSVSQLLQIVDGGMSRESAISLLEKAKGDVNVAVDIFYSKTDNSNVLENDMNIVTQNTENEMTDKSSSTGLLRNSSEATPKMPNLCVQSYVAQADSVCISLPIEKYLPIEHACWTAGQPAPYLHLARTFDLVEREKGKIKTTAMLCNMFRSLLALSPDDVLPAVYLCTNKISPDHENIEALGSSRSKIHEMYKTFGDLGDVAQECRQNQMLLAPPRPLSIRDVFSTLRKLSGIAGSGSTGRRKILVLHLIRSCREMEMKFLVRTLVRNLRIGVMMKTILPALAHAVVIDGKYSNSPVLSLEGIKPQLQELSTEVAEAYNVIPNLDLLIPSLLREDTAFSASSLAMITGTPIPPMLARITNGLTQSLKLFNGRAFTCEYKYDGQRAQIHRSNDGSVQIFSRQMKESTSRFPDLVGMIKELCSIEVSSFILDAEVDICVFVFDIMFCNGQSLLNCSLRQRRKYIHDLFQEKPGHFELAQQLTYDTRNVAPLSVKQQIHGKCPVWSPEFPPRLISSLAFQIGLLDPSNLSIWAKHIIWVVLFRIKVEADEASVDNSTTLERMNTFFKMACQSSCEGIMLKILDVDAGYSASKRCDSWLKVKRDYVGLGDSLDLVPIGAWYGNGRKAGWYSPFLMACYNPEYEEFQSVCRVMSGFSDEFYKEPKPAAARANXRRYTQRPEASGLPLLECSAGQCVTYRSPVQSPVVTHQLDAGSMLQMARDMELMKTMKKFYPPDRIPAEKSTYYDTAELSELWICTVQVWDNRGADLTLSPVHHAAIGLVHPSRGISVRMPRYIRSRPDRSPEDCSTATDVASLFKAQTRKMEVSSDGQDTSH

SEQ ID NO: 130796 - protein, 910 aa, Oryza sativa
  Clone ID: PAT_MRT4530_32924C.1.pep
MAASLRASSSSLRSRLLSSSSAAWSPWSHVLSSSVHSEASNQTETLAFDEIQLSPEKPSTATAFVLHGLLGSGRNWRSFSRALASELRDRSPSDEWRMVLVDLRNHGRSAGIKGLRPPHDMSTAARDLADLVKARGWAWPDVVVGHSMGGKVALDFAESCSRGDYGESADLPKQLGQTPLEGWFPDNYDRMLCQEILWVLDSVPGQVETDNSDGEVERVLQTLASLPSSLPSRKWVVDHMINLGFSKSLSEWIGSNLKKDNEHVTWAFDLQAAIDMFNSYRERSYWTLLENPPKGLDIAIVQAELSDRWLSDDVQRLKALSRRESKPDAGKVSLHVLPNSGHWVHVDNPKGLLEIMVPNFLSTVDSMYSMSCGNHVVFERKCLAPVECCASVRQCKYATRARTFQNSTNEQRQAPTFCSSMDPATVGGGGGEPEAAAEWRARAVGGMEYGWYRAVPGGTGTTLLALRLARGAEAAVAAATVQAALRAILDAHPVLRARLRGSASGSPTLAFPSAAAPPPPPLALELLPVPESATDFPSLLEHELNRNPWTAAAATATASEHEPDAPPVLFATLYELPPPAGGGSALFVRIHTAACDRAASASLVRELLAQLAGDGAAAAAASEPEDAAVRASLEERIPQRDSWKPFWARGLDMVGYSINGLRTSTLPFEVTGTERSTQMLRLGFDRDETTRLLDACKQNGVKLCAAMAAATLLAARQSKLQLASNQQETYSIATLINCRKFLEPALDDHNVGFYHSAITNTHAIHGGEELWELAKRCQDSYTNAKNNKKHLTDIADLNFLMCRAIENPQLTTGSALRTAVVSVFEEPVVYDLSDLQSKAGVEEFVCCATVHGVGPSIGLFDSIRDGQLEFACMYPCPLHSRKQMQEILNKVKQILHEGSIGDDESFEDCT

SEQ ID NO: 130797 - protein, 375 aa, Oryza sativa
  unsure (1)..(375): unsure at all Xaa locations
  Clone ID: PAT_MRT4530_32925C.1.pep
TRPFDLVDRKKGKKTTAMLCNMFRSLLALSPDDVLPAVYLCTNKISPDHENIELNIGGSLVVSALEEALGSSRSKIHEMYKTFGDLGDVAQECRQNQMLLAPPRPLSIRDVFSTLRKLSGIAGSGSTGRRKILVLHLIRSCREMEMKFLVRTLVRNLRVMMKTILPALAHFVIDGKYSNSPVLSLEGIKPQLQELSEVAEAYNVIPILMLISAASMSTQLAETPRAVFKREREQXSSIAIQNIKVDICVFVFDIMFCNGQSLLNCSLRQRRKYIHDLFQEKPGHFELAQQLTVEADEASVDDSTTLERMNTFFKMACQSSCEGIMLKILDVDAGYSASKRCDSWLKVKRDYVGLGDSLDLVPIGAWYGNGRKAGW

SEQ ID NO: 130798 - protein, 393 aa, Oryza sativa
  unsure (1)..(393): unsure at all Xaa locations
  Clone ID: PAT_MRT4530_32926C.1.pep
CREKLTCSDIARHFSPAALLTSGGGGGGVWEAAQRALXWPFGAERDASAEGRILEAPNLRIFTFAELRAATRNFKADTVLGEGGFGRVHKGWVDERTMSPARSGSGMAVAVKKLDPESLQGVQEWQSEVNFLGRLSHPNLVRLLGYCWEDKELLLVYEYMAQGSLENHLFRRSPQQPLSWSLRLRIAIGAARGLAFLHSSEKHVIYRDFKASNILLDTQFHAKLSDFGLAKDGPAGGSSHVTTRVMGTYGYAAPEYVATGHLYVKSDVYGFGVVLLELLTGLRALDAGRPSGQHHLVDWAKPFLSDRRKLARLMDPRLEGQYSSRGAQRAAQLTLRCLAADHKNRPSMREVVAVLEEIESMSRGGSGGGAPGSASPRPAARGGGGGGAHGYGQ

SEQ ID NO: 130799 - protein, 321 aa, Oryza sativa
  Clone ID: PAT_MRT4530_32927C.1.pep
MKNPPPPPVVGAAAGAAAAAAGGKVPAEEVWEVRPGGMLVQKRGGGADEEPVNVKPVPTIRVKVKHAGITHEIYINSQASFGELKKMVAARTGLHPDDQKVMYKDKERDSKAFLDMAGVKDRSKLVVVEDPEARARRLIEERRNGHLEKAAKAVAAVTAEVDKLAPKVAALDASVRKGEKVAENDVVQVTELLMNELLKLDAVVADGDVKAQRRLQVKRVQKYVETLDAVMAKNAAIVRKSGEKLTSKQHHHPPARQQQQQAHQHHQQPAAGQTRWEMFDLLSSLPSTSSASSTTTVSSTASSGAPPPLPPPANRLDWMLF

SEQ ID NO: 130800 - protein, 434 aa, Oryza sativa
  Clone ID: PAT_MRT4530_32928C.1.pep
MSSSWFHSSSSSSSCSSTHHHHRHVVHHASTYFDGDDDEGDVKPAVTQHWRYDARAAASYGGGEDVKPAVVVKQPPLPRPRVGRGVHDRAEETTALSWPVVEPFRSTLRTQESLAGIRARYSVPEGFGLHPAGANQTACAPPPVTPRGGRGGGAAAAAVPICVYAQAFAAGMRLPLHPFVSDALAHFGIAPSQLAPNGWRVLAGFPVLCHFRGVGAPSLPVFRHFFTLAPLPKGKGWYSFRARESVPALFTGLPSSVKAWKEEFLFVSPPPAAPWRCPVRWGTPSKEATSDPALTEREAAVARRLTQGQGVVDLKTYLSESNLVAAKISSAPACLGGTEASRGSSVAAGKKRKVLGDGVSTGGGVLRSELQAKDKALAKAQGEISRLKAQLGSAKARELEEARQALEYERKLGTQVLKSDGAAAGASKRRRGGQ

SEQ ID NO: 130801 - protein, 158 aa, Oryza sativa
  Clone ID: PAT_MRT4530_32929C.1.pep
MGKRQQQRRLVRFAVAAAVVVAAALILTASAKKSGDVTELQIGVKYKPESCTLQAHKGDKIKVHYRGSLTDGSVFDSSYDRGDPFEFTLGNGQVIKGWDQGLLGMCVGEKRKLKIPAKMGYGERGSPPKIPGGATLIFDTELIAVNGKTTGGASNSEL

SEQ ID NO: 130802 - protein, 63 aa, Oryza sativa
  Clone ID: PAT_MRT4530_3292C.1.pep
VMHQAGYLPPSSTLYDDVLSYVWGMVLYYSAEVVLQFESNRCLGHVCSLMCLLTHIVVLILRI

SEQ ID NO: 130803 - protein, 176 aa, Oryza sativa
  Clone ID: PAT_MRT4530_32930C.1.pep
MTLREDKVRSVDRLSPLGRGGLVAAAEVRPSGGSGSSGRRQRGGGCGQWRIHCWGFHIDIFIHEHPLNLHHRFATRCGGGALPSRLSRCPRLAGGGGSGGGALPSARSGEGRPSGGSGGRRHVAAEGRGMQRRDEKRWRLPSVRSGSLAAGQEAVVAPSMFYDDFWDNFCDVLLCE

SEQ ID NO: 130804 - protein, 51 aa, Oryza sativa
  Clone ID: PAT_MRT4530_32931C.1.pep
SCILLRHVWGWTVTCPVTIVNASDSDTLIEARDLSGCIMCLIGAGMEAIAA

SEQ ID NO: 130805 - protein, 69 aa, Oryza sativa
  Clone ID: PAT_MRT4530_32932C.1.pep
YHSKKQLPAIPKDPNVLQPFDPGTTLRVPMGSPSIGIFQLPILRAFFYLAPEKAHPRQIKLNYSSPHFH

SEQ ID NO: 130806 - protein, 93 aa, Oryza sativa
  Clone ID: PAT_MRT4530_32933C.1.pep
MKLFYFYMNFWFSMNLLLFMNEVGTTNFNEMRSKLNNHRTKKYGVHNNIVRNKYIALIKNTQRQCRTRRSSRWPRRHHPTGGGRGKGGGIRGF

SEQ ID NO: 130807 - protein, 82 aa, Oryza sativa
  unsure (1)..(82): unsure at all Xaa locations
  Clone ID: PAT_MRT4530_32934C.1.pep
FFFTGVLIWIFLGMVWIPTRCPVDALXQLSQLCPRSPRTLVVCDSRCVLHFNTSLWPQLLAVMPGTQFGGCGSPPRQALAFA

SEQ ID NO: 130808 - protein, 47 aa, Oryza sativa
  Clone ID: PAT_MRT4530_32935C.1.pep
LITYVVMYSTCLYIYPTNYIYYNIHLWLIMPDQVIHKDSACCSQYII

SEQ ID NO: 130809 - protein, 68 aa, Oryza sativa
  Clone ID: PAT_MRT4530_32936C.1.pep
LVGCVVICNSSIIQVYFLQRFFFKSQVVGATKYDIGKCQDHVWVTKNELLEYFPEHKAFFNKMIIHIR

SEQ ID NO: 130810 - protein, 124 aa, Oryza sativa
  Clone ID: PAT_MRT4530_32937C.1.pep
PIKVGSGIHFSKGGVFRGPFGTPLAHPVTVVGWGTNGSSGPKYWPIKNSWGHSWGERGYIRIFPIVGGPALCGVPPDLACPTLPLSTKSTTGIKKRPNLTISLSPRLPSYPVSFSPPKVSPIHV

SEQ ID NO: 130811 - protein, 761 aa, Oryza sativa
  Clone ID: PAT_MRT4530_32938C.1.pep
MVVAVAVVWCNNVARAQTPVFACDASNATVSGYGFCDRTKSSAARAADLLGRLTLAEKVGFLVNKQAALPRLGIPAYEWWSEALHGVSYVGPGTRFSTLVPGATSFPQPILTAASFNASLFRAIGEVVSTEARAMHNARAMHNVGLAGLTFWSPNINIFRDPRWGRGQETPGEDPLLASKYAVGYVTGLQDAGGGSDALKVAACCKHYTAYDVDNWKGVERYTFDAVVSQQDLDDTFQPPFKSCVIDGNVASVMCSYNKVNGKPTCADKDLLSGVIRGDWKLNGYIVSDCDSVDVLYNNQHYTKNPEDAAAITIKSGLDLNCGNFLAQHTVAAVQAGKLSESDVDRAITNNFIVLMRLGFFDGDPRKLPFGSLGPKDVCTSSNQELAREAARQGIVLLKNTGALPLSAKSIKSMAVIGPNANASFTMIGNYEGTPCKYTTPLQGLGANVATVYQPGCTNVGCSGNSLQLSAATQAAASADVTVLVVGADQSVERESLDRTSLLLPGQQPQLVSAVANASRGPVILVVMSGGPFDISFAKSSDKISAILWVGYPGEAGGAALADILFGYHNPGGRLPVTWYPASFADKVSMTDMRMRPDSSTGYPGRTYRFYTGDTVYAFGDGLSYTKFAHSLVSAPEQVAVQLAEGHACHTEHCFSVEAAGEHCGSLSFDVHLRVRNAGGMAGGHTVFLFSSPPSVHSAPAKHLLGFEKVSLEPGQAGVVAFKVDVCKDLSVVDELGNRKVALGSHTLHVGDLKHTLNLRV

SEQ ID NO: 130812 - protein, 320 aa, Oryza sativa
  Clone ID: PAT_MRT4530_32939C.1.pep
MAMAARGVLAMVVAVAVVWCNNVARAQTPVFACDASNATVSGYGFCDRTKSSAARAADLLGRLTLAEKVGFLVNKQAALPRLGIPAYEWWSEALHGVSYVGPGTRFSTLVPGATSFPQPILTAASFNASLFRAIGEERMCVNIVSMVHALPQQQLRCNAPMHGCACAVQDLRQDMLVSLVTGVLRHCLMGINSEMEAQKAWSMMYNLIVLVVSTEARAMHNVGLAGLTFWSPNINIFRDPRWGRGQETPGEDPLLASKYAVGYVTGLQDAGGGSDALKVAACCKHYTAYDVDNWKGVERYTFDAVQQVIHMRVNELRLLQ

SEQ ID NO: 130813 - protein, 206 aa, Oryza sativa
  unsure (1)..(206): unsure at all Xaa locations
  Clone ID: PAT_MRT4530_3293C.1.pep
MPRVLKEVIEHRFAVRQKVRRQALERQAFIREEVAWLLEADFIREVIHPEWLANLVVAPKANGKLRMCIDYTDLNKACPKDPFHLPHIDQIVDSTAGSTRVKLNPDKCVXGVPAGKLLGFLVSFRGIEANPEKIHAIERMGPPXKLRDVQCVTGCMAALSRFISRLGERALPLFKLLKRSRPFVWTEEAEQALNQLKAYLTSPPSW

SEQ ID NO: 130814 - protein, 49 aa, Oryza sativa
  Clone ID: PAT_MRT4530_32940C.1.pep
SRVFFFFFFFFLLFFFFFFFFFFLIYQPPDKWQRVPIKTPNMVTFNISY

SEQ ID NO: 130815 - protein, 93 aa, Oryza sativa
  Clone ID: PAT_MRT4530_32941C.1.pep
CHCCKLNCKEINEDVVAPLHRLRLPRFRCRSHSFVHRHRSSIQERVAAAPCTIRFCIVQTLVGRQCDLLRDVVFFFVTATMWSIFQRWCLCCD

SEQ ID NO: 130816 - protein, 78 aa, Oryza sativa
  unsure (1)..(78): unsure at all Xaa locations
  Clone ID: PAT_MRT4530_32942C.1.pep
VRASFGDXAVSKERSASAYDHREEGGRLLPRSLLMKSCHASPPANVHVSTQNELTVCTLQCNAAIHQVVSDWFYYHDF

SEQ ID NO: 130817 - protein, 52 aa, Oryza sativa
  Clone ID: PAT_MRT4530_32943C.1.pep
KSTIIILLASHVSQRTNHTPYLHHESMKKKNPYIKNRLQNLGIISSSNQAPT

SEQ ID NO: 130818 - protein, 135 aa, Oryza sativa
  Clone ID: PAT_MRT4530_32944C.1.pep
TLTARRPSPFSIPRRRRHAAARAHDWHLVATGERSCRTPPPSPSPAPPTRCLPPQSLVVPRCRRPAASLPCATGPPHPSPVRLRRLRPPSPATLDDRRLDALCRRSAASLPCAASGLPPRCRSSSTPPAPPTLLA

SEQ ID NO: 130819 - protein, 70 aa, Oryza sativa
  Clone ID: PAT_MRT4530_32945C.1.pep
LLDVICQRTVLHLKKSVITLDFSCSMIEPHVSQSLGTHTMMFPNLLQKVCLFLTNTTNLTYLYYHLNLLT

SEQ ID NO: 130820 - protein, 57 aa, Oryza sativa
  Clone ID: PAT_MRT4530_32946C.1.pep
TSSTSLRENIPKYHERHSPLLQSCPYSKHTHCTAQLYFDMDCLKFRQPCDRTVIYIY

SEQ ID NO: 130821 - protein, 153 aa, Oryza sativa
  Clone ID: PAT_MRT4530_32947C.1.pep
MAAVIDFLQLEPPREPRPQPAVQAALPVAKSALFVAINGLVAPSYLWWCLACDDGGGGGGGLRRRCFRGEAGGDVEQMWYQMASFATAVLGVALLAFHVASSSAPAAMAAWLVWLTKVFTCGTLQFGLNIVHFCIKIIYFKLIRGLDSNLSRG

SEQ ID NO: 130822 - protein, 68 aa, Oryza sativa
  Clone ID: PAT_MRT4530_32948C.1.pep
HADIILRFFSSPLQIRSMMQLIKPRKLSCDPLGLTMHDHRITSSHGQTLCLILELKYLNNSPIVFCRF

SEQ ID NO: 130823 - protein, 125 aa, Oryza sativa
  Clone ID: PAT_MRT4530_32949C.1.pep
KGLARGIKFQVNTNCKENTKNYYSCKAGETEQKKSREGIVDGERETVSLRRSERHSPATECKGGLFDVARALNLKEIEADNEAARVLLTLRCYMKLAERPDFPGMAMAVQGLLKDNCCWKCPANC

SEQ ID NO: 130824 - protein, 818 aa, Oryza sativa
  Clone ID: PAT_MRT4530_3294C.1.pep
MAPAQPAPSAQAKKETGAKPGSSYNCGELGHFADKCPKPRRAGPRFAQARVNHASAEEAQATPEVVLDLDIILGMDWLTKFKGVIDCANRTVTFTKEKGETVVYKSPVSPNQGIPLNQIEVENPVKGYIRPSTSPWGAPAIFVEKKDNTKRMCVDYRALNEVTIKNKYPLPWIDDLFDQLKGAKEHQLYAKFSKCDFWVSEVKFLGHVITAQGVAVDPSNVEKSYYNALCTGGMCKELQQELEHLNLGIVEHGYVAALEARPTLVDQVRAALVNDPEIAKLKNNMRVGKARDLLEDEHGTIWLGERFAVAAFVFSVHHRQPLQPPVAAASAIDDLRRRLSRLRKVKLHPVHPFPQAKIHRSFIVAVNPNAKPKAVHPFFSAGVRRKATVTVVPISPPLEARRRLPFIVARRRHGSLRGTRLRSGEKPVVVAGESMPLVIEGVIMIQERKSYCNASCTGGMCKEMQQELEHLNLGIIEHEYVAAPEARSTLVDQVRAAQVNDPEIAELKKNMRVGKARDFLEDEYGTIWLGERLCVPDDKELRELILTEAHQTQYSIHPGNTKITPETRRITTTSLDPGMEMGRDWNGFHNSTAYHPQTDGQTERVNQILEDMLRAYALDFGGAWDKSLPYAEFSYNNSYQTNLQMAPFEVLYGRKCRTPLFWDQIGERQLFGTEVLTEAEEKVRTIRERLRIAQSRQKSYADNHRRELTFEAGDYVYLRVTPLRGVHCFQTKGKLAPCFVGPYKILERRGEVAYKLELPSNMAGIHDVFHVSQLNKCLRVPEEQADSEHIDLQEDLTYVEKPIRILETSERRTRNKVT

SEQ ID NO: 130825 - protein, 135 aa, Oryza sativa
  unsure (1)..(135): unsure at all Xaa locations
  Clone ID: PAT_MRT4530_32950C.1.pep
KATKFNRPPRRSQAFFLTIGPFNLYQLSPNPPHGGKAPPGQGRIREKPPKXGGRLKPTKPGPGPGXNKRNHPPPPPPEFAPKPPNPYKGPGRKIGPPPPGPGGNXGGGKTGGLKKKNQPGPQKGVPTMLGGGLTN

SEQ ID NO: 130826 - protein, 112 aa, Oryza sativa
  Clone ID: PAT_MRT4530_32951C.1.pep
KTKIRGGLSIQAYLDFFALWDLQVWGLVRGRIGLLHAVPDDDLPTWWCAARKVVTKKERKTFDAGVILVTWLIWKERNARVFDGRASSPACLFATIKDEWEMWLAAGLIPPP

SEQ ID NO: 130827 - protein, 529 aa, Oryza sativa
  unsure (1)..(529): unsure at all Xaa locations
  Clone ID: PAT_MRT4530_32952C.1.pep
WRRGLRPCRRSFKLSSSNSTNPTTFQSANQGQPPRPSQAPMNWRKFRTHRAXQAVMAVKEVQALRKEFDAQQVGSHQQPIRKKVRKDLYYAYHRRSSHTTEQCRNIRQRDNAQDPRPQQGAAVEAPREAAQEQLPRPEQRQDVQRRVIQVITRAAPPVQLSKRQKKMQLRMVHNITSAGEGAPRYLNQQISFGPEDAKGVLFPHQDPLVISAEVAVFEVRRILVDGGSSADVIFAETYAKMGWPTLALTQAPALLRGFGGEAVQVLGQVHMVVAFGTNENSPEEQILFDVVDIPYNYNAIFGRATLNKFEAISHHNYLKLKMPGPTGVIVVKGLQPSAASKDDLAAINRAMHSVEAEQHDHAKRMSKPTPHGKDVTGKFSWTPECQAAFDELKQYLQSPPALVSPTLGSELLLYLEASPVAVSAALVQETELGQKPVYFVSEALQGAKIRYIEMEKLANALVMASRKLKHYFQAHKVTVPSQYSLSEVLRAMEITGRLSKWAAELSPFDLHFVTRTTIKSQVLADFVAE

SEQ ID NO: 130828 - protein, 62 aa, Oryza sativa
  Clone ID: PAT_MRT4530_32953C.1.pep
HASGLEQKLGNTPFSQNKKEIKGKKTLICFSSLFFSLNLRKPDVLHTRKWLLWIASSCDLLY

SEQ ID NO: 130829 - protein, 85 aa, Oryza sativa
  unsure (1)..(85): unsure at all Xaa locations
  Clone ID: PAT_MRT4530_32954C.1.pep
LYRGWSCPLQALLHVQLGVEIKXNPKHAFPSKETSRPDETQSDSDLPVRPATCRRSDQPXTGGLTAQRTAVRLALLGGNRQTSKF

SEQ ID NO: 130830 - protein, 140 aa, Oryza sativa
  Clone ID: PAT_MRT4530_32955C.1.pep
AGYPISRPPLPVLLFSLQFHRCRARPPPSRRRCPRPPPGQPLPRRRRARRPPPSQPLPHRCRSQQPPPCRRRARPPPPRRRRARPPPGQPLPRHRRARPPLPRRRRAPPPPPRHRRARPPPPCRRRRPPPPPRHEKERGI

SEQ ID NO: 130831 - protein, 91 aa, Oryza sativa
  Clone ID: PAT_MRT4530_32956C.1.pep
MALIPSLAAARYALLALPPLMVAAYVYNGGGRGNGDRPRARSINKFTDGDDSEKMGESVHTTNEPPAWPCIDLAIDESYRQKTTNNYDIDP

SEQ ID NO: 130832 - protein, 157 aa, Oryza sativa
  unsure (1)..(157): unsure at all Xaa locations
  Clone ID: PAT_MRT4530_32957C.1.pep
SAHASDFWQVAIIGRPNVGKSSLLNAWSKLXSERAIVTEIAGTTRDVVEANVSIHGIPITLLDTAGIRETDDIVEKIGVERSEAAALGADLIIMTISAVDGWTEDDTKLIEHVLISKKSSGASVPMVLVINKVDCAPFISREQFEQFPWIFKKHVQT

SEQ ID NO: 130833 - protein, 57 aa, Oryza sativa
  unsure (1)..(57): unsure at all Xaa locations
  Clone ID: PAT_MRT4530_32958C.1.pep
NPTALFHQQEFMWRYEICFAVSIGIGLKRENNVVAVIREIRYSSCHSGDLILSTXXX

SEQ ID NO: 130834 - protein, 570 aa, Oryza sativa
  Clone ID: PAT_MRT4530_32959C.1.pep
MARALSRLLLPPLFLCRPLPLPPLLHRRRRVVLNPSPRTLTTRAEALFSRHSHLLPADDRSPSPSTRGSVQPPPDYGGGGGGAGPGTIAAIVTSLGGGPAAVGIVRLSGPDAAAVAGRVFRPARRAAPPWRPRSHFVEYGVALDRDGGVIDEVLVVPMLAPRSYTREDVVELQCHGNDLCLRRVLRACLEAGARLADPGEFTVRAFLNGRLDLAQAENVSRLISAKSAAAADSALAGIQGGFSALVKSLRSRCIELLTEIEARLDFEDELPPLDLTMLVSKINGMRQEVQDALDTANYDKLLQSGLQVAIIGRPNVGKSSLLNAWSKSERAIVTEIAGTTRDVVEANVSIHGIPITLLDTAGIRETDDIVEKIGEILSWKYSMLHSAYLYNGVERSEAAALGADLIIMTISAVDGWTEDDTKLIEHVLISKKSSGAPVPMVLVINKVDCAPFISGEQFEQFHGVFKKHVQTCAVTGKGISELEKAIIEVRGLEPVPSEGRRWTVNQRQFEQLLRTQQAFTRLESSINEQLPMDFWTIDLREAALALATISGEDISEEVLSSIFSKFCIGK

SEQ ID NO: 130835 - protein, 949 aa, Oryza sativa
  unsure (1)..(949): unsure at all Xaa locations
  Clone ID: PAT_MRT4530_3295C.1.pep
MVYTRTGNRTAGEGSNGEERADGVHPNSDSGNGPPPLPENPTLAQVMAHQTQMMAAMMQQMQQQHQQMHQRMMQHAEQQHQQFGPPPPQSKLLEFLRVRPPTFSSTTNPMEANDWLHAIEKKLNLLQCNDQEKVAFATHQLQGPASAWWDNHMATRPPGAEVTWAEFCRSFRKAQVPDGVVAQKKREFRVLHQGNRTVTEYLHEFNRLARYAPEDVRTDAEKQEKFMAGLDDELTNQLISGDYADFERLVDKAIRQEDQRNKMDRKRKAAQFRSNQGSQHRPRFTPGQQGGPTTMIVRQHRPFHSSNFHQGASGSPNHQGGQPNRGAAPRPPMAPAQPAPSAQAKKETGTKPGSCFNCGELGHFADKCPKPRRAGPRFIQARVNHASAEEAQAAPEIETEIPVDTVEKSLRKLEDIPIVCEYPEVFPEDLTTMPPKREIEFRIDLAPGTAAIYKRPYRMAANELAEVKKQVDEQLQKGYIRPSTSPWGAPVIFVEKKDKTKRMCVDYRALNEVTIKNKYPLPRIDDLFDQLKGAKVFSKIDLRSGYHQLRIREEDIPKTAFTTRYGLYECTVMSFGLTNAPAFFMNLMNKVFMEFLDKFVVVFIDDILIYSKSEEEHEQHLRLVLEKLKEHQLYAKFSKCDFWLTEVKFLGHVITAQGVAVDPSNVESVTKWTPPKTVSQIRSFLGLAGYYRRFIENFSRIARPMTQLLKKDEKFKWTAECDKSFEELKKKLVSAPVLILPDQMKDFQVYCDASRHGLGCVLMQEGRVVAYASRQLRPHEGNYPTHDLELAAVVHALKIWRHYLIGNRCEEFEHLNVGIVEHGFVAALEARPTLVDQVRAAQVNDPEIAELKKNMRVGKARDFLEDEHGTIWMGERLCVPDDKELKDLILTEAHQTQYSIHPGSTKXHQRPAGLLQPLQIPEWKWEEIGMDFITGLPRTSSGHDSIWRY

SEQ ID NO: 130836 - protein, 875 aa, Oryza sativa
  Clone ID: PAT_MRT4530_32960C.1.pep
MVIAVEGGFVHEEEEVDHPIRYLPLGRVYSSSAPCPLPKKPRSAEDGKPPVIVYYRRRRKKPRVEGPPPSPATAPPMLHPREDDEDEEVTRRKGSLKYELLSLGQAPPALGGDGEEPARRRCLRRSGGAERRGYFSEPKRRQRQGVHKEAASSAGRRWLELEIEAADPLAFVGLGCKAKVKYDDGESEDLNLADERIKFSISSEEMKCRNLKFGISNLNKRGYDELLALAVSLHDYQGLDPGDLVWAKLTGHAMWPAVVVDESNVPANRALKPGRLDQSILVQFFGTHDFARFLCTQLLPENMLQLQKSMEKGSSDANSNKDVHSCDNLSEDKTAESGGDYDEMTPIELGNLRVSKLGRIVTDSDYFHNKKHIWPEGYTAFRKFRSVKDPHVVILYKMEVLRNSDIKARPLFRVTSEDGTQIDGSTPNTCWKEIYCRLKEKQRNVASGLDRDVCQGSGSYMFGFSNPQIRQLIQELPNARSCLKYFENAGDTFRGYRAVHVNWKDLDYCSVCDMDEEYEDNLFLQCDKCRMMVHARCYGELEPLNGVLWLCNLCRPEAPRVSPRCCLCPVTGHAFNYINPNFGTETCLKDVKRMEPIDGLSRINKDRWKLLCSICGVAYGACIQCSHPTCRVAYHPLCARAADLCVELEDDDKIHLMLLDEDEDPCIRLLSYCKKHRQPSTERPSLESNLAKPAVVVQTDAVPPSGCARTEPYNIHGRRGQKQPQVMATASVKRLYVENMPYIVSGFCQNRVGHDAISEPIQSVGFLDVAHQEAVGNVSSMIEKYKSMKATFRRRLAFGKSRIHGFGVFAKVSHKAGDMMIEYIGELVRPPISDIRERRIYNSLVPEGDMWKTLVKLIGLFMEFNPITQIRGIFT

SEQ ID NO: 130837 - protein, 81 aa, Oryza sativa
  Clone ID: PAT_MRT4530_32962C.1.pep
SPTTAKVDDTETRAGHPPIMSRCNLHWRCRLQQWIWRRSASTPLPRPLKILEKKKYRALETLTKCFLSILNQGLLGRGPPI

SEQ ID NO: 130838 - protein, 67 aa, Oryza sativa
  Clone ID: PAT_MRT4530_32963C.1.pep
PRVRGRVGANGGGSVGKGDAGRHGWSYYSKGGGGGSGGRRRSYLPYKQELVGLFANVSGLRRSYHPF

SEQ ID NO: 130839 - protein, 214 aa, Oryza sativa
  Clone ID: PAT_MRT4530_32964C.1.pep
MPRHVMMHPDRSRFIRTGQARFPFPGANANPEPSPPVLSNAAAPFAASAAACRRLRPCTAAPIAATATSFAVAGAIPTAACLPRAAAAPLSPRAAAYRRLQPPLAVASAVAAPLHCRRWPREIEARLVHPARPAVRRLPPPSAVVFTHAGRIPGEDSLPLFYSPFPVCIAASCPRRRFGRVPPSPHRPPPSPAPPVAAVGGRSPPPHRLTGWPV

SEQ ID NO: 130840 - protein, 92 aa, Oryza sativa
  Clone ID: PAT_MRT4530_32965C.1.pep
KHSLWVVVAQDKAYPHTRLGPEPHHAHEHQLASSRALRMTSNFTAAKMSLLPTVLANSPGVLLTAGEYTSQAADHGAAAHWSSTQPRRPTSS

SEQ ID NO: 130841 - protein, 52 aa, Oryza sativa
  Clone ID: PAT_MRT4530_32966C.1.pep
TKQQHLASTSYKSELTRVRVELPLLLKTSVLRADVAYAEHDLFFRADSPRSV

SEQ ID NO: 130842 - protein, 115 aa, Oryza sativa
  Clone ID: PAT_MRT4530_32967C.1.pep
MNERAGKGGEAGPQRYRSGSGIDSYPAQGVGQRNGGPYKTPPPGPHRARRATPTSAPSNRAAPHQSTGASARRGSGEGDGARRLGARGARQQAVMATARGGSGHEARGQGRGVYS

SEQ ID NO: 130843 - protein, 47 aa, Oryza sativa
  Clone ID: PAT_MRT4530_32968C.1.pep
CITFNAFCYLNSKFQVIELLTKQPELFDMVICFSYRQLFMVQPQGLK

SEQ ID NO: 130844 - protein, 55 aa, Oryza sativa
  Clone ID: PAT_MRT4530_32969C.1.pep
ALAPSSTTKANLIILLIKRTGTACQLNTSTYCWFVFLNMKLLSSYAIYIFPCICS

SEQ ID NO: 130845 - protein, 115 aa, Oryza sativa
  Clone ID: PAT_MRT4530_3296C.1.pep
MVLSCLGSMSKWEPVTFEESLCFVKKVKARDYVLYLSLLDVLSRNEQIPLEAYSELSLLFRDHDDLLEELAKFRPLPTPSTVYSHSSVWLLFFLMPLLVLSILLKCFLLQQPVAS

SEQ ID NO: 130846 - protein, 149 aa, Oryza sativa
  unsure (1)..(149): unsure at all Xaa locations
  Clone ID: PAT_MRT4530_32970C.1.pep
MEGEEEENVGPFRRTSARTRRMATRMASALASSDNRAQAALARLEALESDNAGPEVVDLNDDDEYGSADEEDHVLMQRKQSKNMKRKTRQGKALEKKAARSFMDVLQEXAAVGPPSTSSRRHYCSVCGSTANYTCVRCGTRFCSCRCQL

SEQ ID NO: 130847 - protein, 103 aa, Oryza sativa
  Clone ID: PAT_MRT4530_32971C.1.pep
SYHSLLIWLNLLFLIFRDVQYINNQALLTKIMCFCSCLVLLVVLLVSFADVLVGYLAATLTEISHFFVKRTNPAVLNIDHIYTYGFHTQLINFKVLKGKNSSN

SEQ ID NO: 130848 - protein, 60 aa, Oryza sativa
  Clone ID: PAT_MRT4530_32972C.1.pep
PHVPTYSRAAVGPPSTSSRRHYCSVCGSTANYTCVRCGTRFCSCRCQVIHNDTRCLKFVA

SEQ ID NO: 130849 - protein, 100 aa, Oryza sativa
  Clone ID: PAT_MRT4530_32973C.1.pep
FYCVRSHSFEMDPSQVENVKQRGLPHALILPMLQEYDFRNDTVNPDMEMELKSLARPRPYQEKSLSKMFGNGRTRSGMIELTCGAGKFLVGVYAACTIKK

SEQ ID NO: 130850 - protein, 44 aa, Oryza sativa
  Clone ID: PAT_MRT4530_32974C.1.pep
PVQCLTISLSYQVSMNAYTCSTKRRRWKILLLLQMQTAIASWAP

SEQ ID NO: 130851 - protein, 70 aa, Oryza sativa
  Clone ID: PAT_MRT4530_32975C.1.pep
MASLCRSHAPTPLLGPASLPGSLWAEALHTATNLINRHPTKILHLPPPDHPRLHRRRCTQNFINRVKCTI

SEQ ID NO: 130852 - protein, 82 aa, Oryza sativa
  unsure (1)..(82): unsure at all Xaa locations
  Clone ID: PAT_MRT4530_32976C.1.pep
TMAATLTRAFKGMYLSSPSHYYYYXYFLRTDRGSLSLRSRACMGVPMTMPGPWMTIQMAHKKGAGSTNNGRDSPGQRLRVKI

SEQ ID NO: 130853 - protein, 169 aa, Oryza sativa
  unsure (1)..(169): unsure at all Xaa locations
  Clone ID: PAT_MRT4530_32977C.1.pep
MNQLWRATGLRGIAVVGAGIFARTQYIPRLREIAHLVLLKTIWSRTKESAEAAAELARDFAPEIQPRWGDAGLEEIMGDASISAVAVVLAGQVQVDLSLKMLKAGKHVIQEKPASGSTMEAETALSVYNSFPNQFPYKPIWALAENYRFEPAFVESRKLMSDXGDMMNI

SEQ ID NO: 130854 - protein, 564 aa, Oryza sativa
  Clone ID: PAT_MRT4530_32978C.1.pep
MDSMPPPPPPPPPPPPPPPSPPPPPPFPVISHTSTSTAASNEPFKGPSWSSSVMVAHSSLLVAPTPPVLSISVGGAILASASIPSTSTQVTREGGVLASNTSRAKAKRNAPASKQLKHSTTKRSKPTMVTMVRSPGIRIMMSPMLRSPIPRALSPPPTHERSPSSSPEEATTLQHRSSRSKSKRKLRSTVWKDFDPIYEGEKRIIRFALVETPHDGKNMLSAMVKALQDWNIEHKLFSIALDNASMNDSFMSSLKENLVERKLLPSNGDLFHSRCAVHILNLIVQDGLSAISGATHKIRESVSMLIVFHKATLTVSGSKYPTSNLWFHEIWEVKKLLDTKILNSHPNIVSMAYEMIQKFEKYWKLSFLQICIPVILDARFKLTFLEYRLKQGFEITEASEYLQKINSTIRELFAEYSSKMGSLQESNIVDLTADGNNPCSDGSSRWSNWGQHVDAQKRKRANELDRCLEEEVVSISADFDILQYWKMFSPKYPILAQMACDILAIPASTVPSESAFSTGGRVISDYRSSLSSETVQALICLQSWIRAEDTEINDSENDEDDMSI

SEQ ID NO: 130855 - protein, 377 aa, Oryza sativa
  Clone ID: PAT_MRT4530_32979C.1.pep
MAGDGLPRIAVVGAGIFARTQYIPRLREIAHLVLLKTIWSRTKVSHTQIIHRTPLSCRSLDLTIPLQESAEAAAELARDFAPEIQPRWGDAGLEEIMGDASISAVAVVLAGQVQVDLSLKMLKAGKHVIQATMEAETALSVYNSFPNQFPYKPIWALAENYRFEPAFVESRKLMSDIGDMMNIQVIVEGSMNSSNPYFNSSWRRNFVGGFILDMGVHFIAGLRMMVGSEIATVSSISRHVDKALPPPDNICSLFQLENGCAGVFVFAVNSRTPKILWRVDGTRGTVQIERGIASGKHGYQVLFTNENGQCQTTFYPFCGVNEELKAFVHDIVQANKDGDHKAEPRSSYVEGARDVAVLEAMLESSAKQGTMVQVKKF

SEQ ID NO: 130856 - protein, 104 aa, Oryza sativa
  Clone ID: PAT_MRT4530_3297C.1.pep
PVSSTYGLRNTAGYHMAQTCCFENDPRATANTTPRHPENQFTQHGYEQRENDFILSAPNFVRWHRPPFSAGGTLPPPPPTQQPSAFGTLPPPRPSQQFSACGTM

SEQ ID NO: 130857 - protein, 279 aa, Oryza sativa
  unsure (1)..(279): unsure at all Xaa locations
  Clone ID: PAT_MRT4530_32980C.1.pep
TPAPKARVNHVAASEAQNAPDVVLGTFPVNSIPASVLFDSDATHSFLSKSFASNHGMEVISLGRPLLVNTPGNQVSSMQYCPSVTIEIEEITFPSSLILLESKDLDVILGMDWLSRHRGVIDCANRKVTLTSSNGETVSFVASSPKSHGLTLNQVALQEIPIVQDYPDVFPEDLPGMPPERDXFRIDLVPGTXNPIHKRPYRMAANELVEVKRQVDDLLQKGYIRPSTSPWGAPVIFVEKKDHTQRMCVDYRALNEVTIKNKYPLPRIDDLLSRPEIPK

SEQ ID NO: 130858 - protein, 530 aa, Oryza sativa
  Clone ID: PAT_MRT4530_32981C.1.pep
MVNTRTGSGSGSGHNEGDPTLAQQAQNQQANNNNQPPPPQNKLADFLRVRPPTFSSTTNPVEAGDWLHAVEKKLDLIQCTEQEKVSFASHQLHGPVAEWWDHFRLNRAAGEPITWREFTAAFKKTHIPSGVVALKKREFRAFNRGSRSVTEYLHDFNRLARYAPEDVRTDEERQEKFLEGLNDELSYALMAMEYRDFQQLVDKASRQEDKYNRMEQKKRRAAQFKAQQGSSQRPHIGMGPQAAPYPQGGSSSVVRPQRQFYNNNTGNRSNNNRNVVTRPVAAPTQNQSVRKEQGSKPGVCINCGDPGHYADKCPNPRRVKNAPVQNDSNAPAPKARVNHVVAAEAQNAPDVVLGTFPVNSIPATVLFDSGATVFSKIDLRSGYHQLQIREEDIPKTAFTTQYGLFECTVMSFGLTNAPSFFMNLMNKVFMEYLDKFVMVFIDDIHIYSKTKEKHEEHLRLALEKLREHQLYAKFSNCEFWLPEVKFLGHVISAGGVAVDPSNVESVLNWKQPVTSQNDPKIHPRNCAENN

SEQ ID NO: 130859 - protein, 1025 aa, Oryza sativa
  Clone ID: PAT_MRT4530_32982C.1.pep
MAGDDFPTFRRRAFSLRKVGCEHMVLMVVLVTIKDRFASYCCETLTVPTTSQRGQRLYLLYNMIHYGVSDCKAVRSPWGSLGSLFASGLEGEIMIQERCTVWYISGQSKTIRIAVPAVMDAAHPPKNLIKVLGFVRELRLMMVNTRTGSGSGSGSGHNEGGPTLAQNKLADFLRVRPPTFSSTTNPVEAGDWLHAVEKKLDLIQCTEQEKVSFASHQLHGPAAEWWDHFRQNRAAGEPITWWEFTAAFKKTHIPSEDVHTDEERQEKFLEGLNDELSYALMATDYRDFQQLVDKAIRQEDKYNRMEQKKRRAAQFKAQQGSSQRPHIVLGPQAAPYPQGGSSSVARPQRQFYNNNTGNRSNDNHNVFTRPVAAPTQNQPIRKEQGSKPGCPKPRRVKNAPVQNNSNAPAPKAHVNHVAAAEAQNAPKLVLESKDLDVILGMDWLTRHRGVIDCANRKVTLTSSNGQTVSFFVSSPKPHGLTLNQVALQEIPIVRDYPDVFPEDLPGMPPKRDIEFRIDLVPGTNPIHKRPYRMAANKLAEVKSQVDDLLQKGYTRPSTSPWGAPVIFVENKDHTQRMCVDYHALNEVTIKNKYPLPRIDDLFDQLEGATVFSKIDLRSGYHQLRIREEDIPKTAFTTRYGLFECTVMSFGLTNSPAFFMNLMNKVFMEYLDKFVVVFIDDILIYSKTKEEHEEHLRLALEKLREHQLYAKFSKCEFWLPEVKFLGHVISAGGVAVDPSNVESVLNWKQPKTILEIRSFLGLAGYYRRFIENFSKIARPMTRLLQKDVKYKWTEECEQSFQELKKRLVTAPVFVLPDPRKGFQVYCDASRLGLGCVLMQDGKVVAYASRQLRPHENNYPTHVLELAAVVHVLKIWRHYLFGNRTEMYTDHKSLKYIFTQLDLNMHQRRWLELSKDYDMKIHYHPGKAKVVADALSRKSYCNMLEGRHLPWKLCQEFEKLNLGIVNKGFVAALEAQPTLFDQVREAQVNDPDIQEIKKNMRRGKAIGYIEDEQGTFPTFRRRAFSLS

SEQ ID NO: 130860 - protein, 739 aa, Oryza sativa
  Clone ID: PAT_MRT4530_32983C.1.pep
MGGRRPAAPHRATGGWQEGGGRQRPTARREGGGRRRARREGGGWRRPTSRRDDSGQRRARPGGVTLQIKRKPNGRVVLSIPSYTTTAQPHHHTPAPCRLVGRHQRRRRGTLDRPPSSLLPPRAIDSRRLHDHPSNPDNIPLLPLPTLPSPPHPGTLIRRPSAEVWVVTSAGEEEEVIGVGEDAHGARIMKHIQRGCLKEAASGDAAVWRCADGRRRSGNGNDERRQCSDRRYRVEVEVECLSLPLREAEAHRAEEARPRRRHRREEALPYLCCADVGAERKRQEPRAPRLSPPHRSGSAKNPRSVRLSPPLLASLFGTNGAVPRRPPRPRPVPRRGRRLGRRRRQLGLPASAPRDGARGVAGAHAPRVRRTDGRRHAAATTVLADWEQIGLGGNRVTLRDLHRLGLFTVVLGSGDDVLLDALAAPTSTSCVVQVIPPRDSLPSLPVSEPNLLISGTSFPIGGDNGMMGADNERAEGPQTMLLVEEGIRKVDTEFACISYLTPWRWCNQAVRWLAWKTGTTLAGLVLPDTWSWEKIVGSPAVQGRGGCSLSACTVCTEAQHRMIYDRLHGSGSFRWRVEVPPTTLRMECIKKEAWNPEEGGLNKYPGPYKTQMLRLTEYVKPLTAIETARLIRQRGPIIGALAVNPPHYFSYRADAKQRAKRVYRGCPESAIIARKAAWHAVVCFEYRFVKSLIGEELQLKIMDSHSPDGPRRWICFDAFDRFCLPVICRPPCPRPSSSE

SEQ ID NO: 130861 - protein, 1519 aa, Oryza sativa
  unsure (1)..(1519): unsure at all Xaa locations
  Clone ID: PAT_MRT4530_32984C.1.pep
MTPPHPPESLINAVGFVRELRMMAFEVGYDVAPEYRQIPYDPNEEKCRVRVTLTSDREDLLSIKFEAGGRKYSHACQEVALVAIGELRHRFDEELESSAFQYHPHKPHGQDYGVYHCPEDEDSTTLKHAVYMLSAMDAVGVEREKTADDRENWNRGRICKLESKVYRLQKELAELKGEAPPPAPKLRLTARKRTRPPPRIQLASKTRVVGDVVPDHAEPIIHVLSNDEEEEDPEEREPATPEEEDPSLRSDARRTTNPVEAAAGEPITWREFTATFKKTHIPSGVVALKKRDFRALNQGSCSVTEYLHDFNRLAHYVPDDVRTDEERQEKFLEGLNDELSYALMAIEYRNFQQLVDKAIRQEDKYNRMEQKKRRAAYFKAQXGNSQRPRIALGPQAAPYPXGGSSSVARPQRQFYNNNTGNHSNDNRNVVTRPVAAPTQNQPVRKEQGIKPGVCFNCGDPGHYADKCPKPRRVKNAPVQNNSNAPAPKARVNHVAAAEAXNAPDVVLGTFPVNSIPATVLFDFGATHSFLSKSFASNHGMEVISLGRPLLVNTPGNQVSSTQYCPSITTEIQEIPFPSTLILLESKDLDVILGVDWLTHHRGVIDCANRKVTLTSSNGXTVSFFVSSPRSHGLTLNQVALQEIPIVQDYPDVFPEDLPGMPPKRDIEFRINLVPGTNPIHKRPYRMAAIELAEVKRQVDDLLQKGYIRPSTSPWGAPVIFVEKKDHTQRMCVDYRALNEVTIKNKYPLPRIDDLFDQLEGATVFSKKDLCSGYHQLXIREEDIPKIAFTTRYGLFESTVMSFGLTNAPAYFMNLMNNVFMEYLDKFVVVFIDDILIYSKTKEEHEEHLRLALEKLREHQLYAKFSKCEXWLPEVKFLSHVISAGGVVVDPSNVEXVLNWKQPKMVSEIRSFLGLXGYYRRFIENFSKIARPMSRLLQKDVKQLRPHENNYPTHDVELAAVVHELKIWRHYLFDNRTEMYTDHKCLKYIFTQPNLNMRQRRWLELIKDYDMEIHYHPGKANVVADALSRKSYCNMSEGRHLPWELCQELEKLNLGIVNKGFVAALEAQPTLFDQVREAQVNDLDIXEIEKNMRRGKTIGYIEDEQGTVWLGERICVPDNKELKDTIMKEAHETLYSIHPGSTKMYQDLKQQFWWASMRXEIAEYVALCDVCQRVKAEHQKPACQLQPLKILEWKWEEIGMDYITGLPRTSAGQDSIWVVVDRLTKVAHFIPVKTTYSGNKLAELYMARVVCLHGVPKKIVSDRGSQFTSMFWRKLQEEMRTRLNFSTTYHPQTDGQTKRVNQILEDMLRACVLDFGGSWDKNMPYAEFGYINSYQASLQMAPYEALYGRKCRTPLXWDQTGERQVFGTDILREAEEKVKIIQERLRIAQSRXKSYADNRRRDLTFEEGDYVYLRVTLLRGVHRFQTKGKLAPRFVGPFKIVSRRGEVAYQLELPPSMAGIHDVFHVSQLKKCLRVPTEEADPEHIELQKDLTYVEKPVRILVFPTFRRRAFTLRKAIDQY

SEQ ID NO: 130862 - protein, 1742 aa, Oryza sativa
  unsure (1)..(1742): unsure at all Xaa locations
  Clone ID: PAT_MRT4530_32985C.1.pep
VTSWYQSHLDLRTSQMVNPHPPKNLIEVLGFVRELRMMAFEVGYEVAPEYRQIPHDPNEEKCRVRVTLTSDREDLPSIKFEAEGKKYSHVCQETALVAIGELRHRFDEELESSAFQYHPHKPHGQDYRTYNCPEGEGSATVMHAVYMLSAMDAVGVEREKAAHDRENWNRGRICKLESKVYRLQKELAELKGEAPPPAPKLRLTARKRTSLPPRLQLASKTRVVGDAVPDHAEPVIHVLSDEEEEEDPKEREPATPEEEDPSLRSDARRTTNPVEAGDWLHAVGKKLDLFQYTEQEKVSFASHQLHGPAAERCDHFLLNRAEGQPITWREFTAAFKKTHIPSSVVALKKREFRALNXGSRSVREYLHDFNRLARYAPEDVRTDEERQEMFLEGLNDELSFALMAMDYRDFQXLVDKAIRQEDKYNRMEQKKRSSQRPRIALGPQAAPYPQGGSSSVARPQRQFYNNNTSNHSNDNRNMVTRHVAAPTQNHPVRKEQGSKPGVCFNCGDPGHYADKCPMPRRVKNAPVQNNSNAPAPKARVNHVAAAEAQNAPDVVLGTFPINSIPATVFFDSGATHSFLSKSFAGNHGMEVISLGRPLLVNTLGNQVSSTQYCPSVTIEIEEIPFPSSLIFLESNDLDVILGMDWLTHHIGVIDCANRNVTLTSSNGQTVSFFVSSPKSHGLTLNQVALQEIPIVRDYPDVFPEDLPGMPPKRDIEFWIDLVPGTNPIHKRPYRMAANELAEVKRQVDDLLQEGYIRPSTSPWGAPVIFVEKKDHTQRMCVDYRALNEVTIKNKYPLPRIDDLFDQLEGATVFSKIDLRSGYHQLRIREEXIPKTAFTTRFGLLECTVMSFGLTNAPAFFMNLMNQVFMEYLDKFVVVFIDDILIYSKNKEEHEEHLRLALEKLHEHQLYAKFSKCEFWLPEVKFLGHVISTGGVAVDPSNVESVLNWKQPKTVSEIRSFLGLAGYYRRFIENFSKIARPMTRLLQKDVKYKWTEECEQSFQELKKRLAAAPVLVLPDPRKGFQVYCDASRHGLXGCVLMQDGKVIAYASRQLRPHENNYPTHDLELASVVHALKIWRHYLFGNRTEMYTDHKSLKYIFTQPDLNMRQRRWLELIKDYHPGKANVVADALSKKSYCKMLEGRHLPWELCEEFEKLNLGIVNKGFVAALEAQPTLFDQVREAQMNDPDIQEIKKNMRRGKAIGYIEDEQGTVWLGERNCVPDNKELKDTIMKEAHETLYSIHPGSTKMYQDLKQQFXWASMRREIAEYVALCDVCQRVKAEHQKPAGLLQPLKIPEWKWEEIGMDFITGLPRTSVGHDSIWVVVDRRTKVAHFIPVKTTYMGNKLAELYMARVVCLHGVPKKIVLDRGSQFTSKFWQNLQEGMGTRLNFSAAYHPQTDGQTKRVNXILEDMLRACVLDVGGSWDKNLSYAEFSYNNSYQASLQMAPYKALYGRKCRTPLLWDQTGERQVFGTDVLREAEEKVKIIQERLRVAQSRQKSYADNRRRDLTFEEGDYVYLRVTPLRGVHRFQTKEKLAPRFVGPFKIVSRRGEVAYQVELPLSMEGIHDXVSHVSQLKKCLSVPTEEADPERLEIQEDLTYVEKPVRILEFPTFRRRAFTLRKVQNRPCRAAQVRAGRAVSSFGVAASTSTPACPLIRPETTAVSPPTPPPASPESSGRPFLLAGISPVDRVAVFSGIAAARSSSASLPLHPNPSAVHRRRLRSFSSSTSRRSPGSSSRSAASVVG

SEQ ID NO: 130863 - protein, 926 aa, Oryza sativa
  unsure (1)..(926): unsure at all Xaa locations
  Clone ID: PAT_MRT4530_32986C.1.pep
MAAWSWLILLCLVAAATAGVLQARAQPDSKGFISVDCGLPGKTSYVDDKTKISYAADDGFTDGGSFHNISAEYITPALSARYHNVRSFPDGARNCYTLRSLVAGLKYLIRATFMYGNYDGLSKLPIFDVYIGVNFWMMVNISDPSGATLLEAIVVVPDDFVQVCLVNTGTGTPFISGLDLRPLEKKLYPQANDKRGLSLFGRWNFGPISTTEFIRYPDDPHDRIWMPWVSPSYWVEVSTTRPVQHTDEDVFDAPTKVMQTAIAPLNASSNIEFAWVPYTQPKDPAPGYITVMHFSELQLRSSNATRQFYINLNGNMVFSQGYTPAYLYADAIFNSNPFLRYPQYNISINATANSTLPPIINAIEVFSVFSTATVGTDGQDASAMMVIKEKYQVKKNWMGDPCVPKTLAWDKLTCSYDSSKPARITDINLSSGGLSGEISSAFANLKALQNLDLSNNNLTGSIPDALSQLPSLAVLDLTGNQLNGSIPSGLLKRIQDGTLNIKYGNNPNLCTNDNSCQPAKHKSKLAIYVAVPVVLVLVIVSVTILLFCLLGRKKKQGSMNTSVKPQNETASYVPTNGSHGHGSSMQLENRRFTYNDLEKITNNFQRVLGEGGFGKVYDGFLEDGTQVAVKLRSESSNQGDKEFLAEAQILTRIHHKSLVSMIGYCKDGKYMALVYEYMSEGTLREHISGKRNNGXILNLEREASNRAGIRSRARATNILLNAKLEAKIADFGLSKTFNLENGTHVSTNTLVGTPGYVDPEYQATMQPTTKSDVYSFGVVLLELVTGKPAVLRDPEPISIIHWAQQRLAQGNIEGVVDARMHGDHDVNGVWKATDIALKCTTQVSAQRPTMTDVVAQLQECLELEEGRCAISNANNNFYTDNNSNSNSSYDMYATDHSIDVSQNSAAFETERNFGRMPSTATGPAAR

SEQ ID NO: 130864 - protein, 98 aa, Oryza sativa
  Clone ID: PAT_MRT4530_32987C.1.pep
MVVAATSGPATAPLTIWPCGPRERYREGHLQAAAAVQGSPPPAVTQPGHRAAVATAHAIVALARSLAAPPHLASPLHRPRTIFLNGTEGKTSKISVLK

SEQ ID NO: 130865 - protein, 133 aa, Oryza sativa
  Clone ID: PAT_MRT4530_32988C.1.pep
PLDISRGGHTARSSEAPWRARSLPPPPSSSWPSRSPVPCSTASPRKTTTRRRPSPRSRNLVINSFLSSERQNFVWSIRLVSSDRNNRKTENRDQNFRLDQMSTPNRPFQVIRLSSIAHIHIDVNESRHTYMSR

SEQ ID NO: 130866 - protein, 50 aa, Oryza sativa
  Clone ID: PAT_MRT4530_32989C.1.pep
MPSDIDIRDSLDKPNPVPAEADKSDLDEFIFDEEYYPVVDYILGYTAIQR

SEQ ID NO: 130867 - protein, 676 aa, Oryza sativa
  unsure (1)..(676): unsure at all Xaa locations
  Clone ID: PAT_MRT4530_3298C.1.pep
HIKRDKFLANLIKSLFPNIREEALGKKRRYKEGKNRSLRVILSEEDHSAASIPFGGMVVVLGGEFRQIXYLVEGGVRSITIDATLSKSPLGSYLSVLELSLNMMLPCSYLNGDEEPVLADFSDLIFTIGDATAIQCILCSDVEQTLLDILHDLLVMNNEKKIRPIVAEVYTNIGEPYNDRIYLQGRANVAATYDACVAINSCVWQLFPGEPREYFSCVFPAXANEKFDDLDFLYPNDFLNIIKVNNXREHELCLKIGVPIMLLRNLDQTAGLCNGTRMIVTNLGDRVIEARIITGSNAGETVYIPRITLSATSKKWPFTLERRQFPVRVCYAMTINKSQGQRLRSVGIYLKNPVFCHGQLYVALSRVTSRAGLKMPFDLFCDISPTSKNWKICATIARNESCQPLGASKKLTFEVGASEGKDIDTAVVSERQWTRLNQVLSYVLCSCSVILVHAKGDTAMNPPRFFTVRLTTANQRYVRRPAAIAQGYQLEDGQRLKLVTTHNLMVYIELKRASGKIYITTGWPQFIEATGLQLKEYVATPNALSMKCASAPGRDINLSTELKDYFKDIAQFLHPSNEFYVTTINPTFMKQDKVHFSKQFSMTYIALIVRKKTSQIEVRIPGHSSTTMVLHHSTEKRFNLKSGWTHFPTSNGIQVGTICIFHFHQTNQLQATIDVL

SEQ ID NO: 130868 - protein, 124 aa, Oryza sativa
  Clone ID: PAT_MRT4530_32990C.1.pep
MGGRGQELPPPLSGAALPRLLANATLRPHRLPPPPRSPLPLPARSGRDGPGAAGSRASPAPLQPDLGGGGWEPPPPPQTPLSRAASPPCRCGPPPPPPPPAVAVGSTRRHPREPPPPSVGGRGE

SEQ ID NO: 130869 - protein, 148 aa, Oryza sativa
  Clone ID: PAT_MRT4530_32991C.1.pep
CKARPPAGSLGWPLVGETLQFISAAYSSRPESFDEKRCRRRSTTADAMAPAARVIRTHLRGSPAAVSADAEASRAELQSDSVAFEPRYPMLLMELMAESCILVLGGALQCPVHGLDSAFFKAAELNVRFTANMLSRLCGAMDAWRDSA

SEQ ID NO: 130870 - protein, 68 aa, Oryza sativa
  unsure (1)..(68): unsure at all Xaa locations
  Clone ID: PAT_MRT4530_32992C.1.pep
ESTKELICILSCVRELICILSCVRDKTHVQKGHIMYFGYKYDPTPCNQGTTVQXTSAHRHPFLKKKKK

SEQ ID NO: 130871 - protein, 35 aa, Oryza sativa
  Clone ID: PAT_MRT4530_32993C.1.pep
QGNIYLFELQNFEWKLSLTVKRPLQITILSCSLVP

SEQ ID NO: 130872 - protein, 30 aa, Oryza sativa
  Clone ID: PAT_MRT4530_32994C.1.pep
SCLIAGKSGFFRALPNDGLAHAYRTLGGEA

SEQ ID NO: 130873 - protein, 237 aa, Oryza sativa
  unsure (1)..(237): unsure at all Xaa locations
  Clone ID: PAT_MRT4530_32995C.1.pep
MPVETGYATGHEPGRGVSEATPPPPEPTFVAPSPPSIYQLLPASVSFSPPPPRPPPPPPPPPAPSPPPPSXPPPPPSPFPPPPPPPPPPPPPPSPPPPPPLPLPPPPPXPPPPPPPPPPPPPPPPSPPPSPPPXSPPPPPPLPPPPPLPPSLPSPPPPPPPPPPPPXSPPPPPPPPPPFFPPPPPFSPFXPPPPPSPPXPPFSPLPSFLPPPPLSPPPPPLPPPPPPFPPPPPSPPP

SEQ ID NO: 130874 - protein, 620 aa, Oryza sativa
  Clone ID: PAT_MRT4530_32996C.1.pep
MKRKRGRKMGKKGKLKASITADASPMSPSSPSTVDASSKSPSSPSTEENGTSPAHHQADNAPVIAPPPVPEPAPPEPEKPAVSTDVQNAKPKVYSRVRLKFKSAKVLETHQGPSEAKAPVDGGGGKPASAAPEASKEVVAEKAIVSPDGQKDAQAAELSGSDKDKVARKVASIKIKSVGLSSVEDKNQDRKADSVSEPLPSKQETVLENVESETALELRSSQELEAIKKVMKMDAAEPFNTPVDPVALGIPDYFDIIDTPMDFGTICQNLERGDKYMNSEDVYKDVQFIWDNCTKYNSKGDYIIELMKRVKKGFMKNWLAAGLYSDVQENAAGEEDGATGGRGRVGILVNVAANPWLSEVALRRVGTSAAMVDRLVEMLTWNGRDKPAARRGRAPTARSGTRSGAIESVSSLLFVADEECNLLGLLFAMQVGPGHLASLHGGRRTVAGVDRRLGGQRRASALRLGGVRLATNGGGWPATSGGTATGVRRAAVGGGSVLLVFLFGGGGRVGRRLPPPPRLRFRSARTPPPPAASSRPRSPPRRDRVPLHPPVRPFANSLLAASSSMESQTRPTGARRERRSGRRRGDGPRRPPLVQLLPLRLRPPARCSAVRGPWRRERER

SEQ ID NO: 130875 - protein, 590 aa, Oryza sativa
  Clone ID: PAT_MRT4530_32997C.1.pep
MKRKRGRKMGKKGKLKASITADASPMSPSSPSTVDASSKSPSSPSTEENGTSPAHHQADNAPVIAPPPVPEPAPPEPEKPAVSTDVQNAKPKVYSRVRLKFKSAKVLETHQGPSEAKAPVDGGGGKPASAAPEASKEVAEKAIVSPDGQKDAQAAELSGSDKDKMARKVASINIKSVGLSSVEDKNQDRKADSVSEPLPSKQETVLENVESETALEPRSSQELEVKQATPERQRDDRELTAALEAIKKVMKMDAAEPFNTPVDPVALGIPDYFDIIDTPMDFGTICQNLERGDKYMNSEDVYKDVQFIWDNCTKYNSKGDYIIELMKRVKKGFMKNWLAAGLYSDAQENGGNDNTGDEDVKGSKGKSKQKRRRLGNDRHKNDCACAVCQVTRRKKEKDEILAVIENDTAAVNSNISDQQIMEVDSGINNAGSHDTTSSQEQPPQTDMYRRTVVADDSGTLIENHVKFFNNQPLPHDYEDEGSRPYFDEKEEVDYTDLISQEEHTSSQPNDGSEIAQHQHKEPTETSQEIEMEDYPIQKENQSFLQLCARLFPSNQSSVFRGRHSLFRQQQRQVSMKGSPLHAAITAIMKR

SEQ ID NO: 130876 - protein, 92 aa, Oryza sativa
  Clone ID: PAT_MRT4530_32998C.1.pep
MGIEVGAAVVLTTCCRCPCALNPTKVTDEHEQEADGSGLGDADIEQEEPSPPARGATSCWPRARRGSCTGMPWRTRGSRRRELRPPQCAYAS

SEQ ID NO: 130877 - protein, 440 aa, Oryza sativa
  unsure (1)..(440): unsure at all Xaa locations
  Clone ID: PAT_MRT4530_32999C.1.pep
MLTWNGAAEGRRHGVCRARRVQACQQEAGRAPAPSKYIIGKNCHRVQEVLIGRAVSGGQRAMQVGPGHLASLHGGRRTVAGVDRRLGGQRRASALRLGGLRLATNGGGWPATSGGAATGVRRAAVGGGSVLLDFLFGGGGRVGRRLPPPPRLRFRSAPLRSHAASAGRILPSALSAAERSSAAASSRPPLCQLPPRRILFDGEPDEANGREAGEEIRPTTRGQSDPFPMSHDGRGIDGKVGGGGQKGMMAWEFEEITEELDRLRRGVEEGRRGRRLTGKEQRGQEGRWDGRRRQWLPSREEERGGRRRGEAAEEGEIEDDGAADVAAVCVGDAVVRAQRPAXAEAACERGGRRSGVERWRQAGERAAAGEAXGAKAASAHRSEWAAAVKLTPSAVAKPIPSDAVAAASALLSASVMMAXPRAANADRTRGTGRPASSRCP

SEQ ID NO: 130878 - protein, 1473 aa, Oryza sativa
  Clone ID: PAT_MRT4530_3299C.1.pep
MSTTAPVRIQLAPRNPPPPAAPAAPPVPPAVPAAPAPAPAPVHMSAPASALSFAPASAARGPASGNGGCLFGMVYTRNGSRATGEGSNGEERTEGVHPNSNSGNVPPPLPENPTLAQVMAHQTQMMAAMMQQMQQQHQQMYQRMLQHAEQQHQQFGPPPPQSKLPEFLRVRPPTFSSTTNPMEANDWLHAIEKKLNLLQCNDQEKVAFTTHQLQGPASAWWDNHMATRPPGTEVTWAEFCRSFRKAQVPDGVVAQKKREFRALHQGNRTVTEYLHEFNRLARYAPEDVRTDAEKQERFMAGLDDELTNQLISGDYADFERLVDKAIRQEDQRNKMDRKRKAAQFRAPQGSHQRPRFAPGQQGGPTTMIVRQYRPFHPSNFPQGASGSQNHHGGQPNRGAAPRPPMAPAQSGPSAQARKETGAKPGSCFNCGELGHFADKCPKPRRAGPRFIQARVNHASAEEAQAAPEVVLGTFPVNSIPTTVLFDSGATHSFISKKFVGMHGLIREELSTPMRLTKFKGVIDCVNRTVTLTNEKGETVVYKSPNSPKQGVSLNQIEAEIPVVTMEKNLRKLEDIPIVYEYPEVFPEDLTTMPPKREIEFRINLAPGTAPIYKRPYRMAANELAEVKKQVDEQLQKGYIRPSTSPWGAPVIFVEKKDKTKRMCVDYRALNEVTIKNKYPLPRIDDLFDQLKGAKVFSKIDLRSAYHQLIIREEDIPKTAFTTRKCDFWLTEVKFLGHVITAQGVAVDPSNVESVTKWTPPKTVSQIQSFLGLAGYYRRFIENFSRIARPMTQLLKKDEKFKWTAECDKSFEELKKKLVSAPVLILPDQMKDFQVYCDASRHGLGCVLMQEGRVVAYASRQLRPHEGNYPTHDLELAAVVHALKIWRHYLIGNRCEVYTDHKNLKYIFTQPDLNLRQRRWLELIKDYNMSIHYHPGKANVVADALSRKSHCTALCIEGMCEELRQDFEHLNMGIVEYGFVAALEARPTLVDKVRVAQVNDSEIAELKKNMRVGKARDFHEDEHGTIWLGERLCVPDDKELKDLILTEAHQTQYSIHPGSTKMYQDLKEKFWWVSMRREIAEFVALCDVCQRVKAEHQRPAGLLQPLQIPEWKWEEIGMDFIIGLPWTSSGHDSIWIVMDRLTKVAHFIPVHTTYTGKRLAELYLSRIMCLHRVPKKIVSNRGSQFTSKFWQKLQEELGTRLNFSTAYHPQTDGQTERVNQILEDILRACALDFGGAWDKSLPYAEFSYNNSYQASLQMAPFEALYGRKCRTPLFWDQTGERQLFGTEVLAEAEEKVRIIKERLRIAQSRQKSYADNRRRELTFEAGDYVYLRVTPLRGVHRFQTKGKLVPRFVGPYKILERRGEVAYQLELPSNMIGIHDVFHVSQLKKCLRVPEEQADSEHIDFQEDLTYVEKPVHILDTSERRTRNKVTRFCRVQWSHHSEEEATWEREDELKAAHPHLFASSSESRGQDSV

SEQ ID NO: 130879 - protein, 44 aa, Oryza sativa
  Clone ID: PAT_MRT4530_329C.1.pep
GQQNGSVLQASKKNLLYWMPICSCILSMLYFIHAGNLTGKFEPN

SEQ ID NO: 130880 - protein, 219 aa, Oryza sativa
  Clone ID: PAT_MRT4530_32C.1.pep
AKWHADFFRCKSLVFSSEMKLYTKYCIPHEYMVFEYVTMKWIIATGLRKNQLQQGKNISTPEPFLQFRGTVTQSVTYVGWAKRWEEKNKICINKKHMRLPLVLFDPHKLAVLINPQRPLSLLTTWPLGAAAAEPSGKRTETEPAIGAKENPSHGTGGGEELRRQRGRHGGDTGWGMPNGGGVRPAVWGKDGGDPTFNISHWMNRSKDQEGQMFDELAAR

SEQ ID NO: 130881 - protein, 104 aa, Oryza sativa
  Clone ID: PAT_MRT4530_33000C.1.pep
MSAGVGGLRQLLAAAVTTGVAEARAAIFGHALNPTGKRAATKLLRKKMVGEQLAQWYPYDIKRDDPLVMAREEKARLSKLEMLKRRGKGPPKKGQGRRAVKRSK

SEQ ID NO: 130882 - protein, 702 aa, Oryza sativa
  unsure (1)..(702): unsure at all Xaa locations
  Clone ID: PAT_MRT4530_33001C.1.pep
MITFVDSAAKERERESDKCLDPQLWHACAGGMVQMPPXVSSKVYYFPQGHAEHAQGHGPVEFPGGRVPALVLCRVAGVRFMADPXDTDEVFAKIRLVPVRANEQVYAGDADDGIGASLSGTTSPAATGNSSLNWNTEKGASEGSGSGVIQNSPTDNTSFGEAPVVQGEQHRLRARAGVVWKFRHIYRGTPRRHLLTTGWSTFVNQKKLVAGDSIVFMRTENGDLCVGIRRAKKGGVGGPEFLPPPPPPPPTPAAGGNYGGFSMFLRGDDDGNKMAAAARGKVRARVRPEEVVEAANLAVSGQPFEVVYYPRASTPEFCVKAGAVRAAMRTQWFAGMRFKMAFETEDSSRISWFMGTVSAVQVADPIRWPNSPWRLLQVSWDEPDLLQNVKRVSPWLVELVSNMPAIHLAPFSPPRKKLCVPLYPELPIDGQFPTPMFHGNPLARGVGPMCYFPDGTPAGIQGARHAQFGISLSDLHLNKLQSSLSPHGLHQLDHGMQPRIAAGLIIGHPAARDDISCLLTIGSPQNNKKSDGKKAPAQLMLFGKPILTEQQISLGDAASVDVKKSSSDGNAENTVNKSNSDVSSPRSNQNGTTDNLSCGGVPLCQDNKVLDVGLETGHCKVFMQSEDVGRTLDLSVVGSYEELYRRLADMFGIEKAELMSHVFYRDAAGALKHTGDEPFSEFTKTARRLNILTDTSGDNLAR

SEQ ID NO: 130883 - protein, 192 aa, Oryza sativa
  Clone ID: PAT_MRT4530_33002C.1.pep
MESPCGCSGSLKYAHRGCVQRWCDEKGSTLCEICLQNFEPGYTAPPKKAQPAHVAVTIRESLEVPRPSYEPEDTPLIGEQDYAECAGAAGRSATWCRSVAVTFTAVLLLRHLVAVVTVGAAHQYAFSLLTIYLLRASGILLPFYVVMRLISTVQKGQRQYQLQLLQEQRRNAARMHRLHGQEEQNQHAILVR

SEQ ID NO: 130884 - protein, 74 aa, Oryza sativa
  Clone ID: PAT_MRT4530_33003C.1.pep
MSPGRGAAKAPPSSSVEVSGRPGLGFHSTGPLEEMGQHGKALKRERDARERPRCQLGQVWAGFSPAADHLSIHN

SEQ ID NO: 130885 - protein, 436 aa, Oryza sativa
  Clone ID: PAT_MRT4530_33004C.1.pep
MEASAAKEKDKDGKKMSRVGSWGSMAFYSSSSSSRSQPVSAAEGKNGGKKEKRRSSISRSITCAGSICSTKESSVSSRGRGRRRRSGGGGGGDGGGGGSTSSRSLMGPGYHGDSAAAVSASSSFNSVMTAATSATATTTTTTTSSSATSPPSALSSPLSSIGGSFRAMQIRKLSGCYLHCHSVLDPRTLAAVVFSCPDCDEVFVKPDSLELHRSTRHAVSELGADDTSRNIVEIIFQSSWLKKNAPVCRIERILKVQSSDKTIKRFEQHKEAVKEKARSAGDEAGRNPRCVADGNELLRFHCTTFACSLGLAGGTALCCASSSPPPLHCKLCSIIKDGFRVDGNGRITTMATSGRAHDTAEVSPDGEKRAMLVCRVVAGRVKKLHSSNSSEDHDCDSATLDTSGIKTEGQKDRNTKMSATLNDDEASKILLSPEPD

SEQ ID NO: 130886 - protein, 87 aa, Oryza sativa
  Clone ID: PAT_MRT4530_33005C.1.pep
SGAAEASLLSLNSGERRRRRWGVRRERSTAGGLGFGRSYRRRLWRTTRKTKGCGYMSTPGKKLLMHDFHRLDQDPPCGIKCAALDNN

SEQ ID NO: 130887 - protein, 87 aa, Oryza sativa
  Clone ID: PAT_MRT4530_33006C.1.pep
PQQQIGGVPPIPPPIRAHRRPEPPSRARSCSPSDAQHQRQRRDREQGVNMTCGPYIILFYFIADWISTSTSRVCHAGPKPFRIESGG

SEQ ID NO: 130888 - protein, 481 aa, Oryza sativa
  Clone ID: PAT_MRT4530_33007C.1.pep
MEYMVEIHGGARRETMRIRRGSVRSGSPAPVARSTATSFTVHGRDGRAIRFLGSARRDYSLFVNIYFIFTNVSNTGDKEKETPVNTNGGNTASNSSGGPFLGGSRDTVAQEEGDGEEDEEAVTTVTREKARRGRRGDSDRGCRGGGGRRRDGRGRRGPDESRRGSGGHASHARLGEAATAAAVRPGEGRGGDVGWRRWWRAGTGREDGATAAAAFDRATRWPECARRARRGVTSAGREMKTAATVVSVRNWCGGVSSRKRSEGAVVWAAPNGVNAAHTFGVDARLWATEREHAKAGKEEGTRPDFIVVWSGAVRHGSGRHTGLCGGPTVRAKKPSSSIAAALETETEFDGGVNGPYRLGHERRRRCRLELDGLFAAAVSDGGEIGFFFAGSGGGNSNAFFLGGSGGVNSSGFFSSIDGGGGGGTGATQRREGRASVASGPRSALVGPPRHRLHLPFLLTDRHAATRGRGMEAAAGGAPMRV

SEQ ID NO: 130889 - protein, 110 aa, Oryza sativa
  Clone ID: PAT_MRT4530_33008C.1.pep
NRSCSKTPAMEEDACKKRPPRAPPIKVPPPMVILVVPPPDRPKKKKKGFKVPRCLVVGPERKRPIWGAFFQPPPPLFPLTMQRNIFPFPSMWLGPSVPESSSSIRLFFFF

SEQ ID NO: 130890 - protein, 806 aa, Oryza sativa
  Clone ID: PAT_MRT4530_33009C.1.pep
MRPPPPHLLLLLPRRRRHASSSSAAAAAAGELVGALSALPSPDSARHLDALLRRIGGGGLAAVLSSLPSPLPAASALRLLLHLLSRTSSTSSRSEDDLLTPRVSALLLPSLIADRTAIRTARRLLSRLLHVHPLRTAAEAVADAASTPSSDFLIHTFITSPAQGSLCRAADAFRVLSSRGAPPSIKTCNAFLEALVRAGQLDAAREVFDEMRESRNVALNEYSYTAMIKALCKAGKVDAGFEMLAELWRAGLQPTVVTYNVLMDALCKSGRVEEAFRLKGRMEQGGMTPSVVTFGILINGLARGERFGEVGIVLQEMEQLGVSPNEVIYNELIGWHCRKGHCSQALRLFDEMVLKKMKPTAVTYNLIAKALCKEGEMERAERILEDMLSIGMTVHCGLFNTVVAWLLQRTRRLESVVSITNEMVTRGMRPNDPLMTACMRELCKGGKHQEAVGIWFKTLNKGLGVNLATSNALIHGLCEGKYMKEATKVIQTMLNKGIELDSITYNIMIRGCCKDSKMEEAIKLHGDMTRRGFKPDLFTFNTLLHAYCNLGKMEETFHLLDQMKTEGLQPDIVSYGTIIDGHCKAKDIRKAKEYLTELMDRGLKPNVFIYNALIGGYGRNGDISGAIDAVETMKSNGIQPTNVTYGSLMYWMCHAGLVEEAKTIFSQARENNVDLGVIGYTIMIQGYCKLGKMVEAVAYFEEMRSRGISPNKLTYTTLMYAYSKSGNSEEASKLFDEMVGSGVIPDNITYGTLIARCSEVNSLDKDIGHTAELSSGALTKDDRMYNILSNGINAPWCQKEAASSVE

SEQ ID NO: 130891 - protein, 103 aa, Oryza sativa
  Clone ID: PAT_MRT4530_3300C.1.pep
VPQKGSTVTFFVLFLKNKTLIFQFPSFSPSKPNSTPIGVSFYSQFTIVLNFKPPSLALLKFTFCWWENKIPPKVFPLCHFHHWPKSFFQTPPTLEMEGHGGPF

SEQ ID NO: 130892 - protein, 381 aa, Oryza sativa
  unsure (1)..(381): unsure at all Xaa locations
  Clone ID: PAT_MRT4530_33010C.1.pep
RRRPERWPAAAREAGGVMAAGAAAPPPPLTPPATPPHRFAPPTPPSHXPSPPPPPSPPASRAVTAALTRRAWELPPPPPPPPLPPXVAPVPPPPPPSIEEKKPLLFTPPLPPRKKALLFPPPLPAAXKKPLPPPLPPPTPSPLSFPPWASPPFPSPRPAHSLSPXSQPAGRTCPPPARRNVEPGEQHAETPPHPPHSPVCRPEPAPSSPPSRARAPSPTAARPHRTCAPRSRRSAPPRPPPPXAPLPLFLSPWPPPVHPVPPPPPSRHPPSRFXSPPAPPPXSPPLPSPGRTAAAVAASPSRAWLAWPPLPRRDSSGPRRPLPSRRLPPPPRQPRSLSPPPSSRPPRLPPHLLPPEPPYPRGGPPRPARARRRPPRRGTPR

SEQ ID NO: 130893 - protein, 277 aa, Oryza sativa
  Clone ID: PAT_MRT4530_33011C.1.pep
SSQTSNDADEDDVGEVRRKDGVFLGSARRDYSLFVNIYFIFTNVSNTGDKEKETPVNTNGGNTASNSSGGPFLGGSRDTVAQEEGDGEEDEEAVTTVTREKARRGRRGDSDRGCRGGGGRRRDGRGRRGPDESRRGSGGHASHARLGEAATAAAVRPGEGRGGDVGWRRWWRAGTGREDGATAAAAFDRATRWPECARRARRGVTSAGREMKTAATVVSVAELRKRSEGAVVWAAPNGVNAAHTFGVDARLWATEREHAKAVNSEQPGTGRRRRGGA

SEQ ID NO: 130894 - protein, 278 aa, Oryza sativa
  unsure (1)..(278): unsure at all Xaa locations
  Clone ID: PAT_MRT4530_33012C.1.pep
NPVAFPPPCPRSFRPPPSPHRRLLALELPQPCVHAKSMRRAHAPPRRXALCLAAPSSPPSRARAPSPTAARPHRTCAPRSRRSAPPRPPPPRSSSSVSLTMAAASAPSPLSQSTRHESPCLSSTPKANTELTPPHQFRHRNHRRRRLHLSPGRCHAASSTPRALGPARRSVERRRRRRAILPPGSCSPPAPPPHVAASAFARPNRRRGRRLAEPSVARVAAAAAPGFVRPAAPSSISPPSPTAAAAAVAVAAPAAPRFLLLGRARVGKRRGIGENEEE

SEQ ID NO: 130895 - protein, 183 aa, Oryza sativa
  Clone ID: PAT_MRT4530_33013C.1.pep
QPEGTIGALSKRWGLPGWRLGWLAVCDPNGALKHVRNATEMLLNVTSGPASIVQAAVPKILSNEHHEFHRNVVNLLESAADALYRRVNQIEALQCYSKPHGSMFMMVEVNPSLLFGVEDDMDFARELIKEESVLVLPGSVIGLKNWIRIFFGAPTSVILEACDRIEAFCQKRAVQVKLLKKKF

SEQ ID NO: 130896 - protein, 228 aa, Oryza sativa
  unsure (1)..(228): unsure at all Xaa locations
  Clone ID: PAT_MRT4530_33014C.1.pep
GDDDDEHWRGSADGEARPRATLPLRCRRRRRRCRPAHGHGGRGYRXGAGETEGEASAARRCSGEIRATWWPGRGRGWRCCAGRGGDDDSXTHWRGGTGGWGGTVPATPPNXRRGHRSGEFPARIRGGRGGGWRRSAGEGDGDIRRRTGEAAQAAGGWLAPRKEKEEAGRGGVATGELGKGLKRXNGARGFHFIGWGREPGTGEVGTAAEKSAGGHGKRPGLARAFRVT

SEQ ID NO: 130897 - protein, 494 aa, Oryza sativa
  unsure (1)..(494): unsure at all Xaa locations
  Clone ID: PAT_MRT4530_33015C.1.pep
MNVEHFARTTTLLKRXGNNSKAEFNHRTQQATPTMQTCKGIQEWVSPPPXLPQRWEVPSCTVVNPAVGQPDTPADPTPPRPPSPPVPRKGSSYTSDQVVTYSRLWXTIXYLFLASRGVEVAPTXGPHPSVTQRGRXHGGSSPRAARARAPRGAHGRQRGTDVATTRADVWMAQIRTGADRTAEGEAAGSPAAAGSVGSSDARVGXRRRSAGGKEEKEEGVLTEGTTTEGGGRQRRKRWRRWRTDDGQRSGRGRQAVAALRRGRRGARRSRRCKGCGLAVARAVAARGRRRQTRWRPRVXWRKRSSXGGLGKRSGGRPCHCDXKANGTSGEPRRWLKRRWRAAGGGEWWWXRGYAVAAGFRQWIGEMERRPRCGMARRAGXAQAAGAATALAVAARGWKAPVSGGAXARRGESGRERGGEIVAERGRIRRQPAGDGGAPTWGGWRQFGVDFAGRSGENMGEEEVGIESTRXEVGWSXGRRGVSGGRGKVGKWIYF

SEQ ID NO: 130898 - protein, 128 aa, Oryza sativa
  unsure (1)..(128): unsure at all Xaa locations
  Clone ID: PAT_MRT4530_33016C.1.pep
GSGGSRRRWTCPPPPDLLAAAANAATVAGSAAGGKREGAEGAACRRQIHPRLPPTPPPPPADLPREGGXRGHRIRPQPSPPRPSTVATAAGGRRDGRERGRWNVAASGEREGERRRRWGEGEGAVAVV

SEQ ID NO: 130899 - protein, 83 aa, Oryza sativa
  unsure (1)..(83): unsure at all Xaa locations
  Clone ID: PAT_MRT4530_33017C.1.pep
LPRCEEELAVGVVRSSVPEGXPAGDASVGVPHVGRACVVVEHRCVRRGFAGGERRVKTXSGLGRTDNDVIPLLRALSCYLTRH

SEQ ID NO: 130900 - protein, 82 aa, Oryza sativa
  Clone ID: PAT_MRT4530_33018C.1.pep
MTGDDSVCPPCRDLRSRDDRRLGGACSLRRDLHSRYAGQRIDAYRLRRDLRSRDSERARLTVTNAGSAEERRGEEDEERQRR

SEQ ID NO: 130901 - protein, 167 aa, Oryza sativa
  Clone ID: PAT_MRT4530_33019C.1.pep
MEYHHRPHSPPPSDDDVVVIQMNAAVIAAVDEWSSTNEVDDAAAGKGGGSTRRTFSQAYKMKHRTPLVNTQWQVALLSFQSLGVVYGDLGTSPLYVFSSISLDDPGEADFVGILSIILWTFTMICLVKYVFIVLKADDHGEGGSRFLYFGTKRVVDEKQRRTSSESS

SEQ ID NO: 130902 - protein, 1529 aa, Oryza sativa
  unsure (1)..(1529): unsure at all Xaa locations
  Clone ID: PAT_MRT4530_3301C.1.pep
SCGIRQASNTIQSSPRFSPPGCNLGFLPHKLKGRSMAVADGGGDKGIVTLMITHPKLIGGDVGVPVGSVDLGEQESMQASVVKTGLVMDSDTGVSMGPEIFTEGEVLEEEEDVIEVVLEEDEVQKAGXWTVLARXPNQVALFEDMRRASRFHSDMSYKSLRDNMFIITFTVEGDYEFVIQGGPWIHRGDALLVASFDGLTSLSSVPLEFVPIWVRIYDFPLVLMTKXQGESYGSKLGRVREVDVGDDGRNRHDIFRIRVDLLVKRPLKLKLAIKISVQGKEVTRKFDLRYERVPHFCFICGFIGHSDKECVKRTANEDHPFQFYAELRYSPLKPFERKVCRVKATPSEGPVTCSFGGAGSASSSSSRRKQGDHGAKEIPARVDAHDGFDVRESAGDKKIDEQLAKHTQNLKVDTKQKQPSSTHGEEPVLQGEGVVKSTTAISESEMIPTIKNIDQQVSSGDGSSEDMIRDNRKRSQVQXGAQKAGRVKQALLEYQQTVESGGNSSLEPVSASRALKRIRKSVEGTGRSDMEATSPGAAGAMSCLVWNCRGIGNATIVRDLCALVKEAGSHIVSLRETRQKVEKVRCLRSRLGLKGFVGVNSEGMSGGLALFWHKSVCMEVNVLNERFIDAYVRLVSDGPVWHVTFVYGEPRVEHRHCMWDLLKAIKQSSPLPWLVLGDFNVALWQFEHFSAKRRGESHMQAFQDVLQTCQLFDHGFSRVPFTYDNRREGRSNVRVRLDRALADESWRDIFSDSQVVHLTSPCSDRNPIKCLHYEICXEREATSEEIIKESWDDTGQKLHPGDINVTLSKVMGTLRTWIWRAKKNRITKIRVNDGTVYSTTKEMEQLATEYLKXIYTADPSLDHSRVSRLFQQKVTSEMNVALCKDFTEDEISDVLFQIGPLKAPGPDGFPIRFYRRNWAHIKADVVNAVKELFQSGHMPEGINETSIVLIPTVNQPVDLKDFRPISLCNVIYKIVSKCLVNRLRPILDELISVNQSAFVPGRMITNNALLAFECFHRIQKNRQPNKATCAYKLDLSKAYDRVDWKFLEQAMYKLCFAHRWVSWIMTCISTVRFAVKFHGTLLNTFAPTRGLRQGDPLSPFLFLFFXMVDRLSLLMDEKIYQGAITPVKVCRSAPGISHLLFADDTILFFQAENGQAKIIKEVLANYATGTGXLINPAKCSIMFGDSCPLDCQEAIITTLQIGRRGFEDKYLGFLTPEGRMHKGKFXSLQEKIWKRIMLWGENFLSSGRKEIMLKNAIQAIPVYVMSLFKLPASVCDDLNKISRNCSWGVDKGKRRTHXKFWNHVTRPKQSGGLGLKDFRLFNXALLARQAWRLIDCLDSLCVRVLKAKYXLIDTSFGGNVSPGWRSIIHGLELLKKGIVWRVGDGRSIRIXRDSWLPQNHTRSHIIVKRNYRERWXSDLISETGTXDEQLVNHTILPVDAELILKIWLSSRTEKDFLAWHPDKXGIFSVRSAYSLALLLASEECSSSSSEVSVNKVWNQIWSCNVPQKVKIFYEEQPLIVSKETVSNTA

SEQ ID NO: 130903 - protein, 436 aa, Oryza sativa
  Clone ID: PAT_MRT4530_33020C.1.pep
MASKKALAMQPSKKICMTLLPQDIVELILLRLPVSTLLRCRGVCKQWDGIIRDPQFAMVHIQRAPRRPLFFFQRENLVHLLYPSEAILFDEAWSPSKWVVPVIEPDDFLCASCNGLICLHSDKSTIKIANLATGECMHLVKPVRNSKTDHFSYYSFGFHPVTKQYKVMHFLRDEHLHVGTSFSIIQVYTLGDEKWRDVRTPQALSLRCVERSGVVNVGGAMYWLTEDEESVWKHAVVTFDLSEELFQWLQLPAVDPANYVLGDPDQWLITEVDSNVSVSYYETGKLHIWTIDSKIEQSWSQKYNIRLSMLEVPGPHWICGDKIILHDFNKNLYFYELMGKNSEIESSKLVKQLRFSPRNNMQCFMFVKSLVRLDAFRKAGVENADKMGMEIKLDLQQTPDLDSSLRLINWLEYRRVLEILCVNLDNMHEVLTGLFV

SEQ ID NO: 130904 - protein, 135 aa, Oryza sativa
  Clone ID: PAT_MRT4530_33021C.1.pep
RCRRLPRSCPCGTRPRSAQSSPTSSSSPSSPPPGSSRCPRRRRRRRRRAAARRARGSRWRGGSTRSSGSRRRGGGGGAAMRRWRPAWGGSARGRGCRARASTRSTSARTRRSSAPSSSTSAPSAWPASSTSGACR

SEQ ID NO: 130905 - protein, 372 aa, Oryza sativa
  Clone ID: PAT_MRT4530_33022C.1.pep
MGVGRVMNDAKPYLAMILLQVGFAGMYVVAVASLKRGMSHFVLVVYRNLFATAVMAPFALWFERRVRPRLTLIIFLKIMGLAILEPVLDQNLYYMGANLTSAGFASALINVLPAVTFVMALVLRMEKVKLKSVHSQAKIAGTLFTVAGAVLMVLYHGPVVQFPWTKGQHHDGGSGAGGAAGGGFLQGTIFIVVACVCWSGFFVLQSNTLQSYPAELSLTTLICLMGSVLSGTVALVAERHNTHAWLIGFDTRLFTCVYAGIVSRQRGPVFVTAFNPLCMIITAIMGSIILKEEINLGSVIGAVIIVIGLYALIWGKGADKVEQTDAGAAAAGSNKGGGELPLTAVPNGHGSKHGNGGHVYDVETPPAANGHY

SEQ ID NO: 130906 - protein, 145 aa, Oryza sativa
  unsure (1)..(145): unsure at all Xaa locations
  Clone ID: PAT_MRT4530_33023C.1.pep
MAIGGDAGQVVGDGGAGAGDDNIILNPEFDSGLDNWSGSGCKIELHDSLDDGKVLAVSGKYFVAATXRTDTWNGVQQDVTSRLQRKLLYEVAATVRLSGAAATPSPAEVRATVRRAEHRRAGSNTSASPSTTHAHTSLESILSSI

SEQ ID NO: 130907 - protein, 71 aa, Oryza sativa
  Clone ID: PAT_MRT4530_33024C.1.pep
ANECAFGFMPPWSRWRYACDPSVRERPVRIGPWRYCSLYIVSPLSQMPLFLCCFLYGRWVRWICWPLLPLG

SEQ ID NO: 130908 - protein, 79 aa, Oryza sativa
  Clone ID: PAT_MRT4530_33025C.1.pep
PQHYLSPKKKWAPKIWFSLKQRIPSQFNFPGKARTYPVSPSGRNQLPYNQHGPFVSILRAVLVAPFSLSWCHSAFLCCC

SEQ ID NO: 130909 - protein, 78 aa, Oryza sativa
  Clone ID: PAT_MRT4530_33026C.1.pep
GSMPSCVAQKVAIRIRIMYYLSAKLEKIMYCQEKFLQLQMTRKYESSHSITHPYKPPTLPAEGLFCFILAMLTGSPKR

SEQ ID NO: 130910 - protein, 88 aa, Oryza sativa
  Clone ID: PAT_MRT4530_33027C.1.pep
MAAEAGGRRFVSRERATWAKAQGRRHGGYVASRRGVGSTAVRRLKSFSDFKQDDVRTTCYTLPISPTSSRKQPDKQDPTDWIIGGRRP

SEQ ID NO: 130911 - protein, 175 aa, Oryza sativa
  unsure (1)..(175): unsure at all Xaa locations
  Clone ID: PAT_MRT4530_33028C.1.pep
PSRPEAGAAGSTRRRPPHVVALRRRAPAVAVRRTRPRPRRHRRRPPHAVAGAGGRVAGGGVPVSPGVLPGTTPLNPHVSWHHGSPDXLITQPGVSHSTHVVALALCSNEIPRKWSLSSRAGNCTPGTSPGLRFWKIHSVRKHRPMCRMIKGDLPCTRSSLSFMNLRENPRLTKIR

SEQ ID NO: 130912 - protein, 58 aa, Oryza sativa
  Clone ID: PAT_MRT4530_33029C.1.pep
FCEHNVNSTSTRNPSSGKNEKQNKIVLLPVVGFSFPLANLSFMFYIQLMFSPVLHCEY

SEQ ID NO: 130913 - protein, 164 aa, Oryza sativa
  unsure (1)..(164): unsure at all Xaa locations
  Clone ID: PAT_MRT4530_3302C.1.pep
SCSPIKVNNYPEHQLCLKIGVPIMLLRNLDQTAGLCNGTRXIVTNLGDRVIEARIITGSNAGETVYIPRITLSATSKKWPFTLERRQFPVRVCYAMTINKSQGQRLRSVGIYLKNPVFCHGQLYVALSRVTSRAGLKVLIEDDNGNCTTRTWNIVYREIFSAVR

SEQ ID NO: 130914 - protein, 210 aa, Oryza sativa
  Clone ID: PAT_MRT4530_33030C.1.pep
MERRVANSHGVRVAAGSEPTALTHLHLHGTRLYGRRVASRDVGGSGNRQQEEEAAKEENMRKEIPKSNVSDIKKKKKAEYEKRDSQIQPHQPSIISHICMLSLSKTIGIPHIYMLSKIRTQDPAGGGSCFVWTAGSNDAAEKTASDLTRLRAVARLHRLHLSSLAATTTSCGVGSGGYAGIGGDSCGVDATLANPTPEGFRPGEGEYASG

SEQ ID NO: 130915 - protein, 200 aa, Oryza sativa
  Clone ID: PAT_MRT4530_33031C.1.pep
MRKEIPKSNVSAIKKKKKAEYEKRDSQIQPHQPSIISHICMLSLSKTIGIPHIYMLSKIRTQDPAGGGGCFVWTAGSNDAAEKTASDLTRLRAVAVAPASHVVVDGGCAGFTHCRRWRRRPRVVSTAVATLASLVVGGGNDLVWCRQRRLRWHRRRLVWCRCDTGQQQHPAACLKRIRNVTVERCYAWSSGDRFWSPDSG

SEQ ID NO: 130916 - protein, 44 aa, Oryza sativa
  Clone ID: PAT_MRT4530_33032C.1.pep
LGLSLDLNCSGNTTPQAPSTARTKSTPRRTRHRTHTRTLGLGKN

SEQ ID NO: 130917 - protein, 121 aa, Oryza sativa
  Clone ID: PAT_MRT4530_33033C.1.pep
MDQVPRDDPRRELSETLRVNRNKWETSGPHTNATRMHACGTMWRPQGHTNIATKRAREDCMNDYCRQCKRPGPTMARLARWQHREGKEGALRTMSLQVSTTNKALFNLKGIEENWRGLIGE

SEQ ID NO: 130918 - protein, 211 aa, Oryza sativa
  Clone ID: PAT_MRT4530_33034C.1.pep
MGVDSFLLISENDVSSHQVEVWLQTFGPAERTLIRRHSCEEVFVVLKGKGILVLKYTGQPREIPVFQNSIFMVPVNDPHQVWNSDEHEVEVCLQTFGPGQRTPIHRHSCEEVFVVLKGKGTLFLGSSSMKYPGQPQEIPVFQNSTFTIPVNDPHQVWNSDEHEDLQVIVVISRPPIKVFFYDDWNMPHTAAKLQFPIFWDEECLIAPKDEL

SEQ ID NO: 130919 - protein, 282 aa, Oryza sativa
  unsure (1)..(282): unsure at all Xaa locations
  Clone ID: PAT_MRT4530_33035C.1.pep
MPNYEPPPRMTMNNIRANKPGTQVCSQVAYXKFIQTLDKEQMQAIDDLGFAGLTKMNGVQIRQLLCKQIARHDDEQSRAFNINGIMLEXTIEDVDHMLSVPSKGVELVEVPQAIQVDIDAPKDXKNEALQATKAAMFALYKDKRGTKITLSALRDSLNLNRSSDDHFKRQFVLYTXILCPTTERFVHSNYLNLLINILDIKRTNXASLTLNYLKRSIVSFQHDKEKFRVSHIDPSTARVRPLIQYWDEKKARKREKIMYGVIPLALHQAIPNCLTKLASTAP

SEQ ID NO: 130920 - protein, 60 aa, Oryza sativa
  unsure (1)..(60): unsure at all Xaa locations
  Clone ID: PAT_MRT4530_33036C.1.pep
MREERIGERGGDEEADGWGPRGSHRESAATXDKTGVKIAEGPTLHWFYKMKDALHPVFCG

SEQ ID NO: 130921 - protein, 666 aa, Oryza sativa
  Clone ID: PAT_MRT4530_33037C.1.pep
MTIMQRRDRLSDLPDATLARVLYHLGSVNATVTSALSRRWRNVHAAVPVVDLVDPKKGERWGNVSGQKTCFDHQVTAAILGKDLPTRKFRLDAFYPPYDLRDQWFAIVSVSGLEEFDVKLRYWDHSRRNLCPFGTHPKASADFDEEMRHSFTATPPHIFRCDTLRRLLLTNWTLDVPAGGVSMPSLETLFLKRIMAEDGAVQRLISGCPNIADLTLEQCPSVKRLVVASPRLDSFAMICCHHASHVVLQAERLRTLRYKGGLPGENFFSIANCGDVLAMTIDICESLLGKSASAVVPITKVITRCTNVTFLHLHLRPTMAFHSGTFTRALRHLPHLRQLALKGLLDNDETALSVSTLLRNTPNLDVLSLIPLRPRPPKPDYLYMLRKIKLLNYKGTPNERMLAKYLLSKASALEQCSITLPANKTSTEDRRWKLTKELNWRRADTHFLLTCGAAGQGTMSGVGCGSQRENDHLGKGDERGIKAVITGQPTLAQDVRREDGEIISDVGGNRAVAGQWFGGGRREQRLQQGGVAAVGRREATAMSGYGGASLGAAESRRRRGSAQRRVGADPVPAAPSRMTTMAPGGAAIPSSPSLPPPSSPPRRQGRLCRLRLPRPTWIWRQGWQERPIRCRQRRWAARVTDPVRATTAGDGSDGSGGSDDGGQRGR

SEQ ID NO: 130922 - protein, 996 aa, Oryza sativa
  Clone ID: PAT_MRT4530_33038C.1.pep
MADTVTVGGGGEHRVQVAAAKPCGGQQQQGKKAAAPEKWLNGFVSLVALVERVGNALGTLAFTWATVVLLGGYPTSLTALGSYNDFWFATAIIFLESARMFSGSNNRSDYQLFFRTKGAFRPLDWNWLIAIVCILDVWKLLIPLPHKNVMAAVVLYAMIILLILGKSMTPKFQPSLRNPLRRAISLWSPLAAILLMTPAMQHDHSRDFVRNITGNGSITTRTGGFAPTRSTVVAKWIVFLLLLVSVLVVTISRLKFPRIIKLLDSAWGRKLVSWRRSIQNICMLAALVMVVLTTDGFFRFMIIGMLVIVAVMVSSGNLQIPAAVLRVVFAGLALSHLMALHKNNKEDEETNLVPSLIVFYAMVTAQGILYTVACTLEIFSFIPRRSLIRRAGFRGQLGVEYVNLYYAYALEKCMEKAVFAPKKTSLGNFAMDSLNSDSPKNHLYGIQLMHSLLEKETTRARLLEKLITSTKTMARIISMLGWTSPNYMMVRLYAAKVTAELAKDLQVIAVPRAMQLVSALLDTDGKLKKGNPLLQVDDEQEERQDPILSTANSQEERPNAIRNADDPPKQRQQETLQGTDNLPETQTRSAHIHEQNCIIRSLQKISEYWTVPKEHPLTYHDQLPALGMLIVDKLASCDQNNCVEIDRVTDLIPKIIGFTSFRSDTMNSEAQQMVLVKSSLKVLQRLTSIEGEIGKALRYKISKHPFLLRNLADILGDNIRDQELKKLAVGILRNISIDGNTRQEIGNMKVLITRLMKAFLDLHRTSNTDVDFLLPKVAGQALAMLAMDNVHNCLVMLKEPEFITKLKNMILIQDEKYIYVAPSLLRSMCQHAQAKLTELDLKELSHTLREVLERIMNAEGAELEILIGLSSQICKVNPEEFAQELDHGHIRQRFVKRLVDALNANMKPSAHCPGIRRVILEQSIYMMECNSHYANCFNEFRMMDALSIVEETPSKVENYMVFLGDVGFMECGTPLFALVDRAKELMGRQWLQGINN

SEQ ID NO: 130923 - protein, 1438 aa, Oryza sativa
  Clone ID: PAT_MRT4530_33039C.1.pep
MPRRKGKGKGVEDEVEVYEPASPPERVLIILDSSEDDLDLQEVRRSLMITGRGRARAAERVGEEAPRGSGRRAAPVVASRRRRRRSRSRSRSPRAARPRAESSRRPTARRARARARSPSLEIIDVDSGSDRGVVRVKEEPRSGSDSDYNGARGRARARARAPVAATAAKKKKRKRGKEAPSRAQESREVVRVKEEPNSDGNGAGGRARARSPVAAAAKQRKRGGREAPSRAQESRVPVQIKEEPYSGSDSDGNVAGGRAVVPAADAKQGKRGKKTPSRGKGRRVVVRETSTPAAPSNGAPSVGRGKGRGPGRGRQRSKGAVRGRATPVNRVSTGVGSRTRSRLAEQGRAFAQEEEEQVEEREEEEEEEEQGRAFAQVKEEQVEEQEEDEEEGEEEMEMEVEVEVRSDDNDHGNGGIRGEGGGTDDVAEIEEEELGTDEDETSDDSDENFSDEEGDEEELEEEEEEEEEEDDDDDDEEEEEPGDAPDQPGEAGEESPPRSRIMAMPLMGKRMFEGFSFLQQVDTSTGRDIRARTRSNFKRKKLLDKKLLKRGTFAKPYCIDVSSSGSEEDVPQPEQSAYGGDCADDDGGSDGNEEHRAVKRRKLNRRQSAHSDSEEDTTFVCDVKEGSGSRRVQEGAPRRQVKKEGSNKKKDGSTPQCVRNNGPKVGRQTNGLNGQGGVSFKRNVKIAQRRKRRQATADQEKYGHLLDPMFNEIESNQYEPVPEEQIDRRLPLVFAFGDDDKLEEKSKHDKLQDEDELWKEFDFALESINVCSHNCEEGEKEDEQEIPADKAASCIQGKHELIIDEQIGLRCKHCNFVDLEIRFVLPSMVKSCTERDMRKDHELDLFFDDILTSAGYEGPRDFGGKKTGLVWDLVPGVREDMFPHQQEGFEFMWRKLAGGTSIEQLRNNANTIEGGCVISHAPGTGKTRLAITFVQSYFAFFPECCPVIIAPRGMLATWEQEFRKWKVKVPFHVLNSKEINWKEDRTIKQLAIMDENLAQSLARNKLDHKFRRKLKLASWRKGSSIIGVSYTLFRKLANQSSMDGNMVRNLLLEMPDLLVLDEGHTPRNKKSLIWKVLEEVRTKKRIILSGTPFQNSFLELSNVLYLIRPKFARHFASKSFKKIGLEDYWTSLTLNNITEKKIDEIRQILDPIVHIHNGDILQKSLPGLRESVVILNPLPHQKEIITAMENTVTMGTLDAEYKISLASIHPFLVTCAKLSEKETSSVDVSLLKSLRPNPCVGVKTKFVLEIVRLCEAMKERVLVFSQYLEPLSLIMDQLSKMFNWTEGEEILLMSGNVLVQNREALMEAFNDMKSNAKVMLASTKACCEGITLIGASRVVLLDVVWNPSVGRQAIGRAYRIGQEKIVYTYNLITEGTKEKDKYDRQAKKDHMSKLLFSKEPHAAGFNLSQEVIFNDKILEAMTSHRELKDMFVKILHSH

SEQ ID NO: 130924 - protein, 854 aa, Oryza sativa
  Clone ID: PAT_MRT4530_3303C.1.pep
MATRPPGTEVTWAEFCRSFRKAQVPDGVVAQKKREFRALHQGNRTVTEYLHEFNRLVRYAPEDVRTNAEKQEKFLVGLDNELTNQLISRDYADFEKLGGPTTMIVRQHRPFNSSSFHQGASGSQNHPGGQPNRSAAPRPPMAPTQSAPSAQAKETRAKPGSCFNCGEHGHFADKCPKPRRAGPRFAQARVNHASAEEAQAAPEVVLVTLTNEKVEAVVYKSPVSLKQGISLNQIEVENPVATEEKSSRKLEDIPIVCKYPEVFPKDLTTMPTKREIEFRIDLAPGTAPIYKRPYRMAANELAEVKKKVDEQLQKGYIRPSTSPWGAPVIFVEKKDKTKRMCVDYRALNEVTIKNKYPLPRIDDLFDQLKGAKVFSKIDLRSGYHQLRIREEDIPKIAFTTRYGLYECTVMSFGLTNAPTFFMNLMNKVFMEFLDKFVVVFIDDILIYSKSEEEHEQHLRLVLEKLQEHQLYAKFSKGDFWLSEVKFLGHVITAQGVAVDPSNVESVTKWTPPKTVSQIRSFLGLAELKKNMRVGKARDFHEDEHGTIWLGERLCVPDDKELKDLILTEAHQTQYSIHPGSTKMYQDLKEKFWRASMRREIAEFVALCDVCQRVKKSYADNRRREFTFEAGDYVYLRVTPLRGVHRFQTKGKLAPRFLGPYKILERRGEVAYQLELPSNMIGIHDVFHVSQLMKCLRSSLAAARRRSPPLSAVGRSPPCVTVASRCAAARHCRRVGLGPARARPAASRLRRPIYRAVDRGRSTPPPTWLPRGRHVCAASAPRVHHVVRRSSPHDPAETKGYKVGFLDLNHDPAETKGYKVGFLDLNNCLHWCCRLVRHLLLLAHQPLPLRVRHHQ

SEQ ID NO: 130925 - protein, 465 aa, Oryza sativa
  Clone ID: PAT_MRT4530_33040C.1.pep
MAQQLSAPFRAAAAAGYPAKVLRLRSAGSAQFTSIAASSSFARASAAAADPAKVSPSLPFLLCSLSLTFFPTPPPEFSGLFRVGVRLAEGWDVFVRCVTSCVADTAPRFRLKLGFRESGNLGLGGGGANAGVRFLFIARNIEPLRAIATQAPPAVPQYSSGEKTKVGINGFGRIGRLVLRIATSRDDIEVVAVNDPFIDAKYMAYMFKYDSTHGPFKGSIKVVDDSTLEINGKKVTITSKRDPADIPWGNFGAEYVVESSGVFTTTEKASAHLKGGAKKVVISAPSADAPMFVVGVNEKSYDPKMNVVSNASCTTNCLAPLAKVVHEEFGIVEGLMTTGPAKAVGKVLPELNGKLTGMAFRVPTPNVSVVDLTCRIEKSASYDDVKAAIKAASEGALKGILGYTDEDVVSNDFVGDARSSIFDAKAGIGLSSSFMKLVSWYDNEWGYSNRVLDLIAHMALVNAKH

SEQ ID NO: 130926 - protein, 474 aa, Oryza sativa
  Clone ID: PAT_MRT4530_33041C.1.pep
MAQQLSAPFRAAAAAGSRASAAAADPAKVSPSLPFLLCSLSLTFFPTPPPEFSGLFRVGVRLAEGWDVFVRCVTSCVADTAPRFRLKLGFRESGNLGLGGGGANAGVRFLFIARNIEPLRAIATQAPPAVPQYSSGEKTKVGINGFGRIGRLVLRIATSRDDIEVVAVNDPFIDAKYMAYMFKYDSTHGPFKGSIKVVDDSTLEINGKKVTITSKRDPADIPWGNFGAEYVVESSGVFTTTEKASAHLKGGAKKVVISAPSADAPMFVVGVNEKSYDPKMNVVSNASCTTNCLAPLAKVVHEEFGIVEGLMTTVHATTATQKTVDGPSMKDWRGGRGAAQNIIPSSTGAAKAVGKVLPELNGKLTGMAFRVPTPNVSVVDLTCRIEKSASYDDVKAAIKAASEGALKGILGYTDEDVVSNDFVGDARSSIFDAKAGIGLSSSFMKLVSWYDNEWGYSNRVLDLIAHMALVNAKH

SEQ ID NO: 130927 - protein, 404 aa, Oryza sativa
  Clone ID: PAT_MRT4530_33042C.1.pep
MVDEIGAAKKGEFLVRFVVSMPESSSDPNNGRGKSSKRNLPSWMGSKDGEENPGKKKHMATHEKDGVVFVLSGFVNPERGTLRSQALDMGAEYRPDWTSDCTLLVCAFANTPKFRQVESNNGTIVSKDWILESHSQRKLVDIEPYLMHVGKPWRKNKELVESDEDQKKPHKEHQKQVDRSHIKTSPSAGIEAKHSDVTSKQFSPTKIKQWAKNDLAQTISWLESQEEKPEPNELKAIAAEGVITCLQDAIESLKQGNDVKGVAEQWSFVPHVINELAELDGRRKEGSLSKEQLSQLAIKCKKIYQAEFAHMHDNDKKHQSKPRSDDAQYDSDDTIEMTEEEIDLACRQLPGFLKLACRTENIFSVETSKNKQSNGRKHTSSNSGGRTQQTRPAFRRRDLDPSFC

SEQ ID NO: 130928 - protein, 50 aa, Oryza sativa
  unsure (1)..(50): unsure at all Xaa locations
  Clone ID: PAT_MRT4530_33043C.1.pep
PFIQSPRPFNFXDGMXLXIDFNQQLGXAXQPLXILLTSQTVPXQWXRLNC

SEQ ID NO: 130929 - protein, 103 aa, Oryza sativa
  Clone ID: PAT_MRT4530_33044C.1.pep
MPESSSDPNNGRGKSSKRNLPSWMGSKDGEENPGKKKHMATHEKVQKGSDFSKLLDGVVFVLSGFVNPERSTLRSQALDMGAEYRPDWTLNCTLLVCAFANTP

SEQ ID NO: 130930 - protein, 143 aa, Oryza sativa
  Clone ID: PAT_MRT4530_33045C.1.pep
MQMPFCPKLWSSAAPAPVQPGSVVINGTVVVANHFGLSAPGKSTTLRLFSGTEVDHETRKGRLSAEAALRGGKKTRHGKASTTMYQVTFFVDGEFGTPGAVAVKNGNRNDQFFLRHVRLDLAEDRSIHFDCNSWVYPYKKTTS

SEQ ID NO: 130931 - protein, 857 aa, Oryza sativa
  Clone ID: PAT_MRT4530_33046C.1.pep
MQMPFCPKLWSSAAPAPVQPGSVVINGTVVVANHFGLSAPGKSTTLRLFSGTEVDHGDAESLKRIAETRKGRLSAEAALRGGKKTRHGKASTTMYQVTFFVDGEFGTPGAVAVKNGNRNDQFFLRHVRLDLAEDRSIHFDCNSWVYPYKKTTSDRVFFINTSYLPDKTPEALRLLREEELRSLRGNGRGERKDWERIYDFDYYNDLGNPDNDDHVRPVLGGTKTHPYPRRCRTGRPLSKTDGVTETRKHKLINLDYYIPPDERFSPGKLAEVLAMGVQAVTHFVIPEARSIFHGDVVNFKSTEQLRADLYGKPPQPAADARVMDELKSSVPSHKTYKQVSRIVKDNPAKFPTPQVIHYDTEAWRSDEEFAREMLAGLNPVVIKRLEVFPPNKSKITTDDIMTQIGGLTIQQAMEQKRMYILDHHDYLMPYLRRINTEGVCVYASRTLLFLRDDGALRPVAIELSLPDGGVGGSEISRVFLPASQGTDAHLWHLAKTHVAVNDSGYHQLISHWLFTHATVEPFIIATRRQLSAMHPIHKLLDPHFKDNMQINTLARSILLNAGGLLEKTMYPGKYSMEMSSDIYAHWRFTEQSLPNDLIKRGMASRDPKARGGVSLHIEDYPYAVDGIDVWLAIEGWVRSYCDHFYHADAAVAGDAELQAWWDDVRRVGHGDRQGDAACWLDLDTVAGLVETLSTLIWTASALHAAVNFGQYGYAGYPPNRPTRCRRFVPLPGSPEMAQLEADPGRFFLETVPDRFTATLGIALIEVLSNHTSDEVYLGQRATSTWTDDGEVLLLLDRFRDELRRVEKRVEERNKDPRLVNRRGPVRVPYTLLYPDAGDVAGKEKGITGRGIPNSVSI

SEQ ID NO: 130932 - protein, 59 aa, Oryza sativa
  Clone ID: PAT_MRT4530_33047C.1.pep
NARGLDLIGDFHSPWMLLFRLRANRQTRMRISHHVLQLPIPMAFAPKIHPLLNNALTHD

SEQ ID NO: 130933 - protein, 112 aa, Oryza sativa
  unsure (1)..(112): unsure at all Xaa locations
  Clone ID: PAT_MRT4530_33048C.1.pep
PRVNNLGRSVNKAXFNRIRTAFSYGAQKLGQVLLLQPELIPDEIYGFFKNTLNRIGSGVRPDIGDESYNDAFRCESFLGPGKALWDEMSSMKISCNNQDENRGPHHLSKCLS

SEQ ID NO: 130934 - protein, 53 aa, Oryza sativa
  Clone ID: PAT_MRT4530_33049C.1.pep
AGAFIPSRRKDHLPMGGSPLRRMHTTCTMKTANFGNTSELEDKIKTGDHVQAC

SEQ ID NO: 130935 - protein, 173 aa, Oryza sativa
  unsure (1)..(173): unsure at all Xaa locations
  Clone ID: PAT_MRT4530_3304C.1.pep
MNPPRFFTVRLTTANQRYVRRPAAIAQGYQLEDGQRLKLVTTHNLMVYIELKRASGKIYITTGWPQFIEATGLQLKEYVVFKVLSRSKMHVIIXAKSGYLRCPVPSKPSNSQLKKNALQKPKXQKKRTKTKPHMQHPMQQKLKADIGSACTGNTKRTINEMCFCTGEGHQSIN

SEQ ID NO: 130936 - protein, 282 aa, Oryza sativa
  Clone ID: PAT_MRT4530_33050C.1.pep
MKNFTVGKGHPDAPEHRRGLVPAVEPLVHRSAGADEGEEDGCGDDGADEEHDYHQIGEGARRHIRVLEKAKGISHRGETNVDICRRRWASARLCSWHARPREPNGFPTLSWSRAVRGVEIPCGDQANTNSGPVSVQQLHRCVARRVGVERRVKRVKNAVDVAEHAGGRSGGGAEGRAERRQAAGSGGCRRVRQLHSVGRSARDAQPDGAAPPRLVAVRATSLLARPPPPTSSMVTSGSELPFVARPPSAASLLPRPPRVASPLQAAKRRPPPSRAASLLAVE

SEQ ID NO: 130937 - protein, 45 aa, Oryza sativa
  Clone ID: PAT_MRT4530_33051C.1.pep
FQINCIWCYLLGAGGDQKNIEPDLCQQQGARMQACMKLGVQTSNR

SEQ ID NO: 130938 - protein, 462 aa, Oryza sativa
  unsure (1)..(462): unsure at all Xaa locations
  Clone ID: PAT_MRT4530_33052C.1.pep
LAMFLAGRQADAPQEALQVLDIVLRELPTTRYSPVGRSFYSPNLGRRQQLGEGLESWRGFYQSIRPTQMGLSLNIDMSSTAFIEPLPVIDFVAQLLNRDISVRPLSDSDRVKXKKALRGVKVEVTHRGNMRTKYRISGLTSQATREISFPVDDRGTVKTAVQYFLETYGFSIQHTTLPCLQVGNQQRPNYLPMEVCKIAEGQRYSKRLNEKQITALLKVTCQRPQERELDILRTVSHNAYHEDQYAQEFGIKIDERLAICEARVLPXPRLKSHDSGREKDXLPRVGQWNMMNKKMVNGGRVNNWACINFSRNVQDSAARGFCHELAIMCQISGMDFALEPVLPPLTARPEHVERALKARYQDAMNMLRPQGRELDLLIVILPDNNGSLYGDLKRICETDLGLVYQCCLTKHVFKMSKQYLANVALKINVKVGGRNTVLVDALTRRNSLVSDRPTIIFGGDVT

SEQ ID NO: 130939 - protein, 716 aa, Oryza sativa
  Clone ID: PAT_MRT4530_33053C.1.pep
MDLVVGASSGAVKSLVGKLGTLLAQEYTLISGVRDDIQYINDELASMQAFLSRLKRDVAHDEQRQDWMKQVREVAYDIEDCVDDVRHRLGGEPRGTGTVVSLKRTWYLLTTLYQRCCIATDIGNLKVRAQHVSERRTRYGVENLPANRNGGGNNNSGAPGDHPAPLPRLIGTTEPVGMDDAMNDLQRWFMVSKQNSQQQSQISYLAIVGSGGLGKTTLAMSFYRKFGDEFDSRAFMLASQKFHLPTVLRSLVSQFHQKQVSASEDALHGIEEWGVEALKKKLADQLQGKRYHILIDDIWSVSAWESIRDSLPKNNKGSCVIVTTRFNSVAEACRRQNGHVHKLKQLDPVNSSKLFLQIIYANDPCPTPTINDEIVVKMCGGLPLAIIVVSGLIASELKSKIGKTLDQKLIEVEKALSAELGNNLTTEVVRIINHCYKNLPPDLKTCLLYLSTFPKGRNISRKCLIRRWIAEGFVTDKHGQTAEEVAEDNFNELIGRNLIRPINNSSNGKVKSCQIHDMVLEYIVSKSGDENFITVIGSHWQTPFPSYKVRRLSVHKSDRQETDLVERMKLSHVRSLTVLESFKALHSTMLKFQILQVLDLEGCKDLSSNQLKKICNMHQMKYLSLRGTDIYKIPKKIGRLEYLEVLDIRDTDVTNLPASVERLQRMVHLLAGNKTKRRALRLTEGITKMKTIQTLSGIEISGRSTRTLRPLIGVRR

SEQ ID NO: 130940 - protein, 71 aa, Oryza sativa
  Clone ID: PAT_MRT4530_33054C.1.pep
SPLPDIALLRTRTGRTSVISRAITTSTPTSHLPWDAEQTPKINYLDTVSTQLITYFNVSYTLKQSLYFTGL

SEQ ID NO: 130941 - protein, 84 aa, Oryza sativa
  Clone ID: PAT_MRT4530_33055C.1.pep
GNPYLNTHHLPDDLMFINSLQKKNASSPVYPSTTLITVLPHHDFLRTGADRLHMAPLCSFFVSLLNYNDDYNNSTSPHEEGGWH

SEQ ID NO: 130942 - protein, 70 aa, Oryza sativa
  Clone ID: PAT_MRT4530_33056C.1.pep
LRHHPRPSTCRPLAKVEEDECRWRGLEPTTSSMEEPRPLGLHHFEFVIVRVISASNSSLLKADWAVGERH

SEQ ID NO: 130943 - protein, 125 aa, Oryza sativa
  Clone ID: PAT_MRT4530_33057C.1.pep
MPVHQAPHYEIMVSPHLASLRIMGAHHLSMLSIATVSPACRLPLAPAPHTSEVAGYLHLNLCTVVATTLLGCHSIVVTDSTAGSSIEALDSVVSSTPTAWNLPATIYVPNRCGGRCCSQIHLLTV

SEQ ID NO: 130944 - protein, 552 aa, Oryza sativa
  unsure (1)..(552): unsure at all Xaa locations
  Clone ID: PAT_MRT4530_33058C.1.pep
MAGGGTSIRKYVGALKDTTTVSIAKVNSDYKDLDIAIVKATNHVENLPKEKYIRXIFYHLSAGRARADVAYCIRALGRRLSKTRNWAVALKTLIVIHRALREVDPTFRDELISYGRSSTHMLHLSYFKDDSSAEAWDYSAWVRNYALYLEERLESFRVLKYDVEKDPPRTRDLDTVGLLEQLPALQQLLFRLLGCQVALESVRIHTAINDGILNLVDKFFEMQRDDALRALDLFKRAINQAGQLSEFYEMCKTIHIGRGERFLKIELPPTSFLQAMEEYVRDAPLASINQRNQAVLAIEYKRKPEDEESSSSAPLPPPPVSTSESEPEPEPEPVKEVSPVHEPTDLLGMNEPTPDVSKIDQKNSLALAIVQPDNTPKAAAPTTENVATSWELALVAAPSSNGNAATSNKLAGGLDLLTLDSLYNEAHRQAQQNASYNPWEAAAPASSGPMMQQPMQNPFYASNAIAPPLNVQMAAMAQQQQHMFMLQQQQQQYDQQQQQMMMMMGRQPYDQQQGSSSNPFASPYMSAGVHPYGPGMQLHAGNSYTYSGTGMM

SEQ ID NO: 130945 - protein, 121 aa, Oryza sativa
  Clone ID: PAT_MRT4530_33059C.1.pep
CPSDKTPLRRHELHALAVVAAAHLRDTAVPLVPHCRIRGWRSVGHQRWGTLHQIPLLPSTIKDMALKASGTCWHCKPCVGPSAAGASHWHHPYHQGGGFGDSDAASGSEQFLYMYHSTSTP

SEQ ID NO: 130946 - protein, 148 aa, Oryza sativa
  unsure (1)..(148): unsure at all Xaa locations
  Clone ID: PAT_MRT4530_3305C.1.pep
HASGLKGVHTGQMVLKVVEAMDVYLAGTVMLIFGMGLYGLFITNTSTDVPSESDXRALQGSSLFGMFALKERPKWMKITSLDELKTKVGHVIVMILLVKMFERSKMVKITTGLDLLSYSVCIFLSSASLYILHNLHRPEQDDSVMPNL

SEQ ID NO: 130947 - protein, 415 aa, Oryza sativa
  Clone ID: PAT_MRT4530_33060C.1.pep
MKATMLGRLAAKRRLESSQNKANLPKKKTSSRPIPKIRKSSRKPSDIDPSGKDPEPTDKETDSATAKETRRTEENRPTDSQSATDNVETGYEPPTGSQLAEAKTSASQEPPTGDQPETEPNRDIPETEGQASSPPLNDTNTGPGVSSFDKVQGPARPPPKVITVKWWDDEMQPQGIVINKQKEDEEVSLLAKTLNQATRLVNIIHLRNEAKTATLEKLVPHLGTLEETRAKLHETKELARKTEHNLMDRVAALQEVNFELSGSSKDRKIKSQAQFEVLVNKIKKLEGARDEVANAGTLLIQAMFFNNNGPSFFDAVKVFDKLRTAPDIYFKNIREAGSMGASMALAMTKSLYPKIDVDAIDDFANGTSEEDALELISDAQKAADKIAVDVVERFQDTNLGPTGADVTDDEKTESD

SEQ ID NO: 130948 - protein, 47 aa, Oryza sativa
  Clone ID: PAT_MRT4530_33061C.1.pep
MDNNYMKVEQCTMIMFVPRKAYMDQNASANEGRFASRDITNRKINMF

SEQ ID NO: 130949 - protein, 111 aa, Oryza sativa
  unsure (1)..(111): unsure at all Xaa locations
  Clone ID: PAT_MRT4530_33062C.1.pep
LEAEGRTELGPKEAAFITDPNLPPPLPSPPTXPTPVPPPHPLVPPPHPAPAPAGAARLRIRPPYLPVQPPPPARXPSVPSPSPTPTPAGXRLPLQPADPPVPPPPPTHTQL

SEQ ID NO: 130950 - protein, 78 aa, Oryza sativa
  Clone ID: PAT_MRT4530_33063C.1.pep
PPAPITQAAKPLPHRTDAHGAPPRTGARTRRHDTSTPHRRARPQHLPPPTSRSRSRRWSRGATVRAAASVGGGALRAD

SEQ ID NO: 130951 - protein, 104 aa, Oryza sativa
  Clone ID: PAT_MRT4530_33064C.1.pep
MGPSSSWVHGRRLGCIGPGPALPPVDAVADIRYVKDTEYPEPAPGCSAAAKNNQFLYTGPPPPRSLVDKTQEQRRAGGRESSCEDEQHHELASVSTTSLLLELG

SEQ ID NO: 130952 - protein, 53 aa, Oryza sativa
  Clone ID: PAT_MRT4530_33065C.1.pep
SSLVSASFSDHSWGRINLRTRSGGKEVDVSTLEAGGARDYIDPPPAPLGDLPP

SEQ ID NO: 130953 - protein, 193 aa, Oryza sativa
  Clone ID: PAT_MRT4530_33066C.1.pep
RRVRAVAVAGDDDDEGNHMADGNRGGGLDAAGPRRWRSNGGCDNGRREIKLAANSVSFSHRSAYQFEDAPDMRDEESKDETSAAEVFGEMPQRQRCVSPWAMPVAWPQDREEKDGKGDEGSRGSPPAKRPRSSCGFDDKQTYMLQEILRMTQQQNERMDYLFREIQELVEKVSSLTAVRSGFGGYHQQIAAPS

SEQ ID NO: 130954 - protein, 382 aa, Oryza sativa
  Clone ID: PAT_MRT4530_33067C.1.pep
AKGYVWFKNKTIMTSAISKEKVRRKEKILRALSGHNNLVKFYDACEDGLNVYIVMELCEGGELLDRILARDENAPMKLIDFGLSDFIRPDERLNDIVGSAYYVAPEVLHRSYSMEADIWSIGVITYILLCGSRPFWARTESGIFRSVLRADPNFDDSPWPTVSAEAKDFVKRFLNKDYRKRMTAVQALTHPWLRDEQRQIPLDILIFRLIKQYLRATPLKRLALKALSKALREDELLYLKLQFKLLEPRDGFVSLDNFRTALTRYLTDAMKESRVLEFLHALEPLAYRRMDFEEFCAAAISPYQLEALERWEEIAGTAFQQFEQEGNRVISVEELAQELNLAPTHYSIVQDWIRKSDGKLNFLGFTKFLHGVTIRGSNTRRH

SEQ ID NO: 130955 - protein, 145 aa, Oryza sativa
  Clone ID: PAT_MRT4530_33068C.1.pep
DAWVLRALSGHNNLVKFYDACEDGLNVYIVMELCEGGELLDRILARGGRYTEEDAKAIVVQILSVVAFCHLQGVVHRDLKPENFLFTTRDENAPMKLIDFGLSDFIRPDERLNDIVGSAYYVAPEVLHRSYSMEADIWSIGVITY

SEQ ID NO: 130956 - protein, 109 aa, Oryza sativa
  unsure (1)..(109): unsure at all Xaa locations
  Clone ID: PAT_MRT4530_33069C.1.pep
CSXTAXCXEXXPPXSAAXMRSQXQXQPNXRCTDLRXXPHRXXXXALAXRXQXPANXATXXPXAFNFLPPPXPQSXLPLLSSRPRGETRCALVWLGAVXNXXVXRWPLXI

SEQ ID NO: 130957 - protein, 434 aa, Oryza sativa
  Clone ID: PAT_MRT4530_3306C.1.pep
MDKNFSFVSSVRSTSNGDKASNSITEASEMQEKLNKLQEELKNEKKEKARALDEIAGLKKKKNENKVTSNGGDDKLDLVHRLEQLEGEQEAARDSEKKLLVSLGAQTKQLEQTKVSLEEAKLEIASLKDNKKSSEAFSALSSNPSQPARNLRRRGIMSFSFADPGEVETWSLQRELKLAVEAEEKCKKAMDDLAIALKEQTTDARDAKAKLSLAQSELTNARTEMENSKALLKNTEEKLQVALEEAAQLKFESDELAAASKEKERGLVDCIKMFEGDLIKAKEENNKLIESQRVIRDENSRLREMLKHAVCEANVAKESLEIARAENSQLKEDISEKENTLQSIIQDYESLKVSESAAQSSIGELKDMIDAMFSSESTKTSAEASPRDTKGNEVYYDHERTQLEDIRNPALHKKRTVLRKFADIMKKRNSQSAI

SEQ ID NO: 130958 - protein, 106 aa, Oryza sativa
  Clone ID: PAT_MRT4530_33070C.1.pep
MGDQEDPWPGSMAYIALADNEVDQTNWSAAEVATATVKADGGHRRGVVARYLVAERSIGGMVASREPAIMVRRSPWKPPSPIGHVPVAWEKGKPPCLGVGCSQIKG

SEQ ID NO: 130959 - protein, 90 aa, Oryza sativa
  Clone ID: PAT_MRT4530_33071C.1.pep
LLNFLRVGTMHLKRYPTVKFFIAAPLTFLYIVKALFGLIKQLIGYDIIAFWHPSTVFIFGKSTRETMAKIIEAFGFGVIWFERRLFFDCE

SEQ ID NO: 130960 - protein, 149 aa, Oryza sativa
  unsure (1)..(149): unsure at all Xaa locations
  Clone ID: PAT_MRT4530_33072C.1.pep
MASSSNLLAMAIAVAAVLLAGNGNTGHAARRLADTTEAPAPAPAAAIPAVPAMPKPTIPTIVPAVTLPPIPAVPKVTLPAMPAXAVTVPAVTMLPMPAMPAVPAATLPPMPAVPKVTLPPMPSMPAVPKVTLPPMPSVPMPFLAPPPSA

SEQ ID NO: 130961 - protein, 59 aa, Oryza sativa
  Clone ID: PAT_MRT4530_33073C.1.pep
LEIKTHLRLLWVIFEAWYLPRSPLLVVSAYIFQVNVSDVTWFLLLKVKRNREWSSFATV

SEQ ID NO: 130962 - protein, 109 aa, Oryza sativa
  Clone ID: PAT_MRT4530_33074C.1.pep
STPRDRSPQIPAAAAAAANRRMPAAVAAAGAAAASGTALLAYILLACCRPQPAPEAGEEEEDGVRGCCPPARKRGGGRRLMAVSMLCLRATDYVAAHHLGGLMLNLCLA

SEQ ID NO: 130963 - protein, 144 aa, Oryza sativa
  unsure (1)..(144): unsure at all Xaa locations
  Clone ID: PAT_MRT4530_33075C.1.pep
MNTNFIIYASYIYYNASLSGRCNGVGIMIVYTMTLCHDDDIIVVFGNLSVVFKLLDIIIXDYMLWKRSGPLMVTAQYGYSSARVYSPKLISWGGYSSVFSSGWMVMTDCRKELSNQGWLLEAPGEHRKEDTDSRSKFYVTRDHP

SEQ ID NO: 130964 - protein, 74 aa, Oryza sativa
  Clone ID: PAT_MRT4530_33076C.1.pep
MPKSRFLLTIILLILLCNASAGQTIVMKNDIAATPKLIKGHSRKILTDIQDYDYGGANSKHDPRRRPGIGGRSR

SEQ ID NO: 130965 - protein, 82 aa, Oryza sativa
  Clone ID: PAT_MRT4530_33077C.1.pep
MVDIKSTNVDPDNIVPITLDKLTAEQKVDLEQMMNQMQNKFLHSFVLTRSGTVIQRYKIAMLSDDDPETSSPKDAKPKNEKP

SEQ ID NO: 130966 - protein, 51 aa, Oryza sativa
  Clone ID: PAT_MRT4530_33078C.1.pep
APNSVKLAVGPWNKGPLAGVTASHWRRLHRCWARFRRRPAKSPSLLPYWAI

SEQ ID NO: 130967 - protein, 78 aa, Oryza sativa
  unsure (1)..(78): unsure at all Xaa locations
  Clone ID: PAT_MRT4530_33079C.1.pep
RRLXPLIXRRQRXRXXXRRRPEXDGEXEGEGEGRGWERHGRRRRQRRRGKSWRVLGFERRRISCILVELLQCLIRERN

SEQ ID NO: 130968 - protein, 136 aa, Oryza sativa
  unsure (1)..(136): unsure at all Xaa locations
  Clone ID: PAT_MRT4530_3307C.1.pep
PVRPACNARSDRRSPRSDRPALCRFRFQAVYLDIRVYFMIMTSRWTLYRESIKSSSTLRVLRFVFTEFRRSNKRSTGGQTGGIPVVSPAAATGATDFGGQTGGSTLVRPAASTRSDRKINLGQTXSVDFEGNFYFR

SEQ ID NO: 130969 - protein, 107 aa, Oryza sativa
  Clone ID: PAT_MRT4530_33080C.1.pep
EESFPVVMGPSTPLTNNRALGNGPPGSMEKKRHRGLWALYPSVVAKQARGIGPRSISIKPIWGGSRTRLALGSIYFYQEGVHPGWELSGEGHRRLDNQGGNPGPSKR

SEQ ID NO: 130970 - protein, 56 aa, Oryza sativa
  unsure (1)..(56): unsure at all Xaa locations
  Clone ID: PAT_MRT4530_33081C.1.pep
VNDPHGGTRVSCVASAGRDFRISAAVAAIAPATEADPTPGPTKWXVSGNPRALQSG

SEQ ID NO: 130971 - protein, 61 aa, Oryza sativa
  Clone ID: PAT_MRT4530_33082C.1.pep
MSPAACAKIKLDSTSYVLTFYLKDRVLNAWSAEILGWRPVKRCEDCLQYGHRTKDWKNNME

SEQ ID NO: 130972 - protein, 133 aa, Oryza sativa
  Clone ID: PAT_MRT4530_33083C.1.pep
MAAAVSACSSRCLRLILGRPPRARLASVVEVVEKRRRGGLVAVAATEGSAKSSGEADEQVPSWARPGSDEPPPWAREGGGGGGQQEPGAVELPFFAYLLASAITAIAAGFLWFKAVQTANKEAEEQDRRDGFS

SEQ ID NO: 130973 - protein, 947 aa, Oryza sativa
  Clone ID: PAT_MRT4530_33084C.1.pep
MEEVENTSKRKAPESEHAAAVSGEHPPPPPPPDAAAKRRNLSRSCIHEVAVPKGYAAAKDEAVHGTLSSPAFHGEMAKAYPFQLDPFQSVSIACLERNESVLVSAHTSAGKTAIAEYAIAMSFRDKQRVIYTSPLKALSNQKYRELSQEFSDVGLMTGDVTLQPNATCLVMTTEILRAMLYRGSEVIKEVAWVIFDEIHYMKDRERGVVWEESIIFLPPAIKMVFLSATMSNATEFAEWICNLHKQPCHVVYTDFRPTPLQHYVFPIGGSGLYLVVDEDGQFREDNFLKLQDTFTKQSNQVDGRKGGGPKASGRIAKGGSASGNSDIYRIVKMIMERKFQPVIIFSFSRRECEHHAMSMSKLDFNTDEEKDNIEQVFSSAILCLSEEDRGLPAIELMLPLLKRGIAVHHSGLLPLIKELVELLFQEGLVKALFATETFAMGLNMPAKTVVFTSVKKWDGDTNRYIASGEYIQMSGRAGRRGKDIRGICVIMIDEKALPEVVQKITSLENEATLLDSSGETDLAEYHKLGLDISELEKKIMSEMIRPERALLYLVPGRLVKVRDGSTDWGWGVVVNVVKKPPQSGTLPPALSASRGNNYIVDTLLHCSSSSNENGSRSKPLPPRPGEKGEMHVVPVPLPLLSGLSSVRINIPPDLRPPEARQNILFAVQELGKRYPQGLPKLDPIKDMGLQEPELVELVHKLDDLEQKLCSHPLHKSDQSEQQLSWYQRKAELNHEIQMLKSKMRDSQLQKFRDELRNRSRVLKMLGHIDADGVLQLKGRAACLIDTGDELLITELMFNGTFNDLDHHQVASLASCFIPCEKSSEQIRLRSELSTPMMQLQEAARKIAEVQKECKLEVNVEEYVESTCRPYLMDVIYCWSKGATFGEVIEMTDIFEGSIIRLARRLDEFLNQLKAAAQAVGEVNLENKFGAASDSLRRGIMFANSLYL

SEQ ID NO: 130974 - protein, 172 aa, Oryza sativa
  Clone ID: PAT_MRT4530_33085C.1.pep
MAAAVSACSSRCLRLILGRPPRARLASVVEVVEKRRRGGLVAVAATEGSAKSSGEADEQVPSWARPGSDEPPPWAREGGGGGGQQEPGAVELPFFAYLLASAITAIAAIGSIFEYANQRPVFGVVSPDSALYAPLLGFFVFTGIPTSGFLWFKAVQTANKEAEEQDRRDGFS

SEQ ID NO: 130975 - protein, 343 aa, Oryza sativa
  Clone ID: PAT_MRT4530_33086C.1.pep
MQTLLRSWMQAFSSNFGDLLFFSGVGNTLGSGRGPYGPAVGGEGGGGAAKAAGSEAGGGGKAERVASPVPLTPFGQSARRAAAQWGAGGGGSSSGEMEHARVAAAAECAKRRGMGGKNLASQVVAAADPASQVVGGGGSGLPDIAATGFGRPLASGSPRRRRPFPAAAVAPDLARGRSRPPLGRGGREKGSLLPDSSPATAAGCHPFPAAAATPISGKRAQPAAARERWEGEGELFAGLIACHRSRPTLPRRYRRPLPQPAAAPSPPLPSPPYLARGRSRPQPFSVCHNRPPLGRGGREKARREKGGSGGRRKERAVVEEGGRRHGGALHGPPPKIGFSVADT

SEQ ID NO: 130976 - protein, 79 aa, Oryza sativa
  unsure (1)..(79): unsure at all Xaa locations
  Clone ID: PAT_MRT4530_33087C.1.pep
MTQSEIGSCAPAHKDLXLPKKLFLADTPTTAKMASNGTGGGGXGYSVDLTPKAQHPAVCARVAFMSPLSGNKDHMLSNS

SEQ ID NO: 130977 - protein, 167 aa, Oryza sativa
  Clone ID: PAT_MRT4530_33088C.1.pep
SRRGAAPVGVSGRSGLPGRRGGGSGLPGRRRRRIRPPRHRGDRIRPSPKLAAAHGGGGDGQLAGSGGGRGRRRAPRRDPSPHQPAAGPRPFPAAIVALCRSQPPPLPRRCCCPRSGKRAQPAAAGERWEGEGELAAGLVARHRSRLPSLPRRCRHPHIWQEGAAGRC

SEQ ID NO: 130978 - protein, 131 aa, Oryza sativa
  unsure (1)..(131): unsure at all Xaa locations
  Clone ID: PAT_MRT4530_33089C.1.pep
FFFFFFWAGKPSFGIFIGVRHFRGQHFSNITTRQHCARACIHISRFTRLHQLHFYITITTRAIPFPALTNPVHNVANTYLSRGTSVASHSQRGHSAGXHVTHTVVAWVFIYEGVAHQIXGVSKTLSPSGAA

SEQ ID NO: 130979 - protein, 81 aa, Oryza sativa
  unsure (1)..(81): unsure at all Xaa locations
  Clone ID: PAT_MRT4530_3308C.1.pep
ISVGCFLTSIIYRQLQVXSLFFQLMFRTKLFTYWNDFLFRWHISISLPPLSNRCHXGMYAAKLYKLSINMQKVQTFVMQKL

SEQ ID NO: 130980 - protein, 676 aa, Oryza sativa
  Clone ID: PAT_MRT4530_33090C.1.pep
MPPGEDADTASSCSGADEGEAQAQAQGNEQQRAERVLPNGDLYTGQWRGGSPHGAGKYLWADGCMYEGEWRRGKATGRGRFSWPSGATYEGEFLDGFMHGAGAYVGAAGDTYRGAWAKNLEHGAGEKRYANGDCYDGEWRAGLPEGCGRYAWRDGTEYAGGWRAGLIHGRGALVWANGNRYDGGWEGGRPRGQGTFRWSDGSLYVGFWGREAPGGAVHQKGVYYPSPAAAGESRDPREVFARELPECVRSSTEGQSALPSLRSLRWLARSISGRGSSSSGRSIGSVVGVPHLWGSDGEVKPDIADDWRRRSSVREGRGPPPPSLAAPPPPPHVDKGAAPPRVMKRQGVTIAKGHKNYELMLNLQLGIRTLRKLFKVDPADYMLSLCGDDALRELSSPGKSGSFFYLTNDDRYMIKTMKKSEMLLKMLPAYYNHVRAFEDTLVTKFFGLHCVKLAGANQKKVRFVIMGNLFCSDHTIHRRFDLKGSSLGRTTNKPLAEIDEYTTLKDLDLNFIFRLQKQWFQEFQRQVDKDCEFLEHEKIMDYSLLVGVHFRGAVDIDGDIPASPRLSRWDRDHFLSDPNRWSKIKLGANMLSRAELTIRKNDTDVVGQPTGQYCDVILYFGIIDILQDYDIGKKIEHAYKSFQYDSTSISAVDPRQYSRRFRDFIYNAFQEDRAES

SEQ ID NO: 130981 - protein, 99 aa, Oryza sativa
  unsure (1)..(99): unsure at all Xaa locations
  Clone ID: PAT_MRT4530_33091C.1.pep
MAILXITVNMQCCRCKEKIDKILNCLXCKHCIEKIEYEGEKVIVRGSFCAEELRTCIWRKAGCKIIVSIVIVEVWPPPPPGNRQLSRSTSPTRPSSWWE

SEQ ID NO: 130982 - protein, 88 aa, Oryza sativa
  Clone ID: PAT_MRT4530_33092C.1.pep
SRWGRTVAAGESKNCEELNPNSAAIGVYLAKNKAGVFGSLFLAEKLHTRTRSSGFFWPFGRGGTRTWIQQASKCQYPHCALLFNLESI

SEQ ID NO: 130983 - protein, 797 aa, Oryza sativa
  Clone ID: PAT_MRT4530_33093C.1.pep
MKPVERAKLVRSLRQESRRLRLLVLVIGFFLVTLTFVVISKPDALLFNRTPCRRRFFIIFFFFFFLDPWIDGNTKRLTRFFEFAVNGRLSVDHAPRSLLIRQRIHADSRRSADTFPAAEDPKVVDEDEGAEDATAKGTSEEEKRLLSSEPEQGKNEEAATASEVLGGGGEEDNKNGEEEGHTQHSKVTLPTVSNYTIRDAEDTDNGKQEDGKPNEKYEFEMDADKGDNVEPETDNEEWNKKPLCDFSNFRANVCEMRGNIRIHPNASSVMYMEPASSKREEIWKVKPYPRKGDELCLGHITEITVKSSKVAPECSKYHNVPAVVFALTGYTGNLFHDFTDVLVPLFTTASEFNGEVQFLITDMAIWWTRKYKVVFDKLSKYPLIDFNNDDQVHCFKHAIVGLHAYMEFTIDSSKAPHNYSMVDFNRFMRRTYSLPRDFVTALGEIPKAKPRLLIISRQRTRMFLNLNEIVAMAEEIGYEVVVEEANVSSDLSHFGKVVNSVDVMMGVHGAGLTNCVFLPQNATLIQIVPWGGLDWISRIDFGNPAEQMGLRYKQYSIGVHESSLTDQYPLDHEIFTNPLSFHKHGFEFIRQTFMDKQNVKLACLQVDSRGSPEDEPRADALQVGDPHLRARGASRERDDDVVVDRGEEDDEGDREHRQRRRRHLEPPDAGVHRRRLLHGESGQLRQAAVEHDGGEEDREHHEHDLDVLHLLHRARQRPAPRLTLHRPVQEHQLLRRLGSHLGGAVGDAADVAGLAVLLHVRAPRGAGRAVDDSAVAGALRARRRKRARRRGPPWRWW

SEQ ID NO: 130984 - protein, 87 aa, Oryza sativa
  Clone ID: PAT_MRT4530_33094C.1.pep
AGSPAGPAPVLLSRPTHPFFQATQAAFPRGVFLELEFLHPKSLTWKDYRVMPVQNPRFRSRYGEVFPPYIRTTTLLVLFVAPGFISW

SEQ ID NO: 130985 - protein, 159 aa, Oryza sativa
  Clone ID: PAT_MRT4530_33095C.1.pep
QHEAEERTTAQNTRSAKKERHGRDGAAPELLAWRASPSRPCRRVHPRPPPPPPDPLATAADATTAAGGRREAAEGAAAAGSTLSKHHHRRIHPWLPPKLPPPPDLPLEGGERGWRELPTTTPPPPPDPPTTATNPLEPPSIGRRSGATGRRRRPSVART

SEQ ID NO: 130986 - protein, 63 aa, Oryza sativa
  unsure (1)..(63): unsure at all Xaa locations
  Clone ID: PAT_MRT4530_33096C.1.pep
LRLQLRSTTLLKRANNSKAEYNHRTQXATPTMQTCKGXQGRFVAICLKEVVKHFIEQNSKTVE

SEQ ID NO: 130987 - protein, 58 aa, Oryza sativa
  Clone ID: PAT_MRT4530_33097C.1.pep
VGEQRNWKSSSLGISSWQHIHRVTDHEIFWQHVAKICNFDSMCKDHDILFSPRAEFLQ

SEQ ID NO: 130988 - protein, 61 aa, Oryza sativa
  Clone ID: PAT_MRT4530_33098C.1.pep
MADQDTTRPQQPGAADRARIRHIRVWARVPLQEVNMQVKISTQNTAYGYHPVHRPTNRAQG

SEQ ID NO: 130989 - protein, 391 aa, Oryza sativa
  Clone ID: PAT_MRT4530_33099C.1.pep
MERGAAAAGALSCTFRSPSPSPTSPAAPHWRPLLGFRSRSRSRGRGMPALQVASSLLSLVPFSLSSLSRYCSQSKLLGTNKGQNRCSLATFSSFGQSGISLNNEDLVKDKLLIDCGEDQDCVIDGIVALGKFDALHIGHRELAMYASKAGTPFLLSFVGIAEVLGWEYRPPIVAQCDRKRVLTSWAPYCKNVVPIEYQVEFSKVRYLTPRQFVERLSRDLKIQGVVAGENYRFGYRASGDAAELVKLCEEFGLSAFIVRSVMDTARSYNGVTTSVNSSDKGQVSSSRVRHALAMGDMEYVSELLGRKHRLVLTVKENHLQERKRIMLPKSCMLNMPPADGLYENCDLLNGGHLGLCRVIINSETIVIEMKDENSLLPNTIQENQQLGIEFG

SEQ ID NO: 130990 - protein, 272 aa, Oryza sativa
  Clone ID: PAT_MRT4530_3309C.1.pep
MQAALLLPARPSAAAPPTLLRRGAASASSARAPTPLPAGRLSGGVLSAVRRLTVAAAGSSSSSSGPLYPTPPPTEQDIERAKFEQVVKRLGKTARYFKNLGTLGFWSQLVSTVVSAGILSFSTVITGKVTAPFTFYATAAGIAAGFISVFWSFGYIRLSERLRKTASEPAKAPPRADVIRSLKNGIVLNMLGMGAAVLGMQATVGALVAKALTTSAVPYYQATSPGQSPVLALDVFLVQASANIILSHFLGLASSLELLRSVAIPPAEAAAA

SEQ ID NO: 130991 - protein, 70 aa, Oryza sativa
  Clone ID: PAT_MRT4530_330C.1.pep
MAAREPVFAGTNDTMELSSDAAPSPANLSRTATAICSTPAFAREMVAGGVAGVVAKTAVAPLERVNLMRQ

SEQ ID NO: 130992 - protein, 46 aa, Oryza sativa
  unsure (1)..(46): unsure at all Xaa locations
  Clone ID: PAT_MRT4530_33100C.1.pep
LFAXASSALLDTVSCLHLMWHGHSNPCCAKNPPIVTRTTLTTPPFS

SEQ ID NO: 130993 - protein, 126 aa, Oryza sativa
  Clone ID: PAT_MRT4530_33101C.1.pep
MALQCSGAGIDKGRRRNAARRRREAARGDQATARSGAQLVVVADASRCIFGMAVGRLRVKASLFGSTTATLAGAAFPWCIVAESLLLPPSNGFLQVKTTSCPRTGDDGGILGVVSSMEASFEVLFP

SEQ ID NO: 130994 - protein, 266 aa, Oryza sativa
  unsure (1)..(266): unsure at all Xaa locations
  Clone ID: PAT_MRT4530_33102C.1.pep
TPRPPPTPPMTPSATCLNPRPPPPPPPPPPPPPSRQCSSLRCCSPPPPPPPPXPSSSPSSSPGTRTPSPPPPPCPPRPSPPPPPACSRSPIWTSSPPPPPTPWTRGAAAPTAPSSTRAPARVSRPSPASASSPPPPPPLPPPPPPPPPPPSPNPTTPPPPHPPGERHGRIPPELRPPQRRSPXPEKKPPAPPPPSPPPLPPPPPPPPPSCPGATTRRTASSPTTSAASSRPTTPPLPKSKPXALPAPPSPDPDQLTTNSKGTVLND

SEQ ID NO: 130995 - protein, 186 aa, Oryza sativa
  Clone ID: PAT_MRT4530_33103C.1.pep
PGTGVSEADERSWEQRTGGGSSLLPNVQRAGIDGDGAEVDGLCKDEGPPPALEDRRPRKRGRKPANGREEPLNHVEAERQRREKLNQRFYALRAVVPNISKMDKASLLGDAITYITDLQKKLKEMEDEVLVRVMSPMESHPVRAIFQAFEEAEVHAGESKITSNNGTAVHSFIIKCPGAEQQTREK

SEQ ID NO: 130996 - protein, 83 aa, Oryza sativa
  unsure (1)..(83): unsure at all Xaa locations
  Clone ID: PAT_MRT4530_33104C.1.pep
MLPAGSLTDKQLHFFDANGYLVLGSFSSAEDVKAMRDRMAVLIDGFDGAGDVFFTKDHRQVKNDFXFQSAENIXFFFEEKHLR

SEQ ID NO: 130997 - protein, 610 aa, Oryza sativa
  Clone ID: PAT_MRT4530_33105C.1.pep
MVMKMEADEDGANGGTGGTWTDEDRALTASVLGTDAFAYLTKGGGAISEGLVAASLPVDLQNRLQELVESDRPGAGWNYAIFWQLSRTKSGDLVLGWGDGSCREPHDGEMGPAASAGSDEAKQRMRKRVLQRLHSAFGGVDEEDYAPGIDQVTDTEMFFLASMYFAFPRRAGGPGQVFAAGVPLWIPNTERNVFPANYCYRGYLANAAGFRTIVLVPFETGVLELGSMQQVAESSDTLQTIRSVFAGAIGNKAGVQRHEGSGPTDKSPGLAKIFGKDLNLGRPSAGPGTGVSEADERSWEQRTGGGSSLLPNVQRAPPLQKLPQLQKSHQLVKPQQLVSQQQLQPQAPRQIDFSAGTSSKPGVLTKKPAGIDGDGAEVDGLCKDEGPPPALEDRRPRKRGRKPANGREEPLNHVEAERQRREKLNQRFYALRAVVPNISKMDKASLLGDAITYITDLQKKLKEMEVERERLIESGMIDPRDRTPRPEVDIQVVQDEVLVRVMSPMESHPVRAIFQAFEEAEVHAGESKITSNNGTAVHSFIIKCPGAEQQTREKGRISWGVGATGRGSFTSFAGCRQAASSRLDGHPSTHLSALLIEEVCRQRKKAQILT

SEQ ID NO: 130998 - protein, 136 aa, Oryza sativa
  Clone ID: PAT_MRT4530_33106C.1.pep
MTFKRRNGGRNKHGRGHVKYIRCSNCAKCCPKDKAIKRFQVRNIVEQAAIRDVQEACVHDGYVLPKLYAKVHHCVSCAIHAHIVRVRSRENRRDRRPPERFRRREDRPTGPRPGGAGGPGAPAAAGPGGPPNVART

SEQ ID NO: 130999 - protein, 97 aa, Oryza sativa
  unsure (1)..(97): unsure at all Xaa locations
  Clone ID: PAT_MRT4530_33107C.1.pep
GAYTFFLRLRVSSDLETXCLDLLIAQGCRAILKSIEFFVFFLHKRKEKKSIEFVFSAKCVRQLAMPNISVTAYTEQQLGVDCLFHMLIMPRFWQGLY

SEQ ID NO: 131000 - protein, 68 aa, Oryza sativa
  Clone ID: PAT_MRT4530_33108C.1.pep
CWPFVTYSIKLLLCSLLLSIHMHAKWSLHMLHLKSPCHLVKSKNFTSESHGNKLVLVSDNDTFSKTYF

SEQ ID NO: 131001 - protein, 304 aa, Oryza sativa
  unsure (1)..(304): unsure at all Xaa locations
  Clone ID: PAT_MRT4530_33109C.1.pep
HEALLLQRRWRGSARGKSAGGGGGLRLRLEDLTSRRPASPSALPCGLHRXSIPQKIATPASRITIMGEPLRTLQNDQSEAKDKGNKIDIKYELTSAILSLKHQQASGRLKMPSRLPARYPHNVGHCAELIMNLGIGEDVHCLNVMRSCNHENILHPGIIKEVIIGDSSFNVAWMERYTRVLSEYVQLLLSTARFHAPVGATLLLPSPHLQMVLRGIFDGMEQLFLNGYYHGNFSLENTYCFLECSTPVVKLTNFRKKVPEQAMTWGVEEVRSDRYLSISCIECEICSFVACSLDQVVGSSLFCV

SEQ ID NO: 131002 - protein, 65 aa, Oryza sativa
  unsure (1)..(65): unsure at all Xaa locations
  Clone ID: PAT_MRT4530_3310C.1.pep
WCRWRGRRPAWERGRGGRWGEGAAPXRGGEGKRRRWGDGEGERRRRVRGRARHCNVGEYLHRLLC

SEQ ID NO: 131003 - protein, 756 aa, Oryza sativa
  unsure (1)..(756): unsure at all Xaa locations
  Clone ID: PAT_MRT4530_33110C.1.pep
MHPFCCVPPVPVSPAASAAAAATPAASSAVAGAPAVMPPPPPPLPPPPPRSNSAPPERRALRWAAGGGSGGGNSPPEGVKLNEIVGGGISGILYKWVNYGRGWRPRWFALHDGVLSYYKIHGPDRIVLSRETERGAKVIGEDSLRRLSRPSTSSSSSAHSNGHHLPRKPIGEIHLKVSSVRESRSDDRRFSIFSGTKRLHLRAETREDRAAWVEALQATKEMFPRMSTSEMVGPGDTAAAVAVSTERLRQRLQQEGVSEAAIADSERIVRTEFEVLHKQLMLLKQKQTLLLDTLRQLETEKVDLENTLVDESQRQSKEYGSTSRSKNEKYSEGSASESDDXYNEPQDPAEDETDDDENIYFDTRDFLSSSSFKSSGSDFQRSEAGSDDEDDYPMDGIDTSVTNRXRLRPDQRCLENGEYERANAEKLRLEQRQRQARKMQESGWKPRWFAKDKATDTYRYLGGYWESREKGSWEGXLHAHKFRVLYHRPSVYTRHVKCSEAQKNEIQQKYIKNMVVTLKQQGTQKKARQCLALPHRRMKGARAKENGMEADLLSQIPHTAIRCRSRLQLLQLTTLESLVVAVDSEVQGVVQDRSGRTVATLFGKWDESMHYVMGDCFGKGKGSENFSEAHLLWKRSKPPKFPTRYNFTRFAITLNELTAGLKEKLPPTDSRLRPDQRCLENGEYERANAEKLRLEQRQRQARKMQESGWKPRWFAKDKATDTYRYLGGYWESREKGSWEGCPDIFGQVPNDLMITD

SEQ ID NO: 131004 - protein, 102 aa, Oryza sativa
  Clone ID: PAT_MRT4530_33111C.1.pep
MGDKVEAAGVHDPRVYVNTVACDESTTYPHAESATRRPPVRRASMRRIRALSLPPSRRVGVDTVDAVSNEPGARSDGSTRADGRTYGRAGFYKILDPRIGSF

SEQ ID NO: 131005 - protein, 204 aa, Oryza sativa
  unsure (1)..(204): unsure at all Xaa locations
  Clone ID: PAT_MRT4530_33112C.1.pep
GQTERINQYLEIYLQSTLHETPRKWPSWFPIAEFWYNTSFHTTLGSSPHKALFGTEPSXSADNEATDMLTTRAAYSEFLKNQLAREHLRMKNIADKSRYLLEFPVGDKEYLKLQPYTESPVKLVKKGNAARLQVLIKYQVDLISYFSSKENYDVLVTRFPAASAWGQAESHGSVAAILEAMGQQGGRKHHGAEQELEHQLKYLL

SEQ ID NO: 131006 - protein, 114 aa, Oryza sativa
  Clone ID: PAT_MRT4530_33113C.1.pep
MRRLQQPDQELVRLHFLLGMYAFGKNIQGQEQALGLLVKSPMTGIAAPIKKATTPPRALAITRAKSFFPGSGICRPVPVMMPEVVGGCLVRIYYAPLRYQGPPFPLAWGLSGAP

SEQ ID NO: 131007 - protein, 65 aa, Oryza sativa
  unsure (1)..(65): unsure at all Xaa locations
  Clone ID: PAT_MRT4530_33114C.1.pep
AVSEVFSRIAHKFALMYAKRGFVPWSFGEEMEKGQFSKAREDLAALQKYYXEVGPQGTTLDNVDG

SEQ ID NO: 131008 - protein, 96 aa, Oryza sativa
  Clone ID: PAT_MRT4530_33115C.1.pep
GGSRRTEARRTRLLLRAKANSLAQLASTPATRAPSPRRACSSRTTSTNPIQSNQDSEPLLLLLRIQLCYPVVPRGTVASVRHITVEIDDKVKTIRH

SEQ ID NO: 131009 - protein, 63 aa, Oryza sativa
  Clone ID: PAT_MRT4530_33116C.1.pep
FFFFISTDEKLKLKKKGATLKRQTSLEIQATFGEFANNARLQILPTVCKGYALLEKKPRYRFL

SEQ ID NO: 131010 - protein, 157 aa, Oryza sativa
  Clone ID: PAT_MRT4530_33117C.1.pep
PGRPSVRPTCRLQLFPTTPNCRNPSHPSPQRRRSTSPHDRSPIHSRRSLSRDIEKGTNGIPSSNDVDVLQRNKERSHDDNRNDTEVSGHLSSDFEHRKLTKSLNSPNKPERNSTRDSSLKGTDKHLPSQVRTDSSGEEEGSRARENARKSKFITQKN

SEQ ID NO: 131011 - protein, 88 aa, Oryza sativa
  Clone ID: PAT_MRT4530_33118C.1.pep
MAWSSSSSATVRVVVVAVLLMQCCNAIMAARLLEGDLFGSSSWLQGQVGAAGELILQVLDNGGSPPGGNDCHQGPNPGGSGSGKCWTP

SEQ ID NO: 131012 - protein, 240 aa, Oryza sativa
  unsure (1)..(240): unsure at all Xaa locations
  Clone ID: PAT_MRT4530_33119C.1.pep
DENFLIVLDDVWNREAYTQIADAFPNFQASRIIITTRQGDVATLAQSARQLKLNPLEHTDALELFCRRAFYRNCKCPQNLEKLTNDIVVRCQGLPLAIVSIGGLLSSLPPENQVXGDLRNCFLYCSLFPEDHELSRETVVRLWVAEGFAVQNEENTPEEVXFKMHDLVRDLALSIAKRXKFGSANNYDTMERMDXEXVRRLSSYGWKGKPVLQVKFMASXRPLWALGMKTXSRHMLSSIF

SEQ ID NO: 131013 - protein, 102 aa, Oryza sativa
  unsure (1)..(102): unsure at all Xaa locations
  Clone ID: PAT_MRT4530_3311C.1.pep
KXXPTKMXPQAXXVHTWALLXPYSXYRXGNLCQWETGFSWXPLXSALPFTIXXESVLXSQFHVKXWGQXKXXELYVSXGVXSKGGVXRXQIVGSRXGXRXFY

SEQ ID NO: 131014 - protein, 901 aa, Oryza sativa
  Clone ID: PAT_MRT4530_33120C.1.pep
MEAVILAVSKIGSVLVEEATKAAITKLSEKATNLKELPSKVEEIEDELKTMNNVIKQMSTTNLTDEVVKGWIAEVRGLAHRVQDIMDKYSYHALKLEEENSVKKLFTTPNYVTVFSEIAEEISKIEKKIENVAMRKKRWQQQSQHTPNPLADIERKRSQDCLLAPDDLVGIEDNRKLLTDWLYSKEQDNTIITVSGMGGLGKTTLVNNVYEREKNNFEVSTWIVVSQSYDVVDLLRKLLRKIVPDDQTQLLDLDAHDLKIRIKEKLKDENFLIVLDDVWNREAYTQIADAFPNFQASRIIITTRQGDVATLAQSARQLKLNPLEHTDALELFCRRAFYRNCKCPQNLEKLTNDIVVRCQGLPLAIVSIGGLLSSLPPENQVWNETYKQLRSELTKNNNVQAILNMSYHDLPGDLRNCFLYCSLFPEDHELSRETVVRLWVAEGFAVQNEENTPEEVAEKYLRELIQRNMLEVLGNDELGRVSTFKMHDLVRDLALSIAKEEKFGSANNYDTMERMDKEVRRLSSYGWKGKPVLQVKFMRLRTLVALGMKTPSRHMLSSILSESNYLTVLELQDSEITEVPASIGELFNLRYIGLQRTRVKSLPESIGKLSSLLTLNIKQTKIQKLPQSIVKIKKLRHLLADRYEDEKQSAFRYFIGMQAPKELSNLEELQTLETVEASKELAEQLMKLMQLRSVWIDNIRTDDCANLFATLSKMPLLSSLLLSASHENETLCLEALKPESEELHRLIVRGCWAARTLEYPIFRDHGKNIKYLAISWCRLQEDPLLLLAPYVPNLVFLSLNRVNSASTLVLSADCFPQLKTLVLKRMPDVNHLEIIGGALQHIEGLYVVSLPKLDNVPQGIESLRYLKKLWLLGLHKNFRSQWQKNGMHQKMQHVPELHVKD

SEQ ID NO: 131015 - protein, 125 aa, Oryza sativa
  Clone ID: PAT_MRT4530_33121C.1.pep
LQRSATVEARVAPSRTSGAPAATSLLFLLSPSSLSLSLSLSHVGASAGPGRAAPAVGVHDDARGPAQVERRRRLRCSLRRRLESYSRIFFRAMALCLSLSLSLSLSLPTPPPLPEVSRTSSFDRA

SEQ ID NO: 131016 - protein, 134 aa, Oryza sativa
  Clone ID: PAT_MRT4530_33122C.1.pep
MVPKAEEFSSPYPHQVVVLTRPPARQSCLGLSRFMGRGPLNEPECLIVSAHLQMANFVLSGMVVDSSEPSTVYDNVEIRMVKERKYEVFSSSSSNNMQQTCPSNNKTILAGVHSLTRDHSSSKVPSVNIAGTLL

SEQ ID NO: 131017 - protein, 114 aa, Oryza sativa
  Clone ID: PAT_MRT4530_33123C.1.pep
KKNHPVFIPRGAPGTPTPVAPQGDPLAFGPRGPPRGSVVQSSGPFPPNPGFFFKCLGPFPPSLGVPQPYFVPMVVPPPPNFPLGISFQPWNSSFLEIFPFSKGSPLNKSCFFFC

SEQ ID NO: 131018 - protein, 343 aa, Oryza sativa
  Clone ID: PAT_MRT4530_33124C.1.pep
MAAPALLSAPPPPPPMDEDASAGAHHAFPGPAPPPSPEGAPPPPRRRRSAVRVTSEFDSDARLFSHRLSCRVMDGLAKLRVRVHHGVGGAGAAAVEPPPPEVALLARNFSVAVDTVARSAMLRGAADLAGSLRLSAKHDTKEQKGEVAVRANLGDSPCKIELSSVVPPDGLPRTTFIFPNGEVSVKQKYLDEGDRILSVNGIVRSHVLNGVCTALYSDNEMNIKYRYKDEELSFIPSLSLPSNSLSFAFKRQFTPSDKLSYRYQFDTNYWSFIYKHKASKHVKWKAGYESDQRLGWASLWVGDAGGKTKEVPMKAKVQLTLKVPQDNVKNSAIMFNVKKRWDF

SEQ ID NO: 131019 - protein, 684 aa, Oryza sativa
  Clone ID: PAT_MRT4530_33125C.1.pep
MWAPPGPHPYEVLDMEAPHKRMRVGDPYGDGMPPPLPPPPPPGMVPVEGDRLLGLIRDHGRPPFPPPPGMLHGEPYPPPDRFGYGGGRGYPPPPNYDNPYAHEGSFPDYEHAGRFPPAHERLAALGSSFVPGGPQEGYFNHDHRYNRFQRSESPVAPPLPPPARYPEARSRYDSHGWHPEADVPPPPPPLEPPVPSSSDYHAKPPLQAVKSSLFPIHSGSPAATARPPSSHTLHQAHLMPNANRYNGPIHNEVPGLAYQPHLEQHLGGGRQTQAQHSINNAKISVISACDLFKQPLRGSRPDHIVIILRGLPGSGKSYLAKALRDLEVENGGNAPRIHSMDDYFMIEVEKKVEDNEGSKSSSTSKGRKQLTKKVIEYCYEPEMEETYRSSMLNAFKKTLDEGNFTFVIVDDRNLRVADFAQFWASAKKSGYEVYLLEAPYKDPTGCAARNVHGFTVDDVNKMAADWEEAPPLYLRLDIHSLFNDDNLREHSIQEVDMETEDTDGASNTATSTEAENTQKAVSESLDNGHDQDISGAGKKWDSSEEDDLDGYKELGQSKWSKDFDEDTEKSDHAEGSTHALSGLAQTYSTHRKTVTWGDRLEKGGFSIGAAKRRLTSSLIIGPGSGYNLVSNPLAEDNSKQAKGVINTDTKKRFSEQLRDEGESFRAVFDKRRQRVGVFGNGDGE

SEQ ID NO: 131020 - protein, 117 aa, Oryza sativa
  Clone ID: PAT_MRT4530_33126C.1.pep
MSFCLLDGGGEGEEEEPKFYLDKGTPMGINTNPLGGEGTQNNRSRHKINIQANIRQDKTPDIDFRDKPTKTPYGTYGNQREESSAISDLAGYGFEEEDYHVADYMMILQSTMSTTVR

SEQ ID NO: 131021 - protein, 66 aa, Oryza sativa
  Clone ID: PAT_MRT4530_33127C.1.pep
LDIAFTRYMMTKGNKQETQGGPLGRCSIHMYHHISSIRFQYLLPGPLGRIYHHGNASLISIGICHG

SEQ ID NO: 131022 - protein, 54 aa, Oryza sativa
  Clone ID: PAT_MRT4530_33128C.1.pep
PARRSPPIQSRRQSNSSPIAKQPLPVRSRNQERSWQCKFPHSIGASEFTANDVS

SEQ ID NO: 131023 - protein, 79 aa, Oryza sativa
  unsure (1)..(79): unsure at all Xaa locations
  Clone ID: PAT_MRT4530_33129C.1.pep
GRAAPRPTRAWRTVAGGAVARRRACGXRRRARERRERGGXGSSPASSEAGAEDEGGGGGPTTWRGGRAAVTPKERFERG

SEQ ID NO: 131024 - protein, 80 aa, Oryza sativa
  unsure (1)..(80): unsure at all Xaa locations
  Clone ID: PAT_MRT4530_3312C.1.pep
MMNWLNDPSLKETDVQIARDPRFTAMVERLDKTXAEAAVAPAMDPSMSVSTMQXLMQYPKIVDMAEHVINALMQDPDMYS

SEQ ID NO: 131025 - protein, 170 aa, Oryza sativa
  Clone ID: PAT_MRT4530_33130C.1.pep
DGAPGSMAGFLYVPYYNIAERHLRSDEYLLCMLPLLTRYVFIMGRGSTRLCLPPGLLAPYHSPISGWFADRRLLRSSGRCALFTGTSVCHPCAFGWFADRRLLRSSCRCDLFTGTFVCHPCDFLIVPCLVVAAAMLEGAHARNLQIRTTPVDVINRFNFFGSNLLANFCV

SEQ ID NO: 131026 - protein, 103 aa, Oryza sativa
  unsure (1)..(103): unsure at all Xaa locations
  Clone ID: PAT_MRT4530_33131C.1.pep
MAATLRWGGGGLAVAAFAAVVALSGLLGVAANYGGGGGFLFPQFYQHTCPQMEAVVGGIVARAHAEDPRMAASLLRMHFHDCFVQGCDASVLLDAEGXWRFRR

SEQ ID NO: 131027 - protein, 324 aa, Oryza sativa
  Clone ID: PAT_MRT4530_33132C.1.pep
MDLAWWFAVAVVVCGLVGGGSAGLLETNPGLAYNFYQKSCPNVDSIVRSVTWAQVAANPALPGRLLRLHFHDCFVQGCDASILLDNAGSEKTAGPNLSVGGYEVIDAIKTQLEQACPGVVSCADIVALAARDAVSYQFKASLWQVETGRRDGPVSLASNTGALPSPFAGFSTLLQSFANRGLNLTDLVALSGAHTIGKASCSSVTPRLYQGNTTSLDPLLDSAYAKALMSSCPNPSPSSSTIDLDVATPLKFDSGYYANLQKKQGALASDAALTQNAAAAQMVADLTNPIKFYAAFSMSMKKMGRIDVLTGSKGNIRKQCRSAS

SEQ ID NO: 131028 - protein, 41 aa, Oryza sativa
  Clone ID: PAT_MRT4530_33133C.1.pep
YPEGGAKSTAKNYWPYIAGTCCINFPSRLGGQGCTLRLGFA

SEQ ID NO: 131029 - protein, 240 aa, Oryza sativa
  Clone ID: PAT_MRT4530_33134C.1.pep
MLAAAAALRPPFRRARLSTSHGGGGGVTHPLRPRLQRRALACRADLQQDAPFAAAIGACLLASLVLPTSRGRRDDDEEEGEFGATDTRMGVMGIISLLPYFNWLSWIFAWLDSGKRRYLFYAAAYLAPYLRTNLSLSPEESWLPIASIFACILHVQLEASIRTGDIETFRFVQRAWRLIFPSALKEDVQHRNKGKSIRMGSGNRRIPSAHESREKLRNSDIFKRRLDEPNDEKQNKSDWN

SEQ ID NO: 131030 - protein, 152 aa, Oryza sativa
  Clone ID: PAT_MRT4530_33135C.1.pep
MAMAMAASLAAHHHLAGGGLLPTPRASGRNGRSGITISMRAQTKEDDMLRYKLERVPFLEEKVRKVRENGKIICLDINQLMLSEENRFAFTIEVAEEANSYLEKNRHEYGLKKPILHVLSDRMNEAGFSRPEGYLYPYPIKPGPYFIKEEGH

SEQ ID NO: 131031 - protein, 183 aa, Oryza sativa
  Clone ID: PAT_MRT4530_33136C.1.pep
MAMAMAASLAAHHHLAGGGLLPTPRASGRNGRSGITISMRAQRKQSGDSGSGKGDGGDGRVSGRRRVWRRRKLTKEDDMLRYKLERVPFLEEKVRKVRENGKIICLDINQLMLSEENRFAFTIEVAEEANSYLEKNRHEYGLKKPILHVLSDRMNEAGFSRPEGYLYPYPIKPGPYFIKEEGH

SEQ ID NO: 131032 - protein, 75 aa, Oryza sativa
  Clone ID: PAT_MRT4530_33137C.1.pep
MSMKEFMMGMSLDETVALVEPITPQAPGRKGLVGPTTPRAPRTLCKNYERYSFSTEDCEVHPDHPPLNILYIAQA

SEQ ID NO: 131033 - protein, 426 aa, Oryza sativa
  Clone ID: PAT_MRT4530_33138C.1.pep
MASVSSSPSYSSQAAVLLLLHQPPHQHGHGGACLRYRGSQSQGRGNAVATSLGLSAAGRGGAGGLLLLPPLPALRAAEGKDGRAVTKDEEEEAAAAAVEEEGEVEVRREEDKPGDDGSREAAARGSGSGRFSADYISLGIREPVYEVREQAILVNLGSLRAIAMHERVLIFNYNSPGGKAFLDSLLPRLNPRNINGGPAMPFQLEVVEAALLSRIQRLERRLMRIEPRVGALLEVLPNRLTADVLEQLRLSKQALVELGSRAGDLKQMLIDLLDDPHEIRRICIMGRNCTLDKLSDNMECSVPLEKQIAEEEEEEIEMLLENYLQRCESIHGQAERLLDSAREMEDSIAVNLSSRRLEVSRVELLLQVGTFCVAIGALIAGIFGMNLKSYLETNAWAFWATTGGIVVGAVAGFFIMYSYLKTRKIL

SEQ ID NO: 131034 - protein, 67 aa, Oryza sativa
  Clone ID: PAT_MRT4530_33139C.1.pep
RHVFSIYIVQVLLVGLFFKDPSDDFVVSGNVYVLWVSCGQSSLNSCMYYAINGDYVCATLEVVDVIV

SEQ ID NO: 131035 - protein, 86 aa, Oryza sativa
  Clone ID: PAT_MRT4530_3313C.1.pep
MAPDLLAARGNSDGIEGRGRGRHHGGEGRGNVGLVADNGALVRLLRCGGGDDVAHGSARCSHDPVRALQAAHPPLMPSASCSSSRS

SEQ ID NO: 131036 - protein, 271 aa, Oryza sativa
  unsure (1)..(271): unsure at all Xaa locations
  Clone ID: PAT_MRT4530_33140C.1.pep
GIPGSTPRPAGDDGSREAAARGSGSGRFSADYISLGIREPVYEVIEVKSNGRMSTKKISRRQLLKSSGLRLRDTRSVDPSLWLMNSMPSLLVREQAILVNLGSLRAIAMHERVLIFNYNSPGGKAFLDSLLPRLNPRNINGGPAMPFQLEVVEAALLSRIQRLERRLMRIEPRVGALLEVLPNRLTADVLEQLRLSKQALVELGSRAGDLKQMLIDLLDDPHEIRRICIMXGRNCTLDILSDNMECSVPLEKQIAEEEEEEIEMLLGKYLQ

SEQ ID NO: 131037 - protein, 100 aa, Oryza sativa
  unsure (1)..(100): unsure at all Xaa locations
  Clone ID: PAT_MRT4530_33141C.1.pep
MASVSSSPSYSSQAAVLLLLHQPPHQHGHGFACLRYRGSQSQGRGNAVATSLGLSAAGRGGAGGLLLLPPLPALRAAEGKDGRAVTXDEEEEAAAAAVEE

SEQ ID NO: 131038 - protein, 94 aa, Oryza sativa
  Clone ID: PAT_MRT4530_33142C.1.pep
MASVWGKDSGEYRPERWVTEDGKLRHVPAHRFMPFNAGPRLCLGKDISVLQMKSVAAAVAWNFDLEVVAGHAVEPKVSIVMQIKNGLMVKVKKR

SEQ ID NO: 131039 - protein, 169 aa, Oryza sativa
  unsure (1)..(169): unsure at all Xaa locations
  Clone ID: PAT_MRT4530_33143C.1.pep
SGGARRERRTTKRGERXEAGAGRAQTRDNEKXGXSSRXARDRRGEEEQGEXAKRGGGTKHFXLPXDTLAAPPEDGEETRPPXNKPAXRKXNGGPGTTRGGTGPKPATEGRNGXTGRDXTATQSEAXNTKXGSKGPPPPRNAPNTQEDTXKTAEKDTKPNKEXQTRKQSQ

SEQ ID NO: 131040 - protein, 202 aa, Oryza sativa
  unsure (1)..(202): unsure at all Xaa locations
  Clone ID: PAT_MRT4530_33144C.1.pep
GICCSSASPWSRTGSGMKEVLGWKSPSTFIEIRSFLGLTGCYRWFIKGFSKISKLMTGLLKKKFEXIEECEKSFSELKKRLITGLPSLIVLDXIRNDFEKYCDTCXKRLGCVLIQEEQLVAYASXDELPCTHYLKLAAVVHALKIYMATVLYXDRCEVYTNYISLKYIFILTGLNLRQKDXRELIKDQDXNIHYHQENENIV

SEQ ID NO: 131041 - protein, 84 aa, Oryza sativa
  unsure (1)..(84): unsure at all Xaa locations
  Clone ID: PAT_MRT4530_33145C.1.pep
MAASTMALSSPAXLXGKGVXNAKXFGEGRVTXRKXAAKPKPXAASGSPXYGADRVXYXGPXFGEPRXXXNGEFPXDXGLDNAGL

SEQ ID NO: 131042 - protein, 60 aa, Oryza sativa
  Clone ID: PAT_MRT4530_33146C.1.pep
MDACLLGFAQAGLVSASSAACARFAAAVAVTGRPFDLDREAQIVREALKQNTEIKGAKIK

SEQ ID NO: 131043 - protein, 92 aa, Oryza sativa
  unsure (1)..(92): unsure at all Xaa locations
  Clone ID: PAT_MRT4530_33147C.1.pep
NPXLFSPIKYGGGDNXTASRSKVNRVXPRKKKKFFFSPRCVSARIFFTPPLFPLTLEVISILHQGGLGILIPCFLLIKFFFDEKKKTPAKPK

SEQ ID NO: 131044 - protein, 444 aa, Oryza sativa
  Clone ID: PAT_MRT4530_33148C.1.pep
MASVRALLALTFLLSGGAATAAAAMVRNGGSPSIYGGGGGEGAAVIGRGGRSLLQAAAAAAATTQSAVFSLDSYGAHGDGERDDTAALARAWSAACASAAPAVVLVPESRSYLLRQVTLSGPCESTIKLMVKGTLVASPDMSNWNESNRRYWIVVRGVDGLAVGGGGTIDGNGEGWWENSCKINRALPCKGAPTALSFHTCDNLSVNGLKMVNSQQIHMSVEDCTGVELAHLSISAPGTSPNTDGIHITHSKNVQVSDCTIKTGDDCVSIEDGTHGLHVTRLVCGPGHGISIGSLGDDNSRAEVSDIFIDTVHLYGTTNGARIKTWQGGSGYAKDIVFQNMVMNSVKNPIIIDQNYCDSAKKCETQEGSAVEISNVVFKNIAGTTISKSAITLNCSKNYPCYDISLQDINLEMVDDNGATGSTCQNAKWRKSGTVVPQPCTSTN

SEQ ID NO: 131045 - protein, 103 aa, Oryza sativa
  Clone ID: PAT_MRT4530_33149C.1.pep
LMYATRLHLSGAADPAMGVLGPCILAPDLVPYGFFLVVGALMAALSSSLVNGGQTEACPSCLCIRSASSACGDAWESQQRVGDNAACFTPASLLRQSDREYKD

SEQ ID NO: 131046 - protein, 109 aa, Oryza sativa
  Clone ID: PAT_MRT4530_3314C.1.pep
DANIQDWANIQDWAKYNEFEENTIDEVDGAVEDYDGADSGGPRIYTLDSPGVHRRCFAMSLNASGCGSRLHRRRSTLAVQPISVLWPVDCRALRCHRRRSLNVEQRLMP

SEQ ID NO: 131047 - protein, 110 aa, Oryza sativa
  Clone ID: PAT_MRT4530_33150C.1.pep
MAASKLQAFWNHPAGPKTIHFWAPTFKWGISIANVADFAKPPEMISYPQQVVVACSGVIWARWGMVITPINWNLSSVNAAMAVTGVCQLSRKIRHDYFSDEKSATASLEG

SEQ ID NO: 131048 - protein, 458 aa, Oryza sativa
  Clone ID: PAT_MRT4530_33151C.1.pep
MASSNSTSSARRRAARAPPPPNLGDLSGVSAPLPSNGLHAPSISTHPTNAATPNPSPPGASIVVVVRPAMQPASPVSGDAGPVAEAVPPRGAPQVLVRRRSVPFSPDSPLAPGSRGGGERRSTFREDVSHAAAETYLVTRLAFILLRYLGVGYRWISQLAALIIYAILLMPGFIRVGYYYFFSRQVLRSVIYGDQPRNRLDLYIPRDPKKPSPVVAFVTGGAWIIGNFPQGTISDMVSDASDGISFVCETVGAYGGDPNQIYLMGQSAGAHIAACALLEQAAKESRGEQISWSVTQIKAYFGLSGGYNIENLVDHFHERGLYRSIFLSIMEGKKSLPHFSPETVAKKLCPETIALLPQIVLLHGTDDYSIPFSASETFAGVLKQAGAKAKLLLYEGKTHTDVFLQDPLRGGRDKLVEDVISVIHADDADAREKDALAPIPGRLVSEWQIKLAHRISPF

SEQ ID NO: 131049 - protein, 162 aa, Oryza sativa
  unsure (1)..(162): unsure at all Xaa locations
  Clone ID: PAT_MRT4530_33152C.1.pep
MSYYVDPYTGVPQYSLYPVYGYPPSTPSIEQALREEEIEEDVDQAAAEVSDTEKTPSASSKQTPPTPSAPAHFSRVNKKKTAXKKLAATTLKPAPPPPPPSSPPVQQTSSDXTPLAIGSHHVEEEEQPAAPAIPALADLFSFDIKDYLDEQTEEDTPSKANL

SEQ ID NO: 131050 - protein, 159 aa, Oryza sativa
  Clone ID: PAT_MRT4530_33153C.1.pep
MTNQRREMQVEAPHHQTKIKKQETTIRAHILKPNTSNQQQQQQQQQQQDLSKKNNKKKKPHRGGRWVGMEEAVPGVQIYASPASWRSDPAASTVGGSGEGGVGGVGDRESGGGAGGGGGVCGGQLARAEAEARLEASPAEAAKVETAAAVWPQPPPLPP

SEQ ID NO: 131051 - protein, 52 aa, Oryza sativa
  Clone ID: PAT_MRT4530_33154C.1.pep
ALLHVQLGIEIKGNSKHAFPSKETRDPTKTYSDSDPDGLTAHIPAVRPALLA

SEQ ID NO: 131052 - protein, 73 aa, Oryza sativa
  Clone ID: PAT_MRT4530_33155C.1.pep
RPRFRRNGTRERREMAETMQTGRLSTGLMAPRKQLATKVASKTVPTIEGVTKPNRYRPGTVLLLEIRKLHKST

SEQ ID NO: 131053 - protein, 53 aa, Oryza sativa
  unsure (1)..(53): unsure at all Xaa locations
  Clone ID: PAT_MRT4530_33156C.1.pep
RNERNDNDVRXEMRQTTTMSTNVRYSRRRVEYDVVVYTNRVRTQAFRRHVVSP

SEQ ID NO: 131054 - protein, 115 aa, Oryza sativa
  unsure (1)..(115): unsure at all Xaa locations
  Clone ID: PAT_MRT4530_33157C.1.pep
PFYPCCSHQLCTSPSNGPGNVTKIMNNKDQEYNMCMPGDRIHMDVDLIQPXVTCEQVXRFAIRKGGKNRGFRPSLVNALEVICMEPIRGDSFRCYVSEKPSVVVSIQLMFKVGSC

SEQ ID NO: 131055 - protein, 112 aa, Oryza sativa
  Clone ID: PAT_MRT4530_33158C.1.pep
LDPSTLILEPGRPVAPSAQTLALLLLLAMATDYSIPSPAFLAGNPNATLSCANISTVPDKGCTPAHHQGPTYLQQHRRRANRTRNQTQPLSQEILHFRTNWVNMCFHWNALN

SEQ ID NO: 131056 - protein, 290 aa, Oryza sativa
  Clone ID: PAT_MRT4530_33159C.1.pep
MSRWRAAAARISAAAESRLLSRAFSRVGTPAPQPPCRGFSKASAAAAASSRGPAAAAATTTATAAGARPELAFPFIVLISLSQFQVRLNSMFLSKPCSLALPPDSPLRVEDPKFEGIKHLMLTLLLFYTLFQLEKTFKTTFSLLVLHMWLILRRLKEEGKDGVKFGQYIYEIYNHDVELRVSKAGVNLLLTKWMKELEKIFYGNIVKYDSAISPEARQDDLVNVIWRNVYADEGSEAMDAAAVPAIQALARYTRREATCLSLTDKEAMFSGNFKFTALLPNSPSPAKPVR

SEQ ID NO: 131057 - protein, 98 aa, Oryza sativa
  Clone ID: PAT_MRT4530_3315C.1.pep
MRKRVTSSPAGTSSWLHGQRDDLPRPMMCLVDMGAGGLVVFPVALMRPRLSGTVDSVHDVATTCSGEECLDQLAHHGIHFNIVLNVYDAVISSWYMVN

SEQ ID NO: 131058 - protein, 196 aa, Oryza sativa
  unsure (1)..(196): unsure at all Xaa locations
  Clone ID: PAT_MRT4530_33160C.1.pep
MSRWRAAAARISAAAESRLLSRAFSRVGTPAPQPPCRGFSKASAAAAASSRGPAAAAATTTATAAGARPEVRLNSMFLSKPCSLALPPDSPLRVEDPKFEGIKHLMLTLLLFYSKQSKSIRGANVVYHRITSQVDKSDIFDVFQLEKTFKTTFSLPFLHMWLILRRLKEEGKDGVKFGQYIYEIYXHDVELRVSKA

SEQ ID NO: 131059 - protein, 30 aa, Oryza sativa
  Clone ID: PAT_MRT4530_33161C.1.pep
FGSEPRSVIHAHIKLNLSSPEPTASSQSFS

SEQ ID NO: 131060 - protein, 1425 aa, Oryza sativa
  Clone ID: PAT_MRT4530_33162C.1.pep
MASASASASPRTARQLADALTAHLSLYHAATPPPPSSSSPRAAILRWLASLSPPCRAAAATSLLTPAAAAALLSMLRRLRARGHSSFFVLHPPSPSSAAVAEEGAAAPTVLSRLSRGLLARAAEASRGQGLVFDHLLLFPSSPTSSSRLDAITVAEELLGDLDGFVAAMDEISGGRFLCGDGEVDLVAMVGEEFPELPWLKAKGYYVIEEFVANWVEIALRMSWAAAGGGGGGGGGGRKAVRVGKGVKEKAGLAANAFWREKGYVDWWMRLEPRVRARIMGAFFGKGTTALEIVYLKSNISNRSGDAIFFTKLMSAGTVADHILMKLRGILMVVSTESINLELIGDEAPKAAKKKDVEKISGGSRKGKKKSSSLKKLITSSKQMKDIGCSSSDSHDPKVLPDQQGPSVVCTTIEHASEDNLCKEIAPTPKVEQTVGLGDCKNQCNSKKRNKRKGKTKLHNLMKTENPGSGTLKTDAPHIATEAPNKPVEATHVSPHLPSYVHQSKSCIPKAVNCCDSSIALNGTDVKGIGNTKLEDTLHSPRVSSLLTTECSQSVKTSDGFSMNEQVISQNGQNESTLQPSSCLPSRSDTVDRNSVVATEKILPPVIPTNMFHSAISDNGGVMKTGGEYYVYNRNTLGGTSYEWPSVAPHHFVSPEMQQRPATTDRLHLDVGYRWPAQFEQPFLPPNHQMRNPPVEAGCNQVLSSLSVPLSFDWPPVFRGYGKLNQNNALGYDPLYTPQMQSSAWSGFHAPLIQRGSICNEKDRKYFGDSDPRNKSDVGDDTESYWFSEEESDGRGLSGRDINQYFGGGVMYWSPAEHAGTGFSRPPSLSSDDSAWAWHEADVSQVLDDIPVGIPCTYNANSVSSPPSTSTVLKIKLFPVSKSVSCGSEVIKGDTLPYAMLRPIVVPISRRPSRSEFKGGHDHRSPCVPSNRRDIPLVRRPPSPVVLSVPRVPRPPPPSPVGESRKRGFPIVRSGSSSPRHWGMRSLFTEDKILNRAQFCLDGPEVVWPSWGNKGSPAGTLGQSIEDTVLQDHLVKISQLSRDQHPDVALPLQPPDMLNCSSSKASLSLMHNALHEEIDQFCKQVSAENLVRKPYINWAVKRVTRCLQVLWPRSRTNLFGSNATGLALPTSDVDLVISLPPVRNLEPIKEAGILEGRNGIKETCLQHAARCLANQDWVRTDSLKTVENTAIPVIMLVAQVPCDTNLSSEYSSVLDSSHEQLSINVLGDQGSPSRSDNSSSEGSSMPMCSRINKDDGNVVQSIRLDISFKSPSHTGLQTTELVCELTQQFPAAVPLALILKKFLADRSLDHPYSGGLSSYCLVLLIVRFLQHEHHLGRPINQNLGSLLMDFLYFFGIDPIHIDDPLCPANNVGRNCFRIHQCIKAFADAFTVLENELLQFSAECYTPVSSFNLLKKIMPSIDFDEL

SEQ ID NO: 131061 - protein, 598 aa, Oryza sativa
  Clone ID: PAT_MRT4530_33163C.1.pep
MPFHSSATINLRTSYLEPVASRTYGGNVHRFPSPRGSSSWGFHKFIRHDELERSGHLTGDRFAVRCDVTVMRATELRVEPACLAVPEPDLRAHLRRLLSTGDGADVTFRVGGGETFAAHRCVLAARSPVFKAELCGRGGAAAGRCVDVDDMGAGEFGALLHFVYTDTLLEMASRDVPAMARRLIAAAGKYQVERLKLVCEDMLRRRVDTSMAMATTTDSAATTDDQLSQRPWLTQLFFKFASRMVGGMVVDAFTPEPPTAAEKSGDASPSLSPSPSCSTVAVSEASGHHVLRIEGYKRTKMMMATGEHLNSGEFHVGGYTWRLRYYPNRYDQEFSSSISFALVRTGRDDDDVVVRARVKISLLDVAGEPVTRYSHSDNKCTFYEGHDLWAIKSFIRRVDLEDSGHLDDGGGGGDSFAVRCDLTFNVPDIRVDVDDAAAVTVPAVPPPLLHRHLGDLLASEAAADVRFNVDGEAFAAHRCILAARSPVFRAELFGSMRERAARAIVRVDDMDADAFAAFLHFVYTDELPEMDDDGEEAAAVMAKHLLVAADRYGMERLKKVCEDVLFRHVVVATAATSLALAEQHDCPELKDAILRFKL

SEQ ID NO: 131062 - protein, 447 aa, Oryza sativa
  Clone ID: PAT_MRT4530_33164C.1.pep
MERTGAHGGKRLLPRLLFLAALSVTPWLLIFCLHFSVFDGAPPVSSPAARQSLVAVVSEGGEDSQRFLLEQEEQLRRLPSARDVTTTTAAAVAGDAHACEGRYVYIHDLPPRFNDDILRNCREWYQWINMCVYLSNGGLGEPVDNADGAFADEGWYATDHFGLDVIFHSRIKQYECLTDDSSRAAAVFVPFYAGFDVVQHLWGSNASVKDAASLELVDWLTRRPEWRSMGGRDHFVMSGRTAWDHQRQTDSDSEWGNKFLRLPAVQNMTVLFVEKTPWTEHDFAVPYPTYFHPAKDAEIFQWQQRMRGMKREWLFTFAGGTRPGHALLPAAAGRHYKWHLPDVHETYSVFIAEEDIRSGNVSVEETLRRIPPDVAEKMTETVISLVPRLLYADPRSKLETVKDAVDLTVEAVIERVKKLRKEMHGAGASSRLSTALGANTNGGFQSS

SEQ ID NO: 131063 - protein, 179 aa, Oryza sativa
  unsure (1)..(179): unsure at all Xaa locations
  Clone ID: PAT_MRT4530_33165C.1.pep
ADVSQVLDDIPVGIPCTYNANSVSSPPSTSVCSQNESPDPLPQSVGHSMTANGMNSESLQSPSSMQDSPEDKTISVSKSVSCGSEVIKGDTLPYAMLRPIVVPISRRPSRSEFKGGHDHRSPCVPSNRRDIPLVRRPPSPVVLSVPRVPRPXPSSPXGESRKRGFPIVRSGSSXPRHWG

SEQ ID NO: 131064 - protein, 189 aa, Oryza sativa
  Clone ID: PAT_MRT4530_33166C.1.pep
IFNLLPKTGILTTKIIYSDSQALTDECRHWKFIWHNRAPPRVQFFLWLLIKERLPTKAHKKQIVQSPRCALCDAADETTMHLLFGCQFAQHFWGSIDVTPAVASVQDISALRPPSRLPQQHFQIFYILCLWGLWNHRHDVVFRSLSVSFPRVVKKCIEDASLWAERIRRDDRPVVYAWKSLLSSAVRSH

SEQ ID NO: 131065 - protein, 206 aa, Oryza sativa
  Clone ID: PAT_MRT4530_33167C.1.pep
MDAGEPSTSDSLVLATATNDRASCVGLVELLSENPAALARYPVGTEYDWEDEVTPASDVGDAEGAGSDFDLDFAFAPPVSAAKLVPADDIFAHGRIVPAYPVFDRNFLDLSPGDVAEPASTAAPSTDTYCAWTPRSAPSSPSLDIAARSTRGNCNSETTAKGVPAASTVVEREGKGKEKRGEEGGAHVRLGLIGIFDGKCDGVAWF

SEQ ID NO: 131066 - protein, 62 aa, Oryza sativa
  Clone ID: PAT_MRT4530_33168C.1.pep
RRTLYQPKDLGVMIFDTTVDEPEGDCMIWIPADCYVGAMVTMGRGMRWHCRGALHQEQTTFG

SEQ ID NO: 131067 - protein, 586 aa, Oryza sativa
  Clone ID: PAT_MRT4530_33169C.1.pep
MRKHGWQLPYHPLQVVAIAVFLALGFAFYVFFVPFVGRKAFQYVAMVLYTPLITSVVVLYIWCAATNPGDPGIFKSAEHPKLKDGRRSQKNSDHGLSQGGKMSSDGFNAVDNSEKLSSMLEQNDSHSWPTFSEILCFPFSCLCKRCFHADNQSSEQHMSEEGMFFCSLCEAEVLKNSKHCRVCDKCVDGFDHHCRVRYTSFVFPNGYTLSPLNNWLNNCIGKRNYKGFFLLMTSAVLLWLSGALVLILCIVDRGEFSRQIVSKLGSSFSTVVFIIVVGISTYDYIIALREQEEDQQEETAGHQSPQMSIISSVTGFSTASSFGPLHRGSWCTPPRLFLEDQFDVIPPEIGMLQNSGSKKTKEDEGARRRTGTVKISPWTLARLNAEEVSRAAAQAKKKSKILKPIARHDVPIGHDINIGGKLVPKADNNRRPDKRGRFPAELSLDPLTRLSASGTESNVSDTAIETSGNLAPLQFEARSAFQPSAAASTRNAASSPESSFDSPDLHPFRLSSCTADEMQGAIPHPAQSGIKFSRSTSDGYEASGGEDSDRIPSRIVHRSSNWANAILSSGQGGGPAADPNMPSSEG

SEQ ID NO: 131068 - protein, 337 aa, Oryza sativa
  Clone ID: PAT_MRT4530_3316C.1.pep
MALQVQAALLPSALSVPKKGNLSAVVKEPGFLSVSQKAKKPSLVVRAVATPAAPVASPGAGTSKADGKKTLRQGVVVITGASSGLGLAAAKALAETGKWHVVMACRDFLKAATAAKAAGMAAGSYTVMHLDLASLDSVRQFVDNFRRSGMPLDALVCNAAIYRPTARQPTFTADGYEMSVGVNHLGHFLLARLMLDDLKKSDYPSRRLIILGSITGNTNTLAGNEFHRRFHEETGITFASLYPGCIATTGLFREHIPLFRLLFPPFQRFVTKGFVSEAESGKRLAQVVGDPSLTKSGVYWSWNKDSASFENQLSQEASDPEKARKLWDLSEKLVGLV

SEQ ID NO: 131069 - protein, 70 aa, Oryza sativa
  Clone ID: PAT_MRT4530_33170C.1.pep
GCRNRHERERERTSLEFFFFFFFFRCQFLAGYLYSTFEYFIHRQIITLTSSFYYKFLDKQIYMYSHLLSI

SEQ ID NO: 131070 - protein, 39 aa, Oryza sativa
  Clone ID: PAT_MRT4530_33171C.1.pep
PDDPKNPFHFNTHKFNIQLITIELTNVYPNKTILSNQNQ

SEQ ID NO: 131071 - protein, 197 aa, Oryza sativa
  Clone ID: PAT_MRT4530_33172C.1.pep
MDEWEELARRLPVALMRVSSGMEDVKLIEVALAKFQKRSAMMGRILDGTPAAIAEQELDDPAPVGERPTVSLEKAYREISYSAARHAMARGVFFLCAVHHRTQDEPPFLHWDARHQVAIGHFERAMQSITDAMGHYAAAKDVVIVNETFLPQEDVWRRWASAAKLLVDRAASLTTLALDEARQQSHKLNQIVFQRSN

SEQ ID NO: 131072 - protein, 75 aa, Oryza sativa
  Clone ID: PAT_MRT4530_33173C.1.pep
MPARLLLLLLLTPLMEARSFALMRLPLPTPAHALHAQSRCQLTGFGDMREKEKCLLSDSNLTRVAQEANAVVERR

SEQ ID NO: 131073 - protein, 541 aa, Oryza sativa
  Clone ID: PAT_MRT4530_33174C.1.pep
MVDIKQTEVDPENIIPITMDQLTPEQKAEYEQMMNNLQNQFLHSFVQTHLGTVIQRYKLKVPSNDDLESSTTKDGKPKHDKPKDEKPEEEEPQEFKNLQDQIDYVVYHAFINQSGVLVNTLTNMIKSVIDGSIAKHQAKSPTFLPDGVFPPYRNLVTGKQQPVSGIAPEQPMASTSAFGKQCASTSAQGQLGFNPHVLGKQSVVDPIQQIPIGQQTPIVQQHQPIGAQFIPDQQVHNVHQSPQHYAGGNMNFQYQPYSPQIQYQPGGSPQPHILPRYNQLDHIQQQMQGMPQQKPWADMIADVMREQFGLKPKNIGNLYQPRYPEYFEGVPLPNRYKVPDFSKFSEQNNVSTYEHVSRFLAQCGEASAIDALRVRLFPLCLSGSAFTWFSSLPDSSVQSWADMEKQFHKYFYSGNHEMKLSDLAAIRQRHDGSVRDYIQRFRDMRNRCYSLALTDSQLADLAFQGLATPIKERFSAQDFESLAHLAQKVTLHEQRFAEAKKNFKKVNHVYLLMRKTHTALGDLLSSSAGLNLGEMQACQLD

SEQ ID NO: 131074 - protein, 362 aa, Oryza sativa
  Clone ID: PAT_MRT4530_33175C.1.pep
MAAVTAAAVSTSAAAAVTKASPSPAHCFLPCPPRTRAAHQRGLLLRAQVSTTDAAAVAAAPAKKEKISKKHDEGVVTNKYRPKEPYVGKCLLNTKITADDAPGETWHMVFSTEGEIPYREGQSIGVIADGVDKNGKPHKLRLYSIASSALGDFGDSKTVSLCVKRLVYTNDQGEIVKGVCSNFLCDLKPGSDVKITGPVGKEMLMPKDPNANIIMLATGTGIAPFRSFLWKMFFEKYDDYKFNGLAWLFLGVPTSSSLLYKEEFDKMKAKAPENFRVDYAVSREQTNAQGEKMYIQTRMAEYKEELWELLKKDHTYVYMCGLKGMEKGIDDIMVSLAAKDGIDWADYKKQLKKGEQWNVEVY

SEQ ID NO: 131075 - protein, 56 aa, Oryza sativa
  Clone ID: PAT_MRT4530_33176C.1.pep
YYEKFQSIHFLSCSEACKYSPEDTQNIEGNDEFSLKHRNAKLRRIGTHATLLKSIQ

SEQ ID NO: 131076 - protein, 220 aa, Oryza sativa
  Clone ID: PAT_MRT4530_33177C.1.pep
MAAVTAAAVSTSAAAAVTKASPSPAHCFLPCPPRTRAAHQRGLLLRAQVSTTDDDGGGRGHRRRQQRRSRRTQTRAASRQHLSPPSSTDHGRRHGCGRPHLRRCCSHQGIAVAAAPAKKEKISKKHDEGVVTNKYRPKEPYVGKCLLNTKITADDAPGETWHMVFSTEGEIPYREGQSIGVIADGVDKNGKPHKLRLYSIDSSALGDFGDSRPFALRKRL

SEQ ID NO: 131077 - protein, 87 aa, Oryza sativa
  Clone ID: PAT_MRT4530_33178C.1.pep
RVDYAVSREQTNAQGEKMYIQTRMAEYKEELWELLKKDHTYVYMCGLKGMEKGIDDIMVSLAAKDGIDWADYKKQLKKGEQWNVEVY

SEQ ID NO: 131078 - protein, 807 aa, Oryza sativa
  Clone ID: PAT_MRT4530_33179C.1.pep
MATLRFLGLTGNLLSGRIPVSLANISSLSSILLGQNNLSGPIPESLSQIANLNKLDLSGNRLSGFVPVTLYNKSSLEFFGIGNNSLIGKIPPDIGHTLPNLKSLVMSLNRFDGSIPTSLANASNLQMLDLSSNLLSGLVPALGSLINLNKLFLGNNRLEAEDWSFFTALTNCTQLLQLSMEGNNLNGSLPKSVGNLSTNFEWFKFGGNQISGRIPDELGNLVNLTLLDINSNMLSGEIPLTIGNLRKLFILNLSMNKLSGQIPSTIGNLSQLGKLYLDNNNLSGKIPARIGQCKMLNMLNLSVNSLDGSIPDELVSMSSLSLGLDLSNNKLSGSIPQEVGTLSNLALLNFSNNQLSGQIPSSLGQCVVLLSLNMEGNNLIGNIPPALTSLHAIQRIDLSENNLSSEVPVFFENFISLAHLNLSYNYFEGPIPISGIFQRPNSVSLEGNKGLCANIHILNLPICPSSPAKTKNNKRLLLKVIPSITIALFSALCLIFALVTLWKRRMISFSWFNYGHRQCTDVLRQFSGMLNMLCSSNPKRREVPTTPINNETLKKVSYGDILKATNWFSSVHTISSTHTGSVYVGRFKSDKSLVAIKVFNLNQPGAYESYFIECEVLRSTRHRNLMRPLTLCSTLDKENHEFKALIFKFMVNGSLERWLYSEQHYGIKDRVLCLGQRICIATEVASALDYIHNHLTPPLVHCDVKPSNILLDDDMTARLGDFGSAKFLFPDLVSLESLADIGGTIGYIAPEYGMGCQISTGGDVYSFGVLLLEMLTGKQPTDDTICGWQLAFITLLTPCSQIELQRF

SEQ ID NO: 131079 - protein, 235 aa, Oryza sativa
  unsure (1)..(235): unsure at all Xaa locations
  Clone ID: PAT_MRT4530_3317C.1.pep
MLASTCFSAPPPSSSSPSIPTHLATLCCCFRPPARPPWPRSLLLLGAFPPPTRPLPRASVSSSTAPAKDYEFTDGGGEVELRLDIGKLGIENSRDVFVDVDDTSLLVRAKSDGTLRTLINVKQLFDRIKSSETIWFIDEDQLVVNLKKVEQELKWPDIDESWESLTSGITQLLTGISVHIVGDSTDINEAVAKEIAEGIGYLPVCTSELLESATEKSIDKWXASEGVXSVAEAEC

SEQ ID NO: 131080 - protein, 300 aa, Oryza sativa
  Clone ID: PAT_MRT4530_33180C.1.pep
MLSLLLPPARPRAAVSPDARVVVAQGLGNNTADYARLAAALRDDHGVPAVAVARVSRPDWLRNAAGLVDPSYWRCNLRPRPVLDWYLKRVDEAVSEARELSPNEGISLIGHSAGGWLARVYMEEFDASDISLLLTLGTPHLPPPKGTPGVIDQTRGLLTYVEKNCAPAVYTPELKYVCIAGRYIQGAPLTGHTIATTDDILAVDTPSDIAEAVMVSTNDKSTQSGPTLRARFIGQGYKQVCGRADVWGDGVVPEVSAHLEGALNISFDGVYHSPVGSDDEQRPWYGSPAILKQWVHHLLS

SEQ ID NO: 131081 - protein, 126 aa, Oryza sativa
  Clone ID: PAT_MRT4530_33181C.1.pep
PPLFWAQIVPNFPVGGPYFVCHYAQVKCPIKPGFFFVLGPFFTLLGLKIFLHFLGGSLLRKPGPFGQPGNGNFSLFFRGGPPLLEKCSLFNVLEGFLPPLKKKKKKKKKKKKKKKKKKKTKKKKKP

SEQ ID NO: 131082 - protein, 1298 aa, Oryza sativa
  unsure (1)..(1298): unsure at all Xaa locations
  Clone ID: PAT_MRT4530_33182C.1.pep
NSVGNPFSGQAVPEKLTRTNFLLWKGQILPVIRGARMEGYLTGATQATPAVIDAKDGEATVKAANPAFETWIVADXQVLGFLLSTLSKEILTQVIHLETAAQVWKAITEMLSSHSRARSLNTRLALATTQKGDLSVSDYISKMKVLADEMTSAGKPLDDEELMSYILAGLDDDWEPVVSSLIGRPDVVSFHELYSQLRSFESRXKLRHTAAHQSSVNSAKRSGRGGFIPFNRGGRSGGNGGRGGNNNGGRGGGRGKPRPICQLCGKTGHVVADCWYRYDENFVPENKMAAAASYGVDTNWYVDTGATDHITGELDKLTTREKYNGKDQIYMASGAALDNHAFVEVHSRFFAIKDQVTRNLLLRGPCRNGLYPNPPSSSSSSKQVFGVIKPTISRWHSHLGHPSLSIIQKKKSEVLQKFHDFQQLVERLFNRKIITMQSDWGGEYEKLHSFFTKIGITHHVSCPHAHQQNGSAERKHRHIMEVGLSLLAHASMPLKFWDEAFLAATYLINRTPSKVIQYSTPLERLLNQKPNYSSLRTFGCACWPNLRPYNTRKLQFRSKQCVFLGYSNIHKGFKCLDIATGRVYISRDVVFDENIFPFSKLHSNAGARLKSEILLLPPTLLNPEIASGGMQGNGHMSNDPSNIPVEFVSAQEEAEDGTGNNGGGDTGSDDGSTEPGGNDFSPGHSDVEIDAASASADSADAGAGGAGPDIGAVVPGTANTTAASSSTTAGDTSTSAGSSRAAGSGDVTNNQSDSTQVQHQQTRPTTRLQRGIRKERVYTDGTXRYNFLASSSGEPQSLSEALADPNWKQAMDTEFTALINNKTWHLVPPHNDRNIIDCKWVYKIKRKADSSLDRYKARLVAKGFKQRYGIDYEDSFSPVVKAATIRAVLSVAVSRGWSLQQLDVQNAFLHGLLEXEEVYIRQPPGYEDKSKSDYVCKLDKALYELKQAPQAWYSRLSSKLCDLGFKASKADTSLFFYSKGGVTIFVFIYVDDIIVASSTQSAAEALLKDLKQDFALKDIGDLHYFLGIEVNKVCDGILLTQEKYASDLLKRAGMSGCKPVATPMSTTEKLSAHSGSVLGEQDATKYRSIVGALRPDISFVVNKVCQFLHGPTLQHWMAVKRILRYIKSSIDLGLRINRSSSTLVSAFSDADWAGSVDDRRSTGGFAVFLGSNLVSWSARKQATVSKSSTEAEYKAVANATAEVMWVQTLLKEIGVQVPSMARLWCDNLGATYLSVNHVFHARTKHIEVDYHFLRERVARKQLEIKFIVSGDQVADGFTKPITVQQLRDFRRNLNLDKL

SEQ ID NO: 131083 - protein, 143 aa, Oryza sativa
  unsure (1)..(143): unsure at all Xaa locations
  Clone ID: PAT_MRT4530_33183C.1.pep
XQIXYNKQTTGSFXSHPYTXILINXSICXFXXXXRXQPRSPWXXXRSRRLRFPXRCRXXPKPKNTXSXFFXXPFPXKGPGSCXSXTSXXYPXXPXNLXGXXXWRHLLXFLXSXPCIKXKXXLETXFSXXFXTPGXQPGSFLXG

SEQ ID NO: 131084 - protein, 75 aa, Oryza sativa
  Clone ID: PAT_MRT4530_33184C.1.pep
EDGDGGGGPGIQRHRRRAQQPQATPSPSGPHRRALAAERHCRQRREEERRRERERLLEGGDDMRASLTFFNLFND

SEQ ID NO: 131085 - protein, 526 aa, Oryza sativa
  Clone ID: PAT_MRT4530_33185C.1.pep
MAALTVGHAAIVHATTRLEDARSTGRRRRRRGMITVRAAAAATSGWEPGSWRARPARQIPEYPDAAALEGAERELASFPPLVFAGEARKLEERLGDAAMGRAFLLQGGDCAESFKEFAANNIRDTFRLMLQMAVVLTFGGQMPTIKVLLAYSHGFIFSPFLLLQSIPNDLVGRMAGQFAKPRSNPTETIDGVTLPSYRGDIINSDGFDEKSRAPDPERLIRAYSQSASTLNLLRGFAHGGYADLQRVTQWNLDFLRDSTQGDRYMELSERVHDAIGFMVAAGLTPQHPIMTTAEFWTSHECLHLPYEQALTRVDSISGLYYDCSAHMLWVGERTRQLDGAHVEFLRGISNPLGVKVSDKLEPSELVKLCEILNPHNKPGRLTIITRMGAENTRVKLPHMIRAVRQAGLIVTWVSDPMHGITISAPCGLKTRSFDAIRCELRAFFDVHEQEGSYPGGIHLEMTGQNVTECIGGSKTVTLDDLSSRYRTHCDPRLNASQSLELAFAIADRLRKKRDRAWNRLVYRAVA

SEQ ID NO: 131086 - protein, 34 aa, Oryza sativa
  Clone ID: PAT_MRT4530_33186C.1.pep
CLSLFVPRSPDSCYCEKCQSLHVRCSSSPIVEVS

SEQ ID NO: 131087 - protein, 59 aa, Oryza sativa
  Clone ID: PAT_MRT4530_33187C.1.pep
MLPAVQRTVRACFGISRREGAPLPAGLASQVEAQVGVQRLQMPQMPCGARTETGETGDG

SEQ ID NO: 131088 - protein, 70 aa, Oryza sativa
  Clone ID: PAT_MRT4530_33188C.1.pep
NGLFWDGKIHPKHLKRPLVQTKNKYINKKQKRGGFSSALKRARLTSWLGFFRAPRFKTERQGLFHRGNVI

SEQ ID NO: 131089 - protein, 222 aa, Oryza sativa
  Clone ID: PAT_MRT4530_33189C.1.pep
MEMLIGNLVKKRVRWLKYMRKRYLRRYAAQARRPRLRRLAPPARARDSRATHATDFATVLSISFPFGRRGSDLPPQIRRGLFLKPEAAPSAPPLPDLEFLIGREKAFSSEETLRLYQQPLQLGIKPLFLSDRTDDDQRELTTNNLLQQGYCNLGKLVLQPEGLETSTLAFKTCERQKLVNDGYIIVGNIDDQWNYISSLIAEGCRLAAPLSSLTHVLHRLAS

SEQ ID NO: 131090 - protein, 64 aa, Oryza sativa
  Clone ID: PAT_MRT4530_3318C.1.pep
CPTLQFSATVPDEVPLSMLHCHVMRSCIRAHSIIRMPGNTITGEVITYSLTNGHTVTYTRLNII

SEQ ID NO: 131091 - protein, 113 aa, Oryza sativa
  Clone ID: PAT_MRT4530_33190C.1.pep
MEQKRRTGPDVMEQKRGTGPVPWSTGAGPPRFRGPVLRGGEWPMHHIACLGNTFERADNLTGLPVGHLSTCMQRLEEVKLDWWRNLDGLLTADSELERGPGNAQCSSSARWYW

SEQ ID NO: 131092 - protein, 250 aa, Oryza sativa
  Clone ID: PAT_MRT4530_33191C.1.pep
MDTISGMFRPVFDRIRPSIASAAELSFSRVVSFTGSFNSRTGLLAAGDGEEETTPAQTAAFDIEAPATATTPDQAVRDDAAAAQEGEAAGAAAADDDADEPKRVSKIVQTVCLFVASASLAMSVNLPASGAGGALYGATLAFVCLGLFTSLGLFTSLGLSMYTIVSRPGDAAVAMVQKWAMVLAMASVPASFTLRLCATLPAETLESAWLIFFLLAGAAALYLTLAWKLAGGVRAQHRSVNEERVAGDHV

SEQ ID NO: 131093 - protein, 38 aa, Oryza sativa
  Clone ID: PAT_MRT4530_33192C.1.pep
LEDLMINILPVLTTLLGVHAGAHLTPAHQLDELPYAHR

SEQ ID NO: 131094 - protein, 154 aa, Oryza sativa
  Clone ID: PAT_MRT4530_33193C.1.pep
QRDFSGVSASGSEKRFFHHTEEMINAHPEFLDRATPSLDARLEIAAAAVPELAATAAARAIAQWGRPATEVTHLVVTTNAGAHAPGADVRLAALLGLRPTVRRTMIHLNGCSAGAAALRLAKDLAENSRGARVLVACVELTVLTFRGPDRPHTV

SEQ ID NO: 131095 - protein, 77 aa, Oryza sativa
  Clone ID: PAT_MRT4530_33194C.1.pep
MALGRGLLGQPWPRLTTRLTCISGRTAHHPSTLFLAGGGDAWECFILHVLKSKDEHQYIMAAGFIRSGPRARLALVY

SEQ ID NO: 131096 - protein, 213 aa, Oryza sativa
  Clone ID: PAT_MRT4530_33195C.1.pep
MRRDGHEDGERSQGIEDSLMFGPDDDNGSNIPTQVETLVRGTATVATPEYKSIPDLDYLQELLAIQQQGPRAIGFFGTRNMGFMHQQLIEILSYAMVITKNHIFTSGASGTNAAVIRGALRAEKPELLTVILPQSLKKQPPESQELLSKVQNLIEKPQYDHLPLIEASRLCNMDIISKVQHVICFAFHDSKLLMETCQEAKNLRKIVTLFYLD

SEQ ID NO: 131097 - protein, 293 aa, Oryza sativa
  Clone ID: PAT_MRT4530_33196C.1.pep
MVVVTAAAPPLGIALVGPTRARRGGGLSLSSSSCCYLSMCGRGVLRGGCARMREPLPPAPIGLDRFLCGYMRRDGHEDGERSQGIEDSLMFGPDDDNGSNIPTQVETLVRGTATVATPEYKSIPDLDYLQNDLIHLVVMQELLAIQQQGPRAIGFFGTRNMGFMHQQLIEILSYAMVITKNHIFTSGASGTNAAVIRGALRAEKPELLTVILPQSLKKQPPESQELLSKVQNLIEKPQYDHLPLIEASRLCNMDIISKVQQVICFAFHDSKLLMETCQEAKNLRKIVTLFYLD

SEQ ID NO: 131098 - protein, 73 aa, Oryza sativa
  Clone ID: PAT_MRT4530_33197C.1.pep
MSKEEIGESMAENNQSGPATVIHRQGAKEGDTHRRGRHHRGCCTSSTILLVAAGHSQDIVGPSLASPLSCQLR

SEQ ID NO: 131099 - protein, 1375 aa, Oryza sativa
  Clone ID: PAT_MRT4530_33198C.1.pep
MAPDQSSSSTQPSTDADALAKLQESMATVLSGISLLASKSDLADLSRSVAVATSSITALEQSSSTSSGPRLTGGGLLKSPPPPPPPPPPPPPPPPPPPHARHGAHHDANSGNAVPRFYKLEFPKFDGSDDPLNWLNHCEQFFRAQRSPDGDRVWLATYHLTGAAQEWYFHYEQHKGPPDWDTFKELCYAQYGPPIRNNPLGELKRLSQSTTVATYQQRFLALSSRVTDLLTERQQVQLFTVGLRDDICIDVELHQPEDLQEAMGLARAYERKANFSPSRTVSKQFFRRLTPAELAERRKQGLCYNCDEKFVRGHRCARLFYIEYDDTADDLDDDSADKDEDTEPHISLNAILGVDGANTMRLATRLANEQVVALVDSGSTHNFIHADLAFRLGIPLSLVRDGVRVVVANGDRLTSPGIARGLNLRVADEVFDVDCYALHLGCVNIILGTQWLRTLGPILWDFVNMRMAIWRGCREVMLYGVLDERLASTCAAIHADDLLLSLLAEFDDLFALPTGLPPARAVDHRIHLKTGVSPVAVRPYRYPQLQKDELEKQCAEMLAQGIIRPSTSPFSSLVLLLRKHDGSWRFCMDYRVLNTVTAKDKFPIPVVDELLDELHGAHFFSKLDLRSGYHQVRMHADDVHKTAFRTHRGHFEFLVMPFGLMNAPATFQALMNTVLAPFLRRFVLVFFDDILIYRRTWAEHLQHIQAVLTVVRANNLVLKRSKCHFGERQISYLGHVVSADGVAMDAQKVCTVADWPRPRSVRAVRGFLGLAGYYRKFIRNYGTIAAPLTALLKRDAFQWTPDAARAFTELKQALSTAPVLQLPDFALPFIVECDASGSGIGAVLHQGAGCTNVVANALSRRTEDAEIAALALSGPTFSAFDDLRNEVATDGDLIKIAADITSGKLSAPWALRDGLILRDNRVYVSASSPTLPALLAHAHTGHEGVKHTLHRFRADFFTPHAKQAVQEFVRTCATYQRNKTEHLHPVGLLQSLPVLTQVWEDIAMDFIEGLPRVHGKTVIFTVVDRLSKYAHFIPLGHPYIATTVARAFIDEVVRLHGIPSSIVSDRDPGFTSSFWTELFHLANVKLNLSSAFHPQSDGQSEAANHVIGMYLWCLTGDRPRHWLRWLPWAEYCFNTAFQSSLRSTPFQVVYGRPPPALREYDRGSARVCAVDQALIERDDFLGEIRERLLQAQDYSKLYYDDKHRELAFQVGDWAWVRLLHRQAASLPRFRRGKLAPKYYGSYQVSDRIGDVAYRLKLPAGARIHDVFHVGLLKEFKGTPPDQPPALPALSNGRVLPMLAKAIRARLARGVRQVLIQREGKPAADATWEDETEFRHMYPAFQLEDELFTKEGRDVMVGITYERRRRAVKTDEQRVR

SEQ ID NO: 131100 - protein, 102 aa, Oryza sativa
  Clone ID: PAT_MRT4530_33199C.1.pep
MSMVGQTEILGQSVWAGPEGWLALLDKARRTKLQGQIGPGMSKSYVRSQGIYGHMGAFISLFFSKLDDTRDDNCYLAVLTVTNKCCFLKKDLIKGTMVGSGF

SEQ ID NO: 131101 - protein, 421 aa, Oryza sativa
  Clone ID: PAT_MRT4530_3319C.1.pep
LVDPRAVVNPARGAKGHQKHSTLELTPNSNTHTNGSPSCRPHSLPSALSVPKKGNLSAVVKEPGFLSVSQKAKKPSLVVRAVATPAAPVASPGAGTSKADGKKTLRQGVVVITGASSGLGLAAAKALAETGKWHVVMACRDFLKAATAAKAAGMAAGSYTVMHLDLASLDSVRQFVDNFRRSGMPLDALVCNAAIYRPTARQPTFTADGYEMSVGVNHLGHFLLARLMLDDLKKSDYPSRRLIILGSITGNTNTLAGNVPPKAGLGDLRGLAGGLRGQNGSAMIDGAESFDGAKAYKDSKICNMLTMQEFHRRFHEETGITFASLYPGCIATTGLFREHIPLFRLLFPPFQRFVTKGFVSEAESGKRLAQVVGDPSLTKSGVYWSWNKDSASFENQLSQEASDPEKARKLWDLSEKLVGLV

SEQ ID NO: 131102 - protein, 52 aa, Oryza sativa
  Clone ID: PAT_MRT4530_331C.1.pep
RSLVCLRCRLCHKMYIMSLSYQSCRCSTMLYLSPRSIISMLHAIIFAPRATF

SEQ ID NO: 131103 - protein, 125 aa, Oryza sativa
  unsure (1)..(125): unsure at all Xaa locations
  Clone ID: PAT_MRT4530_33200C.1.pep
PPPGRNKPREGPGLLTPPFLYPNYGGIGVNNXPRCKASPGPRGCCSRSRACLLLNCVGCCPPGIFFPEFFVKGACAPFKNRFPCPVNCGLFLWASLLFAFYFLLWLDLDGFIRFLLGLFIRVCCS

SEQ ID NO: 131104 - protein, 1152 aa, Oryza sativa
  unsure (1)..(1152): unsure at all Xaa locations
  Clone ID: PAT_MRT4530_33201C.1.pep
MAPDQSSSSTQPSPDQSSSTQPSTDADALAKLQESMATRSPDGDRVWLATYHLTGAAQEWYFHYEQHKGPPDWDTFKELCYTQYGPPIRNNPLGELKRLSQSTTVATYQQRFLALSSRVTDLLTERQQVQLFTAGLRDDICIDVELHQPEDLREAMGLARAYEHKANFSPSRTISKQFARTAASSPAASASPAPTAVAAVPDVNSRQFRHLTPAELAEHRKQGLCYNCDKKFVRGHRCARLSYIEYDDTADDPDDDSADKDEDTEPHISLNAISGVDGANTMRLATYLADEEVVALVDSGSTHNFIHADLAFHLGIPLSPVRDGVRVVVANGDRLTSPGIAHGLHLRVADEVFDVDCYALHLGCVDIILGTQWLRTLRPILWDFVNMRMAICRGCREVTLYGVLDERPASTCAAIHTDDLLPSLLAEFDDLFALPTGLPPARTVDHRIHLKTVLLVRKHDGSWRFCVDYCALNTVTAKDKFPIPVVDELLDELHGAPFFSKLDLRSGYHQVLMHADDVHKTVFRTHQGHFKFLVMPFGLTNEPATFQALMNTVLTPFLRRFVLVFFDDILIYSRTWAEHLQHIRTVLTVVCANNLVLKCSKCHFGEHQISYLGHVVSTDGVAMDAQKVCAVADWPHPRSXWTPDAARAFTELKQALSXAPVLQLPDFALSFVIKCDASGSGIGAVLHQGAGPLAFFSRALAPRHAGLAAYERELIGLVQAIRHWCAYLWGRAFLVRTDHYSLKFLLDQRLSTIPQHRWVSKLIGFDFTVEYRPGRTNVVADALSRRIEDAELAALALSGPTFSTFDDLRNEVATDGDLIKITADITSGKLSAPWALRDGLILRDDRVYISASSPTPPALLAHAHTDHEGVECTLHRFRADFFTPHAKQAVQEFVRTCATCQRNKTKHLHPAGLLQSLPVPTQVWEDIAMDFIEGLPRVHGKTVIFTVVDRLSKYAHFIPLGHPYTATTVVRAFFDEVVRLHGIPSSIVSDRDQVVYGRPPLALREYNRGLARVRIVDQALIERDEFLGEIRERLLQAQDYSKLYYDDKHRDLAFQVSDRIGDVAYRLKLPAGARIHDVFHIGLLKEFKATPPDQPPALPALSNGGVLPMLAKAVRAHLARGVRQVLIQWEGKPAADATWEDEAEFRHMYPAF

SEQ ID NO: 131105 - protein, 105 aa, Oryza sativa
  Clone ID: PAT_MRT4530_33202C.1.pep
LCWSSEHRSSSSRSLLVHTALHSAAASDSVSHLLDTQSSISSSSSSGVISDGEQLGRHSRRHSLPGGGRRRAVPCRQLLELLVLLQRVQGERILLHWAVSERRAV

SEQ ID NO: 131106 - protein, 95 aa, Oryza sativa
  Clone ID: PAT_MRT4530_33203C.1.pep
KSEIEPLNSLVSIRNGAHKLIGTGGVGGTQARPYRMSVAYSNAAHSWHTGGGRRPRFDCTTPGLTRMPSPILLSMVLCLTHYYYNTTSYTNNSRR

SEQ ID NO: 131107 - protein, 176 aa, Oryza sativa
  Clone ID: PAT_MRT4530_33204C.1.pep
MAMAGCYCVREHQLEDDDAVGHRLLPPEILVEIGIIAAADHTAAVHARRDAVVEELAARLVGILGLTSPPSAGAGRLGEKRAAAATTTTSSGGATPPYGRSHVRRREQHLAAGGGGGGVIDGGMARYHAPGFGTTQWLAPPAWCGGGGGGTGVFLPRGEVYPTRTLNPPRKQTNIT

SEQ ID NO: 131108 - protein, 60 aa, Oryza sativa
  unsure (1)..(60): unsure at all Xaa locations
  Clone ID: PAT_MRT4530_33205C.1.pep
MSVRSPSLDVDGSGAESIFGSGGIGGFXGYSVGASVGVLLIVSTAALTIYLCSSTELRRC

SEQ ID NO: 131109 - protein, 88 aa, Oryza sativa
  Clone ID: PAT_MRT4530_33206C.1.pep
FLYFPIRCHISCLITLHPLLLFFLIMRADNEVDMALSSMKSGRHPLEALNRLTSNISSFLKHSVCTVLFCASRYYVPFYQARRKGDEQ

SEQ ID NO: 131110 - protein, 85 aa, Oryza sativa
  unsure (1)..(85): unsure at all Xaa locations
  Clone ID: PAT_MRT4530_33207C.1.pep
ALYCVAGAXRLLDGHRLHVVRTVSSHGAHEQNGVRVRAVEYLDRAMRQFVLALHSDHAVSTSSLRSIRVPALEEPCVQPVKLSSA

SEQ ID NO: 131111 - protein, 270 aa, Oryza sativa
  Clone ID: PAT_MRT4530_33208C.1.pep
MEQLNAKLYHRYTALKKRKLLDEGLDQKRAADINELRQAMKDWVAELQSENERLVAKLTQKEQQLVEAQTLLLDETRKTKELNSEILKLQCLLAEKNDANHIATGSPDTTAEMTIENQTPISPAKKTPKSNSRERNIRSIEKAIVPRNGFQEEGRDLDSCRRHMSISGSATEESSSTCMFHLLAESMVGMKFSVKNETEGFSLSVSHEASGYNFTLTWVDQPGGSEWSYQYSSLGTLDRIAMGWMKEDIKFSSTMCPVFFKQISHILRQC

SEQ ID NO: 131112 - protein, 341 aa, Oryza sativa
  Clone ID: PAT_MRT4530_33209C.1.pep
GATFRCHALRKWCYHYNFLWRYISKKIKTDIVSFNVIQSYFASISFSVCLTGRTPLIIAIVFNHVSTVEYLLDRGADANKASHNGLTPIHFAICLGECGMVQLLLAKGACVDPVAYCGTPLHVAATEGRDGAMKILLDHNADFNKMVDGLTPLDTAMDSGELKCINLLIKVGAVVSEDRMLTAENSGSTECFNYLMEETGANCNISDNGEPVNKRKATDLKSLGNKAVEKKDYLSATGFYSKALYLYPDDATLFSNRSLCWHHMGDGHKALLDAYECRKLRPDWLKAYYRQGAALMLLKDYESACETLYDGFKLDPGNSEMEDALREALASLKASASTEAR

SEQ ID NO: 131113 - protein, 1366 aa, Oryza sativa
  unsure (1)..(1366): unsure at all Xaa locations
  Clone ID: PAT_MRT4530_3320C.1.pep
MADHPSNHHGEGMDDFVAELARMTLVVGYPNAPEYSTVPPLSGELPHRVRLEVHGFVGTCLANMVVKASGGTADHACQEAAYLMMARLRDHHSYIFCNTAYRFDPRRASGDDVSTFRPTAGENDTTFGHMCAVMMGMDRMHSDLHKASKALNDGKLVRIIALKDEIARLKKENAQLKGLPAPGGVRIRTTPRKSTTAPVRIQLAPRNPPPPAAPPAPPAVPAAPVAPAPAPAPVPASAPTSALSCAPASAARGPASGNGVCVFXMVNTRNGSRAAGEGSNDEERTDGGYPNSASGNXPPQLPENPTLAQVMAHQTQMMAAMMQQMQQQHQQMHQRMXCNNQEKVAFATHQLQGPASAWWDNHMATRSPGTEVTWAEFCRSFRNAQVPDGVVAQKKTEFRAIHQGNRTVTEYLHEFNRLARYAPEDVRTDAEXHHPFNSSSFHQGASGSQNNPGGQPNRSAAPRPPMATTQAAPSVQGKKDTGAKPGSCFNCGEHGHFSDKCSKPRRAGPRFXQARVNHASVEEAQVAPEVVLGTFPVNSISATVLFDSGATHSFISKKFVGVHGLIREELSTPMRVHTPENSSTSVQFSPSVTIEIRRSPFLANLILLESKDLDVILGMDWLTKFKGVIDCVNRTVTLTNKKGETVVYKSPVALKQGISLNQIEVENPVVTEERSSRKLEDIPIVCEYPERPYRMAANELAEVKKQVDEQLQKGYIRPSTSPWDAPVIFVEKKDKTKRMCVDYHALNEVTIKNKYPLPRIDDLFDQLKGAKVFPKIDLRSGYHQLRIREEDIPKTAFTTRYGLYECTVMSFGLTNAPAFFMNLMNKVFMEFLDKFVLVFIDDILIYSKSEEEHEHHLRLVLEKLQEHQLYAKFSKCDFWLSEVKFLGHVITAQGVAVDPSNVESVTKWTPPKTVSQIRSFLGLAGYYRRFIENFSRIARPMTQLLKKDEKFKWTAECDKSFEELKKKLVSAPVLILPDQTKDFQVYCDASRHGLGCVLMQEGRRTWLELIKDYDMSIHYHPGKANVVADALSRKSYCNALCTEGMCKELQQELEHLHLGIVEHGYVVALEARPTLVDQVRAAQVNDPEIAELKKNIRVGKARDFLEDERGTIWLGERLCVPDDKELKDLILTEAHQTQYFIHPGSTKMYQDLKEKFWWACMRREIAEFVALCDVCQXLQPLQIPEWKWEEIGMDFITGLPRTSSGHDSIWVVVDRLTKVAHFILVHTTYTGKRXSLQMAPFEALYGRKCRTPLFWDQTGERQLFGIEVLSEAEEKVRTVRERLRIAQSRQKSYADNRRRELTFEAGDYVYLRVTPLRGVHRFQTKGKLAPRFVGPYKILERRGEVAYQLELPSNMIGIHDVFHVSQ

SEQ ID NO: 131114 - protein, 236 aa, Oryza sativa
  Clone ID: PAT_MRT4530_33210C.1.pep
SSYAAVSLDKIKDLTVHFTAEFVGELKARAGGRCSTFQCLLAHVWKKITAARDLSPEEFTQVRVAVNCRGRANPPVPMDFFGNMVLWAFPRMRARELLRATYGAVVGAIRDAVARVDGEYIQSFVDFGGAAAAGGGGGGDLVATAAAAGTMLCPDLEVDSWLGFRFHQMDLGTGSPAAFLPPDLPVEGLMVFVPSRAAKGGVDVFMAVAEHHVEAFERIIYSLEEGHGHHVGPCHL

SEQ ID NO: 131115 - protein, 208 aa, Oryza sativa
  Clone ID: PAT_MRT4530_33211C.1.pep
LPKAEIKGFEYCYNWTFAGDGVDPAHNVTIPSFSIEMAGDARLAADAKSIVVPEVVPGVVCLGFNRISQGPSIIGNVLMQEHIIVPHSGESVARRRRGGRARGGGRRCKGDSGCGEGGRARAGGHRHRLPEAEQRRRARPPTAPRPPPLRARIRASKPAAAAAAQSLRAVPDIVAAAEGEGRGGARGLGAAGVGTAAHRLPPWARHRH

SEQ ID NO: 131116 - protein, 56 aa, Oryza sativa
  unsure (1)..(56): unsure at all Xaa locations
  Clone ID: PAT_MRT4530_33212C.1.pep
ARPIRITIHXPXFYNFITXKTLXLPNFXPLAQIPLXPAGXIXXKPPPIXLPXICPX

SEQ ID NO: 131117 - protein, 580 aa, Oryza sativa
  Clone ID: PAT_MRT4530_33213C.1.pep
MPDVFTNVKDEDMQDSVKSLSEKLASALLTINAKDDLVKQHTKVAEEAVAGWEQAEAEVSTLKRLLEASTQKNASLDDQVNHLDDALKECVRQLRQAREEQEEKIRDAVAKKTQELDSHKSELQNHIYELKQQLEAAKLEAATVAVQHDLQDKLQAAEKENKGLKIELLTLAKDLKRLSLERDLSNEAAEGASKQHLESVKKIARVEAECRKLRHLTRRTSLANDSRPAPNNACMESLTDSQSDSGERMLTVDSEMRNSDSWASALIAELDQFKNSSASSRDVVNNHVEIDLMDDFLEMEKLAALSEVERVSSSFGTETDSDQAVAIDKASKVETETLKSQVTDLQAKVEKLETEKRDLEMALAEARVQLDASCDALMAANNKLAELQMQFNLANESKIAALGQADQLDAERGSLALQLESKSIEVEKLQAVVASLEESTDKKELESQLESTSVELADLCKTVASLQEQIDAERTLSLQHKAYADMADADKKSLEAQLQSAHADIGKLRGSLESQESALWSKQRSLFFLSSAQLISFHPWVSSARLRRCTSRRRRSISAPTATSSTSAPTSKLHGLLGFW

SEQ ID NO: 131118 - protein, 815 aa, Oryza sativa
  Clone ID: PAT_MRT4530_33214C.1.pep
MREEGGIASPGEKPIPNGASPNHSQSPKICSRITDNETQGTATAKSLNEKLVLETVSDDSSTQHCQSPQPDVFTNVKDEDMQDSVKSLSEKLASALLTINAKDDLVKQHTKVAEEAVAGWEQAEAEVSTLKRLLEASTQKNASLDDQVNHLDDALKECVRQLRQAREEQEEKIRDAVAKKTQELDSHKSELQNHIYELKQQLEAAKLEAATVAVQHDLQDKLQAAEKENKGLKIELLTLAKDLKRLSLERDLSNEAAETASKQHLESVKKIARVEAECRKLRHLTRRTSLANDSRPAPNNACMESLTDSQSDSGERMLTVDSEMRNSDSWASALIAELDQFKNSSASSRDVVNNHVEIDLMDDFLEMEKLAALSEVERVSSSFGTETDSDQAVAIDKASKVETETLKSQVTDLQAKVEKLETEKRDLEMALAEARVQLDASCDALMAANNKLAELQMQFNLANESKIAALGQADQLDAERGSLALQLESKSIEVEKLQAVVASLEESTDKKELESQLESTSVELADLCKTVASLQEQIDAERTLSLQHKAYADMADADKKSLEAQLQSAHADIGKLRGSIETLESELQKEKTMYEELVVQMESMKIESEKKLGVESAKEALEARLLVVNSEIAKLHGTVNDLECDAAKEKAFSSELKMQLEAVEGIRKMLESELESSHQETMKLQEKISLLEVRLKDQTALLVEFTAKAEDAAVGRKAMEGQLEGAKLEITKLTNRVSLLQGKIEQEKLLSEEYEAKCRKLEAQLSRDSREARLWRLANTNGDLKVKQGLRVANIRPKVQGFYLLWSNLLASCFA

SEQ ID NO: 131119 - protein, 683 aa, Oryza sativa
  Clone ID: PAT_MRT4530_33215C.1.pep
MEYYISCGMVALYRTLESSPIVEQAKVFVLLELSSAHQLPSMGVFSSAPKVYKPASEVNLGADSNEFYISPNVKAPRVAGLLVKIFAWVLEAPIIGSIVLYILKRDNLVNKLVSDAEIPEPPLFTAAHTWQDIPEQNVSLTKPDMSPAERVQEAVVCLPARLESVLADPPSPGFRRWTIRDFTSAYISGEITPVMVARRFLAAVKECSGPDLNMALFISCNPQDVIRQAEASTLRYQQGAPLSAMDGVLVAVKDEIDCLPYPTTGGTRWLQRMRPCVQDAAVVAQLRACGAVLAGKTNMHELGAGTSGINPHHGSTRNPYNTGKVAGGSSGGSAAVVCAGLCPVALGADGGGSVRMPAALCGVVGLKPTAGRFSKDGLLPLNWTVGMPGILAATVEDALIAYAAIADQSQPSHLQANARTLYFLLHVWMFSETEFAEDLIFFVCLQPELNLPLLKAASSMPTIRLARYAKWFNDCSEDIRSCCYKAVHTLRTRYGWEVTADVTIPEIEEMRLAHYVTMGSECTASFDKYLKKLSKSEIGWDVRIALSAYGSFSSRAYLNSQRIRNRQMYFHDKIFETFDVIVTPMTGVTAHELQDNAGHTGELDYINGAALVRYSIAGNFLGLPAITVKVGYDREGLPVGLQFIGRPWSEATLLHLAYAMQEACGKNYRKPMVYYDLLNKNKY

SEQ ID NO: 131120 - protein, 374 aa, Oryza sativa
  unsure (1)..(374): unsure at all Xaa locations
  Clone ID: PAT_MRT4530_33216C.1.pep
RNCRTTAPSLVAGPWRGKQEASDASPPPQRRQRLVTLGEKRCXAKAAQDGSGAASSASPAAASTDVVVMTRHQEVTPSGPAGREIEEARTAASLANQRADKLAHDLAEAREDLLKMRELVAGNERQQQGLEHRMSELENNLSEIRGSLRVSYTGLHQLAGECGVTTTIPANPDQFSLTSSLAKLATAMEEIPSKHAARIGEETSNGIYTGVCHVLTCVRDVDIEDVQQRRQPETPVIVPALALEPYVPQDDVDQSLSAETNMAITSLDLESALADRDRRIQYWRTKFEVAKLERTTVEVKKDQAVEALRGREVWFHAYLRSYCTAMAGVCRELQVPRRNPEESAAGYISWLNRACTQLEGIGKRIDEALKQECR

SEQ ID NO: 131121 - protein, 97 aa, Oryza sativa
  Clone ID: PAT_MRT4530_33217C.1.pep
MAVSNQPPSAIGLQRNNRSVSRQVGKELAPVHGVHPWSPEVAAGVTILLGNAEDKMTSHAKLLSVMLSQARHRRVGQCQVQGCSWHNKNNNNSELVY

SEQ ID NO: 131122 - protein, 81 aa, Oryza sativa
  Clone ID: PAT_MRT4530_33218C.1.pep
GWPNDSRPACVSCARVLSPSDVLPRTGRVLRPAVPRAGLGSNASSMPTNEPVQVDPASTAPGNTHLACQIVPPVGLAAFFA

SEQ ID NO: 131123 - protein, 133 aa, Oryza sativa
  unsure (1)..(133): unsure at all Xaa locations
  Clone ID: PAT_MRT4530_33219C.1.pep
PTRPLFVGWLLLGLFAFSSSVRFRGSSVSWVALAAPVVXYRCFVGGLAWAPXVRSLVAAFSSCVVGLVCLFFLARVSGWSRGFGFVPFSSXPSLRRALVGLLGLVLVGRLVSCLVAPSRRSGGVGGASCGGGG

SEQ ID NO: 131124 - protein, 75 aa, Oryza sativa
  unsure (1)..(75): unsure at all Xaa locations
  Clone ID: PAT_MRT4530_3321C.1.pep
MEYGWTGRRSMLLPDSSRHERGLPIAYMGMGVKPEVXCWLGVVIWRVLSRFPPLQYRGSTLGHGWRKYFMSWVSF

SEQ ID NO: 131125 - protein, 277 aa, Oryza sativa
  Clone ID: PAT_MRT4530_33220C.1.pep
MSDTSKGIPQEQLPSQELHPPPMPVINLGHLSLDDPTVRSRVVNDIAKACRDLGYFQVISHGISQSVMDGAIEAASEFFKLPNEIKKEEYMAKYAVEVRVVALKLMEAILEGLGIGKEYMQEKFEEGLQLLSVNCYPKVSQSDTSIGLAAHSDYGLLTILLTSCQGLEVVDRSSNSWKVVQQLPHALHVHVGDHMEVLSNGRIKTVVHRAVLNPQEARISLASIHGFALHEKVSSAKELVDEENPQKYKESSFNDFLEHLTANMDNRQRNFLESLRM

SEQ ID NO: 131126 - protein, 113 aa, Oryza sativa
  Clone ID: PAT_MRT4530_33221C.1.pep
MAKPKPRVLNSGMISPFSNLHPPSSVHFPMPTAKGQWRPETARARAFALHTPRAERDGDDDDSSEDPTQSSRPSAYRSTHGNFRLFCCAWLHAVRVLVEEVLALGVNVIKNFF

SEQ ID NO: 131127 - protein, 123 aa, Oryza sativa
  Clone ID: PAT_MRT4530_33222C.1.pep
AQLPTLLLGVSSGNLGDLSPSQLAQIDDLQRRTVAEEDGLSREMALVQEGHGAVAVGGGIDVDGIVGRVRGVLGRADALRLRTVKRAVEILEPAQAAELLVAAADMEIGFREFGLKYSSARSD

SEQ ID NO: 131128 - protein, 55 aa, Oryza sativa
  Clone ID: PAT_MRT4530_33223C.1.pep
KDGLKHTKFYYNRHEPVFIRTDFKVQNTKWAFNLLRIFRSLKGFLFLSKSQFQKA

SEQ ID NO: 131129 - protein, 228 aa, Oryza sativa
  Clone ID: PAT_MRT4530_33224C.1.pep
PLGSLDSKKVFFNKVFGSEDQCPPELKEVLNTILEKCGGLPLAIISIAGLLGSQPENPVLWDYVTKYLGSRLGTNPTLKDVVKETLNLSYNSLPHPFKTCLLYLGMYPDGHIMLKADLMKQWSAEGFVSANEAKDTEEIVDKYFDELVNRGILEPVEINKNGKVLSCTLHHAVHDLVMPKFNDDKFTMSVDYSQTITGPSTMVRRLSLHFSSTRYATKPAGIILSRVR

SEQ ID NO: 131130 - protein, 91 aa, Oryza sativa
  Clone ID: PAT_MRT4530_33225C.1.pep
MVARVLIHKNEEKSSETDPDRKSNQGKEITCGRSSSGENTVHLLHIPSNREETRGPPRIGAASPHSPSPEKIRSPHRRRWHTTVARCGALI

SEQ ID NO: 131131 - protein, 75 aa, Oryza sativa
  unsure (1)..(75): unsure at all Xaa locations
  Clone ID: PAT_MRT4530_33226C.1.pep
ADLGCHLVQGWRRRRSPXWWWSPPRSCSSCRSXPSPALSSRSTTSAPSEGVADXTQXLVDXWSAACAPXPHLXPR

SEQ ID NO: 131132 - protein, 94 aa, Oryza sativa
  Clone ID: PAT_MRT4530_33227C.1.pep
GGARLYSGGEVGSRRERAAKAVRGRRGDGDGVDARDDGGGGSDGEESGHERGRSNMARSRRRPRGRARALREGAAEFKGGGENRFAARTSRRRI

SEQ ID NO: 131133 - protein, 252 aa, Oryza sativa
  unsure (1)..(252): unsure at all Xaa locations
  Clone ID: PAT_MRT4530_33228C.1.pep
MSSLESARADLALLILYLNKAEARDKICRAIQYGSKFVSNGQPGPAQNVDKSTSLARKVFRLFKFVNDLHALISPPAKGTPLPLILLGKSKNALLSTFLFLDQIVWAGRTGIYKNKERAEFLSKIAFYCFLGSNTCTSIIEVAELQRLSKSMKKLEKELKHQELLKNEQYQMKLQKCNERRLALIKSSLDIVVAIGLLQLAPKKVTPRVTGAFGFASSLIACYQXCSQPQPNPSDPPEGVSVGSSNVATSKK

SEQ ID NO: 131134 - protein, 144 aa, Oryza sativa
  unsure (1)..(144): unsure at all Xaa locations
  Clone ID: PAT_MRT4530_33229C.1.pep
DTTPAARVHSTTVGXDGAGAGGGGGEVLQPRGLEPPRHDGVPGVPHPRAPGRSLLLLLRARRLRGGPCAAAAAAGEALRPALRRQLGGGGVERSGRDRITRRGEAREAAEGGSGGGGGGSQICGEKGGGSRNAGGAFEGVQRIG

SEQ ID NO: 131135 - protein, 1502 aa, Oryza sativa
  Clone ID: PAT_MRT4530_3322C.1.pep
MAQLSATLKVRRATNNATSPRSWPAGYTFADVLTAAACAPEGKPRGVLTAAACAPGGKPRGGNRAEGVSFDQIKGKAPLEAFGEVASSSATANSSALPATSHCHEGPSPQFPREKLDACSFNIHADFGAIQETRGGCYGDKLEDLFPRVSRGFREWVWVRKGSLSPQLGFPARSEEIRRFGDSARRIWRVLERRCDHRTFAQVVMKRRPPPGRPDWQANKRKAMESGDGGGDWGRQAGGDWGKQAGGSWAHREEEELRKQLLAKGNQVVGDPRRPGRPGQERRDWGDRGAGGSKPAMKCFKCGREGHHQASCTNPPLCYSCHSSGHISANFPMLQSKRGVKLCGFGIPGQGFYSLQVDVSDVEMAKHPASVVETGMTEDAIDELAVVWVKIFGVPKLARSEEHIKAIVELVGEFEMIDLSTLRRDGPVRERLACKDPRELHFAIHVYINKVGYMIRWEPEGYPPYDNSQFPPDDGDDKDKKGNGDNDDMNVDEDQNTQSPARGRSAHDRRSFMGGSRGDVQSAPPAYKGKKALEETCLSETQQCPTKRAACKKQSLLVVEKESMVDQEGDSKAMIVWEGNTTQDVEYESQEIDFPVTQKSTEEGDNEDVLTGILEFEKCDIPSLFDIAIQREEEELDEEDSFQEVSYKKNRPKKSEPAITSRMSLRNRDMASVPIPKIAELLTQKKNLETGGNSNPFVVFQIIDPVELNSIAIAANISLGSNEEEIANTIETIKAKELVQAKLAEMRWKKEKEKEMTDVDSLLRNEKELPDNMGEEVDNLNTPSQEMNNMEISSESLELKKRGLGNIARKKQLKEAWKSSRGASGGILIGTNDELIEKLGTHAGAFFLSVEFRYKKDNSVWEVIVVYGPVLESLKPDFLNELRWVGSDHSPPILNIGEDIERPPKYFRFESAWLTMENFHELVRQHMIPRDGSYILDYSNKKQSFLRRFLKGWELNLRQEKNQQKAVILTQIQELDAQADIRDLSPDEWNKRYEMEADLEHIYEMEELFWHKRCGEMTLLQGDRNTEFFHRMANGRRRKCLILSLEDEGRELTSKEDLKSHIIEYYKSLFRADNLSTVHLSPQIWQSELCLNADQKEAITRPFSMEELDKVIREAKLNIAPGPDGLNIHFYRAFWPEIKNDLFEMLLMLYEGKLDLKRLNFGVISLIPKSSDPTNIRQFRPICVLNDCFKFLSKVVTNRLSEVAPFVISQTQTAFIPGRFILEGCIILHEVLHEFKLKNQQGIILKIDFEKAYDRVSWNFLFEVLERKGFPKIWIDWIKACVMWDKVCVNINGERSDFFRTYRGLRQGDPLSPLLFNLVSDALAAMLDSAKRDSILTGLVPGIFPGGITHLQYADDTVIFIPFDVRQIVATKFLLYCFEEMAGMKINYHKSEIFTVRLIDAENEEVAKMLNCPRGKFPMKYLGLPISPDKILNQEFNFLPHKMEKRLSLWNGGNLTYAGRAVHINACLSSIPSYAMGFYQLPEGIHHKFDSLRGKYYWAGNR

SEQ ID NO: 131136 - protein, 171 aa, Oryza sativa
  Clone ID: PAT_MRT4530_33230C.1.pep
MRAAHVVSIAGLLVMAMAPLASSYPWPTCNGSSNYTANSAFQENLRILNATLPSNVSTSPGLFATATVGAAPDTVYALAFCPPVDNQNASGCRACVAGGFQDAPRLCPSNRAVYILYNFCVFTFSGVNFLGSATNPADQEAQLYNALNLTIPDVGAFTGPPTSSSTPRSIT

SEQ ID NO: 131137 - protein, 439 aa, Oryza sativa
  Clone ID: PAT_MRT4530_33231C.1.pep
SAFSCFPHPTNSTSFSACVEAISRADFPPMSDGYFWSIYYQYEGAVNEGQRGPTIWDTLTKRPGRVIDFSNADVAVDHYHRYKEDVELMNDIGMDAYRFSISWSRIFPNGTGEPNEEGLSYYNSLIDALLDKGIEPYVTLFHWDLPQALEDRYGGWLNSEIIEDFVQYAFTCFKEFGDRVKHWITFNEPYNFAIDGYDLGIQAPGRCSILSHVFCREGKSSTEPYIVAHNILLAHAGAFRAYEQHFKNEQGGLIGIALNSRWYEPFSNADEDTEAAARAMDFELGCITDFSACTMAAYRHGKKIGETAASSWLHIVPWGMFKLMKHVKEKYGNPPVVITENGMDDANHPFSRLEDVLQDDKRIQYHNDYMSNLLDAIRKEGCNVHGYFVWSLLDNWEWNSGYTVRFGLYYIDYKNNLTRIPKASVQWFSQVLAQKTAII

SEQ ID NO: 131138 - protein, 436 aa, Oryza sativa
  Clone ID: PAT_MRT4530_33232C.1.pep
MWSGDKGVMLGTKGSGGGDVGEWLLVLGFGGSIWKGLVHGRLGKRGGDLCAGEIDKRLLELGSCIVQVVMAHQKREATSDNGGGDEEWASKRPKVVGAAAEKEHILTSDASHETNGDEAQGGDASRKENTVSTNPCVSDEKAATNSNVSSGHGVILTSVEADAAEDKGCRHTMEDAWVLLPDASMESPGNLRCAHFAIYDGHGGRLAAEYAQKHLHQNVIAAGLPRELMDVKAAKKAIIEGFRRTDECLLQESTKGNWQDGATAVCVWVLGQTVVVANAGDAKAVLARSTSADGEGAVDDAKSQLKAIVLTREHKAIFPQERARIQKAGGSVGPNGRLQGRIEVSRALGDRQFKKVGLIATPDVHSFEVTRKDHFIILGCDGLWGVFGPGDAVEFVQNQLKETSSATLAVRRLVKEAVRERRCKDNCTAVLIVFKH

SEQ ID NO: 131139 - protein, 34 aa, Oryza sativa
  Clone ID: PAT_MRT4530_33233C.1.pep
ATIKNHVPLHKHLPTASIHNANENLRHTMQLITF

SEQ ID NO: 131140 - protein, 67 aa, Oryza sativa
  Clone ID: PAT_MRT4530_33234C.1.pep
EPSLCGYVQLSKLVNVSPGLRDGFKFNSVFSNLWLMLCECALLTRSPLVINLLERPELCNKIASRVT

SEQ ID NO: 131141 - protein, 47 aa, Oryza sativa
  Clone ID: PAT_MRT4530_33235C.1.pep
VRPFVLPSSTVGFSHYLWFGPPFKRLIGFPPAHFFPFVFAVHLSLYC

SEQ ID NO: 131142 - protein, 62 aa, Oryza sativa
  Clone ID: PAT_MRT4530_33236C.1.pep
MEMMLAHRPPEFTALPLAWTAELWVQAVSERVLDVKSPQRLTCRAHLQLQGVQQSKSFSNDQ

SEQ ID NO: 131143 - protein, 47 aa, Oryza sativa
  Clone ID: PAT_MRT4530_33237C.1.pep
DTGFGGVSTTPKATLATLSTPSTPFFIETGSSNKSSARTAIYKQDHP

SEQ ID NO: 131144 - protein, 126 aa, Oryza sativa
  Clone ID: PAT_MRT4530_33238C.1.pep
TKFALSSYRTSNPLTSEATPCWSSSSLRWRRLARRSAASSGFIKPSMPSAAAAAAGSRYLAFFPLGNRGLRSPGRAPSSSSPPAASASASATAGSGRLVPRGGGSMGRRRAGVAAEIPSCRIPAAR

SEQ ID NO: 131145 - protein, 117 aa, Oryza sativa
  Clone ID: PAT_MRT4530_33239C.1.pep
MAGSTNTVVQTISVTAAATGVHDFRVSLYPVLLSRPADDDGRVHASFACTLLDKSGKPASPESKDTADKIKVKSLDPNTTLSLRKEAVERFDDCFVVRCTSLCSRSPCLRQGLRYRR

SEQ ID NO: 131146 - protein, 1142 aa, Oryza sativa
  Clone ID: PAT_MRT4530_3323C.1.pep
MVYTRNGSRATGEGSNGEERTDGVHPNSNSGNGPPPLPENPTLAQVRAHQGSHQRPRFTPGQQGGPTTMIVRQYRPFNPSNFPQGASGSQNHHGGQPNRGAAPRPPVAPAQSGPSAQAKKETGTKPGSCFNCGELGHFADKCPKPRCAGPRFVQARVNHASVEEAQAAPEVVLGTFPVNSIPATVLFDSGATHSFISKKFVGMHGLRKEELSTPMRVHTPGNSSTSVSFSPSVLIEIQRSPFLANLILLESKDLDVILGMDWLTKFKGVIDCANRTVTLTNEKGETVVYKSLVSPKQGVSLNQIEAEIPVDTVEKNLRKLEDIPIVCEYPEVFPEDLTTMPPKREIEFRIDLAPGTAPIYKRPYRMAANELAKVKKQVDEQLQKGYIRPSTSPWGAPVIFVEKKDKTKRMCVDYRALNEVTIKNKYPLPRIDDLFDQLKGAKVFSKIDLRSGYHQLRIREEDIPKTAFTTRYGLYECTVISFGLTNAPAFFMNLMNKVFMEFLDKFVVVFIDDILIYSKSEEEHEQHLRLVLEKLKEHQLYAKFSKCDFWLTEVKFLGHVITAQGVAVDPSNVESVIKWTPPKTVSQIRSFLVLAGYYRRFIENFSRIARPMTQLLKKDEKFKWTAECDKSFEELKKKLVSAPVLILPDQMKDFQVYCDASRHGLGCVLMQQGRVVAYASWQLRPHEGNYPTHDLELAAVVHALKIWRHYLIGNRCEVYTDHKSLKYIFTQPDLNLRQRRWLELIKDYDMSIHYHPGKANVVADALSRKSYCTALCIEGMSALEARPTLVDQVRAAQVNDPEIAELKKNMRVGKARDFLEDEHGTIWLGERLCVPDDKELKNLILTEAHQTQYSIHPGSTKMYQDLKEKFWWVSMRREIAEFVALYDVCQRVKAEHQRPAGLLQPLQIPEWKWEEIRMDFITGLPRTSSGHDSIWVVVDRLTKDQTGERQLFGTEVLAEAEEKVRTIRERLRIAQSRQKSYADNRRRELTFEAGDYVYLRVTPLRGVHRFQTKGKLAPRFVGPYKILERRGEVAYQLELPSNMIGIHDVFHVSQLKKCLRVPEEQADSEHIDIQEDLTYVEKPVRILDTSERRTRNKVTRFCRVQWSHHSEEEATWEREDELKAAHPHLFASSSESRDRDSV

SEQ ID NO: 131147 - protein, 93 aa, Oryza sativa
  unsure (1)..(93): unsure at all Xaa locations
  Clone ID: PAT_MRT4530_33240C.1.pep
LDTTKLNLREYERALLKVCEXSEKVMGLYSLPMTVVTVGMVGNTLQPSLGANPHRPKETLHPTAPGRVWPNLLVRLNQGPAQPAQVLAGGLLC

SEQ ID NO: 131148 - protein, 116 aa, Oryza sativa
  unsure (1)..(116): unsure at all Xaa locations
  Clone ID: PAT_MRT4530_33241C.1.pep
MAKSSSFGVYSSPFDLRPGFAWFRQVWSKGLMTXANKPLTGKGEIGASAETVQTVWYGMRRPLSTDAPTETNVGILQRTRSXCFAAFAFSRHCAARSSGIYRFAYPYDTWWVVIGW

SEQ ID NO: 131149 - protein, 124 aa, Oryza sativa
  unsure (1)..(124): unsure at all Xaa locations
  Clone ID: PAT_MRT4530_33242C.1.pep
MAERRACSDGVALVAAEMARTAAGGVEXGGGGGGQACGRRSHPSLPAPCPCLLREAWGSLDALVGRLHAAFGEHGGHPQANPFRARAVRLYLREVRDSQAKXPPTWSSYSQAAAVATSPASPAA

SEQ ID NO: 131150 - protein, 138 aa, Oryza sativa
  unsure (1)..(138): unsure at all Xaa locations
  Clone ID: PAT_MRT4530_33243C.1.pep
FFFFFCKYNSXVCTCTYIRQSDKGKSFFPLTPPGLTKAIVGLASTKIYIIKWLLARRRQSRSSHGGSGLATGAVPRYCHGPGLTVHLXCRGVDCRAPWAAGSLYSFFTFPLCELXXPGSRCCGAXVPEXWRPVPVNRR

SEQ ID NO: 131151 - protein, 42 aa, Oryza sativa
  Clone ID: PAT_MRT4530_33244C.1.pep
RALSSLWVSRPRENFIATENVSPTGTEFQVIQQSQQNQFSGF

SEQ ID NO: 131152 - protein, 460 aa, Oryza sativa
  Clone ID: PAT_MRT4530_33245C.1.pep
MEAACVLAVVVVVMAFLSPAARGGVTSTYRRSLQALPDMPIDADVFRPPPGFNAPEQVHITLGDQTGRAMTVSWVTPKLPDSNVVRYGLRADNLTHTANGTFRRYSFGRKYRSGFIHHATLTGLDYGTKYHYAVGSGDTASARSFSFTTPPKPGPDVPYKFGLIGDLGQTFHSNDTLSHYEACGGDAVLFIGDLSYADNHPGHDNNRWDTWARFVERSVAYQPWIWTTGNHELDFAPELGETTPFKPFTNRYPTPFGASGSTRPLWYSVRMASAHVIVLASYAAYGKYTPQWRWLEGELRRVDRAVTPWLIVCVHSPWYSSNGYHYMEGESMRVEFERWLVDAKADVVLAGHVHSYERTRRVSNVAYDIANGMATPVFNRSAPVYINIGDGGNIEGLADDFRWPQPDYSVFREASFGHATLQIVNRTHAFYEWHRNSDGVKVVADHAWFTNRYWFPTDTN

SEQ ID NO: 131153 - protein, 93 aa, Oryza sativa
  Clone ID: PAT_MRT4530_33246C.1.pep
MLEGKAMVEDTDMPVKMQLQAMSAAYKALDRFDVLDCRSIAAHIKKEFDMIHGPGWQCVVGASFGCYFTHSKGSFIYFKLGALRFLVFKGAAS

SEQ ID NO: 131154 - protein, 481 aa, Oryza sativa
  Clone ID: PAT_MRT4530_33247C.1.pep
MVLSKAVSESDMSVHSTFASRYVRASLPRYRMPENSIPKEAAYQIINDELMLDGNPRLNLASFVTTWMEPECDKLIMAAINKNYVDMDEYPVTTELQNRCVNMIAHLFHAPLGEDETAVGVGTVGSSEAIMLAGLAFKRRWQNKRKAEGKPFDKPNIITGANVQVELKEVKLRDGYYVMDPEKAVDMVNENTICVAAILGSTLNGEFEDVKLLNDLLDKKNKETGWETPIHVDAASGGFIAPFLYPELEWDFRLPWVKSINVSGHKYGLVYAGIGWCIWRNKEDLPEELIFHINYLGTDQPTFTLNFSKGSSQVIAQYYQLIRHGFEGYRNIMENCHENAMVLKEGLVKTGRFDIVSKDEGVPLVAFSLKDRSRHDEFEISDMLRRFGWIVPAYTMPPDAQHVTVLRVVIREEFSRTLAERLVLDIEKVMYQLDALPSRLMPPVPPAPLLVVAKKSELETQRSVTEAWKKFVLAKRTNGVC

SEQ ID NO: 131155 - protein, 640 aa, Oryza sativa
  Clone ID: PAT_MRT4530_33248C.1.pep
MGANGVASAAAAATAVLVYVALSSSGGGGEAARLRRPEEEDEEESKKRWPERAPASWREAAAVAARTVGFTYRETLGRWPLGDIAFGIRHYMRIQGNLQHEYTGRSCVPLEGPVTRQELIAILRYLRLCMFFAKKPYEVFLEFGGYGQSDILIRKSKARVMKPSFTIVRDKSTKSFILFIRGATSVKDRLTAATAAEVPFHHVVLKEGRVSNVVVGHVHCGMVAAARWIADQAIPCLSRAVEQFPDYRIKIIGHSMGAGIAAILTYMLRENKKLSSSSCIAFGPAACMTWDLAESGKEFVTTVVNRNDLVPSFGKVSAANLHTEVIGSSWAHDLLEQIQQTRILGFVNRSVTFMQSQFPFISNPRSKVADVDLMLSGTSEAETILSVDARAAIKKHSTLSFWPSAPSNRKTLESSLMNPTQSIAALMSTYVGTDKDTEEHKNQNSDTKELYRQDKEADAEKNLERFLEALRSSPSASQEPLQFYPPGRIMHMVVLPSPKEPSSIDQCSQDECVALYETPRSMYSKIRLARSMIRDHYMPRYIKDVLTLVTKRFFREHNMRGSHNKDVLTFGRGSRENTWWVVGNEIGLVASVGWTTSVCARRLITGGNQKWLGNFTICHLIHNPITIYHSIRCYIMGRME

SEQ ID NO: 131156 - protein, 347 aa, Oryza sativa
  Clone ID: PAT_MRT4530_33249C.1.pep
MAAAAASPSSSPPPPPMSPAPQAASPAEDRRGGRAPVPPYVKAAAGSVGGVMEACCLQPIDVIKTRLQLDRSGAYRGIAHCGTTVVRSEGVRALWKGLTPFATHLTLKYALRLGSNAVLQSAFKDPGTGKVSAHGRLASGFGAGVLEALLIVTPFEARSPLHLFLFYLPGVVKIRLQQQKGLSPDLLRYKGPIHCARTIVTEEGLFGLWAGALPTVMRNGTNQAAMFTAKNTFDIVLWKKHEGDGKVLQPWQSMISGFLAGTAGPICTGPFDVVKTRLMAQGRTGDIKYKGMVHAIRTIYTEEGLRALWKGLLPRLMRIPPGQAIMWAVADQVMGLYERSYLQPAHM

SEQ ID NO: 131157 - protein, 90 aa, Oryza sativa
  unsure (1)..(90): unsure at all Xaa locations
  Clone ID: PAT_MRT4530_3324C.1.pep
RATDEVKTRLCMXXHLPKAPAPKTCTAHPNKLIKLSQAHRPKGARGRGSIIGQTAYASATRGRTXQFHTSASSAPLMVPHSNTMEPKPVG

SEQ ID NO: 131158 - protein, 51 aa, Oryza sativa
  Clone ID: PAT_MRT4530_33250C.1.pep
PVFLLLFLPPTSHLPLYSVFLVRFLYHNIIQFPLPSPLIVLVEDYVRFLPI

SEQ ID NO: 131159 - protein, 43 aa, Oryza sativa
  Clone ID: PAT_MRT4530_33251C.1.pep
VHSLMGKTKGTIKILKIQSRSYIMHNKIILEEATRNLTLGHKP

SEQ ID NO: 131160 - protein, 137 aa, Oryza sativa
  unsure (1)..(137): unsure at all Xaa locations
  Clone ID: PAT_MRT4530_33252C.1.pep
RREECQFWRSSLPTPNRNRRSXRQHPEFTAAADKAGXRRKKGGREVAPARSGPGRLSEKKPARDPTARAVAPPPSDCRAAPLPMTXPPAPPVLHPQATXRRPSAREPAPRCCPLLILLIIHLKMLLPPSTFDNHISS

SEQ ID NO: 131161 - protein, 150 aa, Oryza sativa
  Clone ID: PAT_MRT4530_33253C.1.pep
PAVAALIDLMARRRGQSAANGPKPTTLELVDQHDEAPQEDSEDDGYGAGDDLDLDDSDYGLPGAMSALALAKKATGRPGTAGSGSPIAAVQPAKAKPVQGPVRVRSWPAGPLPSEHSDDKSEKGVAKPKDKINRQIGLGPLLAELKIKGQ

SEQ ID NO: 131162 - protein, 85 aa, Oryza sativa
  Clone ID: PAT_MRT4530_33254C.1.pep
PGNNRHHFNLMVIELQMVSLMNGKGSSMSFFPFSFGKRHAHLQINNFNHMQTTNYKETGTVTQGKRTNQLCSPSDVLYADPSWIK

SEQ ID NO: 131163 - protein, 65 aa, Oryza sativa
  Clone ID: PAT_MRT4530_33255C.1.pep
PLACGGLCPCLSGQCLGGFTGSSSRIYLSVCMVNCHNLVSVWLYHGLLDFAYLVGCISLTCCSLR

SEQ ID NO: 131164 - protein, 586 aa, Oryza sativa
  unsure (1)..(586): unsure at all Xaa locations
  Clone ID: PAT_MRT4530_33256C.1.pep
AVHACDVLSWPGWRSRKSWTRHELARPQAVHVGACRKARDMDRRQWMYHSPRYLALYREEXKFISIVKAHAEQNNMTKIICLCADCKNERAWEDVGKVKEHLVTRGYMEKYEIWTRHGEQEVAGPEKEVPTEVEDMVYGVGCGEDKIDLEEMLRHAEPEVLIGSARGLNNFETLQKAAKEVLYEESKGCDSEFSTLRPVLELMRLKVRYGLSDSSFDSLLELSKNMLPRRNSLPYNTYQAKKLICPLSLGVEKIHACVNHCILYRKEYASLDECPTCGASRYKSNRNTFLEASNIFKGTKRKIPQRVMWYFPVKDRIKRICSNLRDADLMRWHQEGRKKDGMLQHPTDAHQWINFDAKYEEFAKDPRNIRFVLSTDGLNPFGDMSSSHNTADLWKEGLKVWDEYLREYFTVKAIIFVIINDYPAMFSVSGQIKGKTGCVICLNGTYYRYLPGSNEFVYMQHRRFLRTDHKYRKMKSEFDGIEESDPPQKYTSGEKVCEMTEKIVCEFGKGTKKPSKGTKRKKPDKTKKPEDRKKPGDQLPPPFKKHSIFFKYLPYWKDLEVRHAIDVMHLEKNVFDNVIETLLDIP

SEQ ID NO: 131165 - protein, 254 aa, Oryza sativa
  Clone ID: PAT_MRT4530_33257C.1.pep
MAPARIRGDEGIGKNSCNKTWRKKISKKQSAQQGGVNQPLVVPQLFKFHKFMRLFTLQEMLFLRRRKSKWEQQQEEVELFSEEEECSTTRFWRDPDTEFCNICGDDKGNHLELMCPYNYLSPAAYFPCRARLALWGNYTTTLRYKCSRHREEEQSEPPMHDEANARRLGFLRCLVRVNNLSELCPPEQLVELFGRFGPLWMWYVPTRGSGGTCKGFGCVVFQRHRHAEEAVEALNCWEFGGRKLRVDWAYPCLN

SEQ ID NO: 131166 - protein, 74 aa, Oryza sativa
  Clone ID: PAT_MRT4530_33258C.1.pep
FIIADRVFGFMVANSKALLLTLRPVFRGKSGYYFSFHCCEADLMSHSEDPDMLYHRWGSFGGFLSPLLSKDGTM

SEQ ID NO: 131167 - protein, 810 aa, Oryza sativa
  Clone ID: PAT_MRT4530_33259C.1.pep
MMAMKQKRRPERTGERRRSGCGIRTSAIRDDADSWTRNRPGSGRVSVSYPAQARRGRGRAHARTDTEAAAGKTDRHREPRTGSTSPAIRPTTTSSNSSSRGRLDRGERAFYSPLEIGSERRRRPRPTRARINATVVVAPCTAQRTPKAGCSFQRRRRRRRGDRKAFHPTIAAPLPLLGLLRLVDSSYLTAATLLALRGWRGELCVGTRGGTLARLPDSWVLRPLEEDGVHHPARPLSIVATELVSDVTVRIGTTKFYLHKKMIPTTGDENIEIHIHDIPGGAKAFEICAKFCYGMIVTLNAYNVIAARCAAEYLEMHETVDKGNLIYKIEVFLSSSIFRSWKDSIIVLGTTKAHLPWSEDLKLVSHCIDSIASKASTDTSKVEWSYSYNRKKLPTENGLDLEWNGVKKQQFVPHDWWVEDLADLDIDSYKQVITAIKTKGMVPKDVIGEAIKAYTYKKLPSLSKVSMVHGDAKVRAMLVTITCLLPSEKGSVSCSFLLKLLKATNLLKCGELCRKELMKRIGRQLDEASVSDLLIPTVDGETTVYDIDMILSIVEEFVRQDSKNAQKHNGGEVDSHVQAPSASMIKVAKVVDGYLAEVAKDPNTPILKFIHLAETMSINSRPVHDGLYRAIDMYLKEHPSLGKNEKKKLCSLMDCKKLSPDACAHAVQNERLPLRTVVQVLYHEQTRASAAVTIRADSICVGSYESSRSGATTNTEDEWDGVMVVEDLSLSTKTTTKLDGAANSHCSNGKAKKGGASTPKKAAHRRTTTVPTGKGQSGERSSSDSSDSAILQKLELPKRTPSRSTKPAAV

SEQ ID NO: 131168 - protein, 52 aa, Oryza sativa
  Clone ID: PAT_MRT4530_3325C.1.pep
LTTINKTFLLAITNFEPYQASIIYLWVVSQDKLFIQSKVVLSTFIALTRTLS

SEQ ID NO: 131169 - protein, 55 aa, Oryza sativa
  Clone ID: PAT_MRT4530_33260C.1.pep
MRVGPRTGTPGELGRLGAGGVVVLCCVCCVCVCCVFVLCCCCCVCCVLCCCVVWF

SEQ ID NO: 131170 - protein, 332 aa, Oryza sativa
  Clone ID: PAT_MRT4530_33261C.1.pep
MAEQNKRSSSAAENGHAGGKKARANVEVKQEEEEAEEGEMSQEEESAKTGPLVVATAMDDPQIDVRIAVGLLHCHACLLPLKPPVFKCEAAHVVCSGCRGNHGQLCRRAAAYAHCAELDAIVGAAKVACAHAPYGCDSYVVYGAAAEHQRACPCAPCSCPDPGCGFRGSPAALLGHFATDHPWSVTQISYAKPCRLAVPLPRRCHVLVGEDDRAMFLVVSPSPCGVGVGAAVCVACVRANGDDAAAAQYKCKLWVEVPTNSDNMVMMTSKVRSSDLSGGFPAAEQGMFLVVPPELLHEVSGETPILSIRIDRAAPAIAKPTTPRARSLRRLQ

SEQ ID NO: 131171 - protein, 48 aa, Oryza sativa
  Clone ID: PAT_MRT4530_33262C.1.pep
YPYHWPWDLEINWCGILGQDTKKQSRSFVCNQINQWCKTNLHQCFFQF

SEQ ID NO: 131172 - protein, 579 aa, Oryza sativa
  Clone ID: PAT_MRT4530_33263C.1.pep
MRGSSNNHKSKSEEEGVALVQVAEEGETTTKQQQQPDSNKAAAEEEEEEAGYGYSNWWSTWVSSAVKKRVRAPGRVGIVVVVGGFVLLALLAAVAATTTTTWPQLVDFTGAVSSFLQFGNGDGARRHRPHRTSLVSIPIPFTCGSGNDTGTCPRYAASAPAPAPASMSPPPPQTSTVDYCPSYFRHIELDLAAWLASGISPEAVERGRRQAHFRLLVVGGRAYVETYRRAFQTRDVFTQWGILQLLRRYPGRVPDLDLMFNCDDMPEVRAAAYPDRAAAPPLFRYCKDPSTLDVLFPDWSFWGWPEVNIRPWAPLLAEMAEEKARLPWSRREPYAYWKGNPDVSPLRQELLRCNHSLPPDDTVRLYRQDWGFANRNAFRDSNLARQCRHRYKLYVQGRSWSVSRKYILACDSPVLAVATPYQDFFSRGLAAGKHYWPIDPSRSKLCRDIRFAVRWGNAHPAQAQRMGLAGSAFATDDMAMDYVYDYMLHVLTRYASLLRYKPTVPDRAVELCPESMACPRRGRDRDFMMQSREQYVADYQPCTIPPPPLTADDATNMAHRDAEVLSNIDKMIITEDKHN

SEQ ID NO: 131173 - protein, 53 aa, Oryza sativa
  Clone ID: PAT_MRT4530_33264C.1.pep
MGDPRRLCGSDDVPHVIGGRTADADATMDMDTDTSQFLFGGATAEVVTGEEGV

SEQ ID NO: 131174 - protein, 932 aa, Oryza sativa
  Clone ID: PAT_MRT4530_33265C.1.pep
MEEMGSAQLSALAVCVCIFGCLAMADGQNVTGGDGSRPAELRIGALFTFDSVIGRAVMPAIELAVADVNADPGVLPGTKLSVITQDTNCSGFLGTMEALELLAKDVVAVLGPQSSSIAHVISHAVNEFHVPLVSFAASDPTLSSLEYPYFVRATTSDYFQMSAIASIINQYRWREVIAIYVDDDYGRGGITALGDALAKKKSKIAYKAKLPPGASRTTIEDMLMHVNEMQSRVYVVHVNPDSGLAVFAAAKSLGMMSTGYAWIATDWLSAVLDSSDHISTDRMELTQGVIMLRQHVSDSGIQHSLVSRWNNLTRNGGHSSFSSYSMRTYDSVWLVARAVEDFLSEGNAVSFSADPNLQDIKGSNLQLDSLRSLNNGERLLEKVWHTNFTGVSGLVQFTAERDLIHPAFDILNIGGTGFRTIGYWSNISDLSVVAPEKLHSEPLDSSTNNIELHGVIWPGQTSEKPRGWVFPYHGKPLRIGVPLRTSYKEFVMPDKGPDGVKGFSVDVFKAAVGLLPYPVSFDFILFGDGLKNPSYNDLIEKVSDNHFDAAIGDIAIVTNRTRLVDFTQPYTESGLIILAPAREIESNAWAFLKPFTFQMWSVLGVLFLFVGAVVWVLEHRTNTEFRGPPRQQIMTVCWFSFSTMFFAHRENTVSALGRFVLLVWLFVVLIINSSYTASLTSLLTVQELTSGIQGLDSLISSPSSIGYQVGSFARSYLVQELNIAETRLVPLNSPSDYARALELGSGNGGVDAIIDELPYVEIFLSKYCKFKTVGQVFTKSGWGFAFPRDSPLAEDLSTAILTLSENGNLQRIHDEWLTGTECSADDNEVGSNRLSLSSFWGLYLICGFSCVLALLIFFLRICCQYSKYNNQVGLDSPEPEIVTRSARLTTIKSIISFVDKREEEVKNALKKKPNDSLQPRTGSTGEQSTLPP

SEQ ID NO: 131175 - protein, 87 aa, Oryza sativa
  Clone ID: PAT_MRT4530_33266C.1.pep
MATPGCSALSWSWSLGGSERKMRARLPVIVEEKCYTTGYRPECVGRYRLLPTGRDGKRMSMFTASRWQDDMMMASWSRSPPAHRYCL

SEQ ID NO: 131176 - protein, 68 aa, Oryza sativa
  Clone ID: PAT_MRT4530_33267C.1.pep
LSGLYWTAYRSPSSTSLKSSIYMKILSPPRIWHLREPRTFGLVSRRNPERDLFYILLLTSSDPFIADN

SEQ ID NO: 131177 - protein, 206 aa, Oryza sativa
  Clone ID: PAT_MRT4530_33268C.1.pep
MADCYNGIVNPHDSTEVDSNACMLYTTRSFDRTCRNRNASEDSSRRYAAKTAGTPTRLRSIPKKAAWAKAIWQKPCREANGLRRRWTSPEEGYMGEGCMTKAISRGSTTSEVGPRQLAIAPGVGGCHHQEIVCLGVLHEDLPTLIALATSVSLSLLTVWMLFLAHNLAKSVAGVEATIPRFLDLTLIKSFKAVVDKLGENGIMHSW

SEQ ID NO: 131178 - protein, 258 aa, Oryza sativa
  Clone ID: PAT_MRT4530_33269C.1.pep
MQQQLDQQQQQQQHQYDHFFSGHGQFNSETLEAVLCRPPRGAAADPAVPAAAAAAAVLTAARNGGGGHGRARKRPFRTDRHSKIRTAQGVRDRRMRLSLDVARDFFALQDRLGFDKASKTVDWLLTQSKPAIDRLAADPSSSSHRAAGDTRMSSAERGGDHHMVAVGAAGSGKGDADKARGPRGGRSAPMELGCELGRLVPAPVLGEYYYELAEMMSNNTGGEGDDDGDYDDDGDFLDDSGFLCHYRSKKKFSIKDIS

SEQ ID NO: 131179 - protein, 61 aa, Oryza sativa
  Clone ID: PAT_MRT4530_3326C.1.pep
MGSNNVLGAFSGDGIPESCNDKMVNNITKDVGDFYDLFEGPMVTVSRSLYAQAVPMVKFTS

SEQ ID NO: 131180 - protein, 203 aa, Oryza sativa
  Clone ID: PAT_MRT4530_33270C.1.pep
MAANAGNKIRNAKLVLLGDVGAGKSSLVLRFVKGQFVEFQESTIGAAFFSQTLAVNDETVKFEIWDTAGQERYHSLAPMYYRGAAAAIVVYDITNPASFTRAKKWVQELQAQGNSSTVVALAGNKADLLETRQVQIEEAKTYAQENGLFFMETSAKTATNVNDIFYEIAKRLLQGQPAQNPQAGMVLSQRPNERLVSSASCCS

SEQ ID NO: 131181 - protein, 106 aa, Oryza sativa
  Clone ID: PAT_MRT4530_33271C.1.pep
FHTPRGKFRAAVMLATGSTGVSILLQYASTHSMSEEKSPLKERLHSPERQQEEQRLHLQNQERDLSSSLSLLAWNCGRHSSFFNGQWNLLDRKNINSSRSSALQDD

SEQ ID NO: 131182 - protein, 89 aa, Oryza sativa
  unsure (1)..(89): unsure at all Xaa locations
  Clone ID: PAT_MRT4530_33272C.1.pep
LLPVEASPTPPLNHEATTRPLCQGVGKXESAHGEDGQLLHKLSTRQQPSRVTSNDAAXEMIKCHTSSPPARSDRLRLWRLCIGHPECNH

SEQ ID NO: 131183 - protein, 155 aa, Oryza sativa
  Clone ID: PAT_MRT4530_33273C.1.pep
MRQRYSADLLQSEKTKLSRNNKVIFSKNSHLQEVLAPRMLALHQIQEVRLKTIVTRHAPCDAEVNLNRLAKAMGFRKRIANLACVVYGREVSSLSAKKEFRHFFSWSIASTLISAMLYRWTRSERTNVSSAVLDAPLRLRLREQLANNTIPSDSD

SEQ ID NO: 131184 - protein, 74 aa, Oryza sativa
  Clone ID: PAT_MRT4530_33274C.1.pep
MLVSTTSTTDEAEWQGGRSLYEDVTNTGAWTDEVVDRCRRPHTSTPPSLSCMGEREAKIDDDDQRSLIGGFSRV

SEQ ID NO: 131185 - protein, 55 aa, Oryza sativa
  Clone ID: PAT_MRT4530_33275C.1.pep
LQVFYACFWSPLRLFVEINFFFFGAVVFNCSCGSCHPKFSFGPGGLSLRAFIKIK

SEQ ID NO: 131186 - protein, 396 aa, Oryza sativa
  Clone ID: PAT_MRT4530_33276C.1.pep
MAEVDTFLFTSESVNEGHPDKLCDQISDAVLDACLAEDPESKVACETCTKTNMVMVFGEITTKANVDYEKIVRDTCRGIGFVSNDVGLDAEHCKVLVNIEQQSPDIAQGVHGHFTKRPEEIGAGDQGHMFGYATDETPELMPLSHVLATKLGARLTEVRKNGACAWLRPDGKTQVTVEYQNDNGAMVPLRVHTVLISTQHDETVTNDEIAADLKEHVIKPVIPEQYLDEKTIFHLNPSGRFVIGGPHGDAGLTGRKIIIDTYGGWGAHGGGAFSGKDPTKVDRSGAYIARQAAKSIVANGLARRCIVQVSYAIGVPEPLSVFVDTYGTGKIPDREILRIVTENFDFRPGMIIINLDLMRGGNGRYLKTAAYGHFGREDPDFTWEVVKPLKWEEPSA

SEQ ID NO: 131187 - protein, 75 aa, Oryza sativa
  Clone ID: PAT_MRT4530_33277C.1.pep
MLNKLGGKQTIGFFFEKGGFKDFSILKKWGPFVSKFFPLKNFPEAACTVLRGGPIFLAKPPGGPRKNAPPGKGQN

SEQ ID NO: 131188 - protein, 90 aa, Oryza sativa
  Clone ID: PAT_MRT4530_33278C.1.pep
EAAGAAPGIPARPRGGPHLSLWGGVLKRGASWEKGVPGEKGFPANNPTKQTNRKFKGSGRGGLRRGLTQINGGGPTTPFPGKKTRPACHF

SEQ ID NO: 131189 - protein, 77 aa, Oryza sativa
  unsure (1)..(77): unsure at all Xaa locations
  Clone ID: PAT_MRT4530_33279C.1.pep
RGSLLVPPFFFCEVCMYRLLIPCGQFISIYACYEIQTXWVCCGNCXLHACIGMHGLPACVSVHVLMYGSPPESYISW

SEQ ID NO: 131190 - protein, 319 aa, Oryza sativa
  unsure (1)..(319): unsure at all Xaa locations
  Clone ID: PAT_MRT4530_3327C.1.pep
VGKARDFLEDEHGTNWMGXERLCVPDDKELKDMILTEAHQTQCSIHPGSTKMYQDLKEKFWWASMRREIAEFVALCDVCQRVKVEHQRPAGLLQPLQIPEWKWEEIGMDCITGLPRTSSGHDSIWVVVDRLTKEELGTRLNFSTAYHPQTDGQTDYQASLQMVPFEALYCRKCRTPLFWDQTGERQLFGTEVLAEAEEKVRTIRERLRIALSRQKSYTDNRRRELTFEAGDYVYLRVTPLRGVHRFQTKGKLAPRFVGLYKILERRGEVAYQLELPSNMIGIHDVFHVSQLKKCLRVPEEQADSEHIDIQEDLTYVEKP

SEQ ID NO: 131191 - protein, 79 aa, Oryza sativa
  Clone ID: PAT_MRT4530_33280C.1.pep
LVPDARSSSIVNVHRDMSRVVVVVCVTSGPRQILYGSEGVSNTESAVGYFTIWMFEDRCMFSLLRPQCSQSIAMPEEVR

SEQ ID NO: 131192 - protein, 89 aa, Oryza sativa
  unsure (1)..(89): unsure at all Xaa locations
  Clone ID: PAT_MRT4530_33281C.1.pep
TFTPTVPXPHVAAVTDEYPTHCDRNYFLGADAARAVSANINXVVSRLDAALHLSYVEQGLTFDRMQSKMRVFSCRSAVDAVPPPVPAPP

SEQ ID NO: 131193 - protein, 53 aa, Oryza sativa
  unsure (1)..(53): unsure at all Xaa locations
  Clone ID: PAT_MRT4530_33282C.1.pep
MPIHRYEKRHPNINAXLISPCFRVRERDHVIIGQCRPLSKIARLNVLKVILSS

SEQ ID NO: 131194 - protein, 186 aa, Oryza sativa
  Clone ID: PAT_MRT4530_33283C.1.pep
MGLEERVSGRAVGEKKGTNSPPYPFIPASPALVSSFHAPAPGRAAATVRIPRRAHNLGTGRREAPRQTALTRPMSDVVPGATVGDMGPGKRLGGLGVPRHAPRALALPCPEALPQLLCGGGSEGRKPRLNSHQCAAPQLSLTAFNACPHVASVSGEVEAGGVRWVPLKDGLLLSFRAKAQVAVRSR

SEQ ID NO: 131195 - protein, 385 aa, Oryza sativa
  Clone ID: PAT_MRT4530_33284C.1.pep
PTRPRKPKTNIQILQQSVLLKYKYTIVFLKEHAKEIYAEVRAAYIDTMNKVLSAHFRAYIQALEKLQLDIATSTDLLGVETRSTGFLFSMGKESLKTRSSVFALGERINILKEIDQPALIPHIAEAKSQKYPYEVLFRSLQKLLIDTATSEYLFSDDFFGEESLFNDIFAGPIQVVDEHFNAVLLNCYDAIGIMLMIRIIHQHQLIMFKRRIPCVDSYLDKLDLNLERLRMAVEELLVKLAKMFPKQKLQTVFLINNYDLTISILKEELLLEHFSDLIKFVKSRPSEDTASSSDKASVSDVEPLVKDFAGRWKAAIELMHKDVITSFSNFLCGMEILKAALTQLLLYYTRITECVKKINGGSALNKDLVSISSILYEIKKYSRTF

SEQ ID NO: 131196 - protein, 723 aa, Oryza sativa
  Clone ID: PAT_MRT4530_33285C.1.pep
MDAAPAAAEAHDGQRERFDLGVLVGDLALDEDVASDEDESLEGLRQELDDCKDDEEVANILANGIKLRDYTKGVENNIRQIELDSIQDYIGESENLVSLHDQIRDCDNILSQMETVLTGFQTEIGSISSEIKVLQEKSMDMGLKLKNRKAAESKLSKFVEDIIVPPRMIDIIVDGEVNDEYMKTLETLSRKIKFIEVDAMVKSSKALKDVQPEVERLRQKAVSKIFEFVIQKFYALRKPKTNIQILQQSVLLKYKYTIVFLKEHAKEIYAEVRAAYIDTMNKVLDYQCMTWILVQLCVPLIARVLSAHFRAYIQALEKLQLDIATSTDLLGVETRSTGFLFSMGKESLKTRSSVFALGERINILKEIDQPALIPHIAEAKSQKYPYEVLFRSLQKLLIDTATSEYLFSDDFFGEESLFNDIFAGPIQVVDEHFNAVLLNCYDAIGIMLMIRIIHQHQLIMFKRRIPCLDSYLDKVNLSLWPRFKMVFDLHLNSLRNANVKTLWEDDVHPHYVMRRYAEFTASLVHLNVEYGDGQLDLNLERLRMAVEELLVKLAKMFPKQKLQTVFLINNYDLTISILKEAGTEGGKAQVHFEEVLKSNISVYVEELLLEHFSDLIKFVKSRPSEDTASSSDKASVSDVEPLVKDFAGRWKAAIELMHKDVITSFSNFLCGMEILKAALTQLLLYYTRITECVKKINGGSALNKDLVSISSILYEIKKYSRTF

SEQ ID NO: 131197 - protein, 83 aa, Oryza sativa
  unsure (1)..(83): unsure at all Xaa locations
  Clone ID: PAT_MRT4530_33286C.1.pep
IRVATWRGRTDQQVRLTMDVRVWTAPSPARVXSVLRAHAVDRALMQATYNFKLTHQTGTETDVPVDVYILDQAVXEGIDLPYS

SEQ ID NO: 131198 - protein, 60 aa, Oryza sativa
  unsure (1)..(60): unsure at all Xaa locations
  Clone ID: PAT_MRT4530_33287C.1.pep
MXXFLVPXXEGELSGRSNLPSHTYQQSLIARRFQATHPNGRVTRTLLRVLMGNPAVKHET

SEQ ID NO: 131199 - protein, 62 aa, Oryza sativa
  Clone ID: PAT_MRT4530_33288C.1.pep
KSSISCLKKKMRSQLRKASQNPMGWSRLPPSLRKRGHWVVVVRSPGAGVRTATGASPVRTRG

SEQ ID NO: 131200 - protein, 430 aa, Oryza sativa
  Clone ID: PAT_MRT4530_33289C.1.pep
KSYDVACTRRKLGSLERRRTIGRRSRRPLGERVHICCRCEFPIALYGRLIPCEHAFCLACARSDSSCYLCDERIQKIQTVKMMEGIFICAAPMCLKSFLKRSEFDSHIPEVHANLLHNTPEREERNEPDAPNISRASGGDQRQSQMPEMSTARAPPRTGVSPSSSSHVQDRDDRSRYHHSRDQTPQRPPMLSRPPSFHGRHSYPPGDTPSENNPPQGFDRPYNWAHENAPGATPVRQESEHGSQDKQQMMPNAPFMFPPMPHQPNFMMPMNMNQPLMSNTSFNYPLQQDGNPQFFSAPFQMQLPDVGLDQGSASGVQPTPPGPLSFPEGLQRPWGMGLMGNPFQSMPLGQGMPEGAGEPQGGGGMVFLQGGFGVMPDGSMNSGIPGRDLSGQGDRGVLAQMPMPMQMQMSLPPPPPTQPPSAGQQTFSRT

SEQ ID NO: 131201 - protein, 1253 aa, Oryza sativa
  unsure (1)..(1253): unsure at all Xaa locations
  Clone ID: PAT_MRT4530_3328C.1.pep
MVYTKNGSRATGEGSNGEERTNGVHPHSDSGNGPPPLPENPTLPQVMAHQTQMMASMMQQMQQQHQQMHQRMLQHAEQQHQQFGPPPPQSKLPEFLRVRPPTFSNTTNPMEANDWLHAIEKKLNLLQCNDQEKVAFATHQLQGPASAWWDNHMATRPPGTEVTWAEFCRSFRKAQVPDGVVAQKKREFRALHQGNRTVTEYLHEFNRLTRYAPEDVRTDAEKQEKFMAGLDDELTNQLISGDYVDFERLVDKAIRQEDQRNKMDRKRKAAQFRAHQGSHQRPHFTPGQQGGPTTMIVRQYRPFNPXQFSQGASGSQNHHGGSCFNCGELGHFADKCPKPRRAGPRFIQARVNHVSAEEAQTAPEVVLXEAEIPVDTVEKKLRKLEDIPIVCEYPEVFPEDLTTMPPKREIEFRIDLAPGIAPIYKRPYRMAANELAEVKKQVDEQLQKGYIRPSTSPWGAPVIFVEKKDKTKRMCVDYRALNEVTIKNKYPLPRIDDLFDQLKGAKVFSKIDLRSGYHQLRIREEDIPKTAFTTRYGLYECTVMSFRLTNAPAFFMNLMNKVFMEFLDKFVVVFIDDILIYSKTEEEHEQHLRLVLEKLKEHQLYAKFSKCDFWLTEVKFLGHVITAQGVAVDPSNVESVTKWTPPKTVSQIRSFLGLAGYYRRFIENFSRIARPMTRLLKKDEKFKWTAECDKSFEELKKKLVSAPVLILPDQMKDFQEFEHLNVGIVEHRFVAALEARPTLVDQVRAAQVNDSEIAELKKNMRVGKARDFHEDEHGTIWLGERLCVPDDKELKDLILTEAHQTQYSIHPGSTKMYQDLKEKFWWVSMRREIAEFVALCDVCQRVKAEHQRPAGLLQPLQIPEWKWEEIGMDFITGLPRTSSGHDSIWVVVDRLTKEELGTRLNFSTAYHPQTDGQTERVNQILEDMLRACALDFGGAWDKNLPYAEFSYNNSYQASLQMAPFEALYGRKCRTPLFWDQTGERQLFGTEVLTEAEEKVRIIRERLRIAQSRQKSYADNRRRELTFEAGDYVYLRVTPLWGVHRFQTKGKLAPRFVGPYKILERRGEVAYQLELPSNMIGIHDVFHVSQLKKCLRVPEEQADSEHIDIQEDLTYVEKPAEAQPSRPSLSPRDADRWAPPVGPVPFLQLALSRQQPPPRPRFRFFWATSATSARFPVAPSRFFPISPNSPELPIAPAPCNHPPPPFPLLQPPLAAARVAAAPRRPRRRVREDKLYPGRPFPVEFRRRNSHPLAL

SEQ ID NO: 131202 - protein, 158 aa, Oryza sativa
  unsure (1)..(158): unsure at all Xaa locations
  Clone ID: PAT_MRT4530_33290C.1.pep
GDSAAAALLLLLAMXLAQRRADGAFCVFKPDQSPAAMQKAIDYACWRSADCTQIMQSGACYQPSTIGGGGEILRRRREQTAHDGAERTARGGAEMLAAMAGWSTRRTTTEEAGPGANAVVVGPSSCKQRPRHRALAAAPLPPNAAVASTEKKKGGERC

SEQ ID NO: 131203 - protein, 88 aa, Oryza sativa
  unsure (1)..(88): unsure at all Xaa locations
  Clone ID: PAT_MRT4530_33291C.1.pep
KVDPGRYATRLILSPDRWDKSAELGTYQVFGXGERICAGNMLARLQLTIMLHHLSCGYKWELLNPDAGIVYLPHPRPTDGAVMSFSEL

SEQ ID NO: 131204 - protein, 40 aa, Oryza sativa
  unsure (1)..(40): unsure at all Xaa locations
  Clone ID: PAT_MRT4530_33292C.1.pep
KIVDLVXXAXPLALTPDDDPRKEELKKLQTQLEDINKLAH

SEQ ID NO: 131205 - protein, 67 aa, Oryza sativa
  Clone ID: PAT_MRT4530_33293C.1.pep
MEELKDTILYVNWYDQPEARNQSMCLTGEVETNDVEHSYIPMDTRGMLVELEKFSWAPAPKTLPYRP

SEQ ID NO: 131206 - protein, 112 aa, Oryza sativa
  Clone ID: PAT_MRT4530_33294C.1.pep
LFNQGPMTPTLLDIVMITGLDITPSANPVSMNTKSKFSFKTRTIGGWTGYITMNMGTGPMSPREHIAFLVMWLEKFLFCGQVGGPTTNWQHIAEAPDRRRERRRGGGEAPGH

SEQ ID NO: 131207 - protein, 430 aa, Oryza sativa
  Clone ID: PAT_MRT4530_33295C.1.pep
MHAHQHQHALLAALLACALAASSSTAGAQPAGQQGYAYGDVSGQQVHVSTTMIVLLAAVVGVFLFIAISTIYLRHCTGYDPATEGGGVGGSRSMILPANSFVSRRQRRPRGLDSSVVRMFPTMKYAEAKALRVGKVAGAALECAVCLSEFEDDEMLRFLPKCSHAFHPDCIGQWLASHVTCPVCRRNLDPNKDTTEEVIIPAAAAADPNSTSSEIVVIRQEDGAHPAAVVIDVVTEEDDEERRKEELELQAIGTQLRAMRSRSGLRPKTSAAKLPRSHSTGHSLAVRLDGDLERYTLRLPEHVHREMVAAGEQSVRRGRRLGEGVGMGARCSPRFSRSGRWSSFLSNSLSGKLSFLSPSSRRTPDSTQVEVSSSSSSSVTKVKGKRVAAVDVADDGSAHGTAQYPGCTVASSAAAAAVDVEKAATRQVRT

SEQ ID NO: 131208 - protein, 81 aa, Oryza sativa
  Clone ID: PAT_MRT4530_33296C.1.pep
GQCRPLSKTVRFNGLKVNPAGSPGGNGGKKAFPPARAWTRIIHGEFKKKTLCLKSWQGWCFDPNELENGPNKTKSYQQKGF

SEQ ID NO: 131209 - protein, 820 aa, Oryza sativa
  Clone ID: PAT_MRT4530_33297C.1.pep
MDAHDGEADELPPPPPVPANVVPIKADDVESEVPANKPAKPKRFPMARPGLGRKGQPIQLLANHYKVSVKSSEEYFFHYNVILKYEDDRPVDGKGVGRKVIDKLQQTYRSELSSKDFAYDGEKSLFTIGALPQVTNEFTVVLEDVSTGKTAANGSPGGNDSPGGSDRKRVRRPYQTKTFKVELCFAAKIPMNAIAQAIKGQESENSQEALRVLDIILRQHSAKQGCLLVRQSFFHNNPNNFVDLGGGVMGCRGFHSSFRGTQSGLSLNIDVSTTMIVKPGPVIDFLLANQKVDHPDRIDWQKAKRALKNLRIRTTPVNSEFKIIGLSDRNCNEQMFSLRQRNGNNGDVDEVEVTVYDYFVKNKGIELRYSGNLPCINVGKPKRPTYFPIELCSLIPLQRYTKALSTLQRSSLVEKSRQKPQERMSVLNDALRHSNYDSDPMLRASGISIAQNFTQVEGRVLQPPKLKAGNGEDIFPRNGRWNFNNKQMAEPFDVFEESPSLRRAPVSRRVDDMFEQIKSKLPGAPKFLLCLLPERKNCEVYGPWKRKCLAEFGIVTQCLAPQRVNDQYLLNLLLKINAKLGGINSLLQIEASPSIPLVSKTPTIILGMDVSHGQPGQSDRPSIAAVVSSRQWPLISKYRASVHTQSPKLEMMSSLFKPRGTEDDGLIRESLIDFYTSSGKRKPDHVIVFRDGVSESQFTQVINIELDQIIEACKFLDEKWSPKFTVIVAQKNHHTKFFQSGSPDNVPPGIREAQQPYQLFSSVAPICYAHLAAAQVGTFLKFEDMSDASSSQGGHTSVGSVPVPELPRLHEKVRSSMFFC

SEQ ID NO: 131210 - protein, 901 aa, Oryza sativa
  unsure (1)..(901): unsure at all Xaa locations
  Clone ID: PAT_MRT4530_33298C.1.pep
MDAHDGEADEFPPPPPVPANVVPIKADDVESEVPANKPAKPKRFPLARPGLAXKGQPIQLLANHYKVSVKSSEEYFFHYNVILKYEDDRPVDGKGVGRKVIDKLQLPYRSELSSKDFAYDGGKSLQLQYRALLYDXAANGSPGGNDSPGGSDRKRVRRPYQTKTFKVELCFAAKIPMNAIAQAIKGQESENSQEALRVLDIILRQHSAKQGCLLVRQSFFHNNPNNFVDLGGGVMGCRGFHSRFHSSFRGTQSGLSLNIDVSTTMIVKPGPVIDFLLANQKVDHPDRIDWQKAKRALKNLRIRTTPVNSEFKIIGLSDRNCNEQMFSLRQRNGNNGDVDEVEVTVYDYFVKNKGIELRYSGNLPCINVGKPKRPTYFPIELCSLIPLQRYTKALSTLQRSSLVEKSRQKPQERMSVLNDALRHSNYDSDPMLRASGISIAQNFTQVEGRVLQPPKLKAGNGEDIFPRNGRWNFNNKKLIQTCSVDKWAVVNFSARCDVRNLIRDLIRNASAKGIQMAEPFDVFEESPSLRRAPVSRRVDDMFEQIKSKLPGAPKFLLCLLPERKNCEVYGPWKRKCLAEFGIVTQCLAPQRVNDQYLLNLLLKINAKLGGINSLLQIEASPSIPLVSKTPTIILGMDVSHGQPGQSDRPSIAAVVSSRQWPLISKYRASVHTQSPKLEMMSSLFKPRGTEDDGLIRESLIDFYTSSGKRKPDHVIVFRDGVSESQFTQVINIELDQIIEACKFLDEKWSPKFTVIVAQKNHHTKFFQSGSPDNVPPGTVVDKQVCHPRNYDFYMCAHAGMIGTTRPTHYHVLHDEIGFSPDDLQEXVHSLSYVYQTSTTAISVVAPICYAHLAAAQVGTFLKFEDMSDASSSQGGHTSVGSVPVPELPRLHEKVRSSMFFC

SEQ ID NO: 131211 - protein, 97 aa, Oryza sativa
  Clone ID: PAT_MRT4530_33299C.1.pep
FVLRARFVPEVVGAPAVPYRQRCNPIQLALPLTSSSKPFSWSHIISNFNQNPNFGSIQTQPIWCIIVVNRGAIRRVHPSCSLSGLAHGRQRPSSAPM

SEQ ID NO: 131212 - protein, 1157 aa, Oryza sativa
  Clone ID: PAT_MRT4530_3329C.1.pep
MVYTRNGSRATGEGNNGEERTEGVHPNSNSGNGPPPLPENPTLAQVMAHQTQMMAAMMQQMQQQHQQMHQRMLQHAEQQHQLFGPPPPQSKLPEFLRVRPPTFSSTTNPMEANDWLHAIEKKLNLLQCNDQEKVAFATHQLQGPASAWWDNHMATRPPGTEGNMTVTEYLHEFNRLARYAPEDVRTDAEKQEKFLAGLDDELTNQLISGDYANFERLVDKAIRQEDQRNKMDRKRKAAQFRAPQGSHQRPRFAPGQQGGPTTMIVRQYRPFNPSNFPQGASGSQNHHGGQPNRGAAPRPPTAPAQSGLSAQAKKETGAKPGSCFNCGELGHFADKCPKPRRAGPRFIQARVNHASAEEAQAAPEVVLVTLTNEKGETVVYKSPDSPKQGVSLNQIEAEIPVVTVEKNLRKLEDIPIVCEYPEVFPEDLTTMPPKREIEFRIDLAPGTAPIYKRPYRMAANELAEVKKQVDEQLQKGYIRPSTSPWGAPVIFVEKKDKTKRMCVDYRALNEVTIKNKYPLPRIDDLFDQLKGAKVFSKIDLRSGYHQLRIREEDIPKTAFTTRYGLYECTVMSFGLTNAPAFFMNLMNKVFMEFLDKFVVVFIDDILIYSKSEEEHEQHLRLVLEKLKEHQLYAKFSKCDFWLTEVKFLGHVITAQGVAVDPSNVESVTKWTPPKTMSQIRSFLGLAGYYRRFIENFSRIARPMTQLLKKDEKFKWTAECDKSFEELKKKLVSAPVLILPDQMKDFQVYCDASRHGLGCVLMQEGRVVAYASRQLRPHEGNYPTHDLELAAVVHALKIWRHYLIGNRCEVYTDHKSLKYIFTQPDLNLRQRRWLELIKDYDMNIHYHPGKANVVADALSRKSYCTALCIEGMCEKLQQELERLNVGIVEHGFVAALEARPTLVDQVRAAQVNDAEIAELKKNMRVGKARDFLEDEHGTIWLGERLCVPDDKELKDLILTEAHQTQYSIHPGSTKMERLRIAQSRQKSYADNRRRELTFEAGDYVPRPSQAAPSSLSRATDRWGPFAGAAPRLDDVVLATRCHHRWPSDRVAAAALRAPCPRRCRWCRADGCRLPLAAPRRCSRVRRFRPRELSPAVAAGGRAAARRRLASRLCAVLCPSRAAPGSLIGLGRSGPSVPVDRRWTASVVPVHGGPAPLCR

SEQ ID NO: 131213 - protein, 535 aa, Oryza sativa
  Clone ID: PAT_MRT4530_332C.1.pep
MSSPVFVVVGFCLLRMFILFPNPVYHVAAFSQIGNNRSENTKEKYNHKVCKPRVCPGISSPRWPMNCPALGRQPAHYRGRVFVRSFDLESTSKLARTASLFASPPRRHLNLSIAWLDLPIDPCTTQRTVSSIDRLAFTSASTGSIMVAALPDDVLAEVLRRLAPRCLAACRCVCKPWRDLVDDRRLLLLLRAEELLPRPLAGIFLNFFGLFNSEFFARRPSTGAAAAISGDLDFLPTRPPDGARECPLQDHCNGPLDRGRRHYEVLLIPSFRRKPGPNDYLYDKLRGEVDPVLEASTWPPASYAIPVFSSRTWLWQERSFAREGGEEAASTVAEMRSSWSSEFSDNRYSDFYLGKSKKGVYLAFCRDQCLKVWILDETFGEMKWELKHDKDMRHILLGCNNRQGIGSWILQDINYRKDSYTYEDDNMEELDQKKVECEPNKEAALEKFEWISDDENVLDNEDRVTGAYHGYIDIIGFHPYKEIIFLSESLKRGLAYHLSSSKVEDIGNLYPTSYNIHLINERFITASFPYTPCSM

SEQ ID NO: 131214 - protein, 245 aa, Oryza sativa
  Clone ID: PAT_MRT4530_33300C.1.pep
MVSLDIVRRDESAISDLAGHGFEEEDYPVVDYESYLQTAMSTTVNKFLSLRVHFRQPHFGFGSLNVTFMLYQFFLHGLSCHWYHAKPYHPMSTFWFFSPLSKQNQLRVFHMGKYEPEAPIATVEDPISSHDKLENTEMVASLEMLGNMTDKPLAPLEMLPKVKLSVETPPAPMSLPMRFGNGGCHIDLNDQPPEVEKLVDETLKISGEEIKANIELPAPVSPPRSFGTGGCGCDLNEMPEDNDES

SEQ ID NO: 131215 - protein, 169 aa, Oryza sativa
  unsure (1)..(169): unsure at all Xaa locations
  Clone ID: PAT_MRT4530_33301C.1.pep
RNPGRPTRRTFAARRAAPPPPPPPGGRGTATHXGQAXTQXGNAXXEXXGXEHGTQPEGQXPXDKTXGGGEEAFXCVXXEXXXGKXXPRAXXAAPEPTXXXEXRXXDXRQRXQTEQXXXGKEXAANXRAXGARHQGKEKGXXXXDRXRKXADNGTXXQXRPGXNXXGGGT

SEQ ID NO: 131216 - protein, 63 aa, Oryza sativa
  unsure (1)..(63): unsure at all Xaa locations
  Clone ID: PAT_MRT4530_33302C.1.pep
XXXFFFFFFFFFFFFFFXQIPLDXXVEGXKQTKPYRXKNPKYNSCIISSXLINQKKQXXNSSS

SEQ ID NO: 131217 - protein, 51 aa, Oryza sativa
  Clone ID: PAT_MRT4530_33303C.1.pep
GTPSVISVEWAMTYLMRYPRLQNKIQEELERIFRRYLIMSETDLQSFRYMN

SEQ ID NO: 131218 - protein, 90 aa, Oryza sativa
  unsure (1)..(90): unsure at all Xaa locations
  Clone ID: PAT_MRT4530_33304C.1.pep
YQICEPRXCLATGEAVXSRRRRELXLTGSAXARRASRRAAXPXPPPLRPSRPPRGHHHSTXQAQCESSRXLDXTRAAVVVEESGVXAXVR

SEQ ID NO: 131219 - protein, 60 aa, Oryza sativa
  Clone ID: PAT_MRT4530_33305C.1.pep
VSRRSSVKEKEMLQLFFNQTNELMQRMDQTNDQDIARHCFKNTRVVLYFRSDNFICLIQS

SEQ ID NO: 131220 - protein, 240 aa, Oryza sativa
  unsure (1)..(240): unsure at all Xaa locations
  Clone ID: PAT_MRT4530_33306C.1.pep
SSWTLAPGNLHLFKADELNGDALTVAFTGCEGVFHTGTSVPEDETKEMMVPAVKGTKNVLEACSASGVQKLVMVSSIGAVXLYPSWPQDRVRDETCWSDKEFCRENKNWYSFAKTEAEEIALEYSEKNGLHVITVCPALVFGPLLHTMQLNTSSRVLLYIMKGHTPPNFNLPKFGITIVLLVDVGNKVELTSEKPTKLGWKPRKLEETLADSVESYKKAGLVDDEPCRLPHVYRMPDTQE

SEQ ID NO: 131221 - protein, 257 aa, Oryza sativa
  Clone ID: PAT_MRT4530_33307C.1.pep
MTSSLSSSTASAAACCKSRSRNPPPAPAPHTSTARVVRSSRRRLLLVFFSAEAAAAATSGLIQTPCGQAYPFAGTNVKKPQPPSTPYSQSQSQQQFGLDAKGRIRACPSTNPGCVSTNPTVGASCSLASPLIVPANTPTDKAAASLREAILKTQRNAVIKADEETAYGHYIQAEVDGGAGRDVMEFLLKESQSQSQEVVAAYRCVATKVIFVYPFTTAVGDSRGQSQRIAAVAQELGWYAPDLLNAATADDHSILDY

SEQ ID NO: 131222 - protein, 93 aa, Oryza sativa
  Clone ID: PAT_MRT4530_33308C.1.pep
GTKLDNDVCGTCKSQYGWLCCSYVPYVKTWKLPVLVPATLLCLPPSSQEALCWSISSVNCNSNLRWLSMLMFWCKSAGIVLTNNVTIPLIRTI

SEQ ID NO: 131223 - protein, 86 aa, Oryza sativa
  unsure (1)..(86): unsure at all Xaa locations
  Clone ID: PAT_MRT4530_33309C.1.pep
PPPPRMVRSYKKRIPIPLKKSWFFFFSKNYAAKGFSSKQGYSPKGSSKKGYXGKKKNKPGITRVRFTRERKNRGKPPLMCRVKPQK

SEQ ID NO: 131224 - protein, 41 aa, Oryza sativa
  Clone ID: PAT_MRT4530_3330C.1.pep
MGSTDTDPGSNACLGPGDGDSGAHSFILGDALHGERYGTKK

SEQ ID NO: 131225 - protein, 320 aa, Oryza sativa
  Clone ID: PAT_MRT4530_33310C.1.pep
MAPTVEISHLSFTYPGIDGRPPPGAPPLIEDVCFSLDAGHRCLLLGSNGAGKTTILKILGGKHMVDPSMVRVLGRSAFHDTALTSSGDLCYLGGEWRRDVAFAGYQVNIQMDISAEKMIFGVVGVDPQRRDELIKILDIDLAWRMHKASDGQRRRVQICMGLLKPFKVLLLDEITVDLDVLARANLLTYLKKECEERGATIIYATHIFDGLDDWPTHIVYIARGKLQLALPLEKVKEMSQLSLMRTVESWLRKERDEDRRRRKERKEKGLPEFDKVTEGSRVIGDPAARAVNNGWAAGRLASTVAGEENFIFSSNSVLRQ

SEQ ID NO: 131226 - protein, 388 aa, Oryza sativa
  Clone ID: PAT_MRT4530_33311C.1.pep
MAPTVEISHLSFTYPGIDGRPPPGAPPLIEDVCFSLDAGHRCLLLGSNGAGNSTTLSGPSVLSFLSPVRVLWSRGLILGGCWGVGKTTILKILGGKHMVDPSMVRVLGRSAFHDTALTSSGDLCYLGGEVGAGVLRSYISMFWRWRRDVAFAGYQLISLGEAWVNVTVVLQRIHILDIDLAWRMHKASDGQRRRVQICMGLLKPFKVCFILLVMEKMCHVCNLYPNNKVLLLDEITVDLDVLARANLLTYLKKECEERGATIIYATHIFDGLDDWPTHIVYIARGKLQLALPLEKVKEMSQLSLMRTVESWLRKERDEDRRRRKERKEKGLPEFDKVTEGSRVIGDPAARAVNNGWAAGRLASTVAEQPYFLSKKMSILVHVELELRM

SEQ ID NO: 131227 - protein, 82 aa, Oryza sativa
  Clone ID: PAT_MRT4530_33312C.1.pep
RSLIRSFFSGTPQRNLLGYYIILTILIMVFQNKHQVAMLQETCINSTIVLQKFCLLCGIVIRSSVQIEVIHIFLQIDYSFRS

SEQ ID NO: 131228 - protein, 37 aa, Oryza sativa
  unsure (1)..(37): unsure at all Xaa locations
  Clone ID: PAT_MRT4530_33313C.1.pep
LIXSLAKLLVEDSTNTNYLHFIFFKSIGLPNPQIYSN

SEQ ID NO: 131229 - protein, 110 aa, Oryza sativa
  Clone ID: PAT_MRT4530_33314C.1.pep
LWGFFFFFFFFFFFLGVRHNGLPQKGVVKRPLPTDAKPGLCHIGHFTRFGGGVLLQWTKIPPLSPGGFLLLRGIKEGALCEEGRAGPPLPGSPPGRRLSQPAAPLAFTAR

SEQ ID NO: 131230 - protein, 151 aa, Oryza sativa
  Clone ID: PAT_MRT4530_33315C.1.pep
NRPPSPGFSPNQAKPTATSAQAHRAHTPAKPNQMATVPPQPPQLEFSSKGGNQPPLGPTGANHSGHSGEWTVLSPHHGRTDGWTSKAPPHGTTCTNPWQFLGPSLPSQPSTWDGMAKLSSKPKLIQWTCLNNGMCPLDLDAHQEVITIGDN

SEQ ID NO: 131231 - protein, 1020 aa, Oryza sativa
  Clone ID: PAT_MRT4530_33316C.1.pep
MGASAARLAALLLLLLAAAAAVGECVYIPYNTSAGVVGGKLNVHVVPHTHDDVGWLKTVDQYYVGSNNSIQGACVQNVLDSLVPALLKDENRKFVYVEQAFFQRWWRQQSDMIKDIVKGLISTGRLELINGGMCMHDEATVHYIDMIDQTTLGHRFIKEEFGQIPRIGWQIDPFGHSAVQAYLLGTEVGFDAFYFFRIDYQDRDTRKGTKELEVVWRGSKTFGSSADIFAGIFPKNYEPPPGQFYFEVDDTSPIVQDDPLLFDYNVEQRVDDFVAAAIAQANITRTNHVMFTMGTDFKYQYAESWFRQMDKLIHYVNKDGRVNALYSTPSIYTDAKHAENVPWPLKTNDFFPYADNPNAYWTGYFTSRPALKRYVRVMSGYYLAARQLEFFKGRSNSDLTTDSLADALALAQHHDAVTGTEKQHVANDYAKRLSIGYTQAEKLVSSSLSCLSQSGSKSHCPSQTTNFEQCPLLNITYCPPSEMDLSQGKSLVVLVYNSLGWKREDVLRIPVISDSIVVHDSEGREVESQLLPIANASLYMREKHVKAYLGMLPAAKPKFWLAFPVSVPPLGFNTYFISSGKKSASVSLMSTLHSSQGSENSNMQIGQGQLKLQYNAAGALSLYSNSKTQVEANFEQKYKYYIGQDGNGSDPQASGAYIFRPNGTVPIKTDGQVPLTVLRGSILDEVHQQINPWIYQINRVYKGKDYVETEFIVGPIPVDDGNGKELSTEVVTNMATNKTFYTDSSGRDFIKRIRDYRSEWKIEVHQPIAGNYYPVNLGIYVEDGSRELSILVDRSVGGASIKDGQIELMLHRRLLHDDGRGVAEALNETTCFDNQCEGLVIQGKYYLKIDPQGEGARWRRTFGQEIYSPLLIAFAEQDGGNWVNSHVTKFSAMDPAYSLPDNVALLTLQELEDGTVLLRLAHLYEAGEHKDLSALASVDLKRVFPDKKIVKIVETSLSANQERSAMEKKRLKWKVEGPPADEKIVRGGPVDPSKLVVDLGPMEIRTFLINFAPQSGKQLM

SEQ ID NO: 131232 - protein, 103 aa, Oryza sativa
  Clone ID: PAT_MRT4530_33317C.1.pep
HTQPNTPPAIETLAAEVYNYCAKMVDDYNTLNYWDIINYMLWLEQRDGRSLYGAQADYGPLGTPAQNSLPLITADHILGSNISTTTLCMSWGTDNIWTDIMSI

SEQ ID NO: 131233 - protein, 362 aa, Oryza sativa
  Clone ID: PAT_MRT4530_33318C.1.pep
MAVVASRCTGLLLPDLGASLAGFRRRRSTPASSLSFRPRRARRRLGSLSCIAPPDSAEPQTDEPAAKDDSTEDKAEASSASQDAGNPTFPNKDLSRRIALASTIGAVGLFAYQRLDFGGVSLKDLAANATPYEEALSNGKPTVVEFYADWCEVCRELAPDVYKVEQQYKDRVNFVMLNVDNTKWEQELDEFGVEGIPHFAFLDKEGNEEGNVVGRLPKQYFLDNVVALASGEPTAVVATVAGAAQLGEVAGACERHQAAVEAFCPEAGEDGDAGQARGSGGASSWRWRHRGARIDVVSGNGAGARGDGDGGNGADFMATVASAACRRRQHDGWLTALAAVGCCGIRALAAEAAARNLWRRLQ

SEQ ID NO: 131234 - protein, 143 aa, Oryza sativa
  Clone ID: PAT_MRT4530_33319C.1.pep
SARRLPVNQPPVLHGGLCRQPLPVAISSKASSRRLTHRRRVCTPRAALPPWKAKEITHEDAWRRRVTPRNSRIEFQAECILDGTDEVYSSEKPPSDAYLNSEGWEIEQELPTVLSKSYRNGGYDARFHPQSSQGSGQSLLVPK

SEQ ID NO: 131235 - protein, 1253 aa, Oryza sativa
  unsure (1)..(1253): unsure at all Xaa locations
  Clone ID: PAT_MRT4530_3331C.1.pep
MVEVLEEEAVMFTPTPSGSEDASESCGPRHRRRNSPTPPRRDPSRREDPTHSGGSALSPPPGGGRPQRVRARRRLTYGDGGSPRGALQAVGVLLRHPPVNSEPETPVQRWLGDVANLVTTAQWQLAAGGRPAVTVAVGRGRPTRRHRYVAYPHYPLLVSKERARRSATASRRSTDPTSLGASGSRRRHDGLYGEQDARINIERRRDERRAARMGEGASSSGVPHSSSRGGPPPTLTPGGTGCRAFVASLRNVRWPPKFHPNLTEKYDGSINPSEFFHIYTTIIVAAGGDDRVMANYFPMALKGQARGWLMTQPPDSIYSWEDLCQQFVTNFQGTYPRPGEEADLHAVRRKDDESLCSYIQRFCQVRNTIPCIPAHAVVYAFRNGLQHNRMLEKIAFKESKTTAELFELADKVARKEEAWAWNSPGIGAAAAATPESIPRSKRLADCRSVKNLAERFRKADEEKRQGRREGKAPATPADDRRGEAKKKAPADDGDDSEDLEFQIPQGTIATRDGGXACAHTSRRGFKAMRRELLATVPTHEAAWKARWSEXAFDALKAPGMKLQPSLLIIGVTPGHTWPLGHVELLVTFGDSTNFRTERIDFDVADLNLPYNAVLGRPALVKFMAATHYAYLQMKMPGPSGPITVFGDVKVALACAEQRADNLAVATEPQALEASASRASKKHLTSADEVDFIREVIHPEWLANPVVVPKANDKLRMCIDYTDLNKACPKDPFPLPRIDQIVDSTAGCDLLCFLDAYSWYHQIRMAREDEEKTVFVTPMGTFCYTTMPFGLENAGLTFQRMTRITLSNQIGPNIEAYVDDLVVKMRHQDTLLQDLAETFDSLRSTRVKLNPDKCVFAPGLEEPLLLYLAVTPHVVSAALVFEREENGPEAPLTRDGPSSPEDPMPEAPSPWEDPEAPVGGGEALASGPEAYDPDMIRDPPGPLSKGAPDHLPLTTRTGPTERCKCRSHADFAKRGRPQIRRSARLPSHEQHGGIRMTPRGVEGGGRNGHPPSSGPRRLPAGCESSIQRIPVHRPTNGRICPRSVAHGIDLIADTHQDILGPFKAARGGYQHLYIAIDKFTKWPEAYPVVKIDKHSALKFIRGITSQFGVLNRIITDNGTQFTSELFGDYCNDMGIKLCFASPAHPKSNGQVERANAEILKGLKTKTYNVLKKHGDSWLEELPTVLWANRTTPSRATGETPFFLVYGAEAVLPSELSLGSPRVALYDEANQDDLRRDDLDYLEEWRRRAALHAAH

SEQ ID NO: 131236 - protein, 145 aa, Oryza sativa
  Clone ID: PAT_MRT4530_33320C.1.pep
STHPAKNSKENHRRSHRDEPPSLPSTGRGTKTHKNTLAGSIAVIVVTTVAVVVVSSTTGDEPLLSPPSAAEDEPPPSDAGDEPPPPAPRAPRATTGADPRVLPAAASVHTQGQRRRIHPSKGQGCWIVAPGALDVATAFITSRST

SEQ ID NO: 131237 - protein, 50 aa, Oryza sativa
  Clone ID: PAT_MRT4530_33321C.1.pep
RVVQHDAGDRGHSQLPQVRGWPYCRHARAFHHRLVQSIPPPSRRIVGVYK

SEQ ID NO: 131238 - protein, 189 aa, Oryza sativa
  Clone ID: PAT_MRT4530_33322C.1.pep
HKNTLAGSIAVIVVTTVAVVVVSSTTGDEPLLSPPSAAEDEPPPSDAGDEPPPPAPRAPRATTGADPRVLPAAASVLPPAVASSPQTDGRGGDGRAGAARGVAGRRRQSRRRCRRWSTPPEPAPIVAARAATSVADLVKGKLPPAASAAARRLWGEGEEMGKGEGEERGGREGGENERGGGGGGDKIEG

SEQ ID NO: 131239 - protein, 90 aa, Oryza sativa
  Clone ID: PAT_MRT4530_33323C.1.pep
MWHQPNRPALEQPSGDESHRRCAPLSGLVSPSRTPLSGLVSPSRSRDMQFSPHIDDSFYESRSRSSFTTVTVIHYFTTYKPPMLKITVDC

SEQ ID NO: 131240 - protein, 60 aa, Oryza sativa
  Clone ID: PAT_MRT4530_33324C.1.pep
LGSTSVVEINTVVSSTKLHLLRDLAIVSCIVLSVGSLPCGKIYLHVGLTVLYLHHHLLEV

SEQ ID NO: 131241 - protein, 87 aa, Oryza sativa
  Clone ID: PAT_MRT4530_33325C.1.pep
HKIIHKSSPVPPASADGEGKGRRGRRGEGEEEKEGPRLFGRASPACATPMGPPPPRATPMGPPPRPPSSQPMPPPSATTRGWQGRRS

SEQ ID NO: 131242 - protein, 136 aa, Oryza sativa
  Clone ID: PAT_MRT4530_33326C.1.pep
WGFPQFIYMISTKFRKEGKREPGETKIGGGQKWKNGPKDHKKLGLKVEKQRPNRRSNQNGNCQRGRGGKHKKTRRGACANPAGLAGHPKTPGKEKRMYRGETTTGKRGKTRRNGLSPRLVSHPRRRCRTPTRTPAP

SEQ ID NO: 131243 - protein, 107 aa, Oryza sativa
  unsure (1)..(107): unsure at all Xaa locations
  Clone ID: PAT_MRT4530_33327C.1.pep
CWASRARVGASLSDSRTAGVSAAPPLXGTRGPPPPPLVEPELPPPPPATATSGSXPPTHTPREREGPPNSPRAQEPEPEPETVVVMVVPQVSLVPQGISGAHPEGDL

SEQ ID NO: 131244 - protein, 741 aa, Oryza sativa
  Clone ID: PAT_MRT4530_33328C.1.pep
MDTLNHIGAGDKLYGDNGTLAVVLHHGGASCKKNSSIPQTGTLSHIGAGSGVSSDESMLYDAVIAKPGAGSGDELYGDNSALAVVLHHGGASCKKNSSIPQTATLSHIGAGSGVSSDESMLYDAVIAKPGAGLDDELYHDNGTLAVVLHHIGAGHEKNKAYDVIDHTATINHIGADGKDSMVNDHVGAGGDQNKVFDNIGALGMPAAQQAPPSTGKVNHYQSSDHLGNNYHHDESSVRQLLHTRGRLCTRPGRILVPGGRGAHLYAAPSYTLAAADQIHNLQLFGVNNFAATGIIDYFGAGADDLGTASSVFDAADDITLAHYLAMATVQSVWQENCMEQFKLVLEALHQPHRNLYIAVDMEFTADAATNMSHRPVTSTSCYQHVRRYVNGGDIVQMGLTFAFVGDVEGEQAPSPPIALEINFDFNVNSPKYHGESIHFLSSQGHDLTQHSKRGVTPEFVYEGLLRHLPFGDGSVTWVAYHGDYDLAFLLRLLQGGDHGSDALLTLSCFFKIVSLSGHQMHRMDARRGLLAGLEEWNMAIKCARHIDDHTGSIYVVKMLPHKLDEEARRIEELRSYAVEAQQNYELIKTFLKDSDLYEIIVTFMNAEGMLAYSRAWKFCISSRADNACVHPQQFAKFMASCGALGDPNISWVTFHGAHGIARMIRSFDIITIPWIECKGGLFDVAQALNLKEIEADMEAARVLLTLRCYMRLAERPDFPGTKMAVQGLLKESCCWKCPANC

SEQ ID NO: 131245 - protein, 177 aa, Oryza sativa
  Clone ID: PAT_MRT4530_33329C.1.pep
LGQQGRRMSSPQQTARKRCYVNLGKGDDSARRLSSLPSLLAPHTAASFPLFSFPTLTSSSASTLTPCPDYNVDFDTSEDHRPSINLHVSSTSLLRSRHFATLLSDRVLLLPPVHRFAELLAADTNTVDAAINLDVAINAAGRERRGGGGEGADVEVATRRGGVAVPVVLLPRAPPRH

SEQ ID NO: 131246 - protein, 138 aa, Oryza sativa
  Clone ID: PAT_MRT4530_3332C.1.pep
AKVFSKIDLRSAYHQLIIREEDIPKTAFTTRYGLYECTLVVVFIDDILIYSKSEEEHEQHLPQGVAVDPSNVESVTKWTPPKTVSQIQSFLGLAGYYRRFIENFSRIARPMTQLLKKDEKFKWTAECDKSFEELKKKL

SEQ ID NO: 131247 - protein, 98 aa, Oryza sativa
  Clone ID: PAT_MRT4530_33330C.1.pep
MENAPRLVPQRMSDVVAPSFLIAVAPESMERCHHRPAEDGGAWPWSCHAGGGGDGACLVGDLSTTPEEFARLRGIQQTHGFYLTRQPDELLVWFAVAA

SEQ ID NO: 131248 - protein, 68 aa, Oryza sativa
  Clone ID: PAT_MRT4530_33331C.1.pep
LICTRYGYSFYSPLFHIKLLPAQFLVFAFHSLHIGALKFLCTNSEQVCPVSDVMDVGSLLNCFASLTC

SEQ ID NO: 131249 - protein, 72 aa, Oryza sativa
  Clone ID: PAT_MRT4530_33332C.1.pep
LCCVGFFFFLGLFLKRGFLFSTQTCKEMMLQPQVQQIAFLQSKKLSYTSREEFMKMYQKGRALKNVTDRHIA

SEQ ID NO: 131250 - protein, 147 aa, Oryza sativa
  Clone ID: PAT_MRT4530_33333C.1.pep
AAAAMDDVVGRVARPARPSARAIMEGTHKQISSGGASGGYCTVPWCSICTGNNPFAIAEFLLCCNLCGVPLAGRPSFIYIGEKAFCKEECRSRYVVEEALREAREEKRRAAAAAAASPEKKKEAAAARKGGEECREGSIFFICADDL

SEQ ID NO: 131251 - protein, 64 aa, Oryza sativa
  unsure (1)..(64): unsure at all Xaa locations
  Clone ID: PAT_MRT4530_33334C.1.pep
SSQNQIKLKXKKXRXEGQIDSPWXASRXSLPXVLXXGFRRAPRGASPXXXGRXRCRXVXXXXGT

SEQ ID NO: 131252 - protein, 177 aa, Oryza sativa
  Clone ID: PAT_MRT4530_33335C.1.pep
FVLAQFLVETGLSSHQGSGGVSRQGSLCGLALSEVEGQLHGVNLDDLLRTGGGGAGAGAAAAGRKTVDVGLGAGPVLDALYHDGPVSGSKRAPAAGEGAAAEKTVERRKKRMIKNRESAARSRARKQAYTNELENKISRLEEENKRLRMHKAPEPVVQYVPQQEPKNQLRRVNSADF

SEQ ID NO: 131253 - protein, 762 aa, Oryza sativa
  Clone ID: PAT_MRT4530_33336C.1.pep
MKSAVQARNAWAAAHSAYAMSLRDTGAALSEFAHGEGVPPPPPPPQPPPLPEFSPSPAKIHRSKSMPLPPQTKGPAVLHSDSIREDDEEEAEIEEEEDEDEHLDDRRRRLRHRPQVPPLVSSPAPGTPVTPQQPPPPPPPPPDSKPGVDTWDYFFSMDEGMASIAPDDDEIIQEPEDEKYVPASPPRPPLSPPTPVAAPAPQEEFEEEPRTPEMVTPPPSLPPRPPAVSSKKKKGKGKHRAAHHQHTESAPPVTLVGGGGGKAGKVVPVELPRIDLLRVLAEIDDRFLKASESAGEVSKVLEANRMHYHSNFVDTRGHIDHSARVMKIITWNRSFRAMQNGDDGKDDFENDEWETLATVIDKILAWEKKLYDEVKAGELMKLEYQRKVALLNRQKKHNAATEVLEKTKAAVTHLHTRYIVDMQSMDSTVSEIQHLRDNQLYPRLLDLADRMAKMWEDMHLHHENQLKTVLNLKSVDISDSHIETSDHHHSHTRQLRDIVEKWTTNFSDLMSYQKEYINALYSWLKLNLIPIESSLKEKVASPPRVQQPPVKALLQAWNEHLTKLPDDLAKTAIVSFRAVLDTILSVQDEELKQKETCEHTRKEYMRKARAFEDWYHKHAQRRAFDVDPESGEGTSQKDTVAEKRFAVESLKNKLDDEVEAHNKLSKQVREKSLSILKAHLPELFRALTDFSLASFEMYSKMRLMSLMQDQDGQMEPTHQIEDLPVIYVRKKGTSGRSASSIVPVLFMSLNRKKTGYRVSLDI

SEQ ID NO: 131254 - protein, 95 aa, Oryza sativa
  Clone ID: PAT_MRT4530_33337C.1.pep
KPDLIFLISPYNFEETQYKRGGRVVKLPGALWEKREKGSVNGGVKTNSACAPAGLRPTRTRAQGPNAGNSGPDSGAHQGLPMGSPTRTWGDHGHS

SEQ ID NO: 131255 - protein, 149 aa, Oryza sativa
  Clone ID: PAT_MRT4530_33338C.1.pep
RREGGGARRGSGTRGQSEGESLTPRIRRRSLLPAGSVARCCLLALPAIASPASRRHLCWPLSPSFFNVGHRRNSTRRATEPASTVGHRRVKQQWRRRLPIHSPPSLEPPPPHALVGKRAVGWVGMGKGKDVDCGEREGKKKAIIFIRIR

SEQ ID NO: 131256 - protein, 96 aa, Oryza sativa
  Clone ID: PAT_MRT4530_33339C.1.pep
WIPGLRNSARGIKFYFSSSVCDKATCTLNNVRWDMLYVPIGTYWDIIFLLYKRYSCFCFSHLDMVLEFSNDPSFRIYIICWVNMLTEFSLSTNFKI

SEQ ID NO: 131257 - protein, 137 aa, Oryza sativa
  Clone ID: PAT_MRT4530_3333C.1.pep
MEPTSDDDDNYCATTTTTAGHVAAPLRDPSSPRSGGGSAGRAGGGGGSAGRSGGSSARLGDKGRRRQGGRWRRLGEARRAGGSCSATRDGADDEVQRHIPSLVWSSPPSLPLPLRSARRRDGWRPVAVVAWSSPLEQ

SEQ ID NO: 131258 - protein, 175 aa, Oryza sativa
  Clone ID: PAT_MRT4530_33340C.1.pep
SLFLPAQQPLHRFHPIYHSTPSLLIIIASRAHTCTQPLSSYQPTPTSSPSPPPAQLSVSPQCTQFLCVVLSASHLSPVSQQHPPVPIVCALSHCLQAHCCVQCSACLLLLPNDPLSCARLWCTPTSVDNWCVAPKPSEMCCLQTPLIQHCTHKTIVVFAAACSTTMHPALSCQAT

SEQ ID NO: 131259 - protein, 83 aa, Oryza sativa
  Clone ID: PAT_MRT4530_33341C.1.pep
MEAEAASLLAALVSRTIAAYRAAYRRPPPTRFNIATAASASGPRLDYSVTALFSATPSACRLGHLLLLSRAGDAIATVPPAPW

SEQ ID NO: 131260 - protein, 361 aa, Oryza sativa
  Clone ID: PAT_MRT4530_33342C.1.pep
MAALLLLAAAMVVVVFAHAAAAQRYNAIYSFGDSISDTGNLCVGGCPSWLTTGQPPYGKTFFGRPTGRCSDGRVVVDFLAEHFGLPLPPASKGGGDFKKGANMAIIGATSMDAAFFKSIGLSDKIWNNGPLDTQIQWFRQLLPSVCGNDCRSYLSKSLFVVGEFGGNDYNAPLFAGRAMTEVRDYVPQVVSKIIRGLETLIRMGAVDVVVPGVLPIGCFPIYLTLYGTSNGADYDRNGCLKSYNSLSSYHNTLLKRSLSNLQRTYPHARVMYADFYSQVTAMVRSPQNFGLKYGLKVCCGAGGQGTYNYNNKARCGMSGSSACADPANYLIWDGIHLTEAAYRSIADGWLKGPYCNPPILH

SEQ ID NO: 131261 - protein, 67 aa, Oryza sativa
  unsure (1)..(67): unsure at all Xaa locations
  Clone ID: PAT_MRT4530_33343C.1.pep
QTARVQKSFKKTEVEVLKEKLNDRTDSSKNSCHIEPKXHVNFSNLQIVTIISHGHHQAEVLKVEATK

SEQ ID NO: 131262 - protein, 157 aa, Oryza sativa
  unsure (1)..(157): unsure at all Xaa locations
  Clone ID: PAT_MRT4530_33344C.1.pep
VFLTTTDKSASARNTAVALHLRVTPKGYRTXGTITRTGFRAVTTCRLPLTNPWDIQQTKRSFSEPRAECXHSSGTPPEFLLESYICRGRSRXSAKLPGTPLELPLTFYLFXMYKKYNRASFNSGQSCMSXSEISSSFYSLHMTVTAMRIVQNALNRH

SEQ ID NO: 131263 - protein, 128 aa, Oryza sativa
  Clone ID: PAT_MRT4530_33345C.1.pep
MSSGRSSQRSASSPRRRRSHAEASSPPPPPPPRRRRRRRAPSATASTTRVSGPTWPLRWPSRPGSSPTAWPPWCGSSSPCRCPQCARPRGRRGRWASPWRSRTTTSSYSATPTTSSATSRRRSRATVR

SEQ ID NO: 131264 - protein, 39 aa, Oryza sativa
  Clone ID: PAT_MRT4530_33346C.1.pep
MRTPGKCHPSPGRHMTQQQCDNIGILSFRFIALSRKYYM

SEQ ID NO: 131265 - protein, 126 aa, Oryza sativa
  Clone ID: PAT_MRT4530_33347C.1.pep
HASDSSEHVGIVPDDYLRDCPQDGDREAIAISKFMQNLKHLVIRFSKLSVVGLNAISGGCKELEVLDLYGCANLTLRGIQQATSNMKNLKELENPNFYIPRSSFHMGRYGHWQLYDERFQTNVFQI

SEQ ID NO: 131266 - protein, 47 aa, Oryza sativa
  Clone ID: PAT_MRT4530_33348C.1.pep
SGLFQHARITILKTLLELLNGDNPTLAGNTDTTHGDIANLPARLCYP

SEQ ID NO: 131267 - protein, 60 aa, Oryza sativa
  Clone ID: PAT_MRT4530_33349C.1.pep
FCSQNMGLCLQRKLSQNPSEECVRRRSTVQLIQGALLIQSHAMISLENCNWGHNFLLIPV

SEQ ID NO: 131268 - protein, 1092 aa, Oryza sativa
  Clone ID: PAT_MRT4530_3334C.1.pep
MMQQMQQQHQQMYQRMRQQAEQQQQQFGPSPPQSKLPEFLRVRPPTFSSTTNPMEANDWLHAIEKKLNLLQCNDQEKAAFTTHQLQGPASAWWDNHMATRPPGTEVTWVEFCRSFRKAQVPDGVVAQKKREFRALHQGNRTVTEYLHEFNRLARYAPEDVRTDAEKQEKFLAGLDDELTNQLISGDYADFERLVDKAIRQEDQRNKMDRKRKAAQFRNFHQGASGSQNHHGGQPNRSAAPRPPMAPAQSASSTQAKKETGTKPGSCFNCGELGHFANKCPKPRRAGPRFVQARVNHASAEEAQVAPEVVLGTFPVNSIPATVLFDSGATHSFISKKFVGMHGLIREELSTPMRVHTPGNSSTLVQFSPSVTIEIQRSLFLANLILLESKDLDVILGMDWLTRFKGVIDCANRTVTLTNEKGETVVYKSLVSPKQGVSLNQIKVENPVTTEEKGTAPIYKRPYRMAANELAEVKKQVDEQLQKGYIRPSTSPWGAPVIFVEKKDKTKRMCVDYRALNEVTIKNKYPLPRIDDFFDKLKGAKLRIREEDIPKTAFTTRYGLYECTVMSFRLTNAPAFFMNLMNKVFMEFLNKFVVVFIDDILIYSKSEEEHKQHLRLVLEKLKEHQLYAKFSKCDFLLSEVKFLGHVITAQGVAVDPSNVESVTKWTPPKTVSQIRSFLGLAGYYRRFIENFSRIARPMTQLLKKDEKFKWTAECDKSFEEFKKKLVSAPVLILPDQMKDFQGRVVAYASRQLRPHEGNYPTHDLELAAVVHALKIWRHYLIGNRCEVYTDHKSLKYIFTQPDLNLRQRRWLELIKDYDMSIHYHPGKVNVVANARSRKSYCNALCIEGMCGELQQELERLNLRLVEHGYVAALEARPTLVDQVRVAQVNDPEIAELKKNMRVGKAWDFHEDEHGTIWMGERLCVPDDKLAELYLSRIMCLHGVPKKIVSDRGSQFTSKFWQKLQEELGTRLNFCTAYHPQTDGQTERVNQILEDMLRACALDFGGAWDKSLPYAEFLYNNSYQASLQMAPFEALYGRKCRTPLFWDQTGERQLFGTEVLTEAEEKVRIVRERLRIAQSRQKSYVDNRRRELTF

SEQ ID NO: 131269 - protein, 76 aa, Oryza sativa
  Clone ID: PAT_MRT4530_33350C.1.pep
MAYFGVAITITTAPMTETETETKGRAARSSPRRRWSTNCQRHYFLHIPSNERLCRLANVAAAVSGESHVGGKREWR

SEQ ID NO: 131270 - protein, 91 aa, Oryza sativa
  Clone ID: PAT_MRT4530_33351C.1.pep
MYKSSIQAGKTGSQQINQQEWEMEERKGSPCAWVPSLRSYHPYQIKEKMLSGWSVYQYVDQMLAIRAPVLAWEHLYWYLNIISPMKGLKMY

SEQ ID NO: 131271 - protein, 101 aa, Oryza sativa
  Clone ID: PAT_MRT4530_33352C.1.pep
QKQNTTVTQGFIIYTQQQTLALNVFPQQFSLLLSVDFSNSSKPNRLFPELKAWSRTRRASTTIRIEFVAIGVWIRGGDVAPRCRNSVASEGPKFPYRWSLY

SEQ ID NO: 131272 - protein, 1058 aa, Oryza sativa
  Clone ID: PAT_MRT4530_33353C.1.pep
MSINNADSRVTRIPDYSSVVYFIQRWKPAPTHTHTHYRSPQFSQTAVAATARMAGGVGEALVSAVLKEVLGKLGSAVGEQIVMRWNLKQDLESIKSTLGMLQAVLRDAERRSVSDEGASLWLKRLKNAAYDISDMLDEFEAKLSETTFSSSVAKLFMGKRLKNMRVRLTEIAAERTHYGFTLDTYPRDLEREEISKRETTSKINKSAVVGRNKEKEEILALLESDNIENLLVIPIFGFGGIGKTTLAKLVFNDDRTQTFDLRVWIYVSPNFDLKTIGRSIISQIKGQSDCLDDLQSISNCLEEILDGKSCLIILDDLWENSCFQLGELTLMLSSFKAESRLRIVVTTRNEEVARKICTVAPYKLKPLSDDHCWTLFRQSAILSSCTFQGGDKNVLEEIGWEISKKCKGVPLAAQSLGFILRTKDVEEWKNVRDSDVWDGSSPEDVVLPSLKLSYYQMPPYLKICFSYCSTFPKGCEIYSDDLIQQWISLGFIQERPNKHISLEKIGEQYVSELLGMSFLQYSSLVPDYTGLREDAKCSMVLSMHDLMHDLARCVMGDELLLMDNGKEYNSGEGNCRLPKSFHRLGELQYLNLSRCLSLNLMVDINAVCCLTKLQYLNLSRCSSLIHLPETIRGLKDLHTLDISGCQWIEIFPKSICEITSLKFLLIQGCSPWLEKRVRESQFKNDMLALPKFIVQRAAFGMCSNISRLQSVHPAELEIECLENVTSIGEVDVVNLTYKSALSKLALAWTPAAERFVEDEDLLRKLQPPDTLKVLQIQGYMATSFASWMMNLASRLPYLVRIEMVDLPRCEYLPPFGQLQHLELLILRRILSLRKLGGEICGGNGAFRKLREFTLVKMDNLNEWITKVSANGEFMFPSLHKLEISQCPILRLNPCLPRALEWRIEASDQIIADFYHTGSSSSLVLSKMHIRSCRLLPNDWKLLQFLPDLQVLELTHCWFYELPKSIGYLTTLRSLRIDGCDSMTKLSKWLVSLSLLHELIITGCLNLVYLPAFVQKLSALEKLEINDNDALQRWCRNSDSWISENGIKNKVNAYNILCK

SEQ ID NO: 131273 - protein, 33 aa, Oryza sativa
  unsure (1)..(33): unsure at all Xaa locations
  Clone ID: PAT_MRT4530_33354C.1.pep
LVYYVQVFRSNTICGLGDYLEKNYLQGLTVXXG

SEQ ID NO: 131274 - protein, 363 aa, Oryza sativa
  Clone ID: PAT_MRT4530_33355C.1.pep
MRGKKPHKELKLSVPAQETPVDKFLTASGTFKDGELRLNQRGLQLISEETADEPQSTNLKVEDVQLSMDDLEMIQVIGKGSGGIVQLVRHKWVGTLYALKGIQMNIQEAVRKQIVQELKINQATQNAHIVLCHQSFYHNGVIYLVLEYMDRGSLADIIKQVKTILEPYLAVLCKQVLEGLLYLHHERHVIHRDIKPSNLLVNRKGEVKITDFGVSAVLASSMGQRDTFVGTYNYMAFLPFFLVQPERISGSSYDYKSDIWSLGLVILECAIGRFPYIPSEGEGWLSFYELLEAIVDQPPPSAPADQFSPEFCAFISSCIQKDPAERMSASELLNHPFIKKFEDKDLDLRILVESLEPPMNISE

SEQ ID NO: 131275 - protein, 42 aa, Oryza sativa
  Clone ID: PAT_MRT4530_33356C.1.pep
EILPKRGGPVRAHRSDLVGHIRQSSGTKIPVSGADAKAMACA

SEQ ID NO: 131276 - protein, 64 aa, Oryza sativa
  Clone ID: PAT_MRT4530_33357C.1.pep
SHADDDEHTSAECPPSPLTLSRKPSLAVDSQPPSHALTHRRLSAALPLPHSPSRGKESRKERAR

SEQ ID NO: 131277 - protein, 213 aa, Oryza sativa
  Clone ID: PAT_MRT4530_33358C.1.pep
MALACLLAAALSLAGSAAGDMRAAVTTTAGGKVVVRHGVDAAAEARQLTVVAMKKSTRLEDVVAPELIGADLVELHQRRRRILGEDANIVDSVLVGDRQGCLGPCPPRGFPFNTPSRGCNPKYGCNTGHNPPDRQKPLSSIRYCGMRRHLPRVAATSCRPPTTWTPPPPSTKKKRAGWKDMWVAGDALPSTGLKELQTGSKDGFSISVSITVN

SEQ ID NO: 131278 - protein, 143 aa, Oryza sativa
  unsure (1)..(143): unsure at all Xaa locations
  Clone ID: PAT_MRT4530_33359C.1.pep
RTXVFPTLQFQXCCIHTHFTTRNXHXFXTXPVVNSVVAXEMTFXRSKIFFAXTFXGCIIXXTXRSKXLXXXRFQFCXCDDVISNVLPTRAXSIXXFLAQXXEXRRLQHIQMPXXSDQFXSXCKXXXQEVXXXSXYRGNRAVSH

SEQ ID NO: 131279 - protein, 30 aa, Oryza sativa
  Clone ID: PAT_MRT4530_3335C.1.pep
THTGRTGLFPQGVLNFRGCDIPYHHLLILV

SEQ ID NO: 131280 - protein, 172 aa, Oryza sativa
  Clone ID: PAT_MRT4530_33360C.1.pep
MASSTSRQRQWQRRGARGEGGGSGWTMATAQWLVDGTAGCCGNGAHSRRRQRRGARGDGRGSGEVAIGSSGCNGGEAWRSRKASRGRGRRPHLAGAAVIGGVGGRLGVERHGCWQWRSARRERHGRWQGGRHGVRGTADGRKPDWRERLIRWWRRTARRDEARPAVKEATTM

SEQ ID NO: 131281 - protein, 203 aa, Oryza sativa
  Clone ID: PAT_MRT4530_33361C.1.pep
MGIYNKLADDIDEVDIIIAGGGTAGCIIAGRLAEDDPSLSILVIEGGANNKDVASVVNPVFYLQNLLPTTKTALFYKGNKSKQLADREPIVPSGGTLGGGSSINFMMYTRAQRSDFDSWNTPGWSAEEMWPHLKKLETYHGPGAKEHHGHSGPIHVSDGGYRAKAAEDDFISAAEKVGYSEIDDLQNLDNNNGIARWQRYVSP

SEQ ID NO: 131282 - protein, 50 aa, Oryza sativa
  Clone ID: PAT_MRT4530_33362C.1.pep
NRKDDALTPETKLLDRSRRQGYPDQSFERPMSLLPPKEHLLWISDIKTTS

SEQ ID NO: 131283 - protein, 913 aa, Oryza sativa
  Clone ID: PAT_MRT4530_33363C.1.pep
MAGRCPWQYVPPAEATGVSGSVDQVHASFGFNCGEVQDRLRLIGEASTKSIFDGQMTSMDKAANVVLDIEGLPQQPDKCCTGSPKMTRALSRKGSNRMERRSGEEQEQDDLVKKLIIKAAGAVSHRDRDNKRRAVQSGDGGVRLRSLGGLDVASPVFRKTVGLRKLVDDCLSKECKSRRIKTEKGPSSDSSAKRCKCCCTRPNLASDCVNYLKSGVPSRVMFYKQGSWHNFPEQIMKSLIEEFRSNKSSVVAVMDDEPVLVDFLSMTLVNLKSRKQRSVAWFDDTGKCFYPSLFFDEEADEVAKVGGDFEGATQGIMLDKVANSPPEVVKQVVLESSPPVPQKPATADILRKKIASVERGSEGFLFAQDLFLSGMGPFATPNNILHIHRYSPNDITAQCRLQAFEKQMMSTKEERGDANVRYGWLGSRKNDIVRILINGFGNNGKPAEKAGLSAGVYLSPEDRAFSSVGLCDVDEKGVQYMLLCRLILGNMEAVMPGSQDSFPSSDIYDSGVDDCSNPKCYVMWPSHLSTHIRLEYLVSFRLSSKVRNYLLGLKGLWFHPSPKEVAVDISTLVPIMSGNAEGPTSPWISFRVLFAMIQENISSVARELLFHHYEELKENKITREEMPSLWYKSAGKIASSDPARTAAEDRSLDQTGNCSLIVSVAHGDSHAPNAVAENSTSLCTKGCDTPATGMISKGYDSLAPKGVEGLNSAPRATPPGIRPKGGESLVHGLALGNSKCAGAEGINSAPRVTPLGIRPKGGESIAPSLALGNSKCAGAEGINSAPRVTPPGIRPKGGESIAPSLALGNSKCAGAEGLNSAPRVTPPGIRPKGGHGNPKALATEARGSLSLSIAPNVHDPPASSKEPKDDASPIAGMVSESQHSQAPNAVTKGNVARAADTIVALSTLREKGR

SEQ ID NO: 131284 - protein, 129 aa, Oryza sativa
  unsure (1)..(129): unsure at all Xaa locations
  Clone ID: PAT_MRT4530_33364C.1.pep
ERIDSTPYSSFRSKVHHRSLNLYRCVILVPKLANRPFRSSNLFDCVIPVSKLADHSFRSSNLFSCVTPVPKQDGLKNLYQKFRDRGDTTEXVGGPKRVICKFRDRDDTVEQEGRRGAARVEGRGGGGGG

SEQ ID NO: 131285 - protein, 189 aa, Oryza sativa
  Clone ID: PAT_MRT4530_33365C.1.pep
MVADSAVGVHGSAADSGSVRSARTAAERDAEAEATRDTKAAAVEPPEWLQTLPVAPEYHPTLVEFADPIAYILRIKPEASRNGICKIVPLLLQPPEDDTIRRLLQCRQPLPDLPHVPPAGRPLHQEPPCRQPPSVGERGALHPGGVLRQGARVRALEARRTAQEPHPPPAQGPLLGRLHLQALQRRVRQ

SEQ ID NO: 131286 - protein, 951 aa, Oryza sativa
  Clone ID: PAT_MRT4530_33366C.1.pep
MAGRCPWQYVPPAEATGVSGSVDQVHASFGFNCGEGQMTSMDKAANVVLDIEGLPQQPDKCCTGSPKMTRALSRKGSNRMERRSGEEQEQDDLVKKLIIKAAGAVSHRDRDNKRRAVQSGDGGVRLRSLGGLDVASPVFRKTVGLRKLVDDCLSKECKSRRIKTEKGPSSDSSAKRCKCCCTRPNLASDCVNYLKSGVPSRVMFYKQGSWHNFPEQIMKSLIEEFRSNKSSVVAVMDDEPVLVDFLSMTLVNLKSRKQRSVAWFDDTGKCFYPSLFFDEEADEVAKVGGDFEGTTQGIMLDKVANSPPEVVKQVVLESSPPVPQKPATADILRKKIASVERGSEGFLFAQDLFLSGMGPFATPNNILHIHRYSPNDITAQCRLQAFEKQMMSTKEERGDANVRYGWLGSRKNDIVRILINGFGNNGKPAEKAGLSAGVYLSPEDRAFSSVGLCDVDEKGVQYMLLCRLILGNMEAVMPGSQDSFPSSDIYDSGVDDCSNPKCYVMWPSHLSTHIRLEYLVSFRLSSKVRNYLLGLKGLWFHPSPKEVAVDISTLVPVRQPSFLRFFFSIDTLIMSGNAEGPTSPWISFRVLFAMIQENISSVARELLFHHYEELKPSLWYKSAGKIASSDPARTAAEDRSLDQTGNCSLIVSVVHGDSHAPNAVAENSTSLCTKGCDTPATGMISKGYDSLAPKGVEGLNSASRAAPPGIRPKGGESLVHGLALGNSKCAGAEGINSAPRVTPLGIRPKGGESIAPSLALGNSKCAGAEGINSAPRVTPPGIRPKGGESIAPSLALGNSKCAGAEGLNSAPRVTPPGIRPKGGESFVPSLALGNSKCAGAEGLNSAPRVTPKDKEFLSLSISSQQSPVLNSGHGNPKALATEARGSLSLSIAPNVHDPPASSKEPKDDASPIAGMVSESQHSQAPNAVTKGNVARAADTLVALSTLREKGR

SEQ ID NO: 131287 - protein, 144 aa, Oryza sativa
  Clone ID: PAT_MRT4530_33367C.1.pep
LLLVLRRVAAHNQERPPIAQGRRLHPCVKLYAIYLAMQTSSMILGDPNHAAYVHVTHASIPTEACLGLRSPRVRAWYCCRLASMCCMHMDRACRRSSLSFVWRRLESPVHSGSFFVCGQIRLCTRRSICERIGPHNAIWSPPML

SEQ ID NO: 131288 - protein, 190 aa, Oryza sativa
  Clone ID: PAT_MRT4530_33368C.1.pep
MVGAVLGKLLVPRNCLCPFTIPVNDDGVFSDWHFSMACASKTISIGFANSGLYGEARLLSPSYKNYPRRSSYKFIKVRAVQGNDGRRRLVDIIRTIPELSRNYFRSRSRRALFGGISLLGGFYVAQTISLSFGALGVNDVIAAVVCVLLTEYVTKFYYSRPKVTFPFALLNNFKMGFTYGLFIDAFKLAS

SEQ ID NO: 131289 - protein, 162 aa, Oryza sativa
  Clone ID: PAT_MRT4530_33369C.1.pep
AEGLNSAPRVTPKDKEFLSLSISSQQSPVLNSGKGHDGTSGAARPVHAPGHGNPKALATEARGSLSLSIAPNVHDPPASSKEPKDDASPIAGMVSESQHSQAPNAVTKGYNAPTPIPKESKGQHLQSGVHSQSSGPDDASSSNVARAADTIVALSTLREKGR

SEQ ID NO: 131290 - protein, 1672 aa, Oryza sativa
  unsure (1)..(1672): unsure at all Xaa locations
  Clone ID: PAT_MRT4530_3336C.1.pep
MVVEASGGTADHACQEAAYLMMARLRERHNYIFHDMAYRFHPRRASGDDVSTFRPTTGQNDTTFGHMCAVMSGLDRMHSDLHKATKALNDGKLMRIVALMDEIARLKRENAQLKGLPAPGGVRIRTTPRKTTTAPVRIQLAPRNPPPSAAPAAPPVPPAVPAAPAPAPASALSFAPASAARGPASGNGGCLLGMVYTRNGSRATGEGSNGEERTDGAHPHSDSGNGPPPLPENPTLVQVMAHQTQMMAAMMQHQHQQMHQRMLQHAEQQHQQFGPPPPQSKLPEFLRVRPPTFSSTTNPMEANDWLHAIEKKLNLLQCNDQEKVAFATHQLQGPASAWWDNHMATRPPGTEVTWVEFCRSFRKAQVPDGVVAQKKREFRALHQGNRTVTEYLHEFNRLARYAPEDVRTDAEKQEKFMAGLDDELTNQLISGDYADVERLVDKAIRQEDQRNKMDRKRKAAQFRAPQGSHQRPRFAPRQQGGPTTMIVRQHRPFNPSNFPQGASGSQNHHGGQSNRGAAPRPPMAPAQSGPPAQAKKETGAKPGSCFNCGELGHFADKCPKPRRAGPRFIQARVNHASAEEAQAAPEVVLGTFSINSIPATVLFDSGATHSFISKKFVGMHGLIREELSTPMRVHTPGNSSTSVQFSPSITIEIQRSPFLANLILLESKDLDVILGMDWLTKFKGVIDCANRTVTLTNEKGETVVYKSLVSPKQGVSLNQIEAEIPVDTVEKNLRKLEDIPIVCEYPEVFLEDLTTMPPKREIXFRIDLAPGTAPIYKRPXKDKTKRMCVDYRALNEVTIKNKYPLPRIDDLFDQLKGAKVFSKIDLRSGYHQLRIREEDIPKTAFTTRYGLYECTVMSFGLTNAPAFFMNLMNKVLMEFLDKFVVVFIDDILIYSTSEEEHEQHLRLVLEKLKEHQLYAKFSKCDFWLTEVKFLGHVITAQGVAVDPSNVESVTKWTPPKTVSQIRSFLGLAGYYRRFIENFSRIARPMTQLLKKDEKFKWTTECDKSFEELKKKLVSAPVLILPDQMKDFQVYCDASRHGLGCVLMQEGIVVAYASRQLRPHEGNYPTHDLELAAVVHALKIWRHYLIGNRCEVYTDHKSLKYIFTQPDLNLRQRRWLELIKDYDMSIHYHPGKANVVADALSRKSYCTALCIEGMCEELWQEFEHLNVGIVEHGFVAALEARPTLVDQVRAAQVNDSEIAELKKNMRVGKARDFHEDEHGTIWLGERLCVPDDKELKDLILTEAHQTQYSIHPGSTKMYQDLKEKFWWVSMRREIAEFVALCDVCQRVKAEHQRPAGLLQPLQILEWKWEEIGMDFITGLPRTSSGHDSIWVVVDRLTKVAHFIPVHTTYTGKRLAELYLSRIMCLHGVPKKIVSDRGSQFTSKFWQKLQEELGTRLNFSTAYHPQTDGQTERVNQILEDMLRACALDFGGAWDKSLPYAEFSYNNSYQASLQMAPFEALYGRKCRTPLFWDQTGERQLFGTEVLAEAEEKVRIIRERLRIAQSRQKSYADNRRRELTFEAGDYVYLRVTPLRGVHRFQTKGKLAPRFVGPYKILERRGEVAYQLELPSNMIGIHDVFHVSQLKKCLRVPEEQADSKHIDIQEDLTYVEKPIRILDTSERRTRNKVNRFCRVQWSHHSEEEATWEREDELKAAHPHLFTSSSESRGRDSV

SEQ ID NO: 131291 - protein, 263 aa, Oryza sativa
  Clone ID: PAT_MRT4530_33370C.1.pep
MAPKVSLLQVRPLVDRSAAPEAVWPHYATASTLSNYCAYLVTKGLVPDNGLVNGMVFREVRWETMRACFSRRSSLYDVHDELRKKGEEMVKKQKQLVEKQKQRVEQEEDPPATHGGSSTTISEHQGEEDDEIDEAQDGNGDPVPIEGGGHQENNNSQEEAGNGDDAMENSIVLMGAKLAVQLMNSYETDRERMWRELAEFWTGFLLHLAASTRAAKHRTHLVCRGELITILWALLSHAGFLGRTSHGHTLLDPEDLDAADPLS

SEQ ID NO: 131292 - protein, 97 aa, Oryza sativa
  Clone ID: PAT_MRT4530_33371C.1.pep
MGPFADSSRCASAEGPIWTPPPREETRRRGGQAVAGSLLRRKALNLDRTDLPLCFMLSVDVESRRHTLSMLCATRYGTQRRIAIGEGRCRCGWTLSG

SEQ ID NO: 131293 - protein, 94 aa, Oryza sativa
  Clone ID: PAT_MRT4530_33372C.1.pep
EFSKVLRRPEVHTPTKPPLHNIRRGRRSELMWRRIRENGTEWINGHEDYLLTNEFLDHNLFFEENKAAMVTKSDLNDEQDCLAKLYRRLSGSCW

SEQ ID NO: 131294 - protein, 88 aa, Oryza sativa
  unsure (1)..(88): unsure at all Xaa locations
  Clone ID: PAT_MRT4530_33373C.1.pep
PMAPASAPAPVAPSSAQRQMTNPRLLTRERPXHESMLVQXTPPRQQVVQPIQQQVVQPIQQQMVRQVPTGLRTPHVQHQQGGSPQLQT

SEQ ID NO: 131295 - protein, 119 aa, Oryza sativa
  Clone ID: PAT_MRT4530_33374C.1.pep
SVPLSQTKSRTDQTYTKKTEVLNEPPRIKQQLQGHKPSRATAGGRRAARRRRRICASAPPPPVSRAAFDPPVPACLEPCAHATGAPPRRHYPGCRGATRRAHVSVPVMQALRPESEIGS

SEQ ID NO: 131296 - protein, 165 aa, Oryza sativa
  unsure (1)..(165): unsure at all Xaa locations
  Clone ID: PAT_MRT4530_33375C.1.pep
HHTRGDKLYNSQWLRAAVLGASDGLVSTAALMLGIGAXRPADARAVLLSGLXGLVAGACSMAIGEYVSVHVQLDVELADLERRRRRGGPAPAGLGLHAAAAAVSRPGQAXXASALSFAAGAALPLLAAWFVAGAYRVRVVVVVATASLALAAFGAAGARLGRAPG

SEQ ID NO: 131297 - protein, 153 aa, Oryza sativa
  Clone ID: PAT_MRT4530_33376C.1.pep
AAKGRVLPLVAVAAALAAALLYRAPFSKSLGGEGCSLLPHDHFWIASERVDTLGRVGPAAMEVKGGLINAIAVGDYRSSLLRRPVVDYGDAAIMPGLIDVHAHLDEPGRAEWQGFSTGTRAAAAGGITTLVDMPFNSYHATVSEETLKPQLDA

SEQ ID NO: 131298 - protein, 243 aa, Oryza sativa
  Clone ID: PAT_MRT4530_33377C.1.pep
MAMLVRSPTSTLPAANHRQKSGVLLRRPTRRSARRFQLHAEKPASPGAGNETSSSSENAVLRAAWYGSELLGIAASFFRPSQPPTEGDSAGAVEEAASEPQGRAQVAEAVKDDFARSYFVTGNLTLKAYEEDCEFADPAGSFNGLQRFKRNCTNFGSLLEKANMKLTKWEDLEDKSIGHWRFSCVMSFPWRPILSATGYTEYYFDAGSGKVCRHVEHWNVPKMALLRQIFRPSRWVWEKRTEE

SEQ ID NO: 131299 - protein, 576 aa, Oryza sativa
  Clone ID: PAT_MRT4530_33378C.1.pep
MGLCGPIQRNRLTQRGLSKEHHLGPRAKPRRTAAASCPPFASQIHMRRGCTQALSRRVVGDNRNVMSETGTNYSKPYSASMILLEQNFMRAEILEWVGDLNSDPVHTAASRQPDKLIRNNRVSVLDGTYEVWHTFEFSVKEQRVFGGVDIIAFLGPCPFVAVDEDVHTFSMEKGGGSQKGGGGGGGEARRINVVYFLSRGGRTDHPHLFRVNHHRAGVRLRDVKRWLSELRGQDMADNFSWSYKRKYKAGYIWQDLMMDDDLITPISDNEYVLKGCDVRRATESPKEKSSSLAEEPKKLDSQEVKVACDQKQVEEVTTTTAPDSDERSPKTLPPVDEDSPGEPASRSTAPLKKDLPRGLREERKKQQREVVKVVSKAVVVPAPAPEQKVKGAASGRISSHTPPAVGSARRMHLAQLLHNLLTCGAADADDTALRPVLRHGADDDGGDWPPTPVCPGIDGCGLRVGKKVKVRRGRKDKAKPKRDGGDSHKPASLPRCSQCGKEFKPQELHSHMQSCRVFREKMRSSTSSRVSVDRGRTSAAARPEHRRTRSKGAAAAAAAPGDTSDRPSAVLLLRDS

SEQ ID NO: 131300 - protein, 113 aa, Oryza sativa
  Clone ID: PAT_MRT4530_33379C.1.pep
MATLQLNHVARETDDVRRLAAFYEEVLGFERVASPNYPAFQVAWLRLPGTPGVALHIIERDPAAAPAAVAPGAAGAPPAQLPRRHHLAFSVADYDGFLTGLKARGTDVFEKTQ

SEQ ID NO: 131301 - protein, 152 aa, Oryza sativa
  Clone ID: PAT_MRT4530_3337C.1.pep
MKADALWCLGNAQTSHGFFTSDTVKANEFFEKATQCFQKAVDVAPELHMEIHRQMASQASQAASSTSNTRKIWHNFHMVDFKIYVDNDPTFSIPAKNPYPSQARDSEILWQSRKKKKDSDFWYDVFGWVVLGVGMVVWVGLAKSNAPPQAPR

SEQ ID NO: 131302 - protein, 56 aa, Oryza sativa
  Clone ID: PAT_MRT4530_33380C.1.pep
HMLYRDIVPISALDTQHSFDRSVILSYHVSIFKLVPNFLIQRMLLGALDIGSPLPI

SEQ ID NO: 131303 - protein, 154 aa, Oryza sativa
  Clone ID: PAT_MRT4530_33381C.1.pep
MATSSSPLTALYSSFLSYTPSTPSMAALPRRRRAGCRYPRIQAVDLDQNTIVAISVGVVSVAIGIGIPVFYETQIDNAAKRDNTQPCFPCSGSGAQVCRFCTGKGTVTVVIGGGETEVSNCVNCDGVGSLTCTTCQGSGIQPRYLDRREFKDDD

SEQ ID NO: 131304 - protein, 62 aa, Oryza sativa
  Clone ID: PAT_MRT4530_33382C.1.pep
NFCPNKQESTCKKIVKHKVFSFNFKSYLFFIYFFFFLLKYPLFSIPLNYTCYMSLTLSSTRL

SEQ ID NO: 131305 - protein, 99 aa, Oryza sativa
  Clone ID: PAT_MRT4530_33383C.1.pep
VLHYCCRLTLIKTCQNRQYLAECLTLQLESSALSTGEQPFFSAGIIKGLHFFQTLQKTYIHIYQKWTYNTTQNYQINSQMCTSPDYGVVRSDNNMAYHH

SEQ ID NO: 131306 - protein, 107 aa, Oryza sativa
  Clone ID: PAT_MRT4530_33384C.1.pep
IFPLLGGGGFFLSPHVWGPLGFFNGELIFWGGAIFSGAPGPRSLRFLLGPPKPGRGQLTCGALSGAGAPPKKGVWGEPFSRGKNSRGFPPFRGFFPFGGVIPIPAWV

SEQ ID NO: 131307 - protein, 165 aa, Oryza sativa
  Clone ID: PAT_MRT4530_33385C.1.pep
MSQHQQQPHQLSQQQQVQPSQQSSVVLQQHQAQLLQQNAIHLQQQQEHLQRQQSQPAQQLKAASSLHSVEQHKLKEQTSGGQVASQAQMLNQIFPPSIAGSLQQPTLTQTSQVQQAAEYQQALLQSQQQQQQLQLQQLSQPEVQLQLLQKIQQQNMLSQHRSKLL

SEQ ID NO: 131308 - protein, 1055 aa, Oryza sativa
  Clone ID: PAT_MRT4530_33386C.1.pep
MKDQGSSGVSPAPGEGEKKAINSELWHACAGPLVSLPPVGSLVVYFPQGHSEQVAASMHKELDNIPGYPSLPSKLICKLLSLTLHADSETDEVYAQMTLQPVNKYDRDAMLASELGLKQNKQPAEFFCKTLTASDTSTHGGFSVPRRAAEKIFPPLDFTMQPPAQELIAKDLHDISWKFRHIYRGQPKRHLLTTGWSVFVSTKRLLAGDSVLFIRDEKSQLLLGIRRATRPQPALSSSVLSSDSMHIGILAAAAHAAANSSPFTIFYNPRASPSEFVIPLAKYNKALYTQVSLGMRFRMLFETEDSGVRRYMGTITGIGDLDPVRWKNSHWRNLQVGWDESTASERRTRVSIWEIEPVATPFYICPPPFFRPKLPKQPGMPDDENEVESAFKRAMPWLADDFALKDVQSALFPGLSLVQWMAMQQNPQMLTAASQTVQSPYLNSNALAMQDVMGSSNEDPTKRLNTQAQNMVLPNLQVGSKVDHPVMSQHQQQPHQLSQQQQVQPSQQSSVVLQQHQAQLLQQNAIHLQQQQEHLQRQQSQPAQQLKAASSLHSVEQHKLKEQTSGGQVASQAQMLNQIFPPSSSQLQQLGLPKSPTHRQGLTGLPIAGSLQQPTLTQTSQVQQAAEYQQALLQSQQQQQQLQLQQLSQPEVQLQLLQKIQQQNMLSQLNPQHQSQLIQQLSQKSQEILQQQILQHQFGGSDSIGQLKQSPSQQAPLNHMTGSLTPQQLVRSHSALAESGDPSSSTAPSTSRISPINSLSRANQGSRNLTDMVATPQIDNLLQEIQSKPDNRIKNDIQSKETVPIHNRHPVSDQLDASSATSFCLDESPREGFSFPPVCLDNNVQVDPRDNFLIAENVDALMPDALLSRGMASGKGMCTLTSGQRDHRDVENELSSAAFSSQSFGVPDMSFKPGCSSDVAVTDAGMPSQGLWNNQTQRMRTFTKVQKRGSVGRSIDITRYRDYDELRHDLACMFGIQGQLEDPYRMDWKLVYVDHENDILLVGDDPWEEFVGCVKSIKILSAAEVQQMSLDGDLGGVPPQTQACSASDDANAWRG

SEQ ID NO: 131309 - protein, 284 aa, Oryza sativa
  Clone ID: PAT_MRT4530_33387C.1.pep
MERAGYGVGVGGAGAVGAGVVLSRDPKPRLRWTPDLHERFVEAVTKLGGPDKATPKSVLRLMGMKGLTLYHLKSHLQKYRLGKQNKKDTGLEASRGAFAAHGISFASAAPPTIPSAENNNAGETPLADALRYQIEVQRKLHEQLEVQKKLQMRIEAQGKYLQTILEKAQNNLSYDATGTANLEATRTQLTDFNLALSGFMNNVSQVCEQNNGELAKAISEDNLRTTNLGFQLYHGIQDSDDVKCSQDEGLLLLDLNIKGGGYDHLSSNAMRGGESGLKISQHRR

SEQ ID NO: 131310 - protein, 728 aa, Oryza sativa
  Clone ID: PAT_MRT4530_33388C.1.pep
MDLFLSATSIVSNANEWFEFLGTAFSAASLLLSRWRRRRQGDEAERRQLQWKGQDAKMKQLHYCMLQLPDLIHHAEWLSFVKDDKEVAKLLPELKARVHDAYDLLEEFNHHHHHQQQLQLDLGQDAAAEKAGDDFLQSIAGGNTVREILDDLNCLRNTLEGVIDRHARSEPHQIGKLLRPAMTSFYDKSKFRSLEDEVNELLELLGVKICSARPHKRRIKGETASASKRTKRNSGVPSASTRTSCSNQEIASDNVTVLAISGIGGVGKTTLARQVYNDERVKGYFDVRIWISVSDDFNVKRLTKEFIEFALANWMQSDNLCNLQQSLTESIVKFRFLLVLDDVWDDVYANQDNRWQNFLEPLKSAQQGSAILLTTRSQRVADLVNENRHFRLEGLPPTIFDEFFEACAFGSDRCGVNPELNPIGKRIIPQLKRCPLAAETLGRLLKPMLDREHWNQIAGSELWELKQEKYDILPVLRLSYLYLPSYLRNCFLFCSMYPKNHQFDKDTLVNSWIAAGLVESCKGGKLESNGYQYFEDLLHRSLLQKESNSPTDSKYVMHKLIHDMAQLISEHECFIVKGETDLTKIPQGVRHLSIIGSSSLSETNLIMVCKYKTLRSIVCHGVETYILTAVAKYWFEELTKIRMLGFLSCEVNSLPENIDNLKLLRYLNISDCTFEELPQSFWRLQNLQIVDAQKCRVQQIPDDFNRLGNLQRFKLRGRIIKQPGTYEL

SEQ ID NO: 131311 - protein, 75 aa, Oryza sativa
  Clone ID: PAT_MRT4530_33389C.1.pep
SEEGGFRKSGGRACPRPCEAEGGGSASRRRPERRRDAVGVGNGDEERWARGNGAAWERRQPAAEWDADVGKQVGL

SEQ ID NO: 131312 - protein, 1820 aa, Oryza sativa
  unsure (1)..(1820): unsure at all Xaa locations
  Clone ID: PAT_MRT4530_3338C.1.pep
MADHPPNHRGEGMDDFVAELARMTLVVGYPNAPEYSTVPPLSGELPHRVRLEVHGFVGTCLANMVVEASGGTVDHTCQEAAYLMMARLRDRHSXIFCNTAYRFHPRRASGDDVSTFRPTASENDTTFSHMCAVMRGMDTMHSDLHKASKASNDGKLVRIIALKDEIARQKKENAQLKGLPAPGGVRIRTTPRKSTTAPVRIQLAPRNPPPPAAPPAPPTVPAAPAVPAPVPASVPVSAPASALSFALASAARGPAIGNGGWLPATHSGSHDHSSSSSSGSEPGNGETYLPDSRSRSEGPGLFLQMVNTRNGSHAAGEGSNGEERTDGGYPNSASGNSPPPLPKNPTLAQVMAHQTXMMAAMMQLMQHQPXQMHQRMQQQAEQQQQQFGPPPPQSKLPEFLRVRPPTFSSTTNPMEANDWFHAIEKKLNLLQCNDQEKVAFATHQLQGPTSAWWDNHMATRPPGTEVTCAEFCRSFQKAQVLDGVVAQKKREFQALHQGNRIVTEYLHEFNCLARYAPEDVHIDTLKQEKFLAGLDDELTNQLISGDYTDFEKLVDKAIRQEDQRNKMDRKRRFRQFRSNQGSHQRPRFTPGQQGGPTTMIVRQHRPYNPSNFHPGSSGSHHGQGQHNRSAAPRPPMAPVQQTAPVPPKKDTGGKPGACFNCGESGHFADKCPKPRRAGPKFVQARVNHASAEEAQVAPEVVLGTFPVNSIPATVLFDSGATHSFISKKFVGVHGLIREELSTPMRVQTPGNSSTSIQFSPCVTIEIQRSPFLANLILLESKDLDVILGMDWLTKFKGVIDCVNRTVTLTNEKGETVVYKSPVVLKQGISLNQIEVENPMVTEEKSSRKLEDIPIVGEYPEVFPEDLTTMPPKREIEFQIDLAPGTAPIYKRPYRMAANELAEVKKQVDEQLQKGYIRPSTSPWGAPVIFVEKKDKTKRMCVDYRTLNEVTIKNKYPLPRIDDLFDQLKGAKVFSKTDLRSGYHQLRIQEEDIPKMAFTTRYGLYECTVMYFGLTNAPAFFMNLMNKVFMEFLDKFVVVFIDDILIYSKSEEEHEQHLRLVLEKLQEHQLYAKFSKCDFWLSEVKFLGHVITAQGVAVYPSNVESVTKWTPPKTVSQIRSFLGLAGYYRRFIENFSRIARPMTQLLKKDEKFRWTAECDKSFEELKKKLVPAPVLILPDQTKDFQVYCDTSRHGLGCVLKQESRVVAYASRQLRPHEGNYPTHXAVVHALKIWRHYLIGNRCEVYTDHKSLKYIFTQPDLNLRQRRWLELIKDYDMSIHYHPGKANVVANALSRKSYCNALCTEGMCKELQQELEHLNLGIVEHGFVAALKARPTLVDQVRAAQVNDPEIAELKKNMRVGKARDLLEDEHGTIWLGERLCIPDDKELKDLILTKAHQTQYSIHPGSTKMYQDLKEKFWXASMRREIAEFVALCDVCQRVKAEHQRPIGLLQPLQIPEWKWEEIGMDFITGLPTTSSGHDSIWVVVDRLTKVAHFIPVHTTYTGKRLAELYLSRIMCLHGVPKKIVSDRGSQFTSKFWQKLQEELGTRSNFSTAYHPQTDGQTERVNQILEDKLRACALDFGGAWDKSLPYAEFSYNNSYQASLQMAPFEALYGRKCRIPLFWDQIGERQLFGTEVLTEAEEKVRTVRERLRIAQSRQKSYADNRRRELTFEAGDYMYLRVTPLRGVHRFQTKGKLAPRFVGPYKILERRGEVAYQLELPSNMIGIHDVFHVSQLKKCLSLPEEQANSEHIDIQEDLTYVEKPVRILDTSERRTRNKVTRFCRVQWSHHSEEEATWEREDELKAAHPHLFTSSSESRGQDSV

SEQ ID NO: 131313 - protein, 80 aa, Oryza sativa
  Clone ID: PAT_MRT4530_33390C.1.pep
FSFFTSLKLLTVSPPFHNFRHSSLFPPLIEVYEFKQKNLFKFFTIYINVGNGKITSLFKWSKYVVTLFPGLICRSPVAVY

SEQ ID NO: 131314 - protein, 74 aa, Oryza sativa
  Clone ID: PAT_MRT4530_33391C.1.pep
GERRRLRWGVRRERDQGRGARVRPFREAAIGSGGYEECSIQSYFAVWFLSYHPYNSTTTRWTVFKFIRLIPAAK

SEQ ID NO: 131315 - protein, 61 aa, Oryza sativa
  Clone ID: PAT_MRT4530_33392C.1.pep
LLILLHSACQRLLISRSWSTELNILRDATIAQVLKYEDWCMSESTSFKYVDSVIFYLDERI

SEQ ID NO: 131316 - protein, 71 aa, Oryza sativa
  Clone ID: PAT_MRT4530_33393C.1.pep
VTPPQYPIRFHPYCESPTWTTGPVSSPIIKPHLGVGFNPGKWPLKSLSNGVMVSVTLEPCQVLLLAEPKGF

SEQ ID NO: 131317 - protein, 55 aa, Oryza sativa
  Clone ID: PAT_MRT4530_33394C.1.pep
FQQLSKSKLHKAIAPLHLHHIFTWQPLKCMYVCTHMLRWVNLRSSQLLYTCILHM

SEQ ID NO: 131318 - protein, 121 aa, Oryza sativa
  unsure (1)..(121): unsure at all Xaa locations
  Clone ID: PAT_MRT4530_33395C.1.pep
KFPGGRAALQRGRRGGAARDAAVAGTVPPQQGRPRGAAAAGGGGQPRRGPRAGADQAQRRGGGGXRRGPCRSGRGLGSSRCCWRWPPRRSRSRCCSTSASTSPRRRRRSPTPPTRTTSSRL

SEQ ID NO: 131319 - protein, 71 aa, Oryza sativa
  Clone ID: PAT_MRT4530_33396C.1.pep
NHRNSFFKITHFALCLPQQIPDSPDSPSGHRLVSSIMTPVPFQGQVGAGCSIMMNTSFRYVNSPRSSLKMN

SEQ ID NO: 131320 - protein, 758 aa, Oryza sativa
  Clone ID: PAT_MRT4530_33397C.1.pep
MAATMRGGNVALAIIFLCFTCSNNVFLLRSSSASSPIDDFLRCLSGKIPAEQVFTQSSSGFMAELTSSVQNPRFVTNATVRPACIVAASDASHVQAAVRCGHRSGVRLRVRSGGHDYEGLSYRAVRAETFAVLDLAGLRAVRVRAGDATAWVDSGATLGELYYAVGTANPGFAFPGGACSTVGVGGYLSGGGIGLMMRKFGIGADNVLDAMIVNADGELLDRGRMGEDLFWAIRGGGGESFGVVVSWRLKLSMVPPTVAVFTIAKTAGDGGVGDAAALLAKWETLILQPFLPDLTIRVVLQGRTALFQCLYLGSGGCARLAATMRAYFPELGMTASDCHDLTWLRAMAFISLGAADAPPEGMLRRTNNLGTYVKSKSDYVRRPMGAAAWSALFADHLASNNAGVLILEPHGGVVGAVIPDMATPYPHRAGVLYNIQYGVFWWGDDEGESSAAARRWLDALYAAMEAAVSGNPREAFVNYRDLDIGENAVVGGVTEYESARSGQWSQPSTSDLSTRGSVECGSMNSCRACRGHSCLAAVRLGSAWGKREVEENLPWWSSPLAAATEVALPLHVANEVASPLQAAAAKVSDVHWCRRSNEVKHGFSQLVAGSATAGGPSTATRRGWEGRSRQTRPDLPHVAQREGEGESSVAVDREKRRGGEPPSKFDVVNGEEENGGGKVRHGSGMGGGEWGGGEMGRIMAQWWMGRRGESQHCERQKKRQRFGGERGGGNGEMSWISFGGQWGIERRERVRSASRESS

SEQ ID NO: 131321 - protein, 246 aa, Oryza sativa
  unsure (1)..(246): unsure at all Xaa locations
  Clone ID: PAT_MRT4530_33398C.1.pep
MAAAVSLASPFRRVLHVPFARRAIPTSYHFFPSGRCHAALSFAAAAAGDSAVKASLDRNAAEELRSILDMAQRASQRRDVFHTNFLTPPIVKECMLAIEKLADIKAVAQGGYPQAXARGAQVLVDPELVDYLTSTLEKVGKVGVSCTQIPLLALEYEPPRTKSFKTVESSLRVDALGSAGFKISRTKLASLISAGDVRVNWSPVSKNGVTLKAGDVVSVSGMGRLKIGEIVTTRKGKYAVELIRYL

SEQ ID NO: 131322 - protein, 135 aa, Oryza sativa
  unsure (1)..(135): unsure at all Xaa locations
  Clone ID: PAT_MRT4530_33399C.1.pep
AAPRWLAAAAPASSPNAGLSSPRPLESLPFYLGPGPRLLKSLSVPRNFCARLPFFSPVWLVPEPVTSGAAERLDFVEQALLASGQRLDFFCGAILGSLFFGACLLKFGFWEEFGGGGXXAXECSCDRGTGWPCIG

SEQ ID NO: 131323 - protein, 230 aa, Oryza sativa
  unsure (1)..(230): unsure at all Xaa locations
  Clone ID: PAT_MRT4530_3339C.1.pep
PPNRISSEAAAAAAADDDARDAMDMGAMSDPERMFFFDLACQNAKVTYEQNPHDADNLTRWGGALLELSQMRNGPESLKCLEDAESKLEEALKIDPMKADALWCLGNAQTSHGFFTSDTVKANEFFEKATQCFQKAVDVEPANDLYRKSLDLSSKAPELHMEIHRQMASQASQAASSTSNTRQSRKKKKDSDFWYDVFGWGCLLMXLVLGVGMVVWVGLAKSNAPPQAPR

SEQ ID NO: 131324 - protein, 98 aa, Oryza sativa
  Clone ID: PAT_MRT4530_333C.1.pep
FLQALTNGRLVSIRHRVVVGTGKPRLSTIYFAAPPLHARISALPETVAAGAPRRYRAFTWAEYKRTMYTLRLSHNRLDLFHAGDGDGDAGVGDDDDHE

SEQ ID NO: 131325 - protein, 116 aa, Oryza sativa
  unsure (1)..(116): unsure at all Xaa locations
  Clone ID: PAT_MRT4530_33400C.1.pep
DAWPAQVVHTFGFPGGWKGPDFGPGSIAVFKFSLETTPTGIWNGPNGGFQFDQVGSRTGGFGKKVAEPYRQGGTTIIGXGGDPVAVVKKVEVANVLXHILTGRCAYLEPVERKGPS

SEQ ID NO: 131326 - protein, 216 aa, Oryza sativa
  Clone ID: PAT_MRT4530_33401C.1.pep
MAYRADDDYDYLFKVVLIGDSGVGKSNLLSRFTRNEFSLESKSTIGVEFATRSIRVDDKVVKAQIWDTAGQERYRAITSAYYRGAVGALVVYDVTRHVTFENVERWLRELRDHTDANIVIMLVGNKADLRHLRAVSAEDAKAFAERESTFFMETSALESMNVESAFTEVLTQIYRVVSKKALDIGDDPAAPPRGQTINVGGKDDVSAVKKSACCSS

SEQ ID NO: 131327 - protein, 56 aa, Oryza sativa
  Clone ID: PAT_MRT4530_33402C.1.pep
LEMDGPLSSVLATDAPPSSLVSAVVATYVSAIVLGQVGVCAIHCCLPIQPPQAQQL

SEQ ID NO: 131328 - protein, 107 aa, Oryza sativa
  Clone ID: PAT_MRT4530_33403C.1.pep
RFVPGPLFTVCSFWLLPCHVSALPPARARSASVRVLLACDRAVQTRLTKACKSLMSFSLPPGSPFFFPGPRASIITPALPDGGNSGPHPPRGGICLPAPNHPRGAPP

SEQ ID NO: 131329 - protein, 95 aa, Oryza sativa
  unsure (1)..(95): unsure at all Xaa locations
  Clone ID: PAT_MRT4530_33404C.1.pep
AGCGRALLGGPGXFXVAPRCALSCAVCPFVLRPVXLVSLSACLXRVSACCLFAVVFLXGXXVXFRXVRCCCFCXXXXXGRPLSGLRLPVRVLAAS

SEQ ID NO: 131330 - protein, 780 aa, Oryza sativa
  Clone ID: PAT_MRT4530_33405C.1.pep
MKATSEGAWQGDNPLRFSLPLLIVQICLVVVFTRGLAYALRPLRQPRVIAEIIGGILLGPSALGRNKRFLDNVFPKDSLTVLDTLANVGLLFFLFLVGLELDPASLRRTGRTALAVAAAGISLPFALGVGASLVLRAAIAPDAPRGPLIVFMGVALSITAFPVLARILAELKLLTTDIGRMAMSAAAVNDITAWVLLALAIALSGSGSPLVSIYVLLCGVAFVGFATVAVRPVLVFMARRSPEGEPVKESFVCAILVIVLAAGFATDAIGIHALFGAFVIGVLVPKEGACAGALTEKVEDLVSSLFLPLYFVSSGLKTDVTTISGAKSWGLLVLVMTTACAGKIGGTVAASLLMRVPLREALALGMLMNTKGLVELIVLNIGRDRKVLNEEAFAILVLMALVTTFMTTPAVTAVYKPARRQASYKHRTVERADADSELRVLACFHASRGIPTLINLVEASRGTRRSKLTMYAMHLVELSERSSAISMVQRARRNGLPFASRRGHEGGGGGGEVVVAFEAFQRLTAVTVKPMTAISDLDTIHDDIVASALDKRSAIILLPFHKMLCHDGTLEPVDRAFHQVNVRVLRDAPCSVAVLVDRALGGAAQVSAPDVSYSVLLLFFGGADDREALAYASRMGEHPGIALTVARFTAAADDAAEDDDAIQKHISNVRKAGNDGAFKYDEVSAHGRQEVAFAIKTLGRGKNLVVAGRSAAVATPLVDKTDCPELGHVGSYLATPEFSTTSSVLVVQKYDSRGDTGTSSSSQAGGEATVEESGVPIRRP

SEQ ID NO: 131331 - protein, 137 aa, Oryza sativa
  Clone ID: PAT_MRT4530_33406C.1.pep
ASSARRPRAGGGAGAASSAAESSSSGSGDNIVGPGRRPTPSAATTSPTTPTTGGRGGATAATTTAPPSSTRPPTSTGGTSPPSTSSPTPSRGMSSTASPASSFSPRRGSGGSAAASPTSWCASPSRGGAGRSRRCRR

SEQ ID NO: 131332 - protein, 48 aa, Oryza sativa
  Clone ID: PAT_MRT4530_33407C.1.pep
TLDNVTQGESHHSLPVTVQCSKLVLYYQYSSTRAYGIAANCYQSLNPR

SEQ ID NO: 131333 - protein, 466 aa, Oryza sativa
  Clone ID: PAT_MRT4530_33408C.1.pep
MPELHLRRSAWTSSPTSAVSLVDGALAGYSAPTLRLLDIDVPGARLAVATHVAPWLRFAAERVAGELSIRLRSGRYGDGAGEEEVLDLPVCGAATAIHLRLVSHLHLRPPPGGAFAALATATIQSCRVDGGELGRLVSSPQCPRLEELYLINVALVAAAASDVAISSASLRRLRFGVCDTRRLDVDAPELRFLSVSNAGEARVTAGKVEEVAHTGDMDRYEYTQLGRHLRRLEIDLTSPMAAFLGRLDTVGELSLHLAFQSELSDWSQQFEKLVEEMSKLPECEALEICPAFNHSHGFLPIAMHLLRRFAGIRKLSVNLWWVKPPCPPELVSYCPCRTLTDDLFTDNNIIMLCHLEEIEIDEFRERDEQVEFVNQLLRCNVPLLERVVFNVPSCCFPESEEIIREKIHGKLRGDKIKSIISAKRVTTPIFFFSLNETLHLSLMIPMENRVLCFHCSVYYTASLELA

SEQ ID NO: 131334 - protein, 87 aa, Oryza sativa
  Clone ID: PAT_MRT4530_33409C.1.pep
YTCGSQTIKTMYFLPRTLDMREQDGNAERQRGNAVARIGIAGPTRSRGLKVRNRVGPTARLCQQVRDRNGPAAPTCGIEERPITQFG

SEQ ID NO: 131335 - protein, 51 aa, Oryza sativa
  Clone ID: PAT_MRT4530_3340C.1.pep
VFGLEPLLSTMGYTRLPDAVACLHVLSMSYYSSVKAVGGTSIKKKKGRPHY

SEQ ID NO: 131336 - protein, 63 aa, Oryza sativa
  Clone ID: PAT_MRT4530_33410C.1.pep
TVGFHDSSTIVHTRSFSPMSRSHQDNSRALARHTHSPFVVPCYPAADKLTHHKHPTCWLATET

SEQ ID NO: 131337 - protein, 281 aa, Oryza sativa
  Clone ID: PAT_MRT4530_33411C.1.pep
NIHTPNALLLKNLHKFYNRYPVPWVSLIWNTYYTAEPPHVVTPKGSNSNLLVLMFFTSDLPQLFALPLSEQAFQEYLAMSAADTLEHLNDESDRWTYVWGNGIFSSQKIYAMNFSHVHVPVYIKWIWKSSCTMKVKVFGWLLLINRLNTYDMLDRRHCSPQNASLLCVLCSTGSRETTLHLFFQCPFSTQCWAQFGVVWNLSLSFGEMLVMARNSYNSTHFVEKVLYAAWTIWKQRNSLIFENIVSSVPSWRVLFRNDLSLLVHRVKNSERYTLLQWLNLL

SEQ ID NO: 131338 - protein, 65 aa, Oryza sativa
  Clone ID: PAT_MRT4530_33412C.1.pep
KFKPKIRTIQKWTVEFMPVPYFPNRSRNDTKQKIHQRCLIQPRNLGDVRDWRRESNSRQECPPCT

SEQ ID NO: 131339 - protein, 294 aa, Oryza sativa
  Clone ID: PAT_MRT4530_33413C.1.pep
RSVWFPPDRTRCTTCPVLYKAAHRPRRRGSLVLRVLISFITLVPKKSSPEKSVALKLLTKVLADRLQSVIIELIHQNQYGFIKARNIQDCLAWSFEYLHQCQHSKREIVLLKLDFEKAFDTIEHSVILDIMRQKGFDPKWISWISQIFSSASSSVILNGVPGKSFYCKRGIWKKLIISQNCLVALLLFALPLSEQAFQEYLAMSSADTLEHLNDESDRWTYVWGNGSRETTLHLFFQCPFSTQCWAQFGVVWNLSLSFGEMLVTARNSYNSTHFVEKVLYAAWNIWKQRNSLIF

SEQ ID NO: 131340 - protein, 442 aa, Oryza sativa
  unsure (1)..(442): unsure at all Xaa locations
  Clone ID: PAT_MRT4530_33414C.1.pep
DKVIQNVFKPSQRFYYLARNIQDCLAWSFEYLHQCQHSKREIVLLKLDFEKAFDTIEHSVILNIMRQKGLDPKWISWISQIFSSASSSVILNGVPGKSFYCKRGVRQGDPLSPLLFVLGADLLQSIVNKACSQXVFTMPIPTPGNEFPIVQYADDTLLFFDCFQKELFCLKAILNTFASSTGLKINYSKSCMIPLNVDLEKVDHLSKLFGCSIGKLPFTYLCLPLGTTRPRVIDFAPLVDRVERRLSSTTALLSYGDRLTIVNAVLSSLPTYYMCSLSLPKTVIESIDRARRHCLWRGSDINSSKKSLVLWAKVXIDLRLQNNSLLLKNLHKFYNRYPVPWVSLIWNTYYTAEPPHAVTPKGSFWWRDVLQFVDIFRGISACTVQDGKSCLFWEDLWNNKVRALVYPKIYSFARNSNLSVMMFSTSDLPQLFALPLSEQAFQ

SEQ ID NO: 131341 - protein, 554 aa, Oryza sativa
  unsure (1)..(554): unsure at all Xaa locations
  Clone ID: PAT_MRT4530_33415C.1.pep
MNERMTQQRLRQNRRAIVNKMPIDRSPGPDGFNGCFIKACWPIIKHDFYNLYAQFCEGSLVLESINRSFLTLVPKKSSPEKVIDFRPISLQSVALKLLTKVLVDRLQSVIIELIHQNQYGFIKARNILESLAWSFEYLHQCQHSKREIVLLKLDFEKAFDTIEHSVILDIMRQKGFDXNXISWISYIFSSASSSVILNGVPGKFFYCKRGVRLGDPLLPLLFVLGADLLQSIVNKACSXGVLTMPIPTSGNEFPIVQYADDTLLFLTASQKELFCLKAILNTFASSTGLKINYSKSRMIPLNVXSDHLSKLXCSIGKLPFTYLGLPLGTTRPRVIDFAHLVDRVERRLSATTALLSYGDRLTIVNAVLSSVPTYYMCSLSLPKTVIESIDRARRHCLWRGSDINSSKKSLVLXDRVCQPKERGGLGVIYLRLQNNALLLKNLHKFYNRYPIPWVSLVWNAYYTAEPPHAVTPKESFWWRDVLQFVDIFGGISACTVQYGKSCLFWEDVWNNKVRALVYPRIYSFARNTNLSVLMFSTSDLPQLFALPLSEQAFQ

SEQ ID NO: 131342 - protein, 207 aa, Oryza sativa
  Clone ID: PAT_MRT4530_33416C.1.pep
MRARPKPPPSPILILPMVNHANSCRTVGLKIDGGIPSHNSNHSPPSRPFSPSPPLRIAPGLAPTRRQPISHAVKPILRCILDPNPSPASSFTSPRQAKHRRPRTALFFAPEKFFRPQSSVSTDLAVSSTTNQINPSAAARRRRRTLAPSPPRPQPLSPSIARFGEWPEVEEEKRERERLTGLEDSSDSIDNINESQDIEQGKLPYNF

SEQ ID NO: 131343 - protein, 425 aa, Oryza sativa
  Clone ID: PAT_MRT4530_33417C.1.pep
MSMARNQPQDEEIDLQKHKNVISFYENPLLRSHLALAFVDKLEELRDLTLAEWNFRLFMKKKAEIIFQTFQQRMGVSSSPVMHFSLADLISAAPDLQSLSLGFTTMEIDEVVNKMPIDRSPRPDGFNGCFIKACWPIIKQDFYNLCAQFCEGSLVLESINRSFITLVPKKSSPEKVNDFRPISLQSVALKLLTKVLADRLQSVIIELIHQNQYGFIKARNIQDCLAWSFEYLHQCQHSKREIVLLKLDFEKAFDTIEHSVILDIMRQKGFDPKWISWISHIFSSASSSVILNGVLGKSFYCKRGVRQGDPLSPLLFVLGADLLQSIVNKACSQGVLTMPIPTPGNEFLIVQYADDTLIFLTASQKELFCLKAILNTFASSTGLKINYNLEKVDHLSKLFGCSIEQAFQEYLAMSAADTLEHLNDK

SEQ ID NO: 131344 - protein, 141 aa, Oryza sativa
  Clone ID: PAT_MRT4530_33418C.1.pep
MANDEYDALHAAANARGGTVGCPCALPSYGFCHGRGFSDFRGVRLTCYQHILGYGSSTAGIDPPRRLILDRWETSSSSCADRVVESHSANPSPSRQYMAVNDDDVLQIDAITNGGGRSLDGGSALSHVCREIKAPGSHHWW

SEQ ID NO: 131345 - protein, 524 aa, Oryza sativa
  unsure (1)..(524): unsure at all Xaa locations
  Clone ID: PAT_MRT4530_33419C.1.pep
VSSTAISSKHILIYLLFPDDTLLFLTVSQKELFCLKAILNTFASSTGLKINYSKSCMIPLDVDLEKVDHLSKLFGCSIGKLPFTYLGLPLGTTRPRVIDFAPLVDRVERRLSATIALLSYGDRLTIVNVVLSSLPTYYMCSLSLPKTVIESIDRARRHCLWRGSDINSNKKSLVLWERVCQPKDRGGLGVIDLTLXNNALLLKNLHKFYNRYPIPWVSLIWNTYYIAEPPHAVTPKGSFWWRDVLQFVDIFRGISACTVQDGKSCLFWEYLWNNKVRALVYPRIYSFARNSNLSVLMFSTSDLPQLFALPLSEQAFQEYLAMSAADTLEHLNDESDRWTYVWGNGIFSSQKIYAMNFSHVYVPVYIKWIWKSSCTMKVKVFGWLLLIDRLNTYDMLDRRRCSPQNASLLCVLCSTGSRETTLHLFFQCPFSTQCWVQFGVVWNLSLSFGEMLITARNSYNSTHFVEKVLYAAWNIWKQRNSLIFENIVPSVPSWRVLFRNDLSLLVHRVKNSERDTLLQWLNLL

SEQ ID NO: 131346 - protein, 108 aa, Oryza sativa
  Clone ID: PAT_MRT4530_3341C.1.pep
MTGDDHEGPLEDALEAAVLEEVCKITRNGGGGGDGSKGGGGGGGGGVIKSMAAAARVQAATATNLFVPLLFLMLPRFLSREADKKAWGPDLAPELGTSIAARRRSGEE

SEQ ID NO: 131347 - protein, 183 aa, Oryza sativa
  unsure (1)..(183): unsure at all Xaa locations
  Clone ID: PAT_MRT4530_33420C.1.pep
YPGGRRAASKGAAGGRMAGGGRSKGVAGGSGAAAGGGRSDGATAVGGRKRSGGXAAPSRSPILNIXPPSTPTLLSIHAANNRRRGTAAPAPPSLPPSWPSFLAGRRARAEREETGMPTRVERPASRCSSSTLRRPPSPLPPTRRPACAADPLPLAPAPLPPSPPVPAHRRSARPSVLPTAAPP

SEQ ID NO: 131348 - protein, 53 aa, Oryza sativa
  Clone ID: PAT_MRT4530_33421C.1.pep
WHGDAMLPRGQDVRRRCGGWRSPCRLPFAGEVAAASSSLPGSPVCRGFSCIGR

SEQ ID NO: 131349 - protein, 57 aa, Oryza sativa
  unsure (1)..(57): unsure at all Xaa locations
  Clone ID: PAT_MRT4530_33422C.1.pep
MLKSPFQVGQYHPASGICSNQQVTCTXVSEPKSXLLPQRCTLLERLTRCHVRLIEDG

SEQ ID NO: 131350 - protein, 147 aa, Oryza sativa
  Clone ID: PAT_MRT4530_33423C.1.pep
MSSMRWSQIRNNMGSFYVMLGRPHRLSLSSLLPPLSNHNKEMWRRRHPLSAVLSITRAPRKTTACGGTRLAAGEEGATCKDRRGGQGGRTQGGRRWPSAMGGGLMATDEGRGAQPTATRGRGSGDRPPPQPASTIELVSDRPPKRGG

SEQ ID NO: 131351 - protein, 101 aa, Oryza sativa
  Clone ID: PAT_MRT4530_33424C.1.pep
MVGPRGPHISFPFSLFFLVASSDSAGAPRRSTTSTRPPPPKAVLPVVFVDGDQTVDLGTVTVQPFLGVRKLRVVVADRVGLVRQQILASLARPCRARHVPL

SEQ ID NO: 131352 - protein, 386 aa, Oryza sativa
  unsure (1)..(386): unsure at all Xaa locations
  Clone ID: PAT_MRT4530_33425C.1.pep
WPANFKPMGINKXYDGKTDPSAWLSVYSTTIQAAGGDQLVMANCLLVMLTTAAQAWVTGLPRYTINSWFELKGQFIVNFQGTFPHPGTQWDLYQIVQGNDERFSNYIRRFTERRNTILHVTNTEHVLAALPPAYTGVLYLHHHKKEEEAAAAAALGQLNEAKKKREKWLKEMSGWLMVLAVLAASVTYHAGLNPPGGFWQHNDGESHVAGTPVLQSNFPQRYTVFFYFNATAFVTSVVIIILLMNESFYHSEAKVVALEIIAVLDMVCLMGAYIAGSTHAAPCSIYVTVLTVVVFLYVVYAAELLRKIWWLIIHAPVHDTAATGGGKLPAVPQHIVEQASPHHRCHADDVDSSMSAPPRWCMQKFCTPFSFMHVGVRNLYFVYLDH

SEQ ID NO: 131353 - protein, 75 aa, Oryza sativa
  Clone ID: PAT_MRT4530_33426C.1.pep
LISHDTAASHTDRQGAPNGETRKQEEKPPKKQKDSGKHTLLYDLPLLSWYWIILIRLPVSLVLLVVFCLVIFIIC

SEQ ID NO: 131354 - protein, 80 aa, Oryza sativa
  Clone ID: PAT_MRT4530_33427C.1.pep
MPIPEVDIQRRVLAYVSLYWLLLFRILWWLLIEVDLDRGDRVIMLIVLIVSYHESDKALSAMGVPSRRSLMFLGGLVSTA

SEQ ID NO: 131355 - protein, 419 aa, Oryza sativa
  Clone ID: PAT_MRT4530_33428C.1.pep
MEIGRLVRKQTQPGWAPTTRGGGRRRPLALALGRLSSRRPVRCRCLAAMQTSPPPPSVRTVSIPFSDLKERDRDLSGKIEEGLGPNGLGIISIADVPGFPVLRKTLLRLAPKFANLPEDVKKELEDPDSRFNFGWSHGKEKLESGKLDTFKGSFYANPILDAPTTDDVLVRRLYSIYLTGCLVSQGAKSFKALGKLMLEVGLMLAHHCDRYVMQQGVGPYDGESLEQTIASSRCHKGRLLYYYPRQFSKQEEGGSVSSWCGWHTDHGSLTGLTCALFTKNSMEIPCPDSAAGLYIRTRDDKVVKHIIQERVMWSALIEILLHKVTFEENELAYQVGETTEILSRGRLCATPHCVKAPSSENASNVDRSTFAMFMQPDWDEKLKFPSEIPYHQELIPPNGTLTFGEYSERLVNKYYQGKT

SEQ ID NO: 131356 - protein, 146 aa, Oryza sativa
  Clone ID: PAT_MRT4530_33429C.1.pep
MEMIPSPLGPSPSSIFPLRSLSLSCISSRENGVATLMESRTIRRYAAGSSLTLRSEKGMETVRTDGGGGEVCMAARQRHRTGRRDESRPSARASGRRLPPPRVVGAQPGCVCFRTRRPISISPVTYLGVGFVWDSNAGRSVTTTFF

SEQ ID NO: 131357 - protein, 92 aa, Oryza sativa
  Clone ID: PAT_MRT4530_3342C.1.pep
MTGDDHEGPLEDALEAAVLEEVCKITRNGGGGGDGSKGGGGGGGGGVIKSMAAAARVQAATATNLFVPLLFATASLRHISPAQQRVSSSSRP

SEQ ID NO: 131358 - protein, 96 aa, Oryza sativa
  Clone ID: PAT_MRT4530_33430C.1.pep
SRVGPLPCRHLPDDDLDSGFAPDDPDLLCNCPVPDRLLVVSAGVAANLLFAFLIVYALARPPPPLSSPASSAADGEGGEKGERERKGGGRRIGERG

SEQ ID NO: 131359 - protein, 117 aa, Oryza sativa
  Clone ID: PAT_MRT4530_33431C.1.pep
MARISSMLFGRSFGTSDGSYQLIKPLAIAPRGRGAPTRDGTTTPVRPSVSSPQLAPLEDRGVHHHHHHSSSPTIPNPSSSDSPPGDLCCARSRSSLAVDRPVQIRVVYTVRGCSSIY

SEQ ID NO: 131360 - protein, 126 aa, Oryza sativa
  Clone ID: PAT_MRT4530_33432C.1.pep
PSASQPSQSQSQHPRHATPRHAFVCFTRRLAPLEDRGVHHHHHHSSSPTIPNPSSSDSPPVAASVCSPARRAPAGECTARGRLVDAISGVLRGDLCCARSRSSLAVDRPVQIRVVYTVRGCSSIYG

SEQ ID NO: 131361 - protein, 110 aa, Oryza sativa
  unsure (1)..(110): unsure at all Xaa locations
  Clone ID: PAT_MRT4530_33433C.1.pep
RDSFPSTSISRKSTRHKARASDGGRAVVVAGAAGGGSNGGGRSRGRERQRWPKPGEEGATVVVAGSRGWEGMAALAGARXRGRRREWRRWPELGRKGHXGGSGRQRRCRV

SEQ ID NO: 131362 - protein, 339 aa, Oryza sativa
  unsure (1)..(339): unsure at all Xaa locations
  Clone ID: PAT_MRT4530_33434C.1.pep
MGKRQGGGDGSEEAMHRGWRSSTGAGKEVVLLIQATPARGGDGKGPTATECALAAADLTTGEWRRVEVSTDDTSSSSGLCAGRAMPDQRRLRAGRPRRSVVARRVRKRHDAAGQPRGVRERGKEELGVGAAVVYGRRETHRPLFHLPAALCRVAGRPYRVPPYAAWSPRAAPAATPPSRCPLPRRRQRGREELGVGAAVVYGHREPRQPLLYLPAALCRVAGRLYRAPPCAARSPRAAPSRERERTSPAACIASHGHREPRRLLLHLPAALCRVAGRPYRARAVPLPVPAPRSRRPPNRPDRLXLGEVSGTARRGNGLPLRGSTVQLPPPIAVSPRHHL

SEQ ID NO: 131363 - protein, 102 aa, Oryza sativa
  Clone ID: PAT_MRT4530_33435C.1.pep
TCRKHSKCCLQRNFRWFYMLLLTASISLLVSCTTTAHCLLNDFLPQLMMLLLIHCLFRLHAVQPMKCASSRCSTRTNTRTPRVRLDVGKQQRFGSIIHFPSL

SEQ ID NO: 131364 - protein, 92 aa, Oryza sativa
  unsure (1)..(92): unsure at all Xaa locations
  Clone ID: PAT_MRT4530_33436C.1.pep
GRMVSTYQESMPMPLEQGWXSSGSSFXGEEGSSSKQGXIWQGVVVGGLXGDHQQQQGITRVSLHRASQYXAQLPFMSRVEPQKGSILANGQN

SEQ ID NO: 131365 - protein, 109 aa, Oryza sativa
  Clone ID: PAT_MRT4530_33437C.1.pep
KKRTTALYNYWGPIYITTTLTEIMGGGAWDVFFLWGQACSKILYINIGEGPPPHIISTGYYTRHSQHTNLQTGHIWPKPQQGPNQGKDPRFRHMGGGERPTLPSQVPAG

SEQ ID NO: 131366 - protein, 109 aa, Oryza sativa
  unsure (1)..(109): unsure at all Xaa locations
  Clone ID: PAT_MRT4530_33438C.1.pep
GGARELYPGMTEPPEMRRALIRKIYEILSMQVLLTAAVADVVDKVPAMSHYFLFFHPGLGPYMLLIILPFIVLCPLVYXYHQKQPFNLXCSVLFTVIINYVVGMTCAFT

SEQ ID NO: 131367 - protein, 576 aa, Oryza sativa
  Clone ID: PAT_MRT4530_33439C.1.pep
MAGDITCGSLLQKLQLIWDEVGESDEDRDKVLYQLDQECLDVYKRKVDQATDSRDLLIQALDDSKIELARLLSALGEKAIARTPEKTSGTIKQQLAAIAPTLEKLNKQKNERVREFVNVQSQIDQICGEIAGTTEVGEKVATPQVNEDDLTLERLEEFRSQLQELEKEKSNRLEKVLDYVSMIHNLCTVLGMDFLSTVTEVHPSLDDSIGDNCKSISNDTLSKLDKTVATLNEDKKSRLSKLQELAGQLYDLWDLMDAPMQERSMFDHVTCNRSASVDKVTAPGALALDLIEQAEVEVQRLDQLKYSKMKEIAFKKQTELEDIYAGAHMVIDTAAAHEKILALIEAGNIEPSELIADMESQISKAKEEALSRKEILDKVERWMSACEEESWLEDYNRDDNRYNSSRGAHLNLKRAEKARILVNKIPALVETLVAKTRAWEESRGLSFMYDGVPLLAMLDEYVMLRQEREEDKKRMREQKRYIEQQLNTDHEGPFGSRVSPNRPVSAKKVPGAKSNGSANGTPPNRRLSVSGHQNGRSGGKDGKRDSAKTASPGNVAAAKEDASSHISGTDPVPSTP

SEQ ID NO: 131368 - protein, 46 aa, Oryza sativa
  Clone ID: PAT_MRT4530_3343C.1.pep
KKGCPPPPLSSVAVFHILVVVCYCINLSLSPLHTCTNSDLWGGFLM

SEQ ID NO: 131369 - protein, 806 aa, Oryza sativa
  Clone ID: PAT_MRT4530_33440C.1.pep
MASSSSSSSSSLASSSGGGDAASASASASAAAAAGAIVVAVAVRGDGRASRRAARWAAANLAAHGAGAGRVALVHVIPPVSFVPSPSGERVPVEKMDAETVEMYAEDRRARAQEEVFLPLRRLFARTTVETVILEEPSVTAALVRYAADSGVRNLVVGSTSLNWFKRILRLRDVPSTVLKAMPCSCNVFVVSRHRLTIKFANQARTSKSSACVRTQSISHKSFSRIQKNWLLDKQSLHDHPEDGTPKSSGDTSYAGSHTCSSRSTSTNAGKSSGSHGRSLFGSLGRKTPGRDVNTDPDAIGRLKEIPYVALSSIDEDLQSQPVDEVAKLRKELQDTLVMYDKACEDLVHAKKKIKVLSSECTEEAKKVQDALHREELLKQKVADEKTRHLEAVTEVEMAKTLFAQEAFSKHKAEIVADMVIAEKTKVMDALLSTGKSCRRYSKREIQLATDNFSDAKKIGEGGYGNVYRCTLDHTEVAVKVIQQDSSDKIDEFLREVEILSQLHHPNLVLLLGFCPEIGCLVYEYMENGSLEDQLINNKGQQSLHWFLRIQIIFEVACGLAFLHATKPEPIVHRDLKPGNILLDKNYVSKIGDVGLAKLISDIVPEGLTEYRDTAVAGTLYYMDPEYQLTGTIRPKSDVYALGIIILQLLTGKRPHGLILSAEEAIKKDSISDVLDSSQIDWPIAEAEILAKLAVRCTALKCRDRPSLESEVLPEIESILSRITASPTLRSPNAAVPSHFICPILQEVMDDPYVAADGHTYEHRAIKAWLKKHKTSPVTKQRLQYLSIIPNHSLRVAIQQWKSQSS

SEQ ID NO: 131370 - protein, 85 aa, Oryza sativa
  Clone ID: PAT_MRT4530_33441C.1.pep
MNHAIQKVYGGSRQTDPDDISGDVISGGGSAAQARKLAGERRRFGTNGGHQDVEHDAANLPMTKATAEEQRTASATRSKRRRPSA

SEQ ID NO: 131371 - protein, 67 aa, Oryza sativa
  Clone ID: PAT_MRT4530_33442C.1.pep
NYRYEIYPFFDGVSLLQLPAASLGAPPAPSPAAVNVTPPATTTGTRRRGELGETDIRSRSHFNNAIC

SEQ ID NO: 131372 - protein, 58 aa, Oryza sativa
  Clone ID: PAT_MRT4530_33443C.1.pep
MDLQHKSPKLIGLEVFRYYARNREETAELQMNGLFEDCMLAAAVASYLIWLRYCFHAF

SEQ ID NO: 131373 - protein, 92 aa, Oryza sativa
  Clone ID: PAT_MRT4530_33444C.1.pep
GSGPLKPKRGGQAPFPTQGKRKKTKKGGVFNWPPGAPTYPTPQKKLKKGGLESPPRGAFSPLYSQKPGPWGGVPGERKQEPGKSLKYIHAPH

SEQ ID NO: 131374 - protein, 60 aa, Oryza sativa
  unsure (1)..(60): unsure at all Xaa locations
  Clone ID: PAT_MRT4530_33445C.1.pep
TLTVAPTLXSAXTHLSGFTQTDPALCHSPDSVHPGPXLTFXGSLCGDRQAPSVRTCGGYR

SEQ ID NO: 131375 - protein, 90 aa, Oryza sativa
  Clone ID: PAT_MRT4530_33446C.1.pep
MSSSLLPFFLPLSLSSLSPPFSSDWEQRKRLAVRAEVRRRSPRSGKWSTGCPGEASSRPTTSVRQTNRLARARAWFAGEEDDVVGAEPGG

SEQ ID NO: 131376 - protein, 63 aa, Oryza sativa
  unsure (1)..(63): unsure at all Xaa locations
  Clone ID: PAT_MRT4530_33447C.1.pep
RRKYELLHHXPPAGIVLNHRTERSGIHPKTEIDKAAEFRQRHAIATGNDCTKTYWTPSSSSPS

SEQ ID NO: 131377 - protein, 216 aa, Oryza sativa
  Clone ID: PAT_MRT4530_33448C.1.pep
MAPAKVYGPAMSTNVMRILVCLEEVGAEYEVVPVDMSTGEHKRPPHISRNPFGQVPAFEDGDLTLFESRAISKYILRKHGSDLLRESNLSESAMVDVWLEVESSHFDGAMSPIIFQCFIVPMFMGGATDIGVVNESLEKLKKALEVYEAQLSKSKYLAGDFISLADISHFPTVYYLLASAHASVLEAYPRVKAWIDDVMQRPSVKKVTEALKMPSA

SEQ ID NO: 131378 - protein, 258 aa, Oryza sativa
  Clone ID: PAT_MRT4530_33449C.1.pep
MSIRLSKILFSELEEYRDKSRFLYGESMGGAVALLLHTHPPTFWDGAVLVAPMCKISEKVKPHPLVVTLLTQVEEIIPKWKIVPTKDVIDSAFKDPIKREKIRKNKLIYQDKPRLKTALELLRTSISVEQSLSQVSMPFFILHGEADKVTDPEVSRALYERAASADKTIKLYPGMWHGLTAGEPDHNVHLVFSDIVAWLDRRSHRQDRASITPPAACTDSAAAAAADSPVSPEPPRQGAAGGFLCGLTGRANPQQCRM

SEQ ID NO: 131379 - protein, 128 aa, Oryza sativa
  Clone ID: PAT_MRT4530_3344C.1.pep
MGLFNNLPLHTLVSLSPFTLSGPHRPTVHQDRKVSFPLQKLAIEVRGFPTYILGPLPFHNQCGTIQQSLPSHQFGVPQPFTVSGPHQPTVHQDRKGPFPSQKLAVEVGGSPTYIFGSLTFHNQCGTIQ

SEQ ID NO: 131380 - protein, 139 aa, Oryza sativa
  Clone ID: PAT_MRT4530_33450C.1.pep
TTNETTHNPRRVAVPPQPCRRRLRPPSRHLSRAASWCGHRSRSGGSSARWWRGSSTAHAAAAPRLLGAVAAPWLGRASSASSSLPAQWLPGAAAPPWLGTSTTVRWRGGSWVRSSRSLPLTPPSSSVMLDYLLSWNFFF

SEQ ID NO: 131381 - protein, 102 aa, Oryza sativa
  Clone ID: PAT_MRT4530_33451C.1.pep
MEESSSLDVTQSGTIWIPFEQGPALGYGKKCDGLGPRKSRGPEDLVSANPPPAPCALHGASASSPHAGPPAIPSAFSPSQLCAFVCRLFALDTVRPATADTT

SEQ ID NO: 131382 - protein, 86 aa, Oryza sativa
  Clone ID: PAT_MRT4530_33452C.1.pep
LAQLFSFWPLIELRKGEAARPIVVAASSSLGGVTTSPSTALLPHPVVLRPPLPLARLCRLFESPETEAVAGTTDAGSSSAVASASH

SEQ ID NO: 131383 - protein, 105 aa, Oryza sativa
  unsure (1)..(105): unsure at all Xaa locations
  Clone ID: PAT_MRT4530_33453C.1.pep
WAAGSGXSRLXDXLRXXXDTYFXXXXXAASMGASLALAXTKSLYPRVDIDAIDGIADGTSEEAALDLISDAQKAADKIAADVVERFQDTDLRPTGPDNSDDEKTD

SEQ ID NO: 131384 - protein, 188 aa, Oryza sativa
  Clone ID: PAT_MRT4530_33454C.1.pep
MAPESSQPAKKRRTYRCRRCGFPKKGHVCVAAAAAGGVLPLLPLPEEEEKIDGISALPDDVLHTIISLLPTIGGAKTQVISSDVSQGLFVPDIHNGLVDDAAAIECLDLHLKEIVVRNYRGQKSHAAFAKFFILNASVLKVMTFRVVLEVVRDEDQVMNRNPMSSKDPSSDANLIALIYGERVHVQVE

SEQ ID NO: 131385 - protein, 195 aa, Oryza sativa
  unsure (1)..(195): unsure at all Xaa locations
  Clone ID: PAT_MRT4530_33455C.1.pep
GKGRQRVLSSSRRAPASVGLPPPPPQLQPRAAMLPRSRCARLSPGPTPPTPNYGVRRXGHGGLAPAPPPLLPHPVVLRPPLPLARLCRLFESPETEAVAGTTDAGSSSAVASASHGRFLSSTSGQGERRVELEEGAQRGILVSPGTKIDENGAKWRIWQNKCLASLRGGILTNPIGGMALQRNPLLEVAQYPISR

SEQ ID NO: 131386 - protein, 121 aa, Oryza sativa
  unsure (1)..(121): unsure at all Xaa locations
  Clone ID: PAT_MRT4530_33456C.1.pep
FRRRTPPSTIFSSPQVPPPPSIHPLPLRRKHRLPETSXAPPQLKLPRRLLPPRVSTNAPRKLAAPPPSPLSDLPPHPSSERXEPAPPPHPPAXHGSFRTPGRHRRLAPSAPLLLPRAVPSL

SEQ ID NO: 131387 - protein, 84 aa, Oryza sativa
  Clone ID: PAT_MRT4530_33457C.1.pep
MEGAVLVLHQVAILALPAAETEAAIAAAPRRRFCERCELHIHIQGRGCSEEQDHRDEKQLTRSYGSLSGSLRRQIPICMLAEWQ

SEQ ID NO: 131388 - protein, 369 aa, Oryza sativa
  Clone ID: PAT_MRT4530_33458C.1.pep
MALMKRCFCGSQEDIKELLNLKNVQLFSYREIRAATNNFDDGNKIGRGGFGTVYKGTFEDGTAFAAKVLSAESEQGINEFLTEIESITEAKHANLVRLLGCCVQRQNRILIYEYVENNSLDNALQGSAAGVTDLSWSTRSDICMGVAKGLSYLHEEHEPSIVHRDIKASNVLLDRNYIPKIGDFGIAKLFPDNVSHVSTRVIGTTGYMAPEYVVHGQLTKKADVYSFGVLILEIISGRRMSQTIRSGMFLVRQAWMLHEQGSLLDMVDPSMKGGYPEEEALKFIKVALACTQAKPCSRPTMRQVVKLLSRPVCLEELEMLCPGFVGDGHTHDAAAADTVGSPGVMVVSPALSPKVRWPTGTATTTTTEH

SEQ ID NO: 131389 - protein, 103 aa, Oryza sativa
  Clone ID: PAT_MRT4530_33459C.1.pep
MDAKVRKFRNASGTRGSGVYRVKPLDGGEAFDIFCDMKTAGGGWNVFSRRFNGKVNFYRPWADYKNGFGDASGEYWLGLDKVNRLSKTMPHRLRIDLTSFDGA

SEQ ID NO: 131390 - protein, 471 aa, Oryza sativa
  unsure (1)..(471): unsure at all Xaa locations
  Clone ID: PAT_MRT4530_3345C.1.pep
DRKGPFPPQKLAIKVRGSPTYILSPLPFHNQCETIQQSPPSHIGVPQPFTAPSLYSGPXPPTVHQDRKGPFPPQKLAIEVRGSPTYILGPLPFHNQCGTIQQSPPSHIGVPQSFTAPSPYPGPHRPTVHQDRKGPFPPQKLAIEIEPEINFLKNLGCSLPKNYLDTAVDTAVEFMEDIHERMFAPSPSDEALNKANEILKDSFYDNVITGSSATSVRMEFVASNKELSSPSTSTVTAEDSFAGSVVADAPETESILTKSPESDSSEGGNIEVNEQCMLPVDTSAAEISGGKSIDVDEEVLSGNSEKPSDSCTSEDPISIGKELILWRKPLEPQSPESSAFDDAIIPEGTIVNCEEPEHSTKDTEESGKHGDLSKFSGVTISHDLTTDMSNDDDSNVWLDIDLQDDQEQTEADVSPVRQPKKTSFKKKMMRSLANKFRWSKKERNLNQAEAGNVRYQAVSSSDDLEDDWELL

SEQ ID NO: 131391 - protein, 119 aa, Oryza sativa
  unsure (1)..(119): unsure at all Xaa locations
  Clone ID: PAT_MRT4530_33460C.1.pep
LYCWVWGFVVALLAVAAAADGEEEEGKWXXLIXMPSEEGDDADAAVPAPAPAVAYYCGTSMAILVSXSFTYWNYLHQTDVCHAYQILQKGAVKDNNIFLFMNRDLLHNNLSPRPVTIIQ

SEQ ID NO: 131392 - protein, 48 aa, Oryza sativa
  Clone ID: PAT_MRT4530_33461C.1.pep
ADKLPAELCLLILNKAKFKHAGFEITVHIFIEHALNYILTRLRYIIPG

SEQ ID NO: 131393 - protein, 136 aa, Oryza sativa
  Clone ID: PAT_MRT4530_33462C.1.pep
GRDLSSRPQERFVSSPSRVLAAAAAAAKPSPPRLASQRSQDVPRRDPAAAEQGGGVQAAALPPHRHGLLRCRHPRRPLHPPLPQPRRGPPRAHPGALGRNRPPSPARCCSDGRIIFALVFHGWLQSYVWIGFLQTL

SEQ ID NO: 131394 - protein, 56 aa, Oryza sativa
  unsure (1)..(56): unsure at all Xaa locations
  Clone ID: PAT_MRT4530_33463C.1.pep
GSIXGLFLCRCNRNRIGKEIEGVLSEGNRVSIFVTPNNFHAWNMMTKAPFEVDSSL

SEQ ID NO: 131395 - protein, 158 aa, Oryza sativa
  Clone ID: PAT_MRT4530_33464C.1.pep
MGFLSFAGRVLFAAAFLLSAYQEFSEFGVDGGPAAKALQPKFNTIVANISTRTGLVVPHIELKHIVAAMISLKGLGGLLFILSSSLGAYLLLFHLAFITPVVHDFYNYDIESAEFVQLFTKFAQNCALVGALLFFLAMKNSIPKRQPNRKKAPKPKST

SEQ ID NO: 131396 - protein, 65 aa, Oryza sativa
  unsure (1)..(65): unsure at all Xaa locations
  Clone ID: PAT_MRT4530_33465C.1.pep
PPPLIXHCYLVIFVVVVSLANPIILHDPDLSVMVVALLETCKHLFICASFVSLLAPLKKEKKXAA

SEQ ID NO: 131397 - protein, 416 aa, Oryza sativa
  Clone ID: PAT_MRT4530_33466C.1.pep
MDPPRRQRRVSRRARMAPPPLHVELPFMDRQILVSRNSRGYFALGYSLPGEPFPSLHELLGAIYDHYHPQRESRDPAPPPLLPQCEEHVEGNTQLSLEQTLEEPEVATMEESPEPTTLGDPFTATTSSLPSAPHGTSEVSPSSRLRHHTSPESTIWTRDPADWPWIYHIRMDRGGSFHTYPALDGPFLNLYEAEDAINRHLESLKCPMFKEQDGVSPVERMIQKSLYWPDGTRKKYSRSQASQNVDKRRRQMVQVLLDKYNDDHDLVEDLAYELQDVVHYQLIVEGIKWFNHFNFTAKTSGADIDNLFFAEVMSSQGEEDWVVTCCCLIKSADNGICYGCKNDRNLDMKHPNDSDTYVGGHKDIVMPFETENWTESESDDDEDEEEEVKASRIRRMIEGLDDSDEPEDIFDPVFKP

SEQ ID NO: 131398 - protein, 1335 aa, Oryza sativa
  Clone ID: PAT_MRT4530_33467C.1.pep
MPAHGGQDADNRRLFAGVRFALLGFDPVSESQYRSEMVQRGGVDAGAYGAGCTHLIVCDLLYDNPICVAARKDGTKVVSEQWVDDSLDLGEMADADRVLYRPVRDFSGIPGSQSLRICLTGYQKNWRDDIMKMASLMGAEFSKSFDALKDTHLICYKFEGEKYKVAKRENTAKRANVSLVNHQWLEDCLMAWKILPADDYTKSGWEIEIMAAQAKDSEDDEEEAGRSSSHSKRATRSARTKDIRMATLVDPHSQAPTRDPTISSCSAEITAGGHMSTPERITKAGGSTSRSLNIKSDIRNTPISADSDAYESAHFPLNGKEEAPAAQVHRAEAKDDVKMAVDASPGAHCISNIAGTTVCSDHHVHQSTTAPAMLVDKTETIGGNCLDSSNQNNVNIALWSTPSKETFSEKTLRPSGISGNVGQKDGGSTPDLNTAVDQSNTARELTLCEANLRLTGNAASKKNSQVLSYNRRRCRKSVSPEANLKPTGSPQSFEGVTPRVDFTISPSMKSDHKISDITDAESLRDVEIVKKVNKSSGALAQKRASKLSSISMKPSVSSETGTANSPFSSRESASEAATFSDPSRNSAESVILTAKEKSGQSKSNLLSYRRALKLARPVEGEKLSENSTKSKKSLRENTLALHEVDKGGSSSENGLRSEKGCAANSSADSEVDKRSSSSSLQNRDTEMSDVPQVDKTEVVAPNTDFAIVVSHQNMEVVPKSIQVTATISECETFPQEEPTSKVKNASVKRFGNASNKAATRSVKNKDEIVSFKSDGDKVEVQPEKNHARPNGAECTVFIPEEIPNSKANNAATNNSRDALQMNTALALSKTELAEKNPGSASADEYRKSSCEKVSQTADVEMPDAPIVDSTGAMFSKSGFKEVFPPENAGSCPKRLSTNTNMGGPETCTPSIVPNNRVRKAAAKRKVSAVQQNSFGDVPCKNSSAVVSEFKFVYKRASEGPRNGSKKTMDQNLQSSNEDGARDAGVSFSEDDMRDRSKILQNSQARSSKRQKAADLMDGSTDHDKENLPGNHNISKSKYGNSCTSLNSFIQAAGSGKDRLADRGVVEENDCGMLTVLEPRLFILSGHRLLRKEYKLILRRLKGRVCRDSHQWSFQATHFISPELRRTEKFFAAAAAGRWILKSDYLTACNEAGKFLEEEPFEWHGNGLNNGDTISLDAPRKWRQLRQHTGHGAFYGMQIIIYGECISPSLDTLKRAVRAGDGTILATSPPYTRFLKKPDHVDFAVVSAGTPSADAWVEEFKRQGIPCISADYLVEYICKPGQSLNKHVLFNMHDLADKSHAKLLKGQLDDVLGEATEAMQLNQLVRLVDPTTGKED

SEQ ID NO: 131399 - protein, 69 aa, Oryza sativa
  Clone ID: PAT_MRT4530_33468C.1.pep
PVLPRYCRLYLLRTTLKFFFFTVWLNGHSNQLCVKPIRMCYVRKYGFFARTKYFERILCWPTPPLLETQ

SEQ ID NO: 131400 - protein, 178 aa, Oryza sativa
  Clone ID: PAT_MRT4530_33469C.1.pep
MSTGNMLADLSSVNGYHEGLPMVLAHIATYAALALPPTVDARHHSCRGQEDLDHLVIFGAMNPATSANGAAAIIDPPSHTVQWASSHAYASCPSLLAGILGSHHGPGSIKLNRAVAMTAAQLNNGTGRALGGQSAPQFGTPCGKGNEEKEMTDQQVVKDTNDLHHANKQILIKARGRG

SEQ ID NO: 131401 - protein, 89 aa, Oryza sativa
  Clone ID: PAT_MRT4530_3346C.1.pep
MRRFSKQHLVPFILLLLLVMSHLPISSLGSRRAFREEAVSGFRSHELAPTMAPSQEKEAGVVAGAGSICGQKYAVSRRMVPQGPNPLHN

SEQ ID NO: 131402 - protein, 158 aa, Oryza sativa
  Clone ID: PAT_MRT4530_33470C.1.pep
CPLNRARRRVDDGSSPVGGSGRIHGAKDDQMVQIFLASAAMVPGVDSWGKSKRGVGGNVGKHHGKTLVAPPPILSRHMLSSGTEEKPVRRTAAAVGKKKDGRGLRSMSVPAAEKGPKSAPSADPSGRSTIWEEGGGEERGAAVGKKEDGRGGSGYGAA

SEQ ID NO: 131403 - protein, 227 aa, Oryza sativa
  Clone ID: PAT_MRT4530_33471C.1.pep
FMLVPNPDQITLERLFRVDDIRVGATSRKSIPLLVDLLKPIPERPGAPFLALGLLTQLAIDCPPNMMLMAEAGILEALTKYLSLSPQDATEEATTDLLGILFSCAEIRHNEAALGTVNQLVAVLRLGGRNSRYSAAKALESLFIADHVRNSESARQAIQPLVEILSTGMEREQHAATSALVRLLSDNPSRALTVADVEMNAVDVLCRILSSDSSAELKGDAAELCCV

SEQ ID NO: 131404 - protein, 49 aa, Oryza sativa
  Clone ID: PAT_MRT4530_33472C.1.pep
ISVTTTSLTENTCATRLRLPQHPNAAITPLPKIKRQYWFVSLHENILRF

SEQ ID NO: 131405 - protein, 129 aa, Oryza sativa
  Clone ID: PAT_MRT4530_33473C.1.pep
MPLDGDGSIPIPMVFDGGTVGVRRGGTWWTGVGSSTSGNNSSTFCRNRSTVDLQNTRTNSSFTISPARTTTVADKEEKGAVLLALVKGQEEAAALWEVLAPPEPTHTGLTFISQREFSSDHHKEEAKRF

SEQ ID NO: 131406 - protein, 83 aa, Oryza sativa
  Clone ID: PAT_MRT4530_33474C.1.pep
IGGRVRRLVASYTPSTVTSTPAAVPYRIRRRRARRRSAVEVALDVAPPVVPCRIRPMPAPPAATPARRSHLRKNRIWICDWLR

SEQ ID NO: 131407 - protein, 715 aa, Oryza sativa
  Clone ID: PAT_MRT4530_33475C.1.pep
MAMAPVSFLLIFFLTTAGLTLQTCCFDSPGHSANLSTIWTCTSPTTDVLVANPLLSRPVPDNHNLHFAAGFYNYPLVNTYIFGVYTVTDAGEFADMTSWRPEPVADVWSANRDQLIRQNSTLSFTAEGDLVLQHPDGSLVWSTNTSGQSVAGMTLTESGNLVLYNHNNLPVWQSFDHPTDSLLPGQRLVQGMRLKPNALAVNLIASDLYYLTVHSDGLYAFAGSSNSQPYYEFTVSTGNKSQNPPAYLTLANRSLDIFVPSSSSANLEHLSLQSPALSLQYIRFESDGQLRLYEWQADQNGRWLYVQDVFPFQYCDYPTVCGEYGICLNGLCSCPTATESHIRYFRPVDDRRPHLGCTLETPISCQFVQDHQLISLPNVSYLYYDSSRVSELTDEESCKQACLTTCSCKAALFWFSFQMLKLATKDFSNKLGEGGFGSVFSGQLGEEKIAVKCLDQASQGKREFFAEVETIGRIHHINLVRLIGFCLEKSHRLLVYEFMPKGSLDQWIYYKDSNDTLDWRTRRNIITDIARALAYLHEECTHKIAHLDIKPQNILLDDNFNAKVCDFGLSRLIHRDQSHVTTRMRGTPGYLSPEWLTSHITEKVDVYSYGVVMIEIINGRPNLDHSNLGGGIQLLKLLQEKAQNSHLEDMIDRKCNDMSLHQQDVIKIMKLAMWCLQSDCNRRPSMSLVMKVLEGESDVEANLNYNFFDCRQRSS

SEQ ID NO: 131408 - protein, 133 aa, Oryza sativa
  Clone ID: PAT_MRT4530_33476C.1.pep
WWSKYLRSASIRAFACARKAAAMASSSTSAAASKTLRGLLPGGVRPPPPLTSLRAGPRPSASRRASLQRRLFAPTTPASSVSPPRRQAAPRAVPRPTPASPPRRRLLHCNPAAAPLPTGYLHARSVATIRPMV

SEQ ID NO: 131409 - protein, 1314 aa, Oryza sativa
  unsure (1)..(1314): unsure at all Xaa locations
  Clone ID: PAT_MRT4530_33477C.1.pep
MGWYYSPPPAIRLQLDPRAAWFSKGPLERFVRFVSTPEVLEMANPFDAEMSQLEGARKIYAQGVAGGADGAESAAAADITKKELLRAIDVRLSALKQDLVTACARASSAGFNPDSVSELVLFADHFGANRLSEACNKFMSLCQRRPDICPHYSVSSTSSQWKSFDDGNVRGSSSSDMSLDETQADQGASSNKSIIGGSVSHIHRSNSQNSVDVPPEPSAVQHPKPTIQQSVEKQEKETDALPAPAPAGGGSRRLSVQDRINMFESKQKEQTSSSGNSAACTSKVVPTKGEHRRVPSGASMDKLVRRWSNVSDMSIDLSNNDSSSLNEKREIGTPVGTPTSANLEVNSKARADGDANGLKHAVTSCQKDTSDALPLDSTTADAFSSSTLNTTSPSPLSAIASSSPQKQTAPRVEDDMVITSSIESESSFRKEVGASQGKGDVRMSGQAVSSVSTRARVKTSPRPTWPENNVTLSSPPLSQEHVQMTDEETIPIVHEVAVKKEQIVQKDNRGSRLRSKEIHAEADVVGRKDRPSRTTGKISDTRTRATSNPRANFRGSSVRDEAASTEAEVHDVNLQRKSLARKVEDSGRKVAAGSEILPQSDCSIHQGTNLSRQSSSAEQELSLHGGKVKLISDGNAVPLEQTKRPTKGSQDRHDELQKKANELEKLFAAQKLTSSRRGKSTDVQVENTPRVNEVKPPLVLPERIYTKQIVKESITNEFDANELLKMVDTEGYNNNVPQSIISLEESRGKFYDQYMQKRDAKLKEDWKLQGEQKEATIKAMRDSLERSNAEMRAKFSRSSSVPDSTYISRCAHKFPPLQSVIKDKDQGIDSFLVEEEMNSDYLSGDGSSRSADSRKHFSNKVACNQKKSIAPVHRHSSRTVSSGYANRRNLPDNPLAQSVPNFADLRKENTKPSAGLSRAAPRTQPKSFIRSKSIIEESKNISKDQSRKSQSMRKNLSPGELRDATSMNDVIYNWAPSKISNDQVEGVFAYITHTAGSTKSFLRKGNEAHPAVGIAGFAPPMFANTYQNGDDDDFLDQEEDSPDETKDEEYESIEENLRESDFPADSDSENPGISHEFGNSDDPGSENGDVSFPSDAPTLGGSKFNAFAGNMHDTPGEVPASWSTRPHLFAYANDNSDGDAFADSPNGSPSPWNSHTLDQITDADVSRMRKKWGSAQMPFVGPNASQQPRKDVTKGFKKLLKFGRKTRGADGLNDWVSASTASECDDDMEDGRDLAMGSSDDFRKSRMGYPSAYDGFVDTDVFAEQDQSLRSSIPNPPANFRLREDQLTGSSLKELDLXFSLSTFRSKGGDARLR

SEQ ID NO: 131410 - protein, 133 aa, Oryza sativa
  unsure (1)..(133): unsure at all Xaa locations
  Clone ID: PAT_MRT4530_33478C.1.pep
HTKFEPMDLISYFTATQKTSYFNQVRLTGSKFWKREKRGQQXXKNTTXPEPXXTXIXXQREKPPGPSXXXGXXPXXGXXXPPGFPPPXXIXRFPXXXXPKKXXKKKXPLPGEKXFFAPXKKNRXQPXXKKPXG

SEQ ID NO: 131411 - protein, 98 aa, Oryza sativa
  Clone ID: PAT_MRT4530_33479C.1.pep
MGWSRSARQATELWWHGDRRGSRTELWWCRGDRRGGRRQLRATVIWGGTDEGGGIARGTGVPAARIGGAAGLGEGSAAGVGVRRPAERISGGAAAIRV

SEQ ID NO: 131412 - protein, 90 aa, Oryza sativa
  Clone ID: PAT_MRT4530_3347C.1.pep
MGAVVRPAASAASWWAHPLPPPPSAPIPIHPASEQGRCCSSCCFRRILVSTSSAAAAACADPHPSRERAGTPSFALLLLPPHPGEHILFP

SEQ ID NO: 131413 - protein, 185 aa, Oryza sativa
  unsure (1)..(185): unsure at all Xaa locations
  Clone ID: PAT_MRT4530_33480C.1.pep
RKXLXXPLEXGPRPFVVFFLFYFLSFSFLFLFLFLLFFYFFFFFFFFKKKTGKRKNIPWAKKNFFLAGTRDRALGVHSAKNKKPNREKKKKGPPTSNFWAQKKRGRVKLKKGKKGGPTQPPNRTGIKGGGKRDLVRGGKKKLFRPLGPKHPFPGGGGGFPPWGEKKGGPFFATAEGGCGKKPRCF

SEQ ID NO: 131414 - protein, 33 aa, Oryza sativa
  Clone ID: PAT_MRT4530_33481C.1.pep
VVVLSKMSSQCHRQEHSGQNDLGHYSTDRNPPF

SEQ ID NO: 131415 - protein, 288 aa, Oryza sativa
  Clone ID: PAT_MRT4530_33482C.1.pep
MSSNGKPNPPPAASAAAAAGNGAGGPPKMYQRPIYRPQAPAAKRRRGGRSSCRFSCCCCFFYAVLVVLLLAFVAAVAGGAFYLLYRPHRPAFTLSVARVDKLSLSSSATAPTLTDSIDVTLTAKNPNKKLVYLYDDFAVTAATAANAVPLGEGSVPGFVHDAGNITVIKATVSASALGVDPTTAATDIKKSGEFTITLDLETKAGVKVGGLKTKKIGVLVHCEGIKVAAPAPPPPPAKKKKGGVKLSVADAPSPAASVDDTTPSPPPATTVARVCQVRIRVKIWKWTF

SEQ ID NO: 131416 - protein, 133 aa, Oryza sativa
  Clone ID: PAT_MRT4530_33483C.1.pep
MARLRDRHSYTFRSTAYRFHPRRADDDDFSTFHPTAGENDTTFSHICAVMKGMDRMHSDLDKASKALNDGKLMVYTRNGGRTAGEGSSGEERADGGHPNSASGNGSPPLPENPMLAQVMAHQTQMMAAMMQQM

SEQ ID NO: 131417 - protein, 410 aa, Oryza sativa
  unsure (1)..(410): unsure at all Xaa locations
  Clone ID: PAT_MRT4530_33484C.1.pep
MAPRLLLALALVLLASGASAASVGDTCSSEGDCGAGLHCSDCGGGGGGXTCTRAKPIDPLTHGTDLPFNNYSWLTTHNSYALAGSSSATGSALITQTNQEDTITAQLKNGVRGLMLDTYDFNNDVWLCHSFQGKCFNFTAFQPAINVLKEIRTFLDGNPSEVITIFLEDYTASGSLPKVFNASGLMKYWFPVAKMPKSGGDWPLLKDMISQNERLLVFTSKKSKEASEGIAYEWSYVVENQYGNEGMVEGKCPNRAESPAMDSKSQSLVLMNFFTTDPSQTGVCANNSAPLVSMLKTCHDLSGNRWPNYIAVDFYMRSDGGGAPLAADIANGHLVCGCHNIAYCKANSTFGTCVIPPPSPPPSPRKAPSGGKGTSAGGSSSSSGAMARVVLPKLSFFFGVALLILVILSY

SEQ ID NO: 131418 - protein, 252 aa, Oryza sativa
  Clone ID: PAT_MRT4530_33485C.1.pep
HGEDVKREVAIMRRMSSASSSRGGGAASSAAVVRLREACEDAADGSVHLVMELCEGGELFDRIVARGHYSERAAANIFRTIVDVVQLCHSNGVIHRDLKPENFLFANKSEDSPLKVIDFGLSVFFKPGDRFTEVVGSAYYMAPEVLRRSYGPEVDVWSAGVILYILLCGVPPFWGDNDEKIAQAILRGAIDFNREPLPRVSANAKDLVRRMLDPNPSTRLTAKQVLEHPWLKNADTAPNVSLGDAVRARLQQ

SEQ ID NO: 131419 - protein, 577 aa, Oryza sativa
  Clone ID: PAT_MRT4530_33486C.1.pep
MGGCYSAYASSRKLRGRISKISLVIPDPVPDAEAASPRKDGVDGDGDDVRGGGGGCDDGGDVVAIATTTADEFARRYVLGKELGRGEFGVTRRCSDAATGEALACKTIRKHRRLAPPRVTAAKAAAAHGEDVKREVAIMRRMSSASSSRGGGAASSAAVVRLREACEDAADGSVHLVMELCEGGELFDRIVARGHYSERAAANIFRTIVDVVQLCHSNGVIHRDLKPENFLFANKSEDSPLKVIDFGLSVFFKPGTSIFSKISTSHRDRFTEVVGSAYYMAPEVLRRSYGPEVDVWSAGVILYILLCGVPPFWGDNDEKIAQAILRGAIDFNREPLPRVSANAKDLVRRMLDPNPSTRLTAKQVLEHPWLKNADTAPNVSLGDAVRARLQQFSAMNKFKKKALGVVARNLPGEEVDKYVQMFHHMDKDKNGHLSLDELLEGLHINGQPVPEPEIRMLLEAADTDGNGTLDCDEFVTVSVHLKKMSNDEYLAAAFNYFDKDGSGFIELDELREEVGPNEQAILEILRDVDTDKDGRISYQEFELMMKSGADWRNASRHFSRANFSTLSRRLCKDTLTP

SEQ ID NO: 131420 - protein, 134 aa, Oryza sativa
  unsure (1)..(134): unsure at all Xaa locations
  Clone ID: PAT_MRT4530_33487C.1.pep
EEEANPSRRRNPTLVRPYXXGMAAMALRSLVRKVMPVPAAXXRMAKQVQDVTVHKDKLRGTTSPKTTAPPGNGRGSYFKDNHPTFAELVQRDTDRRSFNRMLVAGAASGYAVALVIMLSLRRSVKEDLRNNIYD

SEQ ID NO: 131421 - protein, 1202 aa, Oryza sativa
  Clone ID: PAT_MRT4530_33488C.1.pep
MARCGHRVRITASGGSGRSVVAKVVDECDSVHGCDGEHNYEPPCDNNIVDASPAVWDALGLDKSVGMEHITWSDDGDESKVRSKKIDMESEKKKAKKKREEEEPKSKIKSEEKIKTSRSKQGMKFTEPVRIGPLEKKELNSISEHKQKVSFETQGNKQNHMKQNAGIRIMPYAEPNENSKSITQGSKEGNNKTIQSGTNIHQLQDGERSLKESERNKIDTKHTEETSSSITQITGIGTTQSPQSPALLHDELTMLKSHTTPVAQLSYTSLMHQVINSPRINIEPNMGGRGLESFTSMLQTPSAYNNSMILTTSRVCEQDMLLEDRNNDLLIPSKHYSYQEFDEIYNSARITPEIPVDKTMEELYKLQNTHLKSQATYQKFIVRDICREFLQAGPLRTEIKRTLKPYNENFHEQDIEEQQTRPEATEISGIQQQQTEAEMNDNLNSATNNGEELSEEDIDNFLQNEEESSLPIDDKHIPKLGMKFKSHTEARGFFNFYAYLAGFSVVIAHHYKTTSKKRQGEITKYTYKCNLQGKNEPANKKKSNEQVTEQQRETVVLVKTNCKCTMVAKEVGQFWQISRLDLNHNHALCPRREAKFLRSHKDMTEEEKRLIRTLKECNIPTRSMIVILSFLRGGLAALPYTKKDKKEQDDPGMYYKFKLDEENKVTSMFWTDGRSTQLYEEYGDCISFDTTYRTNRYNMPFAPFVGVTGHGSTCLFGCAFLGDETAETFKWVFETFITAMGGKHPKTIITDQDNAMRSAIAQVFQNTKHRNCLFHIKKNCREKIGSMFSAKANRNLYEEYDDILNNCLTEEEFEVLWPQMIEKFSLQNIKYLQLMWKNRAQFVPVYFKYDFCPFIQSTALSEGTNSRFKRGVGPQHSVMSFMKEYENINDTIFDTEYSKDFQSRTKMPKTLWFNYLIEEQASELYNLDIFRKFQNELKDTLRLQVSVIQQGKVYEVFVSPNSIQQEYRQRKHIVIIDLPNENFGCICGKFSKDGMLCSHILKVMLELNVRKIPEKYIIDRWRKKEKKEKVKGSIHTDATDNSVLMFNVLSRKGADIASKASKRKRTYQFMMEELEKLEMNVQLMIEQEAETHLSQDESNTVQNDTVQHAEEEIIEEVEIEDPDLANTKGRKPKRYRRIVEKMIETSKRKSKDEQHTTETRTSEITNIGNKQEEMKTSKTTKRRKKNNTQEETPKEKLHAKTS

SEQ ID NO: 131422 - protein, 101 aa, Oryza sativa
  Clone ID: PAT_MRT4530_33489C.1.pep
FYSEQREIVTSNSYYYYYCKRRHFVRRSSSVRTPTVRNEQTKDKMISRLPVNTSIVLKYCSKRTHFLPLLREWSSPSPDEQALFTSPKSIQETSIKAKANF

SEQ ID NO: 131423 - protein, 73 aa, Oryza sativa
  Clone ID: PAT_MRT4530_3348C.1.pep
MARETRERGAAAPAGGMGRARQGVTLGEQLAEREEAVTGREARHLESARAERAAMAARASKLEGREKDLAAGG

SEQ ID NO: 131424 - protein, 511 aa, Oryza sativa
  Clone ID: PAT_MRT4530_33490C.1.pep
TQLYEEYGDCISFDTTYRTNRYNMPFAPFVGVTGHGSTCLFGCAFLGDETAETFKWVFETFITAMGGKHPKTIITDQDNAMRSAIAQVFQNTKHRNCLFHIKKNCREKIGSMFSAKANRNLYEEYDDILNNCLTEEEFEVLWPQMIEKFSLQNIKYLQLMWKNRAQFVPVYFKYDFCPFIQSTALSEGTNSRFKRGVGPQHSVMSFMKEYENINDTIFDTEYSKDFQSRTKMPKTLWFNYLIEEQASELYNLDIFRKFQNELKDTLRLQVSEIQQGKVYEVFVSPNSIQQEYRQRKHIVIIDLPNENFGCICGKFSKDGMLCSHILKVMLELNVRKIPEKYIIDRWRKKEKKEKVKGSIHTDATDNSVLMFNVLSRKGADIASKASKRKRTYQFMMEELEKLEMNVQLMIEQEAETHLSQDESNTVQNDTVQHAEEEIIEEVEIEDPDLANTKGRKPKRYRRIVEKMIETSKRKSKDEQHTTETSKCSKIKNPHITINCRNNKFFLQEQVR

SEQ ID NO: 131425 - protein, 293 aa, Oryza sativa
  Clone ID: PAT_MRT4530_33491C.1.pep
MARCGHRVRITASGGSGRSKVRSKKIDMESEKKKAKKKREEEEPKSKIKSEEKIKTSRSKQGMKFTEPVRIGPLEKKELNSISEHKQKVSFETQGNKQNHMKQNAGIRIMPYAEPNENSKSITQGSKEGNNKTIQSGTNIHQLQDGERSLKESERNKIDTKHTEETSSSITQITGIGTTQSPQSPALLHDELTMLKSHTTPVAQLSYTSLMHQVINSPRINIEPNMGGRGLESFTSMLQTPSAYNNSMILTTSRVCEQDMLLEDRNNDLLIPSKHYSYQEFDEIYNSARITPE

SEQ ID NO: 131426 - protein, 491 aa, Oryza sativa
  Clone ID: PAT_MRT4530_33492C.1.pep
MAAVREVGSKAELEAAAGGARAAAVHFWAAWCEASKQMDEVFAHLAVDFPHAVFLRVEAEEQPEISEAYGVTAVPYFVFLKEGKTVDTLEGANPASLANKVAKLAGPASVAESAVPASLGVAAGPAVLEKVQEMAQQNGASSTSSAEDALNKRLEQLVNSHPVFLFMKGTPEQPRCGFSRKVVDVLKQEGVEFGSFDILTDNDVREGMKKFSNWPTFPQLYCKGELLGGCDIVIAMHESGELKDVFKEHNIPLQPQGSKNEEAVKAKPDTEKSGAVSEPALLTAAQKERLESLVNFSTVMAFIKGTPEEPKCGFSGKLVHILKQEKIPFSSFDILTDDEVRQGLKLLSNWPSYPQLYINGELVGGSDIVMEMHKSGELKKVLSEKGIVAKESLEDRLKALISSAPVMLFMKGTPDAPRCGFSSKVVNALKQAGVSFGAFDILSDEEVRQGLKTYSNWPTFPQLYYKSELIGGCDIVLELEKSGELKSTLSE

SEQ ID NO: 131427 - protein, 77 aa, Oryza sativa
  Clone ID: PAT_MRT4530_33493C.1.pep
RRFDQGKIYCYMKIPAIPQRFDQPNNTTRFFHLHSIPQCNNVSFKNTTYFNRRYPISYKLICLRYLCLKRRVLRYPV

SEQ ID NO: 131428 - protein, 51 aa, Oryza sativa
  Clone ID: PAT_MRT4530_33494C.1.pep
MMAFSALALGETIGFKKESTRDHLGTWCNSCAVSLINHHCWDSSYQLSTIR

SEQ ID NO: 131429 - protein, 81 aa, Oryza sativa
  Clone ID: PAT_MRT4530_33495C.1.pep
LCCLCHARRGSWQSPAGTGRASGSFQRLASQSLSITWWSLPPDGLHQIAREGFLAGVDVFQGPQCVGASSPYPMVNKAEAN

SEQ ID NO: 131430 - protein, 94 aa, Oryza sativa
  Clone ID: PAT_MRT4530_33496C.1.pep
MVAVVRGKAIVAPPSLPPPPSPPFRCHPQLRMGKAARPAPPATLPSQPRRPPYSVSSCTTSSRRSSLLPATASTSPLLPPIVADFAKLIHGARD

SEQ ID NO: 131431 - protein, 977 aa, Oryza sativa
  Clone ID: PAT_MRT4530_33497C.1.pep
MGIMWLLQRNATRYGAAATAVIQALMAADEASAAGVAAAADGPAACSLPVDDMPLAAEYARSSNALGSKLFRWCSRENHTSVRKLLEVDGTSERSKLLNKVSVLMGYSNTQELIEQERARRGSATELISVCKEIEFPEMCAKFPCIKIGDSSPIELYAAAASMSQKETVLSENLTNFMRESGGNFGAAYEFSDKCHPLDPTLTNVDHLSISEESSLTAQFVSLEPAVDTDACPESLAVADATVSDSSILDRSIRCFPGTTSRQYRQLEDGGFHTVRKLLQHFPRTYADLQNPQGSIEEGQYIMLFGTVVSSRYMKYYWRGARLKHTLGYLEVVVSCSIIESELSSSVKSCNSQAEQKKTIHLHLKKFFSGTRFSSPSFLKCISSKYKEGDLAYVSGKIKKALTKDHYDLREYTIDMLEEEEQQCTLLDRKPYPIYPSKAGLKPSLLSLSISSSLTKCYSYKWNLEMDGLSDFFFLLLDICVAYMGIHKPKNRDEADFARRRLIFDDFFYLQLGRLFQMLEAVGTRVEKEELLLKCKNHELNAVGADEWSPLARKLLKVLPYLLTPSQLNAVKEIIWDLRRPVPMNRLLQGDVGCGKTVVAFLACMEVISSGFQGLKTGEIAMVIGTHSLIGDKTEFSALRISVIDEQQRFGVVQRGRFNSKHITAENDPSLQFAILAVITIASISLQKMMLYTPSTKSSDDDTISDENSASEIFMAPHVLAMSATPIPRTLALALYGDMSLTQITDLPPGRQPIETLALEGNDAGFESVFQMMSDELVDGGKVYLVYPIIEESEQLPQLHAAKAEFDSIKQKFEGYPCGLLHGRMRSDEKDGALSSFRSGETRILLSTQVIEIGVDVPDASMMVVMNAERFGMSQLHQLRGRVGRGERKSRCVFLCSTPSALPRLKVLEKSSDGFYLANADLLLRGPGDLLGKKQSGHLPEFPIARLEIDGSILQEAHLAALVNNPFSDAGKIASYY

SEQ ID NO: 131432 - protein, 94 aa, Oryza sativa
  Clone ID: PAT_MRT4530_33498C.1.pep
MKPDSTVDMVALSGTHSIGRSQCSSFADRVPPPSGTTTSGSDMDADLVASLRRQCTTPSDTVAQDAVTPDALDNQYYKQGRIQHGGGGVSSPHY

SEQ ID NO: 131433 - protein, 45 aa, Oryza sativa
  Clone ID: PAT_MRT4530_33499C.1.pep
MSCDSIFVAALHRPFFMPESGHQGSPATTVLAHRLGSGRSSSNSK

SEQ ID NO: 131434 - protein, 349 aa, Oryza sativa
  Clone ID: PAT_MRT4530_3349C.1.pep
MEAYKLWVRKNRDLVRSLESLANDITHLKYFYQGLTWILPERFANSEIAPEAVYAFLGIVSSVNQHIIETPTDGQTLASKEQSIPWSLVVSVLKDIEAVVEVAAQHFVGDDRKWSFLAVTEAVKAGVRLAAFGESGYKMLLQGGEVANEEEINILDENFGAKSNGVPVIYPMNGHFQNGHGVASNGLDGKAGFVSKSLEGRAVAALNKFGQNAKMTSDPMWMKKALPPPDPPAMVVEKPTLASIWSAKGISGRLFLLGEVVHIFRPLLYVLLIKKFGIKSWTPWGRVEKAKDDVALYVMRDPFFTRYTKRHLQKAEKVLDPVPLIGFLTGKLVELVEGAQTRYTYTSGS

SEQ ID NO: 131435 - protein, 69 aa, Oryza sativa
  Clone ID: PAT_MRT4530_334C.1.pep
KGRSVRAFFLWATSSFSIKVSTERFSMTVYIFSKGVSTMIKISSNSRQEMSVLDAMRLRVSGSEILQSF

SEQ ID NO: 131436 - protein, 899 aa, Oryza sativa
  unsure (1)..(899): unsure at all Xaa locations
  Clone ID: PAT_MRT4530_33500C.1.pep
MSSSASPSVAPSAEYAEHLSNLDTIPSLSHEHHYFLGPIGNLDPTEFIIAETNRIPFRLANPNLGHWKNTFMSWPSLEKTTTEKSWSVWHKRVSGSKQGNWDEIGIGQALGLTIANSAKDEPLMAAATYFWSNTINAFLFNQGPMNPILLGITMIIGLDMTSSANLMSLNTKNQFDFRTKSICGWSDYVAAYMGKGPATSREHVAFLLMWLEKFLFCGSSCGPTTNWQFLAEALESKRQFPLGKILLGYLFQMLNNASAKIVVCSAVSVGGPWWLLQTWLNLVAMKAVNRPAMTEAEFPRLKPITNDDGEERTHRRCMSYGEYASTPADAGAKLSAELLKDWFCSFYEGFQRDARVWFPYEDXVNLDIPADFRFEDINSEKFDKSRXVFSAAISPCILPVGIHQGRNIQVXAHARQFGMGXTPIGLFFADKIQXSEEISSTLMMDRLLNIPAPPLGSIENIELARLRSRNFDRWWGEWKQHIFHQSASMYMTDLFPDVVPQTTESSPPRKSNSGRDIEYAPCLLPNGGGLAPPVIGYHAPKTSSLLQGQMREPADVGRKRKAKASAIDQSALAPKKKTKKNKPKPADDLPALDPSIEQALDEEEIEEDVDQAAAKKKKTAVRKKSAATILKPAPPPPAPPSPPVXQMSSDCTPSATGSHHHEEEEQPAAPAILALADLFSFDIKDYFDETKEETTSKALDPLDETIKKTLEDISLPLESSLDNLVADCGSIRARFAEIQALIPDDLANTITPAVYLEQHQFKLEKAKQRIADRRERKDIEATIQANRQLVHEEKAKLDQLSAGPIQSNIDRLEARKIDLIAQLEECNAELDLEKQKLANLPNAVEEHKSILKSAIKNVADMTKSLKIIPGTDAQDIQAIEEVVQIRQRVVSAIQCYLSG

SEQ ID NO: 131437 - protein, 681 aa, Oryza sativa
  unsure (1)..(681): unsure at all Xaa locations
  Clone ID: PAT_MRT4530_33501C.1.pep
MSSSASPSVAPSEKYAEHLSNLDTIPSLSHEHHYFLGPIGNLDPTEFIIAETNRIPFRLANPNLGHWKNTFMSWPSLEKTTTEKSWSVWHKLVSGSKQGNWDEIGIGQALGLTIANSAKDEPLMAAATYFWSNTINAFLFNQGPMNPILLGITMIIGLDMTSSANLMSLNTKNQFDFRTKSICGWSDYVAAYMGKGTATSREQVAFLLMWLEKFLFCGSSCGPTTNWQFLAEALESKRQFPLGKILLGYLYQMLNNASAKIVVCSAVSVGGPWWLLQTWLNLVAMKAVNRPAMTEAEFPRLKPITNDDGEERTHRRCMSYGEYASTPADAGAKLSAELLKDWFCSFYEGFQRDARVWFPYEDXVNLGIPADFRFEDINSEKFDKSRXVFSAAISPCILPVGIHQGRNIQVXAHARQFGMGXTPIGLFFADKIQXSEEISSTLMMDRLLNIPGPPLGSIENIELARLRSRNFDKWWGEWKQHIFHQSASMYMTDLFPDVVPQTTESSPPRKSNSGRDIEYAPCLLPNGGGLAPPVIGYHAPKTSSLLQRQMREPADVGRKRKAKALAIDQSALAPKKKTKKNKPKPADDLPALDPSIEQALDEEEIEEDVDQAAAKVSDTEKTPSASPKQTPPTPATLAHFSRKKKTAVRKKSAATILKPAPPPSPPPTGVSACTAGLLCCR

SEQ ID NO: 131438 - protein, 71 aa, Oryza sativa
  Clone ID: PAT_MRT4530_33502C.1.pep
AKAPRISWMADCRRSTQGFLLGYPAQDYGKMVSPVKGGPEPFVTFTEAGLTRLCLKRSPGLTTCGTFPALS

SEQ ID NO: 131439 - protein, 358 aa, Oryza sativa
  unsure (1)..(358): unsure at all Xaa locations
  Clone ID: PAT_MRT4530_33503C.1.pep
MVPFAGWSMPXIQYKDTIMDSTLNCRANGSLFDVSHMCGLSLHGRQAIPFLESLVVADVAALKDGTGTLTVFTNDRGGAIDDSVVTKVTDQHIYLVVNAGCRDKDLAHIGEHMEAFNKKGGDVKWHVHDERSLLALQGPLAAPTLQLLTKEDLSKMYFSDFKMIDINGYACFLTRTGYTGEDGFEISVPSENAVDLAKALLEKSEGKVRLTGLGARDSLRLEAGLCLYGNDMEQHITPVEAGLSWAIGKRRKAEGGFLGADVILKQLQEGPKIRRVGLLSQGPPPRSHSEIVSNSGENIGEVTSGGFSPCLKKNIAMGYVKSGLHKAGTEFKVVVRGKSYDAVVTKMPFVPTKYYKPS

SEQ ID NO: 131440 - protein, 80 aa, Oryza sativa
  Clone ID: PAT_MRT4530_33504C.1.pep
FFFFFVVQLQKKKQAYKPCQFIYCQSKTIYNSCGTTSYQRYAVDQPIQGSEMISVLTKLSRNVNRTKLIYTSNNDDFLIL

SEQ ID NO: 131441 - protein, 129 aa, Oryza sativa
  unsure (1)..(129): unsure at all Xaa locations
  Clone ID: PAT_MRT4530_33505C.1.pep
MATTDATIAHIMDXQEDIEIKSSQCWNPIRPPTTLLTSNSRRICIRPPFSAREYLMESSRSPLSNGSSFFSEFHLVWPESQEQGAASPIMGLWACNFIWDPGPGGAXCGVRPKLVEHDPRTLLVVLPPP

SEQ ID NO: 131442 - protein, 149 aa, Oryza sativa
  unsure (1)..(149): unsure at all Xaa locations
  Clone ID: PAT_MRT4530_33506C.1.pep
AAAAAASPDPASEGAAAVGSLATTDVTITHIMDEQEDIEIKSSQCWNPIRPPTTLLTSNGRRICIRPPFSAREYLMESSRSPLSNGSSFFSEFHLVWPESQEQGAASPIMGLWACNFIWDPGPGGAXCGVRPKLVEHDPRTLLVVLPPP

SEQ ID NO: 131443 - protein, 129 aa, Oryza sativa; identical to SEQ ID NO: 131441
  unsure (1)..(129): unsure at all Xaa locations
  Clone ID: PAT_MRT4530_33507C.1.pep

SEQ ID NO: 131444 - protein, 269 aa, Oryza sativa
  Clone ID: PAT_MRT4530_33508C.1.pep
MKYLVNLTLNKAALKCSDAIKNTNFVVVIALVITGFVLAIQSLGFLMWRKARRCKKVRVLDETGDFITGCPTYPFEIIRAATNGFSQENEIGRGGFGIVYKGQLPNGQEIAVKKLSKENTVQRLKEFMNEVDIIYESGRAMLSWKMRMDIILDIASGLQYLHKDSRHTIIHRDLKVVAKISDFGIARLFSHNGGNQDCTITDRVVGTPGYMSPEYAMDGKLSFMQDVYSFGVLLLEIISGKHNQGTSSLIAHTWRLWEDGRNLELLDPA

SEQ ID NO: 131445 - protein, 72 aa, Oryza sativa
  Clone ID: PAT_MRT4530_33509C.1.pep
CKEHRLLAREAVRKSLVLLKNGKNQKEPFLPLAKNVKRILVAGTHSDNIGYQCGGWTIAWNGDSGRITIGKH

SEQ ID NO: 131446 - protein, 298 aa, Oryza sativa
  Clone ID: PAT_MRT4530_33510C.1.pep
MVKPAAVLLLLYLPLLATPTRIGLSRNPFVPPPNSVPTIDRTEMDVSTSPYRDLIKKWRDLVLLNTRPEVMVPEDHPVLAPQYDDTVPPERLLLPKLVANGDKTATLALRDSNIYFIGFANKAGQWFSFKDRNDLPPSFRARPLSFGVDYASIAGFRKNLPNYPLGRRQTEWAVKVLSEYDPNRTDEATIKRAVVIILLTFCEALRFFPIRNAVEIGWDSVAYITSTDADRLVCWGQISYMLEYSFMSGHSWDSEEQRTRLKNLARDCKIFNEPQALETVDVLEYGAILGAKSTNWLY

SEQ ID NO: 131447 - protein, 403 aa, Oryza sativa
  Clone ID: PAT_MRT4530_33511C.1.pep
MGQDEVEVGAEKKDQELPEVEVVEEEEEEGSKKAAAGCDYCGDAAAVVYCRADAARLCLPCDRHVHGANGVCSRHARAPLCAACAAAGAVFRRGAGGFLCSNCDFSRHRHGGERDPAAPLHDRSTVHPYTGCPSALDLAALLGISYSDKAAAATAAAGGDDGGWWAIWEEPQVLSLEDLIVPTTSCHGFEPLLTPSSPKIQNSPDGKVNEEVIRQLTELANSDGGGAQIWAHREAAQAGDHQLPSWGTTTQHNTGHGNFGTANSNEVATMPTPGYENGGWDNSDYPALNDPCKVEFTYEQPPASSAEACISSFVQMSELCPSMSNGSSMEETHQTNPGNGTPMQVLPKMPEFVPCPDRNLVISRYKEKRKTRRFDRQVRYESRKARADSRLRIKGRFAKVNQI

SEQ ID NO: 131448 - protein, 85 aa, Oryza sativa
  Clone ID: PAT_MRT4530_33512C.1.pep
GLDVRVEKHEHKNTCSLARRQCTQLRTRKRKRLAPLHSAHCWRTGKIRDTCLMKALTCASQPYKFSTAWHSIGSILFHHYLVEMK

SEQ ID NO: 131449 - protein, 152 aa, Oryza sativa
  unsure (1)..(152): unsure at all Xaa locations
  Clone ID: PAT_MRT4530_33513C.1.pep
KVFQANATLRKMIETSNSCYXQHPTKERIKHSNTKKCNKERTMICNKPILCLVPLLCWLDSSSSLSLVVLSSTNKEKHIELRCQHRIERPRVLESLDLTPLGLASTRSGFLKPDCRLIGCSEHRHCQSWCRCYLATACLLPCSPREERKCIG

SEQ ID NO: 131450 - protein, 72 aa, Oryza sativa
  unsure (1)..(72): unsure at all Xaa locations
  Clone ID: PAT_MRT4530_33514C.1.pep
RRRPAAGSASXSVVGGKVVXXRXREKXXSREMSSXGRHRDPDWDRLXAXXAAALGSIGIGSXRRSSSLXXXD

SEQ ID NO: 131451 - protein, 141 aa, Oryza sativa
  Clone ID: PAT_MRT4530_33515C.1.pep
MSRGRGALPATALPLPPLARSGRKGPGVAAARCREHAGEGRGGEGEGPKRQSHQQQPCATIGRSLTIEPYAWDLIKLNTKRNTTNAGRGRSSPPLATLCNYETVGDLINKLSAKGKQKLAKVRTHIDLQPDWASAFVHKFS

SEQ ID NO: 131452 - protein, 443 aa, Oryza sativa
  unsure (1)..(443): unsure at all Xaa locations
  Clone ID: PAT_MRT4530_33516C.1.pep
MKRRMVVVALVLLAVVELVHGDGWRWAPGSRPHSVTITEFGAVGDGKTLNTLPFQNAVFYARSFADKGGAQLYVPKGRWLTGSFNLTSHLTLFLEEEAVIIGTKLLWMDRRKNLVKISRSVGFKLGLAFSCFVPKFMQTWSIWKDPSQWPIVEPLPSYGQGLDLPGPRHRSLINGYNLSDVVITGNNGVIDGQGSVCNVKVHNVTIKTSLDAPLTDGIVPDSCSNVCIEDSSISVGHDAISLKSGWDNYGISFGRPTSDIHISRVDLQASSGAALAIGSEMSGGISDIHVDHIRIGSSSKGSSFGTTPGRGGYCAEVVVPNLVMDGVYLAXGFSGKLSFHPDDCFDPHFLSLIDHITQKNMEGTNISVAGVLSGIEGDPFSAICLSNLNFSIADLAPSSAWTCSNVHGYSELVFPKPCSELHDTSTNSSICFSLSSYSALAVL

SEQ ID NO: 131453 - protein, 91 aa, Oryza sativa
  Clone ID: PAT_MRT4530_33517C.1.pep
MAVERNDVRSEDRRPQAVASDQASFPMTHGTHTIAVPLGTGCLFWMNFASLDWMHRLVLPTYLLLLAWHADAGMLHLLAFRASLEHKATKD

SEQ ID NO: 131454 - protein, 1037 aa, Oryza sativa
  Clone ID: PAT_MRT4530_33518C.1.pep
MAAAETVRKLVVEVVEARNLLPKDGTGTSSPYARVDFDGQRRKTHTVPRELNPAWNEALEFNFAGVAGDVVVGGEPLEVAVLHDVRVGPSRRSNFLGRVRLDARQFVRKGEEALIYFPLEKKGFFNWVRGEIGLRVYYLDEPVAPPPPPPEPPAADPAPAEAAPDAPPADADAAPEAPEKAEEALPAASGGDDGATDKPPETDAAAAAATSAPEEEAPVMASEAVAASAEAAPEEEQILTPPPPPTPTPTPMLRQVPVPARPPPPPPEAPVERSKHDLVDKMPYLFVRVVRARGLPAGAHPHVRVAAGGRHASTREARRGAFFEWDQTFAFVRDPGATDSPGPTLEVSVWDLPPDADVSDADDRHFLGGLCFDTADVHARDPPDGPLATQWYRLEGGRRLAGADLMVATWAGTQADEAFADAWKADSPASSVAAAAASRAKVYVSPKLWLLRLTVIEAQDTLTAPPPRDAGIAVRGTLGFQSLKTRTAPVARNGGPSWNEDLLFVAAEPHADGDDCLVISLEVRHGKDAFPVGSASISLATIERRVDDRKVASKWIDLLPSDEAMKKVGKKAAMHMHGGRLHVRVCLDGGYHVADEQPYASSDFRPSARQLWRPPIGVVELGIVGCKGLLPMRTADGKGCTDAYAVAKYGPKWARTRTISDSFDPAWNEQYTWPVYDPCTVLTVGVFDDPPPPSPSQLPDGAKDAAAFSRPMGKVRIRLSTLESGRVYRGVYPLIMMLPTGAKRMGDVELAIRFAASASALDVLHMYGRPALPPMHHLRPIPAASRDALRLSAARISAAHLARSEPPLRREAATWMLDAAEPRGFSMRKLRANWTRAVAALSWVSDAARWAEDTRSWRNPTATALAHAVLVLLAWHPDLVVPTLTLHVAAVGVWKYRRRPRAPAPHPCVRASMAEAADREELDEEFDAIPSSRPPEVVRARYDRARMVGARLQAMVGDVATQAERLQALVSWRDPRATGVFVALCVFVAMALYVVPIKVVAVVAGFYYLRHPMFRDRMPAPAINFFRRLPSMSERIM

SEQ ID NO: 131455 - protein, 86 aa, Oryza sativa
  Clone ID: PAT_MRT4530_33519C.1.pep
MPKNLEPSHRTQSSTDNERTLTAARGCPAASGGPVRSGEAVDHRGEAERGGESEEERKEMMGIYIALSGRKRVRREGEAMRNERSS

SEQ ID NO: 131456 - protein, 803 aa, Oryza sativa
  Clone ID: PAT_MRT4530_3351C.1.pep
MYNGIGLQTARGSGTNGYVQTNKFFIKPRSSSAGGPPRAAPAPGFDDAGGGLGGMRKPNKEILEHDRKRQVELRLLLLRDALEEQGYTEGEIEERVEEARKEAEIEAAAAAAAEEEGRGAGRQPLPGKGRAGLVTHGRLWSFNFLQEVNSLSFSDTQSHHVAARKEKQLETLRAALGLDVDDKAKKNADVESDVESGELVPGKEYEGLEIDGPEDGKTLKDDRRHAKKGKKDKGSDAKSHGKSSRKIKLGHDSDSDHDDNKKKKKNSRYGSEDDSEAKYDEKKHSKHLKNSRHDTDDDSESDHKNAKCKKSSRHDSESDSESDHKNARRGKSSRHDSESDSDGDYGKKTTKHGKNDRDERKKRPATISRRHDSEDEKPRKGKRMDDSDTDSEGDGSFSESDSDYDRKKKKSTNSSRNESKDDKPRRKAPKDKYSDGPESGSDSDHGGKSKYSKISRRDSELQSRKDADKQDQYRDKLKSEFASDGYGEKKSVKIPYNDLKDDKPSSKVVRKDRYSDESETDSETYVKKKKNLPKSYHHSDKPAQRGKEKEENSGKNVDKRKRHDTDSDSDSHARERKRHLDARASLAAQKKRSVTSSSESSESSDYSSSSDSESDVSSDSREDRKSARQLKHDELERKKRSQDEKRKELEKQKQEEERKELDRQKQREEERKAKELEKQKQREEERKALEKQKQGERDGDRYERDHEGRKGENDVERDYKRKVGEDRYDPSRRQDEDRYDPNRRHDEDMYDPNRRHEEHGRRRNRDFDSRDPKRSRHDDSYHHSRRDYEQRYSRDEYRDRRHR

SEQ ID NO: 131457 - protein, 73 aa, Oryza sativa
  Clone ID: PAT_MRT4530_33520C.1.pep
NVIYYATILELIGNFNIITTPRRPIYISHCMFRISHFQTFKPKFRLSELPFVNEYSKVQTSRISTMVTYNLIA

SEQ ID NO: 131458 - protein, 41 aa, Oryza sativa
  Clone ID: PAT_MRT4530_33521C.1.pep
HGICASQSPFTNDTSIRKPPKNYKILTPTTCHERNSQARVI

SEQ ID NO: 131459 - protein, 296 aa, Oryza sativa
  Clone ID: PAT_MRT4530_33522C.1.pep
MRREDYYFSHESPIPKIPVRRPLLSSDSSAAFAPPPSPLLRLHRPPPRRPMEKPEWSMDDFEIGKYIGEGKFGKVYLAREKQSGYVVALKVTFKAKLDKYRFHAHLRREIEIQHGLDHPNVLRLFAWFHDAERVVLVLEYAARGELYKLLRTVRRFSERTAATYVASLAGALAYCHKKQVIHRDIKPENLLLDIEGRLKIADFGWAVRSNAKRHTLCGTIDYLAPEMIEKKAHDHAVDNWTLGILCYEFLYGSPPFEAAEQDDTLRRIVKVDLSFPSTPYVSADAKDLICKVTPCH

SEQ ID NO: 131460 - protein, 256 aa, Oryza sativa
  Clone ID: PAT_MRT4530_33523C.1.pep
MGDRLAETIRFKEMPFFRCSMCRQYFPAPCRPASSPTRTGAVAVVSPSPRRVAVASLCHRRRVPFCCHCRRPAAPLSRVNSRPAPPRHVASPSPRRLQPAACCRRRRWLRRAEPSPAPLVSPSPSLAPRRAPYQSRRRRRRISASCPVRRCRAIASPRVAIAALSHALPCAITSLSSPRAYGIFFSTPPPRHRTSSFLHPSKPSPCRSGHRSAAGELAVDKPSRSSSSPSTPSYPCPAMAAMAAMRRRSPLRRPTP

SEQ ID NO: 131461 - protein, 113 aa, Oryza sativa
  Clone ID: PAT_MRT4530_33524C.1.pep
PASSPTRTGAVAVVSPSPRRVAVASLCHRRRVPFCCHCRRPAACCRRRRWLRRAEPSPAPLVSPSPSLAPRRAPYQSRRRRRRISASCPVRRCRAIASPRVAIAALSHALPCA

SEQ ID NO: 131462 - protein, 218 aa, Oryza sativa
  Clone ID: PAT_MRT4530_33525C.1.pep
MAAAAVDPMALGLGTSGGGGGGESAVGGDGAEPVDLVEHPSGIVPTLQNIVSTVNLDCRLDLKKIALQARNAEYNPKRFAAVIMRIRDPKTTALIFASGKMVCTGAKSEDHSKLAARKYARIVQKLGFPAKFKDFKIQNIVGSCDVKFAKRFTLPLRTCSRCSLNTGKLSSAEGMICRQNGEFAPAVHTILRTCPGPDFETCTWRHSFFFPLFFVAVG

SEQ ID NO: 131463 - protein, 176 aa, Oryza sativa
  Clone ID: PAT_MRT4530_33526C.1.pep
MARLGYVMDYASVVAAAEGWSGDGGVQAKAAPPPALSSEGLRRTPANPGEATGGPAGLSEGVMSVATARHAAQGGVPLAARPRLMRALPAELLPPPSRLTTASSSPTPATPVSSSAASASPSGCPPLRRPQGDGYPMARPRRGPCSTSSLSAARGSSTPASSSSPLMMGQAVAAIV

SEQ ID NO: 131464 - protein, 119 aa, Oryza sativa
  unsure (1)..(119): unsure at all Xaa locations
  Clone ID: PAT_MRT4530_33527C.1.pep
RLDLKKIALQARNAEYNPKRFAAVIMRIRDPKTTALIFASGKMVCTGAKSEDHSKLAARKYARIVQKLGFPAKFKDFKIQNIVGSCDVKFPIRLEGLAYSHGAFSSYEPELXPGLIYRM

SEQ ID NO: 131465 - protein, 82 aa, Oryza sativa
  unsure (1)..(82): unsure at all Xaa locations
  Clone ID: PAT_MRT4530_33528C.1.pep
AEHFAATKYGFQQVVFSVLLLAVVSVLAATATMAXYHHQDQVVXTPGPFCHQDGYPMYPSRLPGVGEAPYVGVEAQRRAVSG

SEQ ID NO: 131466 - protein, 51 aa, Oryza sativa
  Clone ID: PAT_MRT4530_33529C.1.pep
MGDCATLGATWDVDMEPEQGFRTAIWQSATAGPMWRMTKECLRCKEHTPVW

SEQ ID NO: 131467 - protein, 66 aa, Oryza sativa
  Clone ID: PAT_MRT4530_3352C.1.pep
GRVGVNQHIIETPTDGQTLASKEQSIPWSLVVSVLKDIEAVVEVVAQHFVGDDRKWSFLAVTEAVK

SEQ ID NO: 131468 - protein, 71 aa, Oryza sativa
  Clone ID: PAT_MRT4530_33530C.1.pep
PPPPQPHRGPPPGALPQGAEKKGGPPAQKFPGAGAQAPAQAFRFPGPKKNGPGPPGLFRGLVSNLFGPPPR

SEQ ID NO: 131469 - protein, 44 aa, Oryza sativa
  Clone ID: PAT_MRT4530_33531C.1.pep
FFFFFFFFFFFFFFFFFFFFFFLGETWTIKRLQPNFEKGGAFTF

SEQ ID NO: 131470 - protein, 47 aa, Oryza sativa
  Clone ID: PAT_MRT4530_33532C.1.pep
ELVETARIVMTERKDSGPVRPCHIREAYRRLKLEGKIPRRTVPRLFR

SEQ ID NO: 131471 - protein, 80 aa, Oryza sativa
  Clone ID: PAT_MRT4530_33533C.1.pep
MIKYHKEKLKATKIVLRKFLLLLPVEAGQISVCSCMPASGLQHSLFYMYSVQLYTSCTVLTYIPVATATHACPASTRLAH

SEQ ID NO: 131472 - protein, 112 aa, Oryza sativa
  unsure (1)..(112): unsure at all Xaa locations
  Clone ID: PAT_MRT4530_33534C.1.pep
ISDCIXPVEFNNLFPDYLPYPWDLRKRERGPQCARRKRSTARARTPTRGPPTXPPRRNRRHRRALPPPPPPPPPPPAVEYGSRFEFAIRRIRPPRRRGRRCLLRDKSGRTRG

SEQ ID NO: 131473 - protein, 82 aa, Oryza sativa
  Clone ID: PAT_MRT4530_33535C.1.pep
PISRALSSTVAPSPVTGESPLPTTESPPPHKLAAGRHPSSFVTLFPTFRRRAFSLRKVRECTDYCKASHTDPKQPFEHVEPV

SEQ ID NO: 131474 - protein, 552 aa, Oryza sativa
  Clone ID: PAT_MRT4530_33536C.1.pep
MRRGGRRGTARWTSQGRRNASSRCSQIPQSQANDRVESSTRKRNASPSPSPPSLSCPAHLQTLHLLDLLYLIPYNRSWIKSQRVMEDLPSNLGQPSTSASSVDASYSANRIEDSQLFLSVPALNQAASYLAQTASYLTQCLPVSGYTAISDEGQELATLPPASTAGGSSFQASSEQSADSSPGEIDNTGSSSQEITEQMAPLRVFQNGASLFQGLVERARKTVRGSADDIGWLQQDQSLPPTEDGTARFLEILDAVRQVCCHFGCEFAFWQFSVLTLAFLLFAGLFSNHGPLYFVKTKSYFSKMGLACHIAKIHSESSVSKNAREIKEYIEEIYWGSKKRVLLLGHSKGGVDAAAALSLYWPQLKDKVAGLALAQSPYGGSPVASDILREGQLGDYVRLRKLMEILVSKVLKGDLQALEDLTYERRKEFLRQNPLPPEVPIVSFHTEASITPSVLTALSHVAHLELPAAADGNPTRIPVVMPLSAAMAACSQLLVARYGEKSDGLVTRKDAEVPGSVVVRPERKLDHAWMVYSSLNEEPRDQADTSQGMVQQ

SEQ ID NO: 131475 - protein, 441 aa, Oryza sativa
  Clone ID: PAT_MRT4530_33537C.1.pep
MDSRTTETEERAESKTLEFCSFHSCQETRSTRESKLSRRCSGNRFNALKISKTAQAKRISSVVVSDEKFWDNVELAINVFRSLVKLLRFVDGDKRPAIGFIHGGLMDARIELAQLLRNELELCIPVINAIDFYMDGKLDSELHLMAYYLNPYYFYSNRNGFISSEKISGSVHKFIQRFYPDDQNQDKITGAEMLAYSEASGTFGNPGAKRQREKNNDSFNPAHWWNVWGSKAPYLQGFATKILNLTCSSSGCERNWSAFEWTQTKKRNKLIVQRLNDIVFVQLNSRMKKKDGSAQKEDATMEACEDNDTCNVEGWLQDESEGSQNVARTQTWGYTAETPVLAQRDHLENKPGNQQNVRKGHMERCQIVLPLPGQQRQSLMKLGSMAGSAGTGVNVGRQRSPQVTAPSPQVHEPPSISPLCAAIQEPKYTRDLLHALEMEKK

SEQ ID NO: 131476 - protein, 32 aa, Oryza sativa
  Clone ID: PAT_MRT4530_33538C.1.pep
SLHQLESLDLSSNKLSGEIPQKLASLDFPTVY

SEQ ID NO: 131477 - protein, 72 aa, Oryza sativa
  Clone ID: PAT_MRT4530_33539C.1.pep
SGRGRGRRGARVSEARTLVWSTPTAGDLGTQSGLAVVSDPGNSGTGYLLWPVTRRFSLIARSQLNFTQVICV

SEQ ID NO: 131478 - protein, 148 aa, Oryza sativa
  unsure (1)..(148): unsure at all Xaa locations
  Clone ID: PAT_MRT4530_3353C.1.pep
EKPTLASIWSAKGISGRLFXYGEVVHIFRPLLYVLLIKKFGIKSWTPWLVSLAVEITSLGIHSRATDLHQRGGKVHQLSSAERDELKRRKMMWALYVMRDPFFTRYTKRHLQKAEKVLDPVPLIGFLTGKLVELVEGAQTRYTYTSGS

SEQ ID NO: 131479 - protein, 99 aa, Oryza sativa
  unsure (1)..(99): unsure at all Xaa locations
  Clone ID: PAT_MRT4530_33540C.1.pep
RSQLTPXTPCPLXRTDPARRCXLPVARHHHRTLAQPFPDPQKXDTQAGAKKIXIPVRDGKTSIYTCQVFSSSKQITPEIKMVGWGVATRDGGGGWAGGX

SEQ ID NO: 131480 - protein, 160 aa, Oryza sativa
  Clone ID: PAT_MRT4530_33541C.1.pep
QGGGSAQLDQDIKRLEKIVEILPQDQLCYEAQIIRDGAFLQRALSFYRLMILWSVDLVGGFKMPLPSQCPKEFACIPEHFLDDAMDLLVLTSRVPKALESFALDDFLNFIIMFMAGTSYIKNPYLRAQMVDVLNCWMPQRSGLSSTASLFEGHQLCLDYL

SEQ ID NO: 131481 - protein, 70 aa, Oryza sativa
  Clone ID: PAT_MRT4530_33542C.1.pep
MAPLQLLLPNRYDVALSLSGNAIPRRYLSHPHGRTDGVTHRVPREQQTKEERTYVRTETGVWSVVNWSRS

SEQ ID NO: 131482 - protein, 46 aa, Oryza sativa
  Clone ID: PAT_MRT4530_33543C.1.pep
CGEDAGAARCGRGRSGGGGRGGFDGWRKGTTPTGGAHLSASRRKRA

SEQ ID NO: 131483 - protein, 326 aa, Oryza sativa
  Clone ID: PAT_MRT4530_33544C.1.pep
MRVNRVPAAADGNRMVIEVQATLASATATVSGRGGGFSGGGARPEPVVAAGAWEERYGGGERKASGGRGSSRGGEASGGDCPVEGEADVAGKASDFAGDEERRRWARRFRRWLPTWGGRLEEGDDPDRWGPLVGVPEREGVREDFGEEKKAAYLGSGTLWVEEFSSHMTALTVDEVAQIALDICDACIVKACSNQEKRKITPTNKLASQWPPCHLFRLAVAVAALLVVGSCATELTFKVAKGSSAKSLELVTNVAISKVEVKEKGGKDWVALKESSSNTWTLKSESPLKGPFSVRFLVKNGGYRVVDDIIPESFTAGSEYKSGIQL

SEQ ID NO: 131484 - protein, 336 aa, Oryza sativa
  unsure (1)..(336): unsure at all Xaa locations
  Clone ID: PAT_MRT4530_33545C.1.pep
EELQLFLLPRAPCWAGPLLPSPPRSPPSRPLSPGRRQVGPTCRGRPLPPAVETTAPTSSAPPAPTPRXPRPPHIAALSPASPGPHAPPPPINCSPEPPLPLPALXPPPPVPPTEPAPLAASAAXPPPPAARRQLPRPPLAFRSPPPYRSPYTPLPTTASGRAPPPLKPPXAVKPLPSRSPVSPAPRSPLGCHPPPPEPDSLASPVXPFPPPPFLSLPASAEPRRRSGRAPSPSRRPPPPRRPPVVFGGRVPPPPPCHGRSXLEPCRATIHSPSRLVPLPGGPHRLVDHPSPXSHQPAPPPSPLVPLTSGARMSAPPPPFDDVSSGCTPLARVKLFE

SEQ ID NO: 131485 - protein, 52 aa, Oryza sativa
  Clone ID: PAT_MRT4530_33546C.1.pep
STPTPPLLGHGQQLEIIWVLNINVSKYCFFLSFPFFHYHATEFTLINAKSRL

SEQ ID NO: 131486 - protein, 103 aa, Oryza sativa
  unsure (1)..(103): unsure at all Xaa locations
  Clone ID: PAT_MRT4530_33547C.1.pep
WVLQDAVIGRGFGHRGLSPHRRPLPPPPPDRRPPPPRPPNDRRPRHVWGTRIRRLSPDRQSPPPPPPHRRLPDPTTAAPPTXRIRRPLPPTCRRRPPSPSSPA

SEQ ID NO: 131487 - protein, 110 aa, Oryza sativa
  Clone ID: PAT_MRT4530_33548C.1.pep
MTKHKKAYHIFIIGPFAQVNNLVPYRRTPGILTGQKRRWLPVRPACVERSERPARGDSMPRESICGDGPGVGLVRTEENPNKPHVILPIPLSSSDAVPNCSIEPSSPKEY

SEQ ID NO: 131488 - protein, 65 aa, Oryza sativa
  Clone ID: PAT_MRT4530_33549C.1.pep
YTGEENAISTKSLCGKAKLAATRAREEGNSVSIDCVMPRVIGVMLLLCCTTAPASGFPTQHSVTV

SEQ ID NO: 131489 - protein, 418 aa, Oryza sativa
  Clone ID: PAT_MRT4530_3354C.1.pep
MDSSNGERPPQGEDAPAAAAGSIGGYESLHRLLQSNLSPELFKEASRLLLGLNCGRALEAISLPEATSALAKAHNFDVQAFRFDADKEYLRQPRVIRVGLIQNSIAIPTTSHFADQKKAIMEKVKPMIDAAGDAGVNILCLQVSQLSEAWTMPFAFCTREKRWCEFAEPVDGESTQFLQQLAKKYNMVIVSPILERDVNHGEIVWNTAVVIGNHGNIIGIHRKNHIPRVGDFNESTYYMEGNTGHPVFETAYGKIGVNICYGRHHPLNWLAFGLNGAEIVFNPSATVGELSEPMWPIEARNAAIANSYFVGSINRVGTEVFPNPFTSGDGKPQHADFGHFYGSSHFSAPDASCTPSLSRYRDGLMISDMDLNLCRQIKDKWGFRMTARYDTYASLLSEYLKPDFKPQVIVDPLINKSA

SEQ ID NO: 131490 - protein, 54 aa, Oryza sativa
  Clone ID: PAT_MRT4530_33550C.1.pep
INRLASLILKGFLTVRFFEEPCFLFLFFSFYFFYFVTNRLFNLLLPKMYICKLI

SEQ ID NO: 131491 - protein, 113 aa, Oryza sativa
  Clone ID: PAT_MRT4530_33551C.1.pep
MTKRAWKKGDASAGRVYSYIQGIEARRSPPVVCGRGVTHGQKYDWTSIPCYASCVSSADRWTVNAVRRQSQELNRPDCGSRRSTISGLYSFAMGCGDWEASGGLGLWLDRIGE

SEQ ID NO: 131492 - protein, 722 aa, Oryza sativa
  Clone ID: PAT_MRT4530_33552C.1.pep
MAKTRKAAAAPPPPPPPPPAETPARRKGKKKGRPSLLDLQRRSLRLQAQNPSPAPSPSRRDANPSDEDDDGVGSGGRRRQKRLKSVLSSSGGGEVGRAPPLLPVAPIFRNLPEVFGGLPEERRGGFLPWDTRRCGCRSGWICDFGIFLRGVGFVDDEAPAAAVVVKVEVEEKKKKVSSKATGKGDAASDGGPTTGTPLPDKKLLLFILDRLQKKDTYGVFSEPVDHEELPDYHEIIEHPMDFSTIREKLLNDSYTTLEQFENDVFLLTSNAMSYNSDDTVYYRQARSIEALAKKDFENLRQASEPEEEQQPKTVPRRGRPPKYAKKIEKTENDVSPDLSNAKTKSADHAETIRKRLTGDRTRNANITTRDSPFLQHNTPGSFAGKRTDRFGDYSGPSKYGKKTTPTISDDERRSTYDQQYFHSSPLFSALGGERKVLVPVGLQQQHAYARSLARFAAKFGPVGWDIAAKRIRRLLPSGTNFGPGWVVDGEPPENSQWPRVPMLSDPSIQSTGVPASNVISKNDESNQKSGLTSNEDSGEEHLARTEPVASTSACVNTNSVSATKLATKCENGANVSCDGVGSTGQTPPLQQHSHSREIHSNMNGFTALPNTISQYAGQGFLGQMQLTHAQVLGMFSGVNGRTNGFIHGHPLVANSIKAPQNGDVGKVATNPSPDAGHDSEAALSQTMTSSAPSLSAGVQPSGSMPSEKLANPKKHPDLALQL

SEQ ID NO: 131493 - protein, 57 aa, Oryza sativa
  Clone ID: PAT_MRT4530_33553C.1.pep
MEMVGAKHVEAFDHGRSDWRCAAGLTGYQGRYDRPHAAGLTGHPRRSDRLYGRSDRF

SEQ ID NO: 131494 - protein, 141 aa, Oryza sativa
  unsure (1)..(141): unsure at all Xaa locations
  Clone ID: PAT_MRT4530_33554C.1.pep
SHRPANSIKPYKRRSRRKSIHRSQNHTKPTHQTPKIIVRAWMPFNLAKTSTTDASSSSSVHMIEDERVAVGPAGLPQVHAGEGRRAAAAAGPEVGADDEVVVGGQVGHAQRPGPGTDLCSSGRRPSSPVASFHPFCXPGQL

SEQ ID NO: 131495 - protein, 530 aa, Oryza sativa
  Clone ID: PAT_MRT4530_33555C.1.pep
MLRSLLARAIPRSSAAAATTRGFTDPRSFPLLFREGSRLSTSQGGIGNGGGGGGGGNGGDGEEDDPFSFADLQKLPPDVARDVEAVVGAAEGFHADAARARGLLERCGATASEPVVVAVLDRLRNSCAAAHAAFRWASAQPGYAPGRHACHSMLAILAKHRRFDDARALLDQMRRSSLASPAAVMLLIRRYCAARDVAGAVAAFRALPNLGFRPGVAEFHGLLTALCRYKNVQDAEHLLLSSEKEFPFETKSFNVVLNGWCNMVRSVREAKRFWNAMEIKGIKRDVVSYGSMISCFSKAGSLDTVMKLFNRMKEAGVIPDRKIYNAVVYALAKGQCVNEAKALVRSMEEKGVAPDTATFNSLIRPLCKARQVQEARKMLDDMLGRGLSPSVRTFHALLDVARSPIEVFDLLDKMKELQCDPEMDTFIMLIRKFCRWRQHDSVEKLWSAMPANGLSPDRSAYIVLIHGLFLNGRLEESAKYYEEMKAKGFPPEKKTEEMIQAWLSGRELAKASASVGSRGGSVSLRSNPRK

SEQ ID NO: 131496 - protein, 102 aa, Oryza sativa
  Clone ID: PAT_MRT4530_33556C.1.pep
MAPAESVAHFDSALSSLVSSPQGGGDEMAAIGDLIGRLGSICNHGSASANNSCYSTPRTRARSCPRSPEPETTATRRRRRRISWSQPQRLHPCEDEEGTSRR

SEQ ID NO: 131497 - protein, 48 aa, Oryza sativa
  Clone ID: PAT_MRT4530_33557C.1.pep
FKLCVYALEGEASQAVCHRVCEPLLRNTRPPNLLFSQSCRKFFLFSDG

SEQ ID NO: 131498 - protein, 750 aa, Oryza sativa
  Clone ID: PAT_MRT4530_33558C.1.pep
MDDEKRPRVGDTAESPRKSPRLVHRIPTTTDQAESGVGLKSLLGLIKNNPSKELDDPNAASLGVIDVEKKAARPGDTAATALDVNDWWEKVVALQWMASVGGDCRARRCRHVLYGEDDINLAIALIKTCDDTPMCNADNCGNTEGREISACLDCESRFCTTHGKWHASVNKHWVALVYKKPHVAYCFACEECYFIRTEHFGVVMDNEDDYFISLREEDEKGMRVDNVAGDHASGSVIGHACPIKGIPNLGNTCYLNSLLQCLLVLGRLRAGILGLDAPLGLLGSSLRSLFDDADSVNNAGGLLDPEKLLACVRMLNPEFKGNGMHDSQEALCILRTGLDKEERAMKLSNMQAGAPSAVAPTVIDSIFGGQLSVTSSCKHCSVRSLSHDVFHDLSVPLPQESPAKSDELSPWTKGRRSPRKIRINLLSAIDKHKSDNEKTQSPASELEDVFLVKRSKPLKVDSTKVEQISHSMDAGGPLQTRKDKVQGKVVDVLPRIPEDPASPSFVSPLSEEKNDSAVQPEVSTEAKMTASSAKVTTKDKGKTQISDVVYDKAHDINSLASIEKCLELYLETEIEWTCENCSKVLKKPGIMSSTKEDTTAGDQSEQLEKSAHQVEENQNEQKDKNECPIQTRLIRKLPPVLTIHLMRYLEDLTKVIGHVSFKEILDVGQFMDPSSEDRDNSRYRLVGFVEHLGPSMYAGHYVAYVRPSPPQQTNGSSSWFRASDTDITEVSLEEVLKREAYLLFYERIEG

SEQ ID NO: 131499 - protein, 43 aa, Oryza sativa
  unsure (1)..(43): unsure at all Xaa locations
  Clone ID: PAT_MRT4530_33559C.1.pep
VVIKLGVGGASHCMQQVNLQVNGSXVKTSSETLIAGTVYQTSV

SEQ ID NO: 131500 - protein, 235 aa, Oryza sativa
  Clone ID: PAT_MRT4530_3355C.1.pep
MPIRICGCTAEADEEEERDGDRLGIRWTRCIPIDSGLRGGALDDRCSHTEWLPGPAESNKGVSGDSTSSSTTSRKPSTRSAFHSTFQETLLDLKHHTCQAHHHHRGRLGVELPSSRRRQWLGILPILKAHGGGRGKPIDPFPWAWRQLHQVCQVPLCRQLGISININIRRVPTSGQVLTTAAVEDKDEGGPSFLSQRSPAPSSQRFHNQHQVEDKCVEEPPLTDITPTVTEKLLL

SEQ ID NO: 131501 - protein, 896 aa, Oryza sativa
  Clone ID: PAT_MRT4530_33560C.1.pep
MGSVVSSAYAALRSFVDARIEKVGWWAWPMGERRRERPKTDAEFAARIAWIIEQSNRCNHRDNEKTHKISERGDSQSPASELEDVFLVKTSKPLKVDSTKVEQISHSKDAIGGPLQTRKDKVQGKVVDALPQKVLCDAKVDGMDAATADSRIPEDRASPSFVSPLSEENALIASGSDVKINDSAVQPEVSTEAKMTASSAKVTTKDKGKTQISDVVYDKAHDINSLASIEKCLELYLETEEREWACENCSKVVEKPGIMSSTKEDTTAGDQSEQSEKSAYQVEENQNEQKDKNECPIQTRLIRKLPPVLTIHLMRYLEDFKKVIGHVSFKEILDVGQFIQDSEFEGYSMQDSQQIAERGDSHSLASELEDVVTVKTSEPLKVDSTKMEQITQNKDAVHGPLKTQKDKVQGKAVDVLPQKVLYDVKVDRINVATADSLIPEDPASQSFVSPLREENALASGSDDEKNDSAVQPEVSTEAKRTTSSVKVTTEDKGKTQISDVVYDKAQDIESLASIECLELHFEAKMIEWANENCSIILVEYREPIMSSTKGDTTDGNQSEHSEKIICQSEQSYEKKLFPEVGTCNTDIVQAIVEGRDSHITGLELEDVTHVAIEETDDLKRSLGSRKVIGHVSFEKILDMGLFMDPSSGDKDNSHSPVGVVEHQGLRGPLNFLGATKRGGPQAPEPEFSWISVMGDPVINTDGSCTIAAATVCIEAQHRLAFERLYGKGSFPCKAKVPKELKKACYRQGIWSSEEGAWTPDVLLMIMEKGGILTQRVPNNIQLAIDGFFWLERNVAFGKLEFMRLLYAYGPLLSTLWTDDGYAQTFGDRVYRGLQKDPDSGDHHCVVCFAYRVDSRTNELYVRIMDNCADDGPIRWVLFDVFDSFYVPLIKKSYRAS

SEQ ID NO: 131502 - protein, 84 aa, Oryza sativa
  Clone ID: PAT_MRT4530_33561C.1.pep
MRREILLRTGPARYSYGVDCYAAVHEVRIREDDMPDWQNALHPACIVVARFAASELSRIRHAWLCEPTPSELGSSQRKRMLEYS

SEQ ID NO: 131503 - protein, 117 aa, Oryza sativa
  Clone ID: PAT_MRT4530_33562C.1.pep
MELVASRRGGEHRSTADSNLASPAPEMEVEAKNYSCILPPPLPHQRRRLRGCDGDGDALPRLSRGTRRISIPPIPHPSVSRDSPSLVWTSREAPAWSGRPRRRLRTGYCLVRLNRRA

SEQ ID NO: 131504 - protein, 80 aa, Oryza sativa
  Clone ID: PAT_MRT4530_33563C.1.pep
VRERNGCSWGYVVWKAVDGVAAIASENQEFRIATGSTSRQLLIVRSAVEQRIYGSMEQRSILFDTQNQLFINMEGSILLF

SEQ ID NO: 131505 - protein, 74 aa, Oryza sativa
  Clone ID: PAT_MRT4530_33564C.1.pep
IDQSFDSRPYIAPHPTNHHPWREEKKKILIYIGVLLYISKSSHPKNHGKICSVFSPSTSQRRISTRKGSKTKKK

SEQ ID NO: 131506 - protein, 44 aa, Oryza sativa
  Clone ID: PAT_MRT4530_33565C.1.pep
RGTEQEVRTIILHCRCICTIRCPLVSMHAHAFNNIPSFFDLLGD

SEQ ID NO: 131507 - protein, 636 aa, Oryza sativa
  Clone ID: PAT_MRT4530_33566C.1.pep
MAPPPLAAAPPPPPAAALVHHYTRLLFAAASASAAASLRALLPIHARAVVLGISANPAFATSLITAVAPACLAYARRVFDAAPSRDAYMWNTLLRAHAHSRAHARDALALYARMRAAGVAPDHYTYPIVLPACAAARAPRLGRAAHGDAVRFALARDGFVSSALISMYSQEGEVRDAERVFAERDDARTVVSWTAMVAGYAQNCFFGEAVTLFSDMVAAGVLPNEITLISFLPCLRGQEWLPVGEMVHGFVVKLGFDANVPMVNALITMYGRCGSAPVARVLFNGMSSRTLVSWNTMVAMYEQHGDGVQAIKFFRRMLTEKVGFDCVTLVSVLSACARSGALGTGKWVHELARSHGLDTDARIGNVLVDMYAKCGEIAYAKEVFHSHGLRGHSVVSWSAMINAYANHGEAEEALKLFSLMRNEGVRPNSFTFTAVLMACCHSGLVDEGLKHFNSIATDYQMSPTLEHYACMVDMLGRAGRLVEAYGIIRGMPIRPDKCVWGAFLGGCRLHGMVELAEYVAKELFDSGSNDVTFYVLMANMYFEAGMLEDAERIRGVMKEMELKKTAGHSLVCTDRERIAVTQSPTWPGTFGDVGPEGEVSALLLISPRGGRVTPAPAPRAEAPRPLVELAPHEWVG

SEQ ID NO: 131508 - protein, 63 aa, Oryza sativa
  Clone ID: PAT_MRT4530_33567C.1.pep
MRKKGWMIMRLTSQPARETPRTPAAMDGDRRRRGVRESRARGLTDQTKYGLSLLTWFTSPAQE

SEQ ID NO: 131509 - protein, 85 aa, Oryza sativa
  Clone ID: PAT_MRT4530_33568C.1.pep
MDSKIVVFDGLRTPQAKFQYIIDTLNKALVRFSWMTTTGTLWMPMFAILLRRKSKFLNTQYVFTSSILPFAKIKAPNKVNEDLSN

SEQ ID NO: 131510 - protein, 1204 aa, Oryza sativa
  Clone ID: PAT_MRT4530_33569C.1.pep
MTKPPSTKAEVEPSNMLPISLEDLDGEARKAMKEYIKTITQEALMRTCTRTRQGVVLKPGQLPKPNFDVQNRWSEYANNRRGSGCAISRSDRAKWPARPRIHRRSDRPDGWSGRVFPRRSDRTPNRSDRASGCRSDRALDRNRAKVYQKPYPDYYDNIPYPRGYRVPKFTKFSGEDSRTTWEQKYNESVIDYIKRFRDVRNRCYSLNITDRDLADLAFNGLIVPIKERLEGQQFLDVNQLMQKALDQENRVKDSKKFVRPYEKKHNFNLIDYPEASDSDDEGDHGMYGAEWSWTNKNKPFVCSNLMPTPRKDRQIQSAIDEGRLKFTDGSKMKLDSDLFLVNTINFIDKKFYVKNRVNEGKREGKRVKVETRTLEVITIKVGSHDVPVPSGDEVGESSSNKSEARTSLSQSASLTRPSGRINRGHYLPPGTEPKPRWMPKYLTTIQKRRLQRLRAQELKQREAKERRDRRFNELRPPPTKVWRRKSIEGEESVVVQKEKEEQSVTKDESSPKEDMDVNMVCMLPMESCAMDEAKVAQFSLGPKDAVFEKPDESNRHMKPLYLKGHVDGKLVSRMLLDGGAAVNLMPYSLFKKLGRGDDELKKTNMILNGFNGEPTEAKGIFSVELTVGNKTLPTAFYIVDVQEANLEWLQKRVQEYRSTKNDIGETIEDFDEVEKLGQGFTSADPLEEVDIGDGTKPRPTFVNKNMRADYKVKIIELLKEYVDCFAWEYHEMLGLSRDLVEHRLPIKPGFRPYKQPPRHFNSLLYDRVEEIDRLLKAGFIRPCRYAEWVSSIVPVEKKGIILEIYIDDIIVKSDGMEGHMAVLRLAFERMRRYGLKMNPLKCVFGVSTGKYLGFMVHERGVEIDPKKIEKIRDFKAPTCKKEVQKLLGKVNYLRGFISNLAGKIDDFVPILRLKKEADFTLGAKQQEVSEGLKKYLSTPPVVRAPRAGMPFRLYIASEDKVIGAVLTQEEDGKEYIITYLSCRLLHAETSTCIVACQADVIKHMLQRPILSGRIGKWAYALIEYDLAYEPLKYMKGQIIFDFIVDYYVDNAYEEKKTEENWRIPLIRYLKDPTLKVDRKIRRQALKYTLLDEDLYHRNIDEVLLKCLDDDQSKVAMGEHIIHRFGIPQILTTDQVASFMSKEVKSFAESYGVKLLSSSPYYARANGQAESNNLSSGDYRTLMGDNLDEVIDKRLKGLEEIEKEK

SEQ ID NO: 131511 - protein, 622 aa, Oryza sativa
  Clone ID: PAT_MRT4530_3356C.1.pep
MAVEASGGTADHACQEAAYLMMARLRERHDYIFHDTAYRYHPRRAHGDGVSSFRPTAGENDTTFGHMCAVMRGLDQMHSDLHKATKALNDGKLMRIVALKDEIARLKKENAQLKGLPAPGGVRIRTTPRCLFGMVYTRTGNRTTGEGSNGEERADGVHPNSDSGNGPPPLPENPTLAQVMAHQTQMMAAMMQQMQQQHQQMHQRMMQHAEQQHQQFGPPPPQSKLPEFLRVRPPTFSSTTNTMEANDWLHAIEKKLNLLQCNDQEKVAFATHQLQGPASAWWDNHMATRPPGTEVTWAEFCRSFRKAQVPDGVVAQKKREFRALHQGSRTVTEYLHEFNRLARYAPEDVRTDAEKQEKFMAGLDDELTNQLISGDYADFERLVDKAIRQEDQRNKMDRKRKAAQFRAHQGSHQRPRFTPGQQGGPTTMIVRQHRPFNPSNFHQGSSGSQNHHGSQPNRGTAPRPPMAPAQSGQPAQAKKETGAKPGSCFNCGELGHFADKCPKPRRAGPRFIQARVNHASAEEAQAAPEVVLGTFPVNSIPATVLFDSGATHSFISKKFVGMHGLIREELSTPMRVHTPGNSSTSVQFSPSITIEIQRSPGFAEFSGVIIRKRKRPGKGKMS

SEQ ID NO: 131512 - protein, 433 aa, Oryza sativa
  unsure (1)..(433): unsure at all Xaa locations
  Clone ID: PAT_MRT4530_33570C.1.pep
KFVPISVKPAKANLEWLQKRVQEYQSTKNDIGETVKDFDEVEKLGKGFTSADPLEEVDIGDGTKPRPTFVNKNMRADYKVKIIELLKEYVDCFAWEYHEMPGLSPDMMINDASGHKVISFLDGNAGYNQIFMAEEDMYKTAFRCPGFVGLFEWVVMTFGLKNAGATYQRAMNXIFHDLLGIILEIYIDDIVVKSDGMEGHIADLRLAFERMRQYGLKMNPLKCAFGVSAGKFLGFMVHERGFEIDPKKIEKIRDFEAPTCKKEVQKLLDKVNYLRRFISNLAGKIDDFVPILCLKKEADFTWGAKQQEAFEELKRYLSTPPVVRAPKAGKPFRLYIASEDKVICAVLTQXGKEYIIIYLSRRLLDAETRYVFIERLCLCLYYACTKLRHYLLSSTCIVACQADVIKHMLQRPILSGRIGKWAYALIEYDLCHD

SEQ ID NO: 131513 - protein, 695 aa, Oryza sativa
  unsure (1)..(695): unsure at all Xaa locations
  Clone ID: PAT_MRT4530_33571C.1.pep
MTKPPTTKPEVEPSNIIPISLEDLDGEARKIMEEXIKAITHEVLMRSCTRTRQGVVLKHGLLPKPNFDVVSTEEVTTPIQQLIANTIDSSIAALNNKLDASFESRFNERIDDFIRNRFSSFIADFQPKDKASTSTSKAPVDQIYSKTDGATFAAGHTGQMAGQTGFPPYGQIGPQIGQTRPWTSQTGAIIPIQGIDPMTNNGFLYHIPVHDSPVSTVNTQVPPHIPNVYNNPTRGYPPNTRYGQYNYIAPQPQPLRPPNPPPNQHRPENMEELISGIIRDKFRIEARNHAKVYQKSYPDYYDNIPYPRGYRVSEFTKFSGEDSRTTWEHVGQFLAQCGEASSSDTYKLRLFSLSLSGTAFTWFTFLPANSIHTWPQLEQIFHDYFYTGXTKLSLSDLTSIRQKYSEYVIDYIKRFRDVRNRCYSLNITDRDLADLAFNGLIAPIKERLEGQQFLDVSQLMQKALAQESRVKNSKKFVRPYGKKPNVNLIDYPEASDYDDDGDHDIYVVEWSWTNKNNPFVCSNLMPTPRKDRQSEIKYSFDVAKCDKIFXYLLQEKIIRLPKGHVIPSQEELKRRAYCKXHDSHSHSTNDCNVFRRQIQSAIDEGRLKFTDGSKMKLDHDPFPVNTIDFNDKKVLIRPEQAESTKGKKVFIGEPRPKMMVPKNPEKYEKQGGEKIHNKGKQPRLNSMSSFGTSTH

SEQ ID NO: 131514 - protein, 88 aa, Oryza sativa
  unsure (1)..(88): unsure at all Xaa locations
  Clone ID: PAT_MRT4530_33572C.1.pep
GPGXITGPLVQLDLTESPFSEQRCPLRKWGSRFGEALLHPFSMTLVITHNCRTVGGIVINKGYRGFCLRHCLVYSTNTSCLVDFNNYA

SEQ ID NO: 131515 - protein, 190 aa, Oryza sativa
  unsure (1)..(190): unsure at all Xaa locations
  Clone ID: PAT_MRT4530_33573C.1.pep
MDGDGYDDGSGTRDFMSQSDSHASADGLDPYTDSLHXFTGFGSGGASRIGMAALDLNSSGDGWPDLESYEGLLLWADAQGGDVGGSGSHLRSASKGGGSADLPLVRGCGVSQTLGLRAACPPGGRGAIAACGNSSPYGGGRRAPATGRLMQGRGRGAPATGPRSHGGGRRSAASTVSEDNFDMDSNNVDD

SEQ ID NO: 131516 - protein, 350 aa, Oryza sativa
  Clone ID: PAT_MRT4530_33574C.1.pep
MGMVGETVGLVTAILSLASRIVEMVDSARRSKEQCSLLSEHVQNIRNLLTQLDNQWTPDLATEGVLRSLKTALDDALLLVEACQIEKPWYKRLAPSKKAKKFDALDKRISIILQQFHVANMVLIVNIHKDRFFMTVLKMLLGDGACRNLPERKKNELNSYIRGLTHRDDMSTDAKWVLGWIQKDLADGNGSRFAASIPAEEGSGGGGVSDTLAKEVVQTCELIVQEAGSARQNQGHVQRLKQLAQQVADLMQHPQAYGLTREAETREMVNNLKEVLGDARMIVWYSQQPQRSMIPLPLISCSGGRGRGVEQPAEQILTVVYKMEYYLQVLPVMARRQMVIPESEYGAQAS

SEQ ID NO: 131517 - protein, 158 aa, Oryza sativa
  Clone ID: PAT_MRT4530_33575C.1.pep
MAGVVRRVEEEEEFDEGEVWEVLHHDQSNEAAAAALAGRTTKGARNNRQHEEGGGGAAAARRSKGRSSAPVAIPAAAAGSSSSSSLSSRRGGGGGEEDEEEEEEMMMMLPPHEWLARKMERMNAAAPAPEIGGGRSKGREMRKVRDAVLPKTAFSSEQ

SEQ ID NO: 131518 - protein, 61 aa, Oryza sativa
  Clone ID: PAT_MRT4530_33576C.1.pep
FFFFFFSFMQINQGPYFEYHYHMHCSIGLIYGRCLWQWCRRCLYSAALSIFVTACIVDRLW

SEQ ID NO: 131519 - protein, 46 aa, Oryza sativa
  Clone ID: PAT_MRT4530_33577C.1.pep
LWSIITEFVKSNIHHCVHQPDAGVWYQNGVRHYPIQCLLDRGYFFV

SEQ ID NO: 131520 - protein, 79 aa, Oryza sativa
  Clone ID: PAT_MRT4530_3357C.1.pep
SHPPKQKKGKHIWRGEEPPKNMGRKGTPCRGGNTTKTKSPGHPPTQWGKGQKRKNAPKTKKRGKAPSGGKKTPPPRGGE

SEQ ID NO: 131521 - protein, 165 aa, Oryza sativa
  Clone ID: PAT_MRT4530_33580C.1.pep
MRSREAKEEQGGKRREKRERERENQTKHATEMGSFFSTMFTPPPAADDGGDSRVVAVHSTATWDEQWGAHKSNPNKLIVIDFSATWCGPCRFIEPAFKDMAGRFADAVFFKIDVDELSEVARQWKVEAMPTFVLIKGGKEVSRVVGAKKDELERKVNMFISSSSS

SEQ ID NO: 131522 - protein, 212 aa, Oryza sativa
  unsure (1)..(212): unsure at all Xaa locations
  Clone ID: PAT_MRT4530_33581C.1.pep
AVCISKYLKKKPMSVLKTKAGDSHFWQGLMEVRNDFFKFCSXKVGDGRSIMFWEDSWLEGRPLTSQFPALYNITLSKNISLAMIKEHGWGVIKFRRTLFGEKLRDWDKIKQGFDNLHFIPNCRDRLCWNLTKQGTFNVKSFYNALCVQQTNVPFKKVWKFKIPLKIKIFIWLILKGRTLTKDNLFKRGWRKGDTNCQFCDQQETIQHLFFDC

SEQ ID NO: 131523 - protein, 53 aa, Oryza sativa
  Clone ID: PAT_MRT4530_33582C.1.pep
WRWPRWRRASHPTCNKHHRTQVTSGMVGRWPPELHSSIISLFISRVLLCDVHG

SEQ ID NO: 131524 - protein, 83 aa, Oryza sativa
  unsure (1)..(83): unsure at all Xaa locations
  Clone ID: PAT_MRT4530_33583C.1.pep
FQPMYALTFGSIFALLYHIVSXLVSTGLYCYIISSTADCLYIIIYIRHIADCXNPITIGWYWHRLLSAIGWNHYIGLSADRLF

SEQ ID NO: 131525 - protein, 41 aa, Oryza sativa
  Clone ID: PAT_MRT4530_33584C.1.pep
MSGDQADDVGCDNSAFVENVLDNGAYSTTTYSKDNRASPQR

SEQ ID NO: 131526 - protein, 838 aa, Oryza sativa
  unsure (1)..(838): unsure at all Xaa locations
  Clone ID: PAT_MRT4530_33585C.1.pep
MARRRGSAAAAAASPALSMFRSGSAPPTVQGARTASNGGVGDVLSDEEIRSHPAYLSYYYSNEHLNPRLPPPMVSKEDWRVAQRVQAVSGGVGDRRRRPSDVGGGSSLFSVPGMLSTAQIQLDLIHQXAQLQSRSESMNGLRSGSTSPSLVRVQSLGSSISHNFASAVGSSISRSTTPDPQLIRRTPSPCLPPVGVRMGSTDKKVDGSAVASHNHDTADIAAALSSMNLSGSKMASLEAEVQNRAYQNFGDQTDVLFSVPKERRQLSQQKLAQNADEESINALEYAAFPNGSGNFNNSNMSKLSVDSRSKFPIQSPHGNANNKGSLVSPTGSVSLYQNLNGDNSNIDVNLLSNQGGSGFQGQPMESMYAPYLQANSDSPLGAATNLNPFQGSSFSGSVPLDSPGYQKAYIASLLAQQKLQYGVPYLGKGMAYLSSPTSTPFISSPQGHVRQGDRLARISSVGKTTTGGPMGSWNSDNGLIDNGYGSSLLEEFKTNKTRSFELLDIVGHVVEFSSDQYGSRFIQQKLETASAEEKDTIFPEILPQARTLMTDVFGNYVIQKFFEYGTEPQKKQLASLLKGYVVQLSLQMYGCRVIQKALEMVEVEQQTQMALELDGNIMKCVRDQNGNHVIQKCIECIPQERIRFIISAFYGHVVELSTHPYGCRVIQRVLEHCNDENTQSTMMEEIMQSVVLLTLDQYGNYVIQHVLQHGKPDERSAIIKQLAGQIVKMSQQKFASNVVEKCLSFGSPEERQILINEMLGTTDENEPLQAMMKDQFANYVVQKVLETCDDQNRELILSRIKVHLNALKRYTYGKHIVARVEKLIAAGERRSGVSSSSS

SEQ ID NO: 131527 - protein, 65 aa, Oryza sativa
  Clone ID: PAT_MRT4530_33586C.1.pep
MDKIDCYVVPQTTGTGRNIFQGGSPLSASLPLLGVQLVLIVAVTRVLYFLLKPLKQPRVVSEIMA

SEQ ID NO: 131528 - protein, 97 aa, Oryza sativa
  Clone ID: PAT_MRT4530_33587C.1.pep
LRLELYLVDYCVALCTVLAMLQPVRVDAWSLLLSLASVATSVVMSVVSCSALGCIGACRCSWWSWWPGDSPALLQALIHKQAVRLVMRMLDLVRELG

SEQ ID NO: 131529 - protein, 112 aa, Oryza sativa
  Clone ID: PAT_MRT4530_33588C.1.pep
WRTAIDGGSSRRLRPSFRPRAVEREACRAYRRRGEAGVHMAAAAAICACACACVSGLGAPVRTPAGLLLRAAAAGRMQMWLREFTVLCWAGGLLLLRSVGSLVGCGCYLGRR

SEQ ID NO: 131530 - protein, 145 aa, Oryza sativa
  Clone ID: PAT_MRT4530_33589C.1.pep
MATLSLQVFRVIFAHSELSYWQSATVLPRPLYRDMRLLGPAARGLAPPHLLPPAVYHTPRVVVVSSRLDYVSVTRDTSPGRGRRGGLYILYAGGRVKSARWIQGNRNAKHMRLYPYQYSFLEYRGKGPGKHSVKALELFCFTLVD

SEQ ID NO: 131531 - protein, 2517 aa, Oryza sativa
  unsure (1)..(2517): unsure at all Xaa locations
  Clone ID: PAT_MRT4530_3358C.1.pep
MADTRSSAEDETKRPTEEETGRDGEMGSEPNLEERLKRLNMHGEEETDLDFSEELEGLIKDVRWLALFRVYTTKPFSHSALLNAMRNAWSSAQDISFKVMDSNLFMVQFQCLGDWNRMEGGPWIFRGAPVVLKEYDGFTNVFDYKLDKIPVWTRIHGVPDGLMKKRELAERVAKKVGEQPFTVIVDEGRINPVKYLRARVFLDLSPLVRFVPITIKERILYPRARANWLHGDRNTSFFQQFARRRRKIKGLIDENGCFQTDEDRMSIVYGYFQLFSAEVTQIDGSSLLDVQRKVTGDMNFGLLAPYTAEEVKNALFSIGDLKAPGPDGLHAVFYKRFWDMLESDLVKEVLDAINTMKIPDGWNDTTVVMIPKVDKPDRVTQFRPISLCNVVYKIISKMLANRLKCLLPEIISDQQSAFVPGRLITDNVLVAYECLHTMKKKKGRKVQYRVNFNGVLTEVIKPSRGLRQGDPLSPYLFLLVAEGLSSMLQGAENRGDLVGIRMVYTRNGSRATGEGSNGEERADGVHPSSDSGNGPPPLPENPTLAQVMAHQTQMMAAMMQQMQQQHQQMHQRMMQHVEQQHQQFGPPPPQSKLPEFLRVRPPTFSSTTNPMEANDWLHAIEKKLNRLQCNDQEKVAFATHQLQGPASAWWDNHMATRPPGTEVTWAEFCRSFWKAQVPDGVVAQKKREFRALHQGNRTVTEYLHEFNRLARYAPEDVRTDAEKQEKFMAGLDDELTNQLISGDYADFERLVDKAIRQEDQRNKMDRKRKAAQFRAPQGSHQRPRFAPGQQGGPTTMIVRQHRPFNPSNFPQGASGSQNHHGGQSNRGAASRPPMAPAQSGPPAQAKKETGAKPGSCFNCGELGHFADKCPKPRRAGPRFIQARVNHASAEEAQAAPEVVLGTFPVNSIPATVLFDSDLDVILGMDWLTKFKGVIDCANRTVTLINEKGEXVVYKSLVSPKKGVSLNQIEAEIPVDTVEKNSRKLEDIPIVCEYPEVFPEDLTTMPPKREIEFRIDLAPGTAPIYKRPYRMAANELAEVKKQVDEQLQKGYIRPSTSPLGAPVIFVEKKDKTKRMCVDYHALNEVTIKNKYPLPRIDDLFDQLKGAKVFSKIDLRSGYHQLRIREEDIPKTAFTTRYGLYECTVMSFGLTNAPAFFMNLMNKVFMEFLDKFVVVFIDDILIYSKSEEKHEQHFRLVLEKLREHQLYAKFSKCDFWLTEVKFLGHVITAQGYYRRFIENFSRIARPMTQLLKKDEKFKWTAECDKSFEELKKKLVSAPVLILPDPMKDFQVYCDASRHGLGCVLMQEGRVVAYASRQLRPHEGNYPTHDLELAAVVHALKIWRHYLIGNRCEVYTDHKSLKYIFTQPDLNLRQRRWLELIKDYDMSIHYHPGKANVVADALSRKSYCTALCIEGIRSGGTAYAQANDSEIAELKKNMSVGKARDFHEDEHGTIWLGERLCVPDDKELKDLILTEAHQTQYSIHPGSTKMYQDLKEKFWWVSMRREIAEFVALCDVCQRVKAEHQRPAGLLQPLQIPEWKWEEIGMDFITGLPRTSSGHESIWVVVDRLTKVNLERHGLVPVGTSSGRDSRPRIHKYRVVPSTLHQCLKFLDGSGTQQRIVGNLSPYTTQESHHADAKYYFPVDDSDQTLGRTTPAADLLIAPGRTPTPEIRRLITAGPLAGATGSSTRNRRNNARHHSFMSAQYENKPYTGAGMSGVVVPVEDTALTSPTFTPLLLKAGTSSRTPTTQTSVARVPVDLQAPSSKEILLTRNVAMVQGRKLLDISNDAPTVITIRARNNSRRSGYHYEGRCQINSFIGKGWDQRSTKQANAAATGYIYASMITEQEGELEDPFMLDELKEEKQPTIDDLVEINLGTMDDPRPTFVSAALSAEEQESYRSFLMEYRDCFAWTYKEMPGLDPRVATHKLAIDPQFRPVKQPPRRLRPEFQDQVIAEVDRLITAGFIKESIVAELFKKFAKRAQNEFSCTLVKIRSDNGSEYKNTNIKDYCDDLGIKHELSATYSPQQNGVVERKNHTLVEMASYASNSKAYRVYNKNKGIVEETVDVQFDETNGSQEGHENLDDVGDEGLMRAMKNMSIGDVKPIEVEDKPSTSTQGEPSTSAAPSQAQVEVEEEKAQDPPMPPRIHTALSKNHPIDQVLGDISKGVQTRSHVVSICEHYSFVFCFEPKHIDEALYDPDWINAMHEELSNFVRNKVWTLVERPRDHNAIGTKWVFRSKQDENGLVVRNKISLVAQGFTQVEAIRIILAFASCFDIELFQIDVKSAFLNGEIAELVFVEQPPGFEDPKNPNHDFKTGKVDTTLFTNIIGDDFFVCQIYVDDIIFGSTNEVFCKEFGGDMMSREFEMSMIGKLSFFLELHIKQLKDGTFMSQTKYIKNQLKRFGLEDAKPIKTPMATNEHRDLDEGGKPIDLKLYRSMIGSLLYLTASRSDIMFNVCKCARFQAAPKECHLVAVKRILRYLKYSSIIGLRYPKELLAWAKEKRPSIRNAWMIEEVDWGPNKDIL

SEQ ID NO: 131532 - protein, 109 aa, Oryza sativa
  unsure (1)..(109): unsure at all Xaa locations
  Clone ID: PAT_MRT4530_33590C.1.pep
EPQHRHLHFHPARLPPPPSRWPTLPQRPPFRTASPPPPLIAVPXPFPSPTPPASLPRQPPSHATXSSPPPAAGAPGRAPPPRXPPPDRRLATPRRPPSSPHRRPPAPPR

SEQ ID NO: 131533 - protein, 110 aa, Oryza sativa
  Clone ID: PAT_MRT4530_33591C.1.pep
MMTESTWDPHINDTNSHSSPSVALPPFSLKLVEEQDPEEDVKAGVPSDGVSEGGGRAMAQGQGAQPIPLAAMGSMESGASRGGALAVTREHRSRRRSGRGGVDESLVEPE

SEQ ID NO: 131534 - protein, 70 aa, Oryza sativa
  Clone ID: PAT_MRT4530_33592C.1.pep
MALYYVKAQVSEGGSLGNNKFQTYFLHCIATQGKMLKLSKWRENVQVFAPTYLYNPYMLELPHPIWKFKS

SEQ ID NO: 131535 - protein, 1376 aa, Oryza sativa
  Clone ID: PAT_MRT4530_33593C.1.pep
MDLGYEHPAVLLSVEISEVVQKLRRSLGKSSDSFKRTTKKLDVVEDKLRFLRLDSLQRVKPAPAWLQDLNKAAQDAKGLLDDMESEVKAPDSSISDVMNWLSSDDRNMIRMVYVISKLASACSQGKSIVDTPPLNESALGDEKEDKIASSSVAMTRQDKSFLGDDFLIGRDEEIAMIRDMVLDNAQYVPTEITLKIREEAEKLHVPHKGWITETLHKIDMSKWTQQAIEVSPHPENEKSNKVEYIRHPHDSAVTYLRNPAVIPIVGISGVGKSALAKFIFDDANVREHFGDISAWVYMTDRTDQLVTIEQIIYSFNPKDNISYMTSLDSAYSQLQDIIEGKRFLLVLDDVWNEICVLWNDLRSVLSKGAPGSVVLVTTQLYSVANFVGTAGPVILDPLQSDDSWALLRRYAFVEPCRSLSTEGLKEIGRKISHRLHGLPLSIKVTGATLRSQLEEADWREILNSWWWNVSDDNFAIRIISSLGSCYSALPGYLRQCFVYCSIFPRNYVFEKDKLVQMWIANGFIQLDSSSGVKRLEDVGGEWFYELVNRAFLQPSARKTEYIMHDLVWDFASALSSDEYHGNDNKVRGVSQDVRYLSVDMDALDTLPDKFKTEQLRTFMLLDGSHQPSNNETHLPLSNFLCNSKSLRLLAFSSRSYKWLGRTSALSNVISSTKHLRYLDLSFTGIAKLPNSVCSLCHLQVLGLRGCTFGKLPGDMNFLINLRHLHASSGTIAQINGIGKLTKLQELHEFHIKAEEGHGITELSDMNDLGGSLCISHLEMVTDPAEALQANIVEKDYITALELRWSYTLPDLSKSILGCLSPPRYLQELKLYGYSGFELPDWVGQLKHVRVVEISWCKNLNVLPPLGQLEHLQKLKLDGLPSIKDINSDICGTSNVVFWSLEELSFEYMENWESWTYAGSSDFIRNLKKLKILSCEKLRKVPFESLGLATKEIIIKWCDPYDDTFSRYLQGLNGLTRLEVGGSRRCKLIIPCKQLMSLEYLHIQGFGDVCIKSGLWYIKNLKNILIIDCSTVVTDSNEESAQEDKQSPTQIDRTMHSLTHLTLGGDTMQKVGLEFVIPQTPSLRNLRLDIVQGHTSITKKWLQYLTSLQELEIYSCHALPSSLSSLSSLRRCTLKYCHWMYSIPPNSLPGNLKELQIEECSFELEARCQNPTGDARPEGRKIELWQKRKMGEWRERKLEHGRTKLIEMQQKNESLGIPMSWREKSPKSSKGESLYQSDKYWSRGQRMQEGHEWPRKQHMEEQSFIEKEKSSSLNEQAEEDESKKEPLEEWLQQSEGDQWPEREWELYSWVERKLKKELDRNKDDPSSLMKEREEWLKEEERKFHIHDSHALVKEILHLNQESRQCFCFRHHLSAQRT

SEQ ID NO: 131536 - protein, 26 aa, Oryza sativa
  Clone ID: PAT_MRT4530_33594C.1.pep
SCSEQHVNSSNWMSTSHTDTLTIDSG

SEQ ID NO: 131537 - protein, 56 aa, Oryza sativa
  Clone ID: PAT_MRT4530_33595C.1.pep
PCALFRHDHEQRTARCPSHSCDFPIRPYHERVVILVTIFVLSSVPFFDTSYHGRYI

SEQ ID NO: 131538 - protein, 914 aa, Oryza sativa
  Clone ID: PAT_MRT4530_33596C.1.pep
MAEAAVVQALIKIGTTFGDAALQSLKDIIKKEVALLQELPELAKSIGRELDMINSFLMQVRAKIHSTDNEVLKRWVVRVRQVAYHVEDIIDEYSYNVALLQEESYLSRMMRATYYGVTFHGIATGLKDVQNDIKQLSDTKTKFAEFFNELHSNTGSNTQSHLSRDRSLHTVKEGIVGMTEEVDLLNSWLSPNDLTRVVLSVWGLFGLGKTTLVRKVYESVKEQKIFDCYSWIEVPHEYNNDVMLRQLIRDLSQDQSQIPGNLDSMYGSQLVDILCVVLSGRRYLIVLDNVWDADAFHGISSFLIDNGNASRIIITTRTSDVASLAQDTYKLKLKPLGDEAAMELFCRRAFHNKDMRCPPHLKDLCEQIVRKCGGLPSAIYAIGNVLAVREQTEVAWKIMNDQFQCMLEDNPGLGEVRSALSVSILFLPRHLKNCFLYCSLFPQNYRLSRESLVKLWTAEGFITKRGSSTLEEVADEYLMELIRGSLLQLLETDEIGRVAFCKMHDIVRDLALSYSRKEMFGLSDGDLQTDQKEDVRRLSISKCNKNVGSILEFPRLRTFVATNGGAESDLLHSLIQKSKYLAVLELQDSPIDIIPANIGELFNLHYLGLRRTNVKSLPKSIEKLTNLETLDLKYTGVDVLPKEICKLKKLRHLFAEKLIDRNRQVFRYFKGMQLPHGFSHMNEIQTLETVEATKDSIELLGKLTALRTLWVENVHRADCTKLFDSLSEMENLSSLLVSASDEYEVLNFDAFSPSEMKLQKLIIRGCLENDTFDKLMFKNLGSHIKYLSLSSSRLGNDPFPLLAKNMKNLIYLSIRKWCCAEEVALREGWFPRLTTLFLGDMKQVHTIVIEPSAVESLEALYLVSLTAMTAVPTGLELVGSLRKLVVWGQSDDFKLEWKRENWETKLRHIPEIRI

SEQ ID NO: 131539 - protein, 161 aa, Oryza sativa
  Clone ID: PAT_MRT4530_33597C.1.pep
MAVGLAFAANTDSLNAFVPLLGASSSADTQRPACSRPVDLAVVGGGPAGLAVALADEGSRPEIEHEASVNKHKTARLAMSTRWEDRRRWPNIVRAAGGEGGAAAAEEPPKSDSCGEGKGREAARMEKLTVMGQAHHKAHVKKAHIQTSSAWTGGAVGTAAG

SEQ ID NO: 131540 - protein, 569 aa, Oryza sativa
  Clone ID: PAT_MRT4530_33598C.1.pep
MEPKEAPPPPPPQSPSSTEEEGMLSVTAAMARDAAVLFQSRRYADCAEVLAQLLLKKEGDPKVFVSGAASAALWVELVGCLHISPVCALWSVCDMQFHVVFDACVDMDVHTGHDLFNKVLHNMAIAESFLDGCPDPKKLLEILGNVKRRSEELACASRQQTDSANGTGNSVSSGSRGSGIIPLISAANNATTYGDEFDTTIITFNTYCFSQSTMAVILYHLHDYESALSILDPLYRNIEPIDETTALHVCFLLLDITLALQDASNAADIIQYLERSFGVVSATNQNENANTAQQQSAQPKPSAKISTPPDSDSNTCAGGSENLSAGNFSDDTLEFESFYSTLDGGNQNWGRPILNDFSRASADLAATAADLKVRLQIYKVRLLLLTRNLKVAKRELKVLMNMARGRDSSTELLLKSQLEYARGNYRKAVKLLSTPNNRSEQAMLAMFYNNLGCILHQQRSIQTSVWCFSKALKYSLSLRSEKPCKLTAISQDKSCLISYNCGIQHLMCGKPLLAARCFREAMPLLCNRSLFWLRFAECSLLALEKGILTSSGATSCNDEIEVDVMGSGK

SEQ ID NO: 131541 - protein, 885 aa, Oryza sativa
  Clone ID: PAT_MRT4530_33599C.1.pep
MEAPPLAAPICASQGAMGSLLGKMEELLVAPDGSRLPKGVKDRMLLLGGDLGVVAAYLADLSELEDPPPTAKRWMREVRELSYDIEDYIDEFCAAPRPGRRANTMARFVCRIGRVKVARLPKRLKRHQQMGKMVSQFRIYVEEAIERHGRYGLDCCDHRRRYVSFGPMLPSRPYGEEDAQLVIDGRVSEFIERLANDEDQKLKVVSVVGSSGIGKTTLAKLLYNRIGGQFDCRAFVRISRKPDMKRVFREMFFQLQRKQPPDDYKELALIDSIREYLQDRRYLIIIDDLWAASVWDLINQAFPETCLLYLNMYPEGYKICKDDVVEKWVAEGFIDQIEGRDLEKVAGSYFDELIDRRFLQPSRLNYNNEVSTCTIHDEVRDLIAYKSVEENFVLVLDFYRKDVELSDKVRRLSVHFGDIKYAKIPTNIRTSEVRSLTFFGLCKCMPSLTEFKLLRVLNLQLSGHVGDELLDLSGISELFQLRYLKIACDIRTELPSQMRGLKYLETLQMDTTLTAVPWDIIFLPCLLHLHLRFDMNLIDLMGHMTPPSELGSSSSNSSPSGGIISNLNNVRDIHLTFCALPSKHLERNMEILGSLLGRLGNLKNLTLVSSSSQKKIAASGASEVTILWDNLAPPPLLQRFEWLLHSCIFYRVPKWIGELGNLCILKIAVRELVKNSVDILRGLPALMALSLNVHRASVENIFFDKVGFSVLKYFKYNCSVPWLKFEAGAMPNLRKLKLGFSALGDLYGTAPIRIGHLLGLKEISVKIHGASVDAESALTSAVSNHPSNPRINVQLVDKIFYGDRVTKEKDHGSEEEQNAIMSANFDEYHQTQDKESSDANKQVGSIVPLPREQEHGILEHDEYAPKDPDKYKQSDIRNISILYIN

SEQ ID NO: 131542 - protein, 1306 aa, Oryza sativa
  Clone ID: PAT_MRT4530_3359C.1.pep
MVYTRTGNRTTGEGSNGEERADGVHPNSDSGNGPPPLPENPTLAQVMAHQTQMMAAMMQQMQQQHQQMHQRMMQHAEQQHQQFGPPPPQSKLPEFLRVRPPTFSSTTNPMEANDWLHAIEKKLNLLQCNDQEKVAFATHQLQGPASAWWDNHMATRPPGTEVTWAEFCRSFRKAQVPDGVVAQKKREFRALHQGNRTVTEYLHEFNRLARYAPEDVRTDAEKQEKFMAGLDDELTNQLISGDYADFERLVDKAIRQEDQRNKMDRKRKAAQFRAHQGSHQRPRFTPGQQGGPTTMIVRQHRPFNPSNFHQGTSGSQNYHGSQPNRGTAPRPPMAPAQSGQPAQAKKETGAKPGSCFNCGELGHFADKCPKPRRAGPRFIQARVNHASAEEAQTAPEVVLVTLTNEKGETVVYKSLVSPKKGVSLNQIETEIPVDTVEKNLRKLEDIPIVCEYPEVFPEDLTTMPPKREIEFRIDLAPGTAPIYKRPYRMAANELAEVKKQVDEQLQKGYIRPSTSPWGAPVIFVEKKDKTKRMCVDYRALNEVTIKNKYPLPRIDDLFDQLKGAKVFSKIDLRSGYHQLRIREEDIPKTAFTTRYGLYECTVMSFGLTNAPAFFMNLMNKVFMEFLDKFVVVFIDDILIYSKSEEEHEQHLRLVLEKLKEHQLYAKFSKCDFWLTEVKFLGHVITAQGVAVDPSNVESVTKWTPPKTVSQIRSFLGLAGYYRRFIENFSRIARPMTQLLKKDEKFKWTAECDKSFEELKKKLVSAPVLILPDQMKDFQVYCDASRHGLGCVLMQEGRVVAYASRQLRPHEGNYPTHDLELAAVVHALKIWRHYLIGNRCEVYTDHKSLKYIFTQPDLNLRQRRWLELIKDYDMSIHYHPGKANVVADALSRKSYCTALCIEGMCEELRQEFEHLNMGIVEHGFVAALEARPTLVDQVRAAQVNDPEIAELKKNMRVGKARDFHEDEHGTIWMGERLCVPDDKELKDLILTEAHQTQYSIHPGSTKMYQDLKEKFWWVSMRREIAEFVALCDEELGTRLNFSTAYHPQTDGQTERVNQILEDMLRACALDFGGAWDKSLPYAEFSYNNSYQASLQMAPFEALYGRKCRTPLFWDQTGERQLFGTEVLAEAEEKVRIIRERLRIAQSRQKSYADNRRRELTFEAGDYVYLRVTPLRGVHRFQTKGKLAPRFVGPYKILERRGEVAYQLELPSNMIGIHDVFHVSQLKKCLRVPEEQADSEHIDIQEDLTYVEKPAEAQPGSRPPASLPPGVADRGTHLSDPSPTSRLSRSRRRTRNGRRAHASASPGP

SEQ ID NO: 131543 - protein, 855 aa, Oryza sativa
  Clone ID: PAT_MRT4530_335C.1.pep
MVVAALPDDVLAEVLRRLAPRSLAACRCVCKPWRDLVDDRRLLRADLLPRSLAGIFVNFHCLYSSEFFARPPAAAAAISGNFDFLPPKDEYDQYRHHQVEGHCNGLLLIRFRDLVVNPATRWWDRLPPRPLPRDEMDRIDAAYLVFDPAVSPRHYEVFLTPSFRWKSESEKAELDPMVEASEWPPESYTLPVFSSRTGLWQERSFIRQGQAAGTIADMRSDWASDQRNGVYWRGALYVHCQTNFVIRISLNDDKYQVIKPPEYSGRYLNFYLGRSEKGVYLALSRDNCLKVWILDETCSKMKWELKHDKHIRHILLGRNNRQGLGPWILQDINHQKNPYIYEYDEIIEAPNQKKVECEQAALEKFEWISDDENVLDNEDIVTGGYHEYINIIGFHPYKEIIFLDESLKRGLAYHLSSSKVEDIETSLKILQSRELVTTLSPFPTDATVSCLMNEDARCWDGDLIRSLFPVDIAKEILQIPISRHGDADFASWPHEKLGLYSVRSAYNMVRSEAFFADQSNSGRGMASRLLESQKDWKGLWKINAPGKMKIILWRAAHECLATGFQLPRRHIPSTDGCVFCNRDDTVEHVFLFCPFAAQIWEEIKRKCAVKLGRNGFSTMRHWIFDFLKRGSSHTNTLLAVTFWHIWEARNNTKNNNGTVHPQRVVIKILSYVDMILKHNTKTVDGQRGENTQAIPRWQPLPAGVWMINSDAAIFSSSRTMGVGALIRDNTGKCLVACSEMISDVVLPELAEALAIRRALGLAKEEGLQHIVMASDCLTVIRRIQTSGRDRSGVGCVIEDIKKLASTFVLCSFMHVNRLSNLAAHSLARNAELSTCTVYRSVIPDYIRDILCDDVA

SEQ ID NO: 131544 - protein, 70 aa, Oryza sativa
  Clone ID: PAT_MRT4530_33600C.1.pep
RWLSLKLHACVYDKSCLLSNFLVLATTTCEWGDSRSTYSLAPMLVYVICIRDMGKSRRKSTYRKCVQPKL

SEQ ID NO: 131545 - protein, 87 aa, Oryza sativa
  unsure (1)..(87): unsure at all Xaa locations
  Clone ID: PAT_MRT4530_33601C.1.pep
SHVGATGGVVAGDMAEVELCVGCTPPSSHPAPSRDGVGAXGDGGEHMVRLTPPRAEAETTKPSPLLPTAASVSALEPRRRWCVGTRP

SEQ ID NO: 131546 - protein, 57 aa, Oryza sativa
  Clone ID: PAT_MRT4530_33602C.1.pep
CSTVPCATPPLAKKCVENDLIRPSSLCWSCMGIAQIWWHVGWRSPFLLQAFLHAGVV

SEQ ID NO: 131547 - protein, 175 aa, Oryza sativa
  unsure (1)..(175): unsure at all Xaa locations
  Clone ID: PAT_MRT4530_33603C.1.pep
SLSVRSLAPAVYALIPPLALFHGRQTFPEEPVWKSKAPPRCXYFAWLAIRRSCWTADRLRSRGLPHPASCVLCSQCDESMDHILIDCPKSRQLWWLILWVIGRPNLLPFAQHSFVAWWCNCRANIEKRKQRGFDAIVTLTAWNIXKERNHRVFNNESKSWVEVAKLRGDRHGDRH

SEQ ID NO: 131548 - protein, 61 aa, Oryza sativa
  Clone ID: PAT_MRT4530_33604C.1.pep
MVRAACLSFVTKLGGSPSSMANGSGMCGVPLLFPRSRSVPQPQAAWEKSESGNNQLLTLAS

SEQ ID NO: 131549 - protein, 218 aa, Oryza sativa
  unsure (1)..(218): unsure at all Xaa locations
  Clone ID: PAT_MRT4530_33605C.1.pep
VRSLAPAVYALIPPLVRNKRTVMEALANHTWINDIRGGIGVDAXDPRKWESSGRYSAKSAYLALFHGRQTFPEEPVWKSKAPPRCXYFAWLAIRRSCWTADRLRSRGLPHPASCVLCSQCDESMDHILIDCPKSRQLWWLILWVIGRPNLLPFAQHSFVAWWCNCRANIEKRKQRGFDAIVTLTAWNIXKERNHRVFNNESKSWVEVAKLEGEEAALW

SEQ ID NO: 131550 - protein, 488 aa, Oryza sativa
  unsure (1)..(488): unsure at all Xaa locations
  Clone ID: PAT_MRT4530_33606C.1.pep
MERPRPAPVRAFVLLRRGRRRCGGRARVAGSEPAASAFLSFSDPLTGDDGGRVTGGGRGGASRFPVDHEINSRIYLWRGHPWNLEVDAVVNSTNESLDESHSSPGLHAAAGSGLAEECSTLGGCRTGMAKMTNAYDLPARKVIHTVGPKYAVKYHTAAENALSHCYRSCLELLIENGLESIAMGCIYTEAKNYPREPAAHVAIRTVRRFLEKQKSKIAGVVFCTVSSSDTEIYKRLLPLYFPRDRQEEEIAVSKLPADVGDENGETVIDERKITAGPRPAGATDRAATTAPIDLPFDSGLASKRSSFKLDSYLDPSFMSLIKDPDLRRKEQWEKSAQAQKGFNYAKLLGYGDLACPSLSAAEEYSLHSRYLAKANSLNLSXEIAEMKIIYRGGVDSEGRPVMVVVGAHFLLRCLDLERFVLHVVKEFEPLIQKPYSIVYFHSAASLQPQPDLGFMKRLQQILGRKHQRNLHAIYVLQPTLGLRTAILA

SEQ ID NO: 131551 - protein, 512 aa, Oryza sativa
  Clone ID: PAT_MRT4530_33607C.1.pep
MRRGGVKAAAAAEKAREAARAKVWAARASTTVVLWLCCALLLATSRELGRWSGCLTQPLIVVERRFEAVAAAGSERAAASASAAAAARGERAESSASEAAVAALPPKRIYKNNGYLMVSCNGGLNQMRAAICDMVTIARYLNVTLIVPELDKTSFWADPSEFKDIFDVDYFISSLRDEVRILKELPPRLKRRVELGYVRSMPPVSWSDISYYQNQILPLIRKYKIVHLNKTDARLANNGLPMEIQKLRCRVNFAALRFTPEIEELGRRVVRILRRNGPFLVLHLRYEMDMLAFSGCTHGCSNEEAEELTRMRYAYPWWKEKVIDSNAKRNDGLCPLTPEETAMVLKALDIDSSYQIYIAAGEIYGGQRRMAALTSAYPNVVRKETLLPSDLRFFQNHSSQMAALDYIVSLESDIFIPTYDGNMAKVVEGHRRYLGFKKTVLLDRKLIVELVDQYKNGTMRWNHFSSAVKASHSSRMGAPSRRQMIPDKPKEEDYFYANPHECLHQPEELSVL

SEQ ID NO: 131552 - protein, 35 aa, Oryza sativa
  Clone ID: PAT_MRT4530_33608C.1.pep
LIRQSTWWVLMSTLGPGLMTHQVRMICYIYETVSC

SEQ ID NO: 131553 - protein, 104 aa, Oryza sativa
  Clone ID: PAT_MRT4530_33609C.1.pep
PHNEPGRAYDRCYVLCFEAYSDATGAVAALEALHDYRLHERKPDTVVLNINPARSPFRPADDPRDDRLRRTLHCLLPTLLSSSPPCPHPAPSIASTKSRTISAP

SEQ ID NO: 131554 - protein, 60 aa, Oryza sativa
  Clone ID: PAT_MRT4530_3360C.1.pep
GLPVAGVGKVFLEYADVDGATKAKTAMHGRKFGGNPAVALVTGDEGEWWGRGHLISLSLW

SEQ ID NO: 131555 - protein, 315 aa, Oryza sativa
  Clone ID: PAT_MRT4530_33610C.1.pep
MMKRFYSSIGQGVEALHRSLAVGEVGFMSAAFVQQAAALVRSVHAQLLEVVGRLHLPAGERWLDEYMDETSRLWDACLLVRAGASALHAYSAAAAHAIHHLYDHDDDYIHAARAINAPRRHAAGLLQDNRALLHDNILDPASLLLLDHRSPRDLNLNAFNGFRALLYALRNATSFLLAILLSATVSSCLPDHLISTCTPLPLPTAPGYASSMARLRHRVAQEMRALAAPAADGILMYEFRQARAAIDSLKADLDRVVATGTGYAHREDMAERAHLVKGCLAMLSSGAEAVIAELDDLFDDIVEGRKMLSDLCSHR

SEQ ID NO: 131556 - protein, 84 aa, Oryza sativa
  Clone ID: PAT_MRT4530_33611C.1.pep
SFPQLHFDLRLLGTDLQLLFLFGIVLDLGLEGMAVWGSRSDLMRKFRVLGDCEMWLCLVHAEVVSLVENCNDVIESLCVYDRLM

SEQ ID NO: 131557 - protein, 60 aa, Oryza sativa
  Clone ID: PAT_MRT4530_33612C.1.pep
MEKQDTGDGRQREPGWRWTRTQGGDVTWSRKKTAALTGVRRGDDERMKAETASARCTFRG

SEQ ID NO: 131558 - protein, 71 aa, Oryza sativa
  Clone ID: PAT_MRT4530_33613C.1.pep
RDAVNIHDGLPGKEVRGQLSQQQSCFIHRYQKCSWMDGFRFLPFFSFTSVAGLGSQHPRYAWLVTVWIPTS

SEQ ID NO: 131559 - protein, 47 aa, Oryza sativa
  Clone ID: PAT_MRT4530_33614C.1.pep
FFDIIRFSRFQMLSFIFQRSVKLSKKFNFYQIGSMTPFYHCRMVLHD

SEQ ID NO: 131560 - protein, 659 aa, Oryza sativa
  Clone ID: PAT_MRT4530_33615C.1.pep
MMYYRRALKLQAFLDMASESGYKAVADPAEEEKKSQRSLSSQLEAVADMKFTYVATCQIYGNLKQAGDRRATDILNLMVNYPGLRVAYIDEVEERDGDKVKKVFYSVLVKALDNHDQEIYRIKLPGPAKLGEGKPENQNHAIIFTRGEALQTIDMNQDNYLEEALKMRNLLEEFNENHGVRQPTILGVREHIFTGSVSSLAWFMSNQETSFVTIGQRVLANPLKVRFHYGHPDVFDRIFNITRGGISKASCGINLSEDIFAGFNSTLRRGNVTHHEYIQVGKSMVVIIVYVFLYGRLYLALSGLEFAIMKQARMRGNRALQAAMGSQSIVQLGLLMALPMFMGIGLERGFRSALGDFIIMQLQLCSVFFTFYLGTKSHYFGRTILHGGAKYRATGRGFVVRHVRFAENYRMYSRSHFVKGLELMLLLVVYQLYGDVATDSTAYILLTSSMWFLVITWLFAPFLFNPSGFEWQKIVDDWTKWISSRGGIGVPANKAWESRRSTTTPWQQKAFTKLLGLQYRRKGAKNGAADALSRRSHRVDLADRRRYDCLLLACEGGKQGNRGNAYWDIAFVLCIVSTIASLVLVEESPCRPRSLRSCPTVLESVQELLQRPGIDVGLESAQHEIKHGAIVFFMELLSILQSNITQCVQNLGVTGAGLL

SEQ ID NO: 131561 - protein, 209 aa, Oryza sativa
  Clone ID: PAT_MRT4530_33616C.1.pep
MGPDVSMAVCCAFPVLVSLLLVRFAYVMYHSGHMPSKLSASAAGMRSLIVLGSGGHTAEMMNVVTTLQKDRFTPRYYVAALTDNMSLQKAQVYEQSLVRVEVDKEEGVENAQFVQIYRSREVGQSYITSIATTLLATSHAIWIIIRIRPQVVLGLGWSSIFYIESIARVKKLSLSGLLLYKLRIADQFFVQWPQLQQKYPRACYAGRLM

SEQ ID NO: 131562 - protein, 78 aa, Oryza sativa
  Clone ID: PAT_MRT4530_33617C.1.pep
LYPGGPFDPLGLADDPKAFPELKVKGFKTGPPPMFPMFGFFVQAFVPGKGPPENLAGPLAGPVNNNAWGYPPNLVPAK

SEQ ID NO: 131563 - protein, 58 aa, Oryza sativa
  Clone ID: PAT_MRT4530_33618C.1.pep
MACGVGNACRRMGWGPRDPAEYAEDPFRLRRGLRLGTARGSGASGHVAVHPGCFTISL

SEQ ID NO: 131564 - protein, 87 aa, Oryza sativa
  Clone ID: PAT_MRT4530_33619C.1.pep
MAGCGGDGALPTAASTASALPLPLSFLSRWHGVATTAVGGHAGAVLEEEERGSGPAGLWLRRRGAAMLAWMGPAAVEEDSDEKEEAI

SEQ ID NO: 131565 - protein, 132 aa, Oryza sativa
  unsure (1)..(132): unsure at all Xaa locations
  Clone ID: PAT_MRT4530_3361C.1.pep
FFPPPFPKGGRLGPLAKFWATTTAGKGPRLVSAKGNHIARERGARFGGGRVRRWFLFPLPPXXXXXXXXXPPPPWAPLNKGRPKPVPPKLGRPDPPPPTTLEAGSPPPTTLEAKFSPYPHGGNPPTTSKFFF

SEQ ID NO: 131566 - protein, 56 aa, Oryza sativa
  Clone ID: PAT_MRT4530_33620C.1.pep
REKKKKKQEEKIFDNKEKATFRHNQVTCLSDCLDYSSYTCRLQSIEKMGITKDLLL

SEQ ID NO: 131567 - protein, 545 aa, Oryza sativa
  Clone ID: PAT_MRT4530_33621C.1.pep
MASLAAAESHEGAGDTNDGNTDDTTSGDLVEASPYRPIKQTSPNTALDNISGSPLRSIEYRIGRKETAALREMEVAGAQAGILPLLLRHPASLRGSLSLSCGGARRSWAAAAATAEGGGGEEGRGYERVPMDTPGAYRLVDRATGRSVIVWGGTDDVSMPSPAAMAYRPVLEGKSCIIGDQSGSGKTLAYLCPVVQNLRKEEVEGLHRSSPRNPRVVVLTPTAELASQVFYTLNVILPMFSDCFYAKLGKAGVLIGTFLISQKTQLESLDQELDVLIATPGRFLYLLQEGFVQLNNLRCVVLDEVDILYGEESFEQVLHQLITVAPLTTQYLFVTATLPLDIYNKVVETFPDCELIMGPGVHRTSSRLEEILVDCSGDDNEEKNPETAFSNKKSALVKIIEESPVRKTIIFCNKIETCRKVENALRRVDRKASQIKVLPFHAALDQQQRIANIKEFLNKQTADSMFLVCTDRASRGIDFANVNHVVLFDYPRDPSEYVRRVGRTARGASGNGKAFVFAVGKQVSLARRVMERNIKGHPLHDVPCV

SEQ ID NO: 131568 - protein, 69 aa, Oryza sativa
  Clone ID: PAT_MRT4530_33622C.1.pep
MPGLPRPETPNRAPQRLYLTRGASETRTERLPTATARPIHSALEPEPRSAYRSMRVPTLVCRTPPTSRR

SEQ ID NO: 131569 - protein, 237 aa, Oryza sativa
  Clone ID: PAT_MRT4530_33623C.1.pep
MASLCRPAPAIHAFTAVCALPPPALHACRPSPLHHNTVRRHCEPLIPLAAIALPRRAPPTVPGCCTQVVPAQPQRRRFPRCFTPPAPSFSAGVAPEPAYSRGKLYRLPHDPLHPRLLPRPSLAHECVGKGGAAPAQDGFQPCRPRPGRDPPSLVGLACSTTTRDGSTLAVGLPLTGKGAIRVAGDPKFMNTTLGNFENLIKNRFWDTGWASIFVLHAFSSNSSDLLFFFGAGEDPTG

SEQ ID NO: 131570 - protein, 85 aa, Oryza sativa
  Clone ID: PAT_MRT4530_33624C.1.pep
MAAEDITVSGAIGAEQKPNLLEIRLAIDWGVCLLGLLCFALLFACASATLAYHESVARPLACLSQGRAELPCVAGRQGRPCYLRS

SEQ ID NO: 131571 - protein, 71 aa, Oryza sativa
  unsure (1)..(71): unsure at all Xaa locations
  Clone ID: PAT_MRT4530_33625C.1.pep
ERGGEKKIAAANPPPXXSAXFPPPPRSPAAAAAMAXKRKTDAXXWLDEADRTVXSTFXGAATXXSSSTPRS

SEQ ID NO: 131572 - protein, 57 aa, Oryza sativa
  Clone ID: PAT_MRT4530_33626C.1.pep
SQEPSGGNGTCTLHSALTYCDWIRRQPVRHKQRSAYVPPSAPSTAGPTRRAPLMNTY

SEQ ID NO: 131573 - protein, 134 aa, Oryza sativa
  Clone ID: PAT_MRT4530_33627C.1.pep
NQNPNFMAGPPDGQNGQEKGARTMAPAKKGQRTGQKHPRPFFLNKGKKPKKGQTGKKNGLGLAPTQTKKIGGPEKQIKSLPRGGSRKPPPGGEKRPPPGPLPSGREKPPFLPPCPEGPHKHEGLIEGGPPPGGG

SEQ ID NO: 131574 - protein, 105 aa, Oryza sativa
  Clone ID: PAT_MRT4530_33628C.1.pep
MAEAPVEEIEGRSSQRTTTSAAAPVEHAVPGDIAVSSSIQQKVAAATRNGGVLGGAAALFVVLRELRPSISSIARDPREKFDNLTLFFVAQLFKLALVRMISGTI

SEQ ID NO: 131575 - protein, 120 aa, Oryza sativa
  Clone ID: PAT_MRT4530_33629C.1.pep
TFGYVAPEYAMTCRVSDKADVYSYGVVLMELISDKKALDPSFSPYGNGFNIVAWACMLLRQGRAREFFIDGLWDVGPHDDLVETLHLAVMCTVDSLSVRPTMKQVVQRLKQLQPPIREHR

SEQ ID NO: 131576 - protein, 1719 aa, Oryza sativa
  Clone ID: PAT_MRT4530_3362C.1.pep
MAVEASGGTADHACQEAAYLMMARLRERHNYIFHDTAYRYHPSRANGDGVSSFRPTAGENDTTFGHMCAVMRGLDRMHSDLHKATKALNDGKLMRIVALKDEIARLKKENAQLKGLPAPGGVRIRTTPRKTTTAPVRIQLAPRNPPPAAAPAAPPVPPAVPAAPAPAPAPAPASALSFAPASAARGPASGTGGWLSATPSGSRDLSSSSSSGSQSGSGETYLPGSRSRSEGPGCLFGSDDGRYHVPMMVYTRTGNRTTGEGSNGEERVDGVHPNSDSGNGPPPLPENPTLAQVMAHQTQMMAAMMQQMQQQHQQMHQRMMQHVEQQHQHFGPPPPQSKLPEFLGVRPPTFSSTTNPMEANDWLHAIEKKLNLLQCNDQEKVAFATHQLQGPASAWWDNHMATRPPGTEVTWAEFCRSFRKAQVPDGVVAQKKREFRALHQGNRTVTEYLHEFNRLTRYAPEDVRTDAEKQEKFMAGLDDELTNQLISGYYADFERLVDKAIRQEDQRNKMDRKRKAAQFRAHQGSHQRPRFTPGQQGGPTTMIVRQHRPFNPSNFYQGTSDSQNHHGGQPNRGAAPRPPVASAQSGQPAQAKKETEAKPGSCFNCGELGHFADKCPKPRRAGPRFIQARVNHASAEEAQAAPEVVLGTFPVNSIPATVLFDSGATHSFISKKFVGMHGLIREELSTPMRVHTPGNSSTSVQFSPSITIEIQRSPVLANLILLESKDLDVILGMDWLTKFKGVIDCANRTVTLTNEKGETVVYKSLVSPKKGVSLNQIETEIPVDTVEKNLRKLDDIPIVCEYPEVFPEDLTTMPPKREIEFRIDLAPGTAPIYKRPYRMAANELTEVKKQVDEQLQKGYIRPSTSPWGAPVIFVEKKDKTKRMCVDYRALNEVTIKNKYPLPRIDDLFDQLKGAKVFSKIDLRSGYHQLRIREEDIPKTAFTTRYGLYECTVMSFGLTNAPAFFMNLMNKVFIEFLDKFVVVFIDDILIYSKSEEEHEQHLRLVLEKLKEHQLYAKFSKCDFWLTEVKFLGHVITAQGVAVDPSNVESVTKWTPPKTVSQIRSFLGLAGYYRRFIGNFSRIARPMTQLLKKDEKFKWTAECDKSFEELKKKLVSAPVLILPDQMKDFQVYCDASRHGLGCVLMQEGRVVAYASRQLRPHEGNYPTHDLELAAVVHALKIWRHYLIGNRCEVYTDHKSLKYIFTQPDLNFRQRRWLELIKDYDMSIHYHPGKANVVADALSRKSYCTALCIESMCEELRQEFEHLNIGIVEHGFVAALEARPTLVDQVRAAQVNDPEIAELKKNMRVGKARDFLKDEHGTIWMGERLCVPDDKELKDLILTEAHQTQYSIHPGSTKMYQDLKEKFWWVSMRREIAEFVALCDVCQRVKAEHQRPTVHTTYTGKRLAELYLSRIMCLHGVLKKIVSDRGSQFTSKFWQKLQEELGTRLNFSTAYHPQTDGQTERVNQILEDMLRACALDFGGAWDKSLPYAEFSYNNSYQASLQMAPFEALYGRKCRTPLFWDQTGERQLFGTEVLAEAEEKVRIIRERLRIAQSRQKSYADNRRRELTFEAGDHVYLRVTPLRGVHRFQTKGKLAPRFVGPYKILERRGEVAYQLELPSNMIGIHDVFHVSQLKKCLRVPEEQADSEHIDIQEDLTYVEKPVRILDTSERRTRNKVTRFCRVQWSHHSEEEATWEREDELKAAHPHLFTSSSESRGRDSV

SEQ ID NO: 131577 - protein, 83 aa, Oryza sativa
  unsure (1)..(83): unsure at all Xaa locations
  Clone ID: PAT_MRT4530_33630C.1.pep
TDSSSPPXXPPPPPPAXAXSSCXRXTXKHKPAHXCVRGXEXXKGNRVEXVXXXGDVGGGGGXGXGKXRERGXXCWMGGGGGGG

SEQ ID NO: 131578 - protein, 93 aa, Oryza sativa
  Clone ID: PAT_MRT4530_33631C.1.pep
CSPVYTPCPLMLGPCGSSVPHVSVQGPHLRPCNALLHYQCLLCCVIAVACMLVGCPSIRATNMGSAGKGGTCSVRRPNDQRRHQVHRCCHEYT

SEQ ID NO: 131579 - protein, 79 aa, Oryza sativa
  unsure (1)..(79): unsure at all Xaa locations
  Clone ID: PAT_MRT4530_33632C.1.pep
VAADAFHAELLLAATDPCRRHLPRRAAPRRHRSLPPTPSTPSCSSPPPIPPPEXPFVARSPPPPSAPICSPPPPIPIAA

SEQ ID NO: 131580 - protein, 130 aa, Oryza sativa
  Clone ID: PAT_MRT4530_33633C.1.pep
ARGARPPPPRSSFGHLRRYGPLLRPPSALLGHVNKTTATSSRLNDAAGGATTEDDEADTEDHGGHARPPPLSPAALACLAGRPCLLSPPLPPLSPTATAFAYHHRACLLRLPPPPPRPLSPAVAPRVSAH

SEQ ID NO: 131581 - protein, 109 aa, Oryza sativa
  unsure (1)..(109): unsure at all Xaa locations
  Clone ID: PAT_MRT4530_33634C.1.pep
SSRFKDAAGGASTEDDEADTEDHGGHARPPALNPAALACFAGRPCLLSPPLPPLSPTATAFACHHRAXLLRLPPPPPRPLSPAVAPRVSAHRRRREKRRKGKKQGMWAH

SEQ ID NO: 131582 - protein, 301 aa, Oryza sativa
  Clone ID: PAT_MRT4530_33635C.1.pep
MDAPVITLLVFLVAVAAATAAAEMPRMEHPRKGDGSLSLLAVGDWGRRGAYNQSMVAAQMGIVGEKMDIDFVISTGDNFYKNGLTGVDDKAFEESFSDIYTAKSLHKPWYTVLGNHDYRGDALAQLSPVLRKVDSRWICIKSFVVSAEIADFFFVDTTPFVLKYWTDPKNSKYDWRGVSPRETYIANVLKDLEDALEQSKAPWKIVVGHHAIRSVSQHGDTKELLEHLLPILKQDSVPDERAGSKAWRGVQTANTDKVEFFYDGQGFMSLRLTAAEASLAFYDVAGKILHTWMVAKPATGY

SEQ ID NO: 131583 - protein, 191 aa, Oryza sativa
  Clone ID: PAT_MRT4530_33636C.1.pep
MLPRSQSIFHLGEEGGVVHCHRGGNHLVAASMGMGGAGGHYGSGTRGGGRRARERERLVVGLQIIVHSQHHHGRHAHAHAASVVLKQMVRPRAAAAAAAGRHGAVSCSFLKACSLCRRELSPTKDVYMYRGDQGFCSEECRWQQIAVDEAREREAAAAAGRPERRGLARHHSPHRAAAPVRGRPRKTLAVA

SEQ ID NO: 131584 - protein, 391 aa, Oryza sativa
  Clone ID: PAT_MRT4530_33637C.1.pep
MGPHPLFLPLSSLLSSSSMGRDARGDGWRERPRRRRRQAKKSGAVVAGERGGGGRERRQRRAKQAGAAGEAGKGGRVERRRPRVPTVVLRVRLVVLCGCAAGRVVEAAARRGGLVHVAEQSGRRAEEGAATAEVAEGGAWRRWASSAGLHRQPSRHRPRRRPSHPHPRRAPRTAGSPCQLHPLRVPVRILALSVSDPDVPLSPAVDESYTLSVDKSYTLSPPCSSARPPSCSFALPAAVLVRSLAGRARLLPLGCRADPPPRSLAARPSLLRPLRRPPHRRQEAARPRGVGKLTGLPTPLAALASSLSLRARRRPPRLLPLLAHSPPASSFPPSPHALALATALSTPSTLSLFLVRLPHLVIDDDDNHINMSTSFTSALSTAIATTHQHRR

SEQ ID NO: 131585 - protein, 115 aa, Oryza sativa
  unsure (1)..(115): unsure at all Xaa locations
  Clone ID: PAT_MRT4530_33638C.1.pep
TTPQVSPRPQQATELNRRSFSEPGAECTGSSSTPPKFLLESYTRRGRSQXSAKLPGTPPELLLTLYLFXMYKRYNRASYNSAQSCVFRSVMESSFYSYHMTVMAMVNVLTTLQPS

SEQ ID NO: 131586 - protein, 173 aa, Oryza sativa
  unsure (1)..(173): unsure at all Xaa locations
  Clone ID: PAT_MRT4530_33639C.1.pep
DPRAAGAYCCMEESQLSHFRTKSFQQKYRTAPLKEIHDTIHRGIIEGSEAGQRIIKPSSYVGGPRYLYQNYLDCVALCRKYGCPDLFITFTSNPLXQKLLXALALIPGQHSXEQPDIVDRVFHMKLHLFIDDITKNEFFGPITAGLIHYFNSRHTPFIYLSIYFKYVFHFIYL

SEQ ID NO: 131587 - protein, 360 aa, Oryza sativa
  Clone ID: PAT_MRT4530_3363C.1.pep
MSQTELPESTSPSESAPAMASTTPAPYVVEDCGPNLQLFSDGTVIRFEDYNILPPPVLPPALSTVQWKDVVYDAGRGLKLRVYRPPAATVAGEKLPVLVYFHGGGYFIGSFEMDNFHACCLRLAHELPAVVLSADYRLAPEHRLPAAHDDAATAMSWVRDQAVASGDAADPWLAESADFGRVFVSGDSAGAGIVHHVALRLGSGQIAVDPARVAGCALLFPYFGGEERTRSEAEYPPGPFLTLPFSDQGWRLALPRGATRDHPLANPFGPESPAMDAVALPPLLVVVAQLDLLRDRDVDYAARLRAMGKQVEMVEFEGQHHGFFAVEPLGDAGSELVRVVRRFVYGNGGDAAAAAAAASK

SEQ ID NO: 131588 - protein, 931 aa, Oryza sativa
  Clone ID: PAT_MRT4530_33640C.1.pep
MTPEQLFDLSVKYFEWAEDNAIKASESASFQGGVYESLVHKPRVFTWTGYRLFIGASEAAIIKWKREEEYSEVMEFVESVINEQKFQLAANGVINASFIGKDLGIDKPASINIENSAASASTAVATTEEAMKEAAQQFQPNWHHLYLCHEVEEIIAGRRGNTIFNVTPGSGKTEVFSIHLPVYAMLKCKKVRNLNVSFADSLVKRNSKRVREIISSNEFQELWPCKFGTSKDEEMQVLNEDGKVWFELISAAAGGRITGSRGGYMTPGFSGMVMLDDIDKPDDMFSKVKRERTHMLLKNTIRSRRMHNETPIIAIQQRLHAQDSTWFMMNGGMGIEFDQISIPALVTEEYGKTLPDWLQPYFERDVLSSEYVELDGVKHYSFWPSKESVHDLLALREADQYTFDSQYQQKPIALGGSVFNSEWWTYYGNSLDADEPDPGKYDYRFITADTAQKTGELNDYTVFCLWGKKNDKVYFIDGIRGKWEAPDMERQFTAFVNQAWRHNKSMGVLRKIYVEDKASGTGLIQNLRKKTPISITPLQRNKDKVTRAMDAQPVIKAGRVVLPEEHPMLAEIIAEHSAFTYDDTHPHDDIVDNFMDAANIELLTIDDPIERMKRLAGMGCQLTALFIGGNMKIVKHDGYNDIFNGGADGSPKPFFMSDASYHVGSFYNDNATAKRIVDVIPEEMVTAGFKMSGVKDEKEFKSLWDSYKIDSSLVDVLCWSRLYGGAAIVAIIKDNRMLTSPVKPGAKLEGVRVYDRFAITVEKRVTNARSPRYGEPEIYNVSPGDNLQPYLIHHTRIFIADGERVTPQIRKQNQGWGASVLNKSLIDAICDYDYCESLATQILRRKQQAVWKVKGLAEMCDDDDAQYAARLRLAQVDDNSGVGRAIGIDAETEEYDVLNSDISGVPEFLSSKMDRIVSLSGIHEIIIKNKN

SEQ ID NO: 131589 - protein, 78 aa, Oryza sativa
  Clone ID: PAT_MRT4530_33641C.1.pep
MRQHVVDDGSVRRRMEAEVPSYSRDWEFAAVVDMNLASSTSPSASSFSSPSASPPHLDSGNSYRSGYGNVIGSMTVWV

SEQ ID NO: 131590 - protein, 91 aa, Oryza sativa
  Clone ID: PAT_MRT4530_33642C.1.pep
MDLWLSFHLFIILVTVAPGNMTGVTGWRKSRSEGCFVPRRSPAGGPRARGWARSEPAVARASPGAWCLSPSVGDVLRLRFRPPAFLAAFVR

SEQ ID NO: 131591 - protein, 674 aa, Oryza sativa
  Clone ID: PAT_MRT4530_33643C.1.pep
MVRKNGWQLPAHTFQIIAITVFFLLVVAFYAFFAPFLGKQVLEYIAFGIYTPVAFVVFILYIRCTSINPADPGIMSKFQNGFRNAPTSGTGLQDTNLPGRGDVATGTNSPTSTFKSSLDGRSNHAGLAAGDGNNLSSQPPRSSSCSLVGGLICALFVEEDCRTLVDSEHQADGEDALFCTLCNAEWLNNCVGRKNYFTFLALMITSLLWLAIEIGVGIAVLVVCFVNKNSESIIQDKLANGLTRPPFATIVAIFTLLSIIACIPLGELFFFHMILIRKGITTYEYVVAMRAMSEAPQEEEEEDGVNIVYSPTNSATTGFSGGSSLGLPYKGSWCTPPRIFVDQDEVIPHLEAGMVPSTIDPDTAGNAERANRAKKQVKISAWKLAKLDTNEAMKAAARARASSSVLRPVDARHRGGHDAGDLSSSGNGSVRSSVSAAAKEQRRRASSLPSSCAQSVASQDEYEQSGSSVMSSPVRLHKLAPPPLPAAHNVPPRPPPPVNAAPEAAIPRPPPPVPPATRISNPMFQSATSYVRENRRASVVWDQEAGRYVSVAPAPATARPGGGGGGAEQPAARAPPFLANPGGEREPLSAARSRNNPAAPAPTNAAPSSSSTLPSERLTYSGQSIFFGGPLLGGAAAAGEPRRDEAAGTRARGGESFPVFAPGTFQKKPPPFRR

SEQ ID NO: 131592 - protein, 56 aa, Oryza sativa
  Clone ID: PAT_MRT4530_33644C.1.pep
LTVHCKVWSRFLLKMRHILFYIKRRQRPDCSKKKYDSTNIYCNETISLYMLLNPSC

SEQ ID NO: 131593 - protein, 66 aa, Oryza sativa
  Clone ID: PAT_MRT4530_33645C.1.pep
KHKEAKIPVKQPQIFKDSSSRCRGIREGKTALAYHFLLAISWLWGKKNHEKPAEPNPAALSPIPTD

SEQ ID NO: 131594 - protein, 551 aa, Oryza sativa
  Clone ID: PAT_MRT4530_33646C.1.pep
MASPAKRARPPASSPVDPPASPPAPEDPCVLLRRSWELASVLHFLRVFEPVIEGNLGLSAEEIETALIANNHDLARIHIALIKVFCKKGKNFISLSLSFLFAITDCNSHVYQGIPPTIKNLKVDDGWITATAKKLSDWWTWVAEGANPFKINPGKEIDTYKQQDPIKRLLILKALCEVRSEQNDAVWYVNDEMKRGVDISNFRKEKLGSSSNGTIYWYDGDSTIGHRLYSEYVTLDFKRNLKGKNGRLTKPVINIQWETVATNLDEFVEISEKLCSKGRPESAIGEHLKTEIIPDVEKLQKKKERDLKRQQKKDELLAYATSFQTRSLRERRPVSYNYSDYDRSIKEAIKAAAKSKESDPQEAGKKEKRASHQGNKGANGGSDIGPEQKEDGQEDAGGSDVNPEQDKDGGQEDVESLDDLSSDEDEDRDYNGKDDDSSGSDGENDVGSDGENDAYDPNKGDTEEEEVFVPRKRTRLASRRFDKPPQGLRRSRRNMKNDEDVMRPGQLTPRSMTKKTMRQRPTSISKQFSLSGSEDDREMIVADSEEESGSP

SEQ ID NO: 131595 - protein, 286 aa, Oryza sativa
  Clone ID: PAT_MRT4530_33647C.1.pep
MATAATASATAATRFTRLAGVGLRRTARLPTAVRFQRRVLATTALLRTAELRPKEQGLPETLDYRVFLVDGGGRKVSPWHDVPLRAGDGVFHFVVEIPKESSAKMEVATDESFTPIKQDTKKGNLRYYPYNINWNYGLFPQTWEDPTLANTDVEGAFGDNDPVDVVEIGERRANIGDVLKVKPLAALAMIDEGELDWKIVAISLDDPKASLVNDVDDVEKHFPGTLTAIRDWFRDYKIPDGKPANRFGLGNKPTSKEYALKVIEETNESWEKLVKRNIPAGELSLA

SEQ ID NO: 131596 - protein, 516 aa, Oryza sativa
  Clone ID: PAT_MRT4530_33648C.1.pep
MDPLKGVEESSLVTKGEMKSLLQDLIATGMMGPRIGGASPEIKLEQMPNEVKLEESQNYLSWSRRTRLMLRAKGVEHYLEETCIEPDDKLSVDWKVWNSTNSTVATWLMTSVAPSIARMVETISNASTVWKTLSKMYSGEDNAMMMVEAQDKVENLKQEGRTVQEYASELQQLWADLDHYERGTGRRIGTGVRRNGLWYINNEEVGLAAVAGNAEEIILLHCRLGHPSFDNMTRKNDGDQIREFAREQVEESEQPEHPVQESSPCLSPPTPLPLIETSGDVPPILEQVELPLTQRRETRSNAGKPPIRLGFEHISSKHDIANYISYSHISPAYKTFIASLQAVPVPKDWRCAKQDPRWKDAMKEELHALQENKTWELVRLPPGKRAVRWKVDRYKARSIAKGYSQTYGIDYDETFAPVAKMGIVRALVSSAVNFGWPLHQLDVKNAFLYGDLQEVYMEIPLGFGNNQTVGKEMFGKTFEVKDLGPLRYFLGIEIARSSKGIVLSQGKYILDLLAET

SEQ ID NO: 131597 - protein, 103 aa, Oryza sativa
  Clone ID: PAT_MRT4530_33649C.1.pep
MSSSSLSKKASSFVVTASMSAVEALKDQAGLCRWDYALRSLYQRAAAAKQVTGRAVPVSLSSQTGGAAASSSPAAACGRAARSKRSEEEKMQKAYHLVCWGPN

SEQ ID NO: 131598 - protein, 53 aa, Oryza sativa
  Clone ID: PAT_MRT4530_3364C.1.pep
WRWRTARSGFQRRNPTGEGWIGWPARRRTRWRLRRGSNLVTLFLVLLSLVSRM

SEQ ID NO: 131599 - protein, 191 aa, Oryza sativa
  Clone ID: PAT_MRT4530_33650C.1.pep
MSLIHHGSKLSCSPLANPDELNDTHRLSVSCLPAESGKGKRLMMMRMQRSTPKVNRDRVQPDRSSWATTCRYSSSLPFFPAIPVNLRLISPWLLLHSWYRFRGRLCRLVGSLVCLPITFWASPGTVRRRCRHVGGGSRTVSPTTWSVRAENLTQEDDGVAVLAMDQWTTKRDETGPAGPGRAREYWTHENP

SEQ ID NO: 131600 - protein, 123 aa, Oryza sativa
  Clone ID: PAT_MRT4530_33651C.1.pep
KSPRSITHTHTIKVHTYMHCCNCNCRVGAWLLQVYTWYRWFGTHSQIGVRCASLFAGDRTLAGRYGPTALFRRTGFGRPWFDRGFLDGAPLCRLTNVPWTEGSPNHGRTIGEGRPFLELPFTF

SEQ ID NO: 131601 - protein, 119 aa, Oryza sativa
  unsure (1)..(119): unsure at all Xaa locations
  Clone ID: PAT_MRT4530_33652C.1.pep
TSLWARVTPHTRCSRRCRAPWERRRPRFAPPPPPPCRAPPPRRPNPLQPPRXAPPSTSNRSTEPAPSXSSFAPPSPWPSRRPPPEPPSTTAPRRHRPPASPPPSHQSPGAPSSPSSQLL

SEQ ID NO: 131602 - protein, 145 aa, Oryza sativa
  Clone ID: PAT_MRT4530_33653C.1.pep
PRVRKELHEDIMVPDYCYAGGGELQSLNAWFGPHGTVTPLHHDPHHNILAQVLGRKYIRLYPASISEDLYPHTETMLSNTSQVDLDNVDLKEFPRVENLDFLDCILEEGDLLYIPPKWWHYVRSLSISFSVSFWWRSTVVPSKGS

SEQ ID NO: 131603 - protein, 60 aa, Oryza sativa
  Clone ID: PAT_MRT4530_33654C.1.pep
GDTGKMGSRLTSSLGWKDTFKAFQVRTTYFFDCTQNLQSLAKPMEIRNRRITDCRRYSYA

SEQ ID NO: 131604 - protein, 109 aa, Oryza sativa
  unsure (1)..(109): unsure at all Xaa locations
  Clone ID: PAT_MRT4530_33655C.1.pep
GGSVPCRQVVRRNHRASYERLQHDYFSPNPTYGPVLFRRXNDVVAHDDYFVLKRNAASTMGILPLVKIATTLRMITNGVAADTQDEYLQIADSTTIVENFGDEYLRYPT

SEQ ID NO: 131605 - protein, 86 aa, Oryza sativa
  Clone ID: PAT_MRT4530_33656C.1.pep
MGVGERLTRGRWWGQKAAKWMEHALPRVLGRKDNVFHHECTCIENIRMPAVPYIEDADAGVLQDHVEDHDDALPPDLSGQIVDEQE

SEQ ID NO: 131606 - protein, 103 aa, Oryza sativa
  unsure (1)..(103): unsure at all Xaa locations
  Clone ID: PAT_MRT4530_33657C.1.pep
XNSXXXXKXAXXXXVXXXXLKXAXRXTXRAXXXFXQWXIHLXTXXFRXXXLSINLXXLHEGXXSLXCACADTMSPLYXXXSGXDLPTPIHXAKXCXLEXRXXX

SEQ ID NO: 131607 - protein, 74 aa, Oryza sativa
  Clone ID: PAT_MRT4530_33658C.1.pep
MKGAKCKGADKPDAKLAAKSKDAETPAAKGRKGKASKDPNKPKRNPSAFFGFMEEFRKESKERNPKNKSVAAAR

SEQ ID NO: 131608 - protein, 103 aa, Oryza sativa
  Clone ID: PAT_MRT4530_33659C.1.pep
MAGRRERLGADAAPGVRRRSRRCGWRLVAIASLVVSTVAWGEWGIGSSVGNAGASDRFIGLHTKACVRCRLGIPHTFVGHLSGTGAASITVVVLTVGFSLAHS

SEQ ID NO: 131609 - protein, 1213 aa, Oryza sativa
  unsure (1)..(1213): unsure at all Xaa locations
  Clone ID: PAT_MRT4530_3365C.1.pep
MINTRNGSRAAGEGSNGEERTDGGHPNSASSNGPPPLLENPILAQVMAHQTQMMEAMMQQMQHQHQXMHQRMQQQAEQQQQQFGPPPPLSKLPEFLRVRPPTFSSTTNPMEANDXLHAIEKKLNLLQCNDQEKVAFATHQLQGPASAWWDNHMATRPPGTEVTWAEFCCSFRKAQVPDGVMAQKKREFRALHQGNRTVTEYLHEFNRLARYAPEDVRTDALKQEKLLAGLDDERTNQLISRDYADFEKLVEKAIRQEDRRNKMDRKRKTAQFRSNPRSHQRPRFTSGQQGGPTIMIVHQHRPFNSSGFHQGASGSQNHQGGQPNCNAAPHPPMAPAQSAPSAQAKKETGAKPGSCFNCGEHGHFADKCPKPTRAGPRFAQARVNHASAEEAQAAPEVILGTFPVNTIPATVLFDSGATHSFISKKFAGVHGLRKEELSTPMRVHTPGNSSTSVSYSPSVLIEIQRSPFLANLILLESKDLDVILGMDWLTKFKGVIDCVNRTITLTNEKGEAVVYKSPVSLKQGISLNLIEVKNPVATEEKSSRKLEDIPIVCEYPEVFPEDLTTMPPKREIEFRIDLAPGTAPIYKRPYRMAANELVEVKKQVDEQLQKGYIRPSTSPWGAPVIFVEKDNTKRMCVDYLALNEVTIKNKYPLPRIDVLFDQLKGTKVFSKIELRSGYHQLRIREEDIPKTAFTTRYGLYECTVMSFGLTNAPAFFINLMNKVFTEFRDKFVVVFIDDILIYSKSEEEHEQHLRLVLEKLQEHQLYAKFSKCDFWLSEVKFLGHVITAQGVAVDLSNVESVTKXTPPKTVSQIRSFLGLASYYRRFIENFSRIARPRTQLLKKDEKFKWTAECDKSFEELKKKLVSAPVLILPDQTKDFQIYCDASRHGLGCVLMQEGRVVAYASRQLRPHEGNYPTHDLELAAVVHALKIWRXLIGNRCEVYTDHKSLKYIFTQPDLNLRQRRWLELIKDYDMSIHYHPGKANVVADALSRKSYCNALCTEDMCKELQQELEHLNLGLVEHGYVAALEARPTLVDQVRAAQVNDPEIAELKKNMRVEKARDFHEDEHSTIWLGERLCIPDDKELKDLILTEAHQTHYSIHPGGTKMYXQDLKEKFWWVSMRREIAEFVALCDVCQRVKAEHQRPAGLLQPLRIPEWKWEEIEMDFITGLPRTSSGHDSIXVVVDRLTKVAHFIPVHTTYTGKKLAELYLARI

SEQ ID NO: 131610 - protein, 71 aa, Oryza sativa
  Clone ID: PAT_MRT4530_33660C.1.pep
MDSAILQRKCPDYHEGNGLFGLIRSKSCQNERHGHGCQTFIGYGRSAEDFTSRANASAASALAASAAGGGR

SEQ ID NO: 131611 - protein, 71 aa, Oryza sativa
  Clone ID: PAT_MRT4530_33661C.1.pep
ACLLVPRRSWIRRCPSGSPCWAPMPVAPRAPVLMYSLSPSRSLSERHPHISGMYLTKRERTRIHVRGRTRG

SEQ ID NO: 131612 - protein, 93 aa, Oryza sativa
  Clone ID: PAT_MRT4530_33662C.1.pep
GSQEGEVPPTVGCCRRAIAGSPPMCARCRGRCARTPLRRRTAVAGSSPMRAGDAPFRRCASAPLLLSGEERGEERTSGVMQRSSVIFFFFSRP

SEQ ID NO: 131613 - protein, 133 aa, Oryza sativa
  Clone ID: PAT_MRT4530_33663C.1.pep
MGSRQPAGSSLVAPPPPVTAAIAAKWNRLLAAAAAAASIVPHGHHLPPPPKPPDPTSISDEAPHCHRAAQLPPRRARESPISVRSLPFFTGSGTNRRSCSINNEAFVRIQSTTIYLNIYIPAMMHIREIERDR

SEQ ID NO: 131614 - protein, 156 aa, Oryza sativa
  unsure (1)..(156): unsure at all Xaa locations
  Clone ID: PAT_MRT4530_33664C.1.pep
ALVRARLHRWPMGRMSPXAIRCLCRSGFGHADSECNSAXWKCLLHRHRSPVRSGPCGSICIHRYPRSTVPEGXSSCDRSPWVASAVALAGGRSRRRRSYRPLTPWYGHPRSVRSVKLLERVVKCCWXLFVXCVRPCVPVPSRSCKCCCCRWSCRVC

SEQ ID NO: 131615 - protein, 100 aa, Oryza sativa
  Clone ID: PAT_MRT4530_33665C.1.pep
LKRSISETAHNCNPGITKAHTLHCGSTEHSTNTVSSQRQAQVPILSAGPHKNTTAIFKPFQCHYKTTWERFNAPRLREESMLLLDVHGNDITLSQHSELS

SEQ ID NO: 131616 - protein, 132 aa, Oryza sativa
  Clone ID: PAT_MRT4530_33666C.1.pep
MVSTIKVHNVSLEASEQDIREFFSFSGVIVHVEMQSGDERSQFAYITFEDDEGAERAMLLTGATIVDMSVIITPATNYQLPAAVLADIESKNAGGMESALRKAEDAVVSMLAKGFVLGKDALERAKSFDEER

SEQ ID NO: 131617 - protein, 523 aa, Oryza sativa
  Clone ID: PAT_MRT4530_33667C.1.pep
MLLGAMSGGGVVVAVAVAYAALAVVALRMALSYKSALYAVRRLWRWADEWAQAYQYHEVPRFACDGGGAENPLFRKAAQYVAVLPSLEDADAASVLSSASRTNGGFSLQLGPGHTARDAFLGARLAWTNRGDVLVLRVRRHDRTRVLRPYLQHVESVADEMELRRRELRLFANTGVDGSTGTPRWASAPFTHPATLDTVAMDPDLKARVRADLENFLKGRAYYHRLGRVWRRSYLLYGPLGTGKSTFAAAMARFLGYDIYDVDLSRAGSDDLRALLLHTTPRSLILVEDLDRFLQGGGAGDAEARAARVLSFMDGVASCCGEERVMVFTMRGGKEGVDAAVVRPGRLDVHIHFTLCDFEAFKALASNYLGLKDHKLYPQVEESFHGGARLSPAELGEIMLANRSSPSRALRNVITKLQHVSGAAAAPRPPHRRNTSWSGAGGPWEEQAARASADAADGGEEAITATAACGVFAKDAPMREFKKLYGLIKIRSRKEGSSGFMPLHGGEAPSPANGRGSEHDKER

SEQ ID NO: 131618 - protein, 390 aa, Oryza sativa
  unsure (1)..(390): unsure at all Xaa locations
  Clone ID: PAT_MRT4530_33668C.1.pep
VSLEASEQDIREFFSFSGVIVHVEMQRXLTFKDSSRRRIYGSNLFAMLFSGDERSQFAYITFEDDEGAERAMLLTGATIVDMSVIITPATNYQLPAAVLADIESKNAGGMESALRKAEDAVVSMLAKGFVLGKDALERAKSFDEKHQLTSTATAKVTSLDRKMGLSQKFSTGTLVVNEKMKEMDQKYQVAEKTKSALAAAEQTVSTAGSAIMSNRYILTGAAWVTDAYSKVATTATDAGAKSKEMVVAEQDDKHQDDKPAKDYSPISSKEFVQEGKHQEGERPKKNMPEKPEMGKRELENQEAAIPTAHAQENAQITGKEHKHQEADLPKADIPGSFTMAAKSEKHRNPYSELSKTHIPGSPATIPVCTATTDVNSTKTPKKPENAEGFI

SEQ ID NO: 131619 - protein, 349 aa, Oryza sativa
  unsure (1)..(349): unsure at all Xaa locations
  Clone ID: PAT_MRT4530_33669C.1.pep
LIVSASGDSHSDDDRPFSGGGRVPVPPFSWRRLWLFTGPGLLMSVAFLDPGNLEDDLQAGAAAGDALLWLLLXTTAMGLLVQLLSARLRVATGRHLAELCRGGYPDWAHRALWLVAEVAMVSADIQEVIRSAVAIRILSHGFMPLWAGVVITAGTSSTITGTYAAVAVWFNTSDSALDVLNEWLNVLQSIQIPFALIPLITLVSKEEVMGVFKIGPRTQVCTPGVIPLLQLLDGCHRRQGLSSSTDVAIFQSSRKMGVGVVIRDHNGDCLYACSELVPGIMMPETIEAIAIQRALSIDWEDDGQQDSLFHVTGQTGLCDLPAVRPAASGGQTGSGDSEQQLISAVRPGI

SEQ ID NO: 131620 - protein, 112 aa, Oryza sativa
  Clone ID: PAT_MRT4530_3366C.1.pep
ATQRLVQRRLHDRQRALAGALDMVLTITPTSTGAALVLALLMAKLKGMVLRMPPPKPSPDELVVHLFKQTFNKAVNQAVHDRFRDRLKGMLKGFDEAFDVPDLSGSYRCCTM

SEQ ID NO: 131621 - protein, 202 aa, Oryza sativa
  Clone ID: PAT_MRT4530_33670C.1.pep
LVCPVGPRPVAEQSRYFGLLGAVALSRGPTPVALRQALSGKVGCPACAGSSGGLPRFVGPPRPHAKSPARAPRALLHNCSTKHGGNSTRDAPSTWTYRNNETNCADRTVPRTAPQPNDHVDCRVSGFAEATNFNDQAGRHQGFRPSSFGTTNHCQGQIIDHAVAASKHAEVNNSMKSRDVNLNSRLNTISFPMPTANNETST

SEQ ID NO: 131622 - protein, 200 aa, Oryza sativa
  unsure (1)..(200): unsure at all Xaa locations
  Clone ID: PAT_MRT4530_33671C.1.pep
GDNEAVCSSCLFSFCTLCRDRRHVGDKFRYTLWXKRQEAGKLQGDQHKFLEELRSIKAIMKDSKMCPRCKMAIHKIEGCNKMSCSNCGQYFCYQCNSAIEGYEHFRGSCKLFPQEELDRWNMQMNPRVQRQNVAQVQAEMFRQFAHPCPTCRQPCPKMGNNNHVFCWACQKHFCALCRKTVHKTSQHFGPKGCKQHTADP

SEQ ID NO: 131623 - protein, 309 aa, Oryza sativa
  Clone ID: PAT_MRT4530_33672C.1.pep
VGSSGGKGDPIGTKKFPSFASGRNYLCADRANPLSVSRTARIAHHHLLKSPAQATSAVHTNHRGLDQGDGATLDQNNNGAQDKYQGQSERCETQMTKEAGNHLRPSCMSSFSMRTVHEWWPNSILAGRLFRWLEESCDDDITGVWFKHDKPTSIEISAKEIKMQVIRGGILHADLCSALIRLYQQLDAKMNTNPCGQRWRHFFLPQFAKALMFERNFSSMKAVSDMFDQHISGYKIQNCQLLISPVQLASDTWACYIWDMGEEANAHFGPCLATPGGLRSLTRPSQVKKGDRNGSKQASEQHLCRPTTH

SEQ ID NO: 131624 - protein, 134 aa, Oryza sativa
  Clone ID: PAT_MRT4530_33673C.1.pep
MEDHQGGGVGRASNKIRDIVRLQQLLKRWKKLATMAPGGRSGVPKGSFAVYVGEEMRRFVIPTEYLGHWAFERLLRDAEEEFGFRHQGALRIPCDVAAFEATLRLVAAGNGNAKAKDDAAAMCSCSSDTEILCR

SEQ ID NO: 131625 - protein, 99 aa, Oryza sativa
  unsure (1)..(99): unsure at all Xaa locations
  Clone ID: PAT_MRT4530_33674C.1.pep
RHKYGKTANPFLQXGGFKMKNNQVGEKLGLGGQQFPYQGINIVQAKGKKLKLQRFGDFYFEGKRGQAQALLGFKGPSKKGIPPRDYGGPRTITPLGGVL

SEQ ID NO: 131626 - protein, 142 aa, Oryza sativa
  unsure (1)..(142): unsure at all Xaa locations
  Clone ID: PAT_MRT4530_33675C.1.pep
MSRIRLINEWAKNAEMTXPIGPKFTSLHMGAKEEATSQNLGWLGRPMVRSNPPQRRSIQGXDGWCGWLPYSDXRDIRIVFGNLSMVFRLLDIIIWGYMLXKRGGPLMVTAQYIISALLLGIIFLVTSLRNTNKFMLVLRSRS

SEQ ID NO: 131627 - protein, 151 aa, Oryza sativa
  Clone ID: PAT_MRT4530_33676C.1.pep
MATSPMLFLVSLLLVLVAAATGDEASPSNAAAPAAPVLVGGRTEIRDVGSNKAVQSLGRFAVAEHNRRLRHGGSGGPADPVPVKLAFARVVEAQKQVVSGVAYYLKVAASARDPRGGAAAGGDRVFDAVVVVKAWLKSKELVSFTPASSTK

SEQ ID NO: 131628 - protein, 127 aa, Oryza sativa
  Clone ID: PAT_MRT4530_33677C.1.pep
MVQRTLEVRGYADIYAWIGIAGAVEGGGVGCGMVEDGVVGHGAVEDGGVERGAVEDSGGRHAVEAEAAAAARWRAEAAAAARWRAEAGHGAMEGGGGCSDAVQAGGGGGCSDAVQAGGGGGAVRQWW

SEQ ID NO: 131629 - protein, 102 aa, Oryza sativa
  Clone ID: PAT_MRT4530_33678C.1.pep
QARSSLPLISSAEGWGHLGGCRTAEEAAAEEEPDLAEAEVSSAVPSRCGGGCLDGQRMAASKVSGIRRRRRSPTSQRKRSAARCQATASAVVAGVGCFHGRR

SEQ ID NO: 131630 - protein, 48 aa, Oryza sativa
  Clone ID: PAT_MRT4530_33679C.1.pep
NLSVGSFTGAQHRQDDARSCTRRTWPLNLSVWWYSGAMYPSVPATFPR

SEQ ID NO: 131631 - protein, 1230 aa, Oryza sativa
  unsure (1)..(1230): unsure at all Xaa locations
  Clone ID: PAT_MRT4530_3367C.1.pep
MEANDWLHAIEKKLNLLQCNDQEKVAFATHQLQGPASAWWDNHMATRPPGTEVTWAEFCRSFRKAQVPDGVVAQKKRKFRALHQGNRTVTEYLHEFNRLARYASEDVRTDAEKQEKFMAGLDDELTNQLISGDYADFERLVDKAICQEDQRNKMDRKRKAAQFRSNQGNHQRPRFAPGQQGGPTTMIVRQYRPFNSSNFHQGASGSQNHHGGQPNRGAAPRPPVAPAQSGPSAQAKKETGTKPGSCFNCGELGHFADKCPKPRRAGPRFVQARVNHASAEEAQAEPKVVLGTFPVNSIPAIVLFDSGATHSFISKKFVGMHGLRKEELNTPMRVHTPGNSSTSVSFSPSVLIEIQRSPFLANLILPESKDLDVILGMDWLTKIKGVIDCANRTVTLTNEKGETVVYKSLVSPKQGVSLNQIEAEIPVVTKEKNPRKLEEIPIVCEYPEVFPEDLTTMPPKREIEFRIDLAPGTAPIYKRPYRMAANELAEVKKQVDEQLQKGYIRPSTSPWGAPVIFVEKKDKTKRMCVDYRALNEFVVVFIDDILIYSKSEEEHEQHLRLVLEKLKEHQLYAKFSKCDFWLTEVKLLGHVITAQGVAVDPSNVELVTKWTPLKTVSQIRSFLGLAXKDFQVYCDASRHGLGCVLMQEGRVVAYAXRQLRPHEGNYPTHDLELAAVVHALKIWRHYLIGNRCEVYTDHKSLKYIFTQPDLNLRQRRWLELIKDYDMSIHYHPGKANMVADTLSRKSYCTALCIEGMCEELRQEFEHLNVGIVEHGFVATLDARPTLVDQVRAAQELKDLILTEAHQTQYSIHPGSTKMYQDLKEKFWWVSMRREIAEFVALCDVCQRVKAEHQRLAGLLQPLQIPEWKWEEIGMDFITGLPRTSSGHDSIWVVVDRLTKVSHFIPVHTTYTGKRLVELYLSRIMCLHGVPKKIVTDRGSQFTSKFWQKLQEELGTRLNFSTAYHPQTDGQTKRVNQILEDMLRASALDFGGAWDKSLPYAEFSYNNSYQASLQMAPFKALYDRKCRTPLFWDQIGEHQLFGTEVLAEAEEKVRTIRERLRIAQSRQKSYADNRRRELTFEAGDYVYLRVTPLRRVHRFQTKGKLAPRFVGPYKILERRGEVAYQLELPSNMIGIHDVFHVSQLKKCLRVPKEQADSEHIDIQEDLTYVEKPVHILDTSKRRTRNKVTRFCRVQWSHHSEEEATWEREDELKAAHPHLFTSSSESRGRDSV

SEQ ID NO: 131632 - protein, 61 aa, Oryza sativa
  Clone ID: PAT_MRT4530_33680C.1.pep
TDKFHRLKLNFSHSTKPCGKTFGPRDRTLTKSKSGRFHPTYTKGTPKSKNKVSNPKQGNRF

SEQ ID NO: 131633 - protein, 374 aa, Oryza sativa
  Clone ID: PAT_MRT4530_33681C.1.pep
MMNLISFETPPLGRRSQDGGSSSSSITAATTTINKAKEAASHLDLSLGISLSPGGGGGDAGTKASSCCYGGGGDGGGCMGSGMLTAGVLGVGHGGSSHDNTTTSSGGVAAGVLGVGHGGSSHDNTTASSGGGGSWTAAFMPSPTGFMHPWSLAARQQKAAAEQERSGVARLPPATTTYMPRAAATVISLPAAVGWPPVHTSRRNLVATINNVLKPDTTAAVKPDRPTQATAMFAADETTAPPPRSAAAATEASRTLNMFAKVHMDGYKVGRKINLRAHRNYDSLRRVLTKMTHNFFCPADYSSTNKGEEDCAKSDEFIFLYEDFEGDRMLVGDVPWELFLASAKRLYIAKNPAPRNKEHAEIAKRKETEDAIDN

SEQ ID NO: 131634 - protein, 280 aa, Oryza sativa
  Clone ID: PAT_MRT4530_33682C.1.pep
MDLDGVLLRFAEKRFRDFTRGCDPVGKSSLEVEGVYQFIVQGGPWLHREDALMVAKFDGITSPSQVPLELNPITMLDVVLSKYYADKECDRKLATGFQPFQFSAELRCSPLKPFERKINKVKPMQSTGVVCKLIFKGVGSASSTSSCQDKGEQWDEAIPRRVDAQDGFESREKEEDEKIDQQLAEQACNLQVSVKKVARQQDSSSEGGRGGTEAAQLPSEEMIPVIKNLHQQASFGDGSTKESNSQLKRRSPDQGAAKQMGRVQPAFLGYGQLTGDNKQL

SEQ ID NO: 131635 - protein, 341 aa, Oryza sativa
  unsure (1)..(341): unsure at all Xaa locations
  Clone ID: PAT_MRT4530_33683C.1.pep
GDKCKLVISSQSSVQREEQDSYLQGPGAFTEGEVYEEEDVIEVNLEEEEVKQAGQWSILEXYYSLKTPNQTALFDDMPRAWRLKSDISXKSLRDNLFIVTFIVEGVYQFIVQGGPWLHREDALMVAKFDGITSPSQVPLEVVPIXVRIYDLPLVLMTKERGILYGSKLGQVKEVDVEDDGRNKHDFFSRLXVDLPVKRPLKTKLAIKINVQGNEVVRHFDLRYERVPHFCFICGLIGHSDKECDRKLATGFQPFQFSAELRCSPLKPFERKINKVKPMQSTGVVCKLIFKGVGSASSTSSCQDKGEQWDEAIPRRVDAQDGFESREKEEDEKIDQQLAEQA

SEQ ID NO: 131636 - protein, 112 aa, Oryza sativa
  unsure (1)..(112): unsure at all Xaa locations
  Clone ID: PAT_MRT4530_33684C.1.pep
PYNEFVRQQYDITSTPIIQSXAFQLRNNQVWLQLALVAQQSHYQDINIVQAIAQQLQLQQFGVLYFDRNLARAQAMLAFYLPSTCRIYTGYSGGPRAILEALPPLAVVCTEF

SEQ ID NO: 131637 - protein, 86 aa, Oryza sativa
  Clone ID: PAT_MRT4530_33685C.1.pep
GPGHAVPGRPPGRRGRLGQPQQEGSRWRPRPSRSHDASVPRGRHGRRHERAGCSCWLSSSVLAPISTRTNKLGFRVVVRVSSHSMA

SEQ ID NO: 131638 - protein, 48 aa, Oryza sativa
  Clone ID: PAT_MRT4530_33686C.1.pep
QQMVLASHVCHERITGKLILLHIIWSLYCKRLILYTLPSDAALMLEGE

SEQ ID NO: 131639 - protein, 46 aa, Oryza sativa
  Clone ID: PAT_MRT4530_33687C.1.pep
KDVIPGLAIHFPGWESVYMEPQKAAFVGVVPTTLAQTILQPKRWMF

SEQ ID NO: 131640 - protein, 89 aa, Oryza sativa
  Clone ID: PAT_MRT4530_33688C.1.pep
MTKEVDEATAVAQGTCAGSRCCSSAPVGWGSAIGDVTLSHNIVMHHSSSSRRHRSFLLPTMFIADQARQKPRILRRVTISGSSLVGYCP

SEQ ID NO: 131641 - protein, 27 aa, Oryza sativa
  Clone ID: PAT_MRT4530_33689C.1.pep
TDYFLLRKTETFRIYIIHFLVPYYIYT

SEQ ID NO: 131642 - protein, 85 aa, Oryza sativa
  Clone ID: PAT_MRT4530_3368C.1.pep
MGWATITLNAFALASLEVLQLLRVMGKSPAWPLSMTSDIDACGCRLLLEGENQVKFWMGVGSGIVVASILGGYGLKVLLFPRSLI

SEQ ID NO: 131643 - protein, 61 aa, Oryza sativa
  unsure (1)..(61): unsure at all Xaa locations
  Clone ID: PAT_MRT4530_33690C.1.pep
GGRSITRWLRALLQEFSTSSAPLFMDAPHSCXRTDAXDDHCFDEEAIPCDKNDDNYIDYDH

SEQ ID NO: 131644 - protein, 61 aa, Oryza sativa
  Clone ID: PAT_MRT4530_33691C.1.pep
HVYLHSVVCKPRQIGVLGVTSTVCIFLCYQCSRFWAYVFNNFNAVHVDQYVSCPQYQSLIR

SEQ ID NO: 131645 - protein, 42 aa, Oryza sativa
  Clone ID: PAT_MRT4530_33692C.1.pep
PLSPQGYECLGYKIPYVLGTNKYSWPGLISPNFPLNQGPFKV

SEQ ID NO: 131646 - protein, 79 aa, Oryza sativa
  Clone ID: PAT_MRT4530_33693C.1.pep
MAPIMYDGRAESTELMSASRPSEDRRERTKDSFKNHKLLLLCRQDDETVVGILQDGALERMVKRVAQVSVVRSLEQQAL

SEQ ID NO: 131647 - protein, 57 aa, Oryza sativa
  Clone ID: PAT_MRT4530_33694C.1.pep
MREGYTVTACQDAFIIFIYPCVSELKKGARERLLALPNASRQKLLLDHGDKLLQDHD

SEQ ID NO: 131648 - protein, 115 aa, Oryza sativa
  Clone ID: PAT_MRT4530_33695C.1.pep
GYWIFQHGNKGITGLFLRPAAPGKKTTGQLQPGRYRSLEYTQRHFAQTDVLPNGLLLTTGVLDLVTGYFAASLWPDCLKYATGCHGNATGYSRERFTTARLRVEWTSTLDRRNYY

SEQ ID NO: 131649 - protein, 418 aa, Oryza sativa
  Clone ID: PAT_MRT4530_33696C.1.pep
MGVMPPRTRHGHRTPTPDPVSETEESSGEDYAQSDEEVEANIEGASEVASGDDVSGSGEDEDEGNDDMHIDPFIQFVVNMRNPSQYTILRHHDQFLRPRDTLDPRFHTAFQKTVYEQVYAGKAFAKHKWISWRDINETPEFESLQDLFKTVGIDRIVTLKQDYNEYLIRQFYATVWVAGDYSCRLEDYPSVVNRIVRATILPRLGNNDDIRGVAWHVIDAIIQGRQFDIVSLMMQEIAISKGTFTQGIYYAPYIMRLIQDKLGAAGQNLKKHKQYKPRLQLGAPRAPRTVPSSHPGASSSSAPPPPPEYDPNAFFHPQFAYFGTQPNEYFNPVLGAINTLSESIQRLSTGQEALHEDVCGLRTDVGDLNASMGRLHTRVGALDSRVQMLESTQAFLYHRLPDAPHPSSSARPPSPPQE

SEQ ID NO: 131650 - protein, 457 aa, Oryza sativa
  unsure (1)..(457): unsure at all Xaa locations
  Clone ID: PAT_MRT4530_33697C.1.pep
MAKAGKPRRYSESKGILSEGISGELQRLRHDEFGIKEAQQAAPVMPPRTRHGLHAPTPDPVSEPEESSGEDYAQXDEEVEENVEGASEEESGDDVSGSGEDEDEEXFLRPRDTPDPRFHTALQKTVYEQVYAGKAFAEHKWISWRDINETPEFESLHDLFKIVGIDWIVTLKQDYNEDLIRQFYVTVWVARDYSEMKWMSDTLQCSISRRQFRRLLNIHLDFRDDLHEEHTHNPLSIDYLSQFYEDGVRYTHEKVDGLRTIPSVVNRIVRATILPRLGNNDDIRGVAWHVIDAIIQGRQFDIVSLMMQEIAISKRTFTQGIYYAPYIMRLIQDKLGAAGQNLKKNKQYKPRLQLGAPRAPRTLPSSHPGASSSSAPPPPHGYDPNAFFHPQYAYFGMQPNEYFNPVLGAINTLSESIQRLSTGHEALHEDVRGLRTNVGDLNASVGRLHTRVGVLDS

SEQ ID NO: 131651 - protein, 377 aa, Oryza sativa
  Clone ID: PAT_MRT4530_33698C.1.pep
VYAGKAFAEHKWISWRDINETTELEGLQDLFKTVGIDWIVTLKQDYNEDLIRQFYATVWVAGDYSEMKWMSDTLQCSISRRQFRRLLNIRLDFGDDLYEEHTHNPLSLDYLSQFYEDGVRYTHGKVAGLRTIPSVGRQFDIVSLMMQEIAISKGTFTQGIYYAPYITRLIQDKLGAVGQNLKKHKQYKPRLQLGALHAPRAAPSSHPGASSSSAPPPPPGYDPNTFFHPQYAYFRMQPNEYFNPVLGAINTLSESIQRLSTGYEALHEDVRGLRTDVGDLNASMGRLHTRVGAVRPASQQQSDRRHMRHQTGPLEAGMVLLGMVDTEPTEPYSVRPSRGRSDRAEAGGAKAGGAAPGGLATAPRAAAGGWAAPGGRG

SEQ ID NO: 131652 - protein, 304 aa, Oryza sativa
  Clone ID: PAT_MRT4530_33699C.1.pep
MPPRTRHGRRAPTPDPVSEESSGDEYAQSDEEVEANVEGASEGESGDDDSGSGEDEDEGSDEMNIDPSIQFVVNMRNPAQYTILRHHDQFLRPRDIPDPQFHTAFQKTVYEQVYAGKAFAEHKWISWRDINETPEFESLYDLFKTVGIDRIVTLKQHYNEDLIRQFYATCSISRRQFRRLLNIRLDFGDDLHEEHTYNPLSIDYLSQFYEDGVRYTHGKVAGLRTIPSVVNSIVRATILPRLGNNDDIRGVAWHVIDAIIQGRQFDIVSLMMQDIAITKGTFTQGIYYAPYIMRLIQDKLGAAG

SEQ ID NO: 131653 - protein, 1416 aa, Oryza sativa
  Clone ID: PAT_MRT4530_3369C.1.pep
MVYTRNGSRATGEGSNGEERTDGAHPHSDSGNGPPPLPENPTLAQVMAHQTQMMAAMMQQMQQQHQQMHQRMLQHAEQQHQQFGPPPPQSKLPEFLRVRPPTFSSTTNPMEANDWLHAIEKKLNLLQCNDQEKVAFATHQLQGPALAWWDNHMATRPPGTEVTWAEFCRSFRKAQVPDGVVAQKKREFRALHQGNRTVTEYLHKFNRLARYAPEDVRTDAEKQEKFMAGLDDELTNQLISGDYADFERLVDKAIRQEDQRNKMDRKRKAAQFRAPQGSHQRPRFTPGQQGGPTTMIVRQHRPFNPSNFPQGASGSQNHHGGQSNRGAAPRPPMAPAQSGPPAQAKKETGAKPGSCFNCGELGHFADKCPKPRRAGPRFIQARVNHASAEEAQAAPEVVLGTFLVNSIPSTVLFDSGAMHSFISKKFVGMHGLIREELSTPMRVHTPGNSSTSVQFSPSITIEIQRSPFLANLILLESKDLDVILGMDWLTKFKGVIDCVNRTVTLTNEKGETVVYKSPDSPKQGVSLNQIETEIPVDTVEKNLRKLEDIPIVCEYPEVFPEDLTTMPPKREIEFRIDLAPGTAPIYKRPYRMAANELAEVKKQVDEQLQKGYIRPSTSPWGAPVIFVEKKDKTKRMCVDYRALNEVTIKNKYPLPRIDDLFDQLKGAKVFSKIDLRSGYHQLRIREEDIPKTAFTTWYGLYECTVMSFGLTNAPAFFMNLMNKVFMEFLDKFVVVFIDDILIYSKSEEEHEQHLRLVLEKLKEHQLYAKFSKCDFWLTEVKFLGHVITTQGVAVDPSNVESVTKWTPPKTVSQIRSFLGLAGYYRRFIENFSRIARPMTQLLKKDEKFKWTAECDKSFEELKKKLVSAPVLILPDQMKDFQVYCDASRHGLGYVLMQEGRVVAYALRQLRPHEGNYPTHDLELAAVARPTLVDQVRAAQVNDSEIAELKKNMRVGKARDFHEDEHGTIWLGERLCVPDDKELKDLILTEAHQTQYSIHPGSTKMYQDLKEKFWWVSMRREIAEFVALCDVCQRVKAEHQRPAGLLQPLQIPEWKWEEIGMDFITGLPRTSSGHDSIWVVVDRLTKVAHFILVHTTYTGKRLAELYLSRIMCLHGVPKKIVSDRGSQFTSKFWQKLQEELGTRLNFSTAYHPQTDGQTERVNQILEDMLRACALDFGGAWDKSLPYAEFSYNNSYQASLQKAPFEALYGRKCRTPLFWDQTGERQLFGTEVLAEAEEKVRIIRERLRIAQSRQKSYADNRRRELTFEAGDYVYLRVTPLRGVHRFQMKGKLAPRFVGPYKILERRGEVAYQLELPSNMIGIHDVFHVSQLKKCLRVPEEQADSEHIDIQEDLTYVEKPVRILDTSERRTRNKVTRFCRVQWSHHSEEEATWEREDELKAAHPHLFTSSSESRGRYSV

SEQ ID NO: 131654 - protein, 77 aa, Oryza sativa
  Clone ID: PAT_MRT4530_336C.1.pep
GVVQQGCLGLSELRCCWLRALASQTSQAKATLIMENMHLHILPTMNPDGFALRRRGNANNVGLNGDFPGQSYKFQES

SEQ ID NO: 131655 - protein, 161 aa, Oryza sativa
  Clone ID: PAT_MRT4530_33700C.1.pep
SFPRPSEVAVRGIATYWFEDQRTCRIISRTPMEVAVREIATYWFGDQRTSRIISRTPMEVAVREIATYWFENQRATSRIISRTPMKVAVREIATHWFENQRASRIISRTPMEEIATYWFENQRASRIISRTPMEACGAGDCYVLVREPASCFHIGHGMWWL

SEQ ID NO: 131656 - protein, 170 aa, Oryza sativa
  Clone ID: PAT_MRT4530_33701C.1.pep
MPFDEVCFLRHSEGSHSTAQSATGARRGAAARPATGPRRRLRGALAGAAAAWRWPCGVGERGRRGDEARCGGAVPRLGGGRAPQLNAMPEPRIEHYGCVADMLSRAGRLDEAEELIALLAACRAHGDVERAERMRRSEIDKVPGCSLIEIDGVVHEFKAIPANSIRQQDS

SEQ ID NO: 131657 - protein, 95 aa, Oryza sativa
  Clone ID: PAT_MRT4530_33702C.1.pep
YQERFTVVFTTVDAASTRRLRRLRRLRLLDAYADTDAAFARRLQRWLCHLQIWSAASNTMQTPFLNTCDELHIFPSELGPLALISMIQECQMRQT

SEQ ID NO: 131658 - protein, 220 aa, Oryza sativa
  Clone ID: PAT_MRT4530_33703C.1.pep
METGVFVVSAVVGLFAVASAVLGFIAEEKKLTPEDIDVSSGECEYPANAAFVLGICAVLLLAVAQIIVSSVAGCCGCCRPRAGASESRRVTGIVCSVFSWIAAIVAGVSFVQGAAWNAPVTRDTAPLCYYLKDGVFRRAAVLSLAAAVFGIKSYIMLRVAAAVEPKPDGQQPQPQQAPAAPVVTGYPPQGYAPNQQFTAAADQVYGPSALYPPTKGYGQV

SEQ ID NO: 131659 - protein, 53 aa, Oryza sativa
  Clone ID: PAT_MRT4530_33704C.1.pep
MAWRKSVQMAVESSPWRLMAWGVTTATLLQRHSKQCVATHMGHRDSPPTLTMS

SEQ ID NO: 131660 - protein, 50 aa, Oryza sativa
  Clone ID: PAT_MRT4530_33705C.1.pep
MDGNGAGRTGLGWNAPDPDPQLHSCPDHGCGSKTTLVPDPSGAPQPDQSP

SEQ ID NO: 131661 - protein, 109 aa, Oryza sativa
  Clone ID: PAT_MRT4530_33706C.1.pep
MAQGDNGKKAMPQAENKEIAAKDAQDIRRQADEFNSWLDRMEAMDSQELKQYKEQNKDMFNSQKKAAINKIQQKEKKKRKRTVLSPILGAVMKFHRDNDVDPSASGPAA

SEQ ID NO: 131662 - protein, 167 aa, Oryza sativa
  Clone ID: PAT_MRT4530_33707C.1.pep
LISSGGVVTTAKATPADLALPGRRSRRALLRRRRGGAGQQRRRLADDDDVPAPGRVVVVVVRGELDAGAALQRREEGGGEAPGSSAQRAARSFGPGGRGRLRGCRRRTRTAARRWRRASAYRSILVEWSGVLLSERSGSPLLEAWPERSVGFCPCYRSGRIAVDVNQ

SEQ ID NO: 131663 - protein, 77 aa, Oryza sativa
  Clone ID: PAT_MRT4530_33708C.1.pep
SLTSDLETISIVLNNIHSGEQMAPHEILTGNRHSSADNHIESRDNSQENKNDRKKSSPCVFPFREREMGTQRWRTRG

SEQ ID NO: 131664 - protein, 494 aa, Oryza sativa
  Clone ID: PAT_MRT4530_33709C.1.pep
MRKAAAAAVAAAAAVGVALLVRRQLREAKRWGRADAVLRELEERCAAPPGRLRQVADAMAVEMHAGLASEGGSKLKMIISYVDALPSGEEKGVFYALDLGGTNFRVLRVQLGGKEGRVIKQEHDEISIPPHLMTGGSNELFDFIASSLAKFVASEGEDFHLAEGRQRELGFTFSFPVKQTSIASGTLINWTKGFSIDETVGEDVVTELTKALERQGLDMKVTALINDTIGTLAGGRYDDNDVIAAVILGTGTNAAYVERANAIPKWHDLLPKSGDMVINMEWGNFRSSHLPLTEFDQALDAESLNPGEQVYEKLISGMYLGEIVRRVLLKMAEEASLFGDEVPPKLKIPFIIRTPYMSMMHCDRSPDLRTVGAKLKDILGVQNTSLKTRRLVVDVCDIVAKRAAHLAAAGIHGILKKLGRDVPNTDKQRTVIAVDGGLYEHYTIFAECVESTLRDMLGEDVSSTIVIKLAKDGSGIGAALLAAAHSQYREAEEL

SEQ ID NO: 131665 - protein, 1705 aa, Oryza sativa
  unsure (1)..(1705): unsure at all Xaa locations
  Clone ID: PAT_MRT4530_3370C.1.pep
MGCKMAGHPPNHRGEGMIDFVAELARMTLVVGYPNAPEYTTIPPLSGELPHRVRLEVHGYVGTCLANMAVEASGGTADHACQEAAYLMMARLRERDNYIFHDTAYRYHPRRANGDGVSSFCPTAGENDTTFGHMCAVMRGLDRMHSDLHKATKALNDGKLMRIVALKDEIARLKKENAQLKGLPAPGGVRIRTTPRKTTTAPVRIQLAPRNPPPAATPAAPPVPPAVPAAPAPAPESALSFAPASAARGPASGTGGCLFGMVYTRTGSRATGEGSNGEERANGVHPSSDSGNGPPPLPENPTLAQVMAHQTQMMAAMMQQMQQQHQQMHQRMMQHAEQQHQQFGPPPPQSKLPEFLRVRPPTFSSTTNPMEANDWLHAIEKKLNLLQCNDQEKVAFATHQLQGPASAWWDNHMATRPPGTEVTWVEFCRSFRKAQVPDGVMAQKKREFRALHQGNRTVTEYLHEFNRLARYAPEDVRTDAEKQEKFMAGLDDELTNQLISGDYADFEWLVDKAIRQEDQRNKMDRKRKAAQFRAPQGSHQRPRFTPGQQGGPTTMIVRQHRPFNSSNFHQGSSGSQNHHGGQPNRGAAPRPPMAPAQSGPPAQAKKETGAKPGSCFNCGELGHFADKCPKPRRAGPRFIQARVNHASAEEAQTAPEVVLGTFPVNSIPATVLFDSGATHSFISKKFVGMYGLRKEELSTPMRVHTPGNSSTSVSFSPSVLIEIQRLPFLANLILLESKYLDVILGMDWLTKFKGVIDCANRTVTLTNEKGETVVYKSLAPPKQGVSLNQIEMEVPVVTEEKNLKKLEDIPIVSEYPEVFPEDLTTIPPKREIEFRIDLAPGTAPIYKRPYRMAANELAEVKKQVDEQLQKGYIRPSTSPWGAPVIFVEKKDKTKRMCVDYRALNELRIREEDIPKTAFTTRYGLYECTVMSFGLTNAPAFFMNLMNKVFMEFLDKFVVVFIDDILIYSKSEEEHEQHLRLVLEKLKEHQLYAKFNKCDFWLTEVKFLGHVITAQGVAVDPSNVESVTKWTPPKTVSQIRSFLGLAGYYRRFIENFSRIARPMTQLLKKDEKFKWTAECDKSFEELKKKLVSAPVLILPDPTKDFQVYCDASRHGLGCVLMQEGRVVAYASRQLRPHEGNYPTHDLELAAVVHALKIWRHYLIGNRCEIYTDHKSLKYIFTQPDLNLRQRRWLELIKDYDMSIHYHPGKANVVADALSRKSYCTALCIEGMCEELRQEFGHLNVGIVEHRFVAALEARPTLVDQVRAAQVNDPEIAELKKNMRVGKARDFLEDEHGTIWMVERLCVPDDKELKDLILTEAHQTQYSIHPGSTKMYQDLKEKFWWVSMRREIAEFVALCDVCQRVKAEHQRPAGXHFIPVHTTYXGKRLAELYLARIMCLHGVPKKIVSDRGSQFTSKFWQKLQEELGTRLNFSTAYHPQTDGQTERVNLILEDMLRACALDFGGAWDKSLPYAEFSYNNSYQASLQMAPFEALYGRKLYTAICALFWDQTGERQLFGTEVLAEVEEKVRIIRERLRIAQSRQKSYADNRRRELTFEEGDYVYLRVTPLRGVHHFQTKGKLAPRFVGPYKILERRGEVAYQLELPSNMIGIHDVFHVSQLKKCLRVPEEQVDSEHIDIQEDLTYVEKPVRILDTSERRTRNKVTRFCRVQWNHHSEEEATWEREDELKAAHPHLFTSSSESRGRDSV

SEQ ID NO: 131666 - protein, 55 aa, Oryza sativa
  Clone ID: PAT_MRT4530_33710C.1.pep
PALKTAQIWWFGPLRGRPFSTNIRRNLQLFATYLPYTFTLPGTTTAPPVTVVWFG

SEQ ID NO: 131667 - protein, 35 aa, Oryza sativa
  Clone ID: PAT_MRT4530_33711C.1.pep
FDENWQTVIISQRVYACEGLFFDENWPDVKLLGNA

SEQ ID NO: 131668 - protein, 54 aa, Oryza sativa
  unsure (1)..(54): unsure at all Xaa locations
  Clone ID: PAT_MRT4530_33712C.1.pep
ELTSREFFFAMYVVLFFPLWGDIGYVSVVDVPVQIYANQSKWIIQQKKKKXKKK

SEQ ID NO: 131669 - protein, 58 aa, Oryza sativa
  Clone ID: PAT_MRT4530_33713C.1.pep
MAMAALATGLHRDAKPLLHFTPDDLEVVPFYMENFLALLAPGLIILFPDLKDILPSSW

SEQ ID NO: 131670 - protein, 118 aa, Oryza sativa
  unsure (1)..(118): unsure at all Xaa locations
  Clone ID: PAT_MRT4530_33714C.1.pep
VVIIIHGVSIAYIKLHDLCLILTENGCWFVQAQNSYNVFRIIYIHEQIINMHRRKKKGRKKMDTAKRSSESGVVVNTGLSLSTTDATAGGAREGALALALPVELPLLRRGXVSPTMAM

SEQ ID NO: 131671 - protein, 93 aa, Oryza sativa
  Clone ID: PAT_MRT4530_33715C.1.pep
MVAIDTKRTKQSIKGEKREQRFRVRGDAHNHGDLLTLGPKAPDNRASNRPHRVSDLGAPAGVFWERMVNRGKAGSKEGGTGVTFRKPRKKRGS

SEQ ID NO: 131672 - protein, 471 aa, Oryza sativa
  Clone ID: PAT_MRT4530_33716C.1.pep
MPPLHRRLVLCFLILAAAAAATTAASISTPAELAVASHPLSPLRLPPAAPFAGGGEGGGGGGGPFCTRVHIRGRPSRLRDPSRFFHALRVRANATRPSGLELCFHRNATVGPCKCAASQCHKMAKSGLWVQAISPYDTRVLDFRMPSDPSRSIIVSTEEEFLLHRVVFLLLGMVLMAVAHTLSESVVFYYGGAMTIGIFLVILIILFQGMKLLPTGRKSSLAIFVYSSLVGMTTYFLHYLSGLLRSVLVEIGIAEDMHNPLGVFLLVSVILAGAWFGYWGVRKLVLTEEGSVDAGVAYFVEWAILIISAVMILQSSLDYLFAFSALLFCTAIKAVSRIEGKSRVLRCLSRAFSNIVPTGYEGFGEEYSSMNGSHQDGFSKLHGSRKTLSQDLATDSYYSTFHTNPERKKFSEEEYAAFTREETHKAMKQLVSSPDFNRWALANVDRISVTPPQRTPQNSMSQQRKRLFGLF

SEQ ID NO: 131673 - protein, 33 aa, Oryza sativa
  Clone ID: PAT_MRT4530_33717C.1.pep
MACGNASTENSGKSDSGSCRAQIFGYVKELPTE

SEQ ID NO: 131674 - protein, 114 aa, Oryza sativa
  Clone ID: PAT_MRT4530_33718C.1.pep
MVSPPELVPYLTGDGTEKRGWVRMAVDALAAVLSADGVNEDTKEGLIDALIAGDLGPIMNTLIAAVPRSGMGPQGRRQSAAWRQPCRCEAAQLARRWSGQAPSRRSREFTVGDD
